United States Patent Application Publication US 2007/0192889 A1 - sequence listing, part 11

SEQ ID NO: 22170 - DNA, 983 bp, Oryza sativa
  Clone ID: TF_OsC99563_1
atggcgtatgagaactatgcaaatacaactgttagtgtgaatttgaatctgcagtacagatttcacaatctggctgagtttgacgatgggaaaaaaagttgccggaaacggctggatggtcataacaggcgtcgaagaaagccacagcatgatgcattgaaccctaggagtttccttccgtatcatcaagcgaatcagttttcagtctacccgcaaacatttccgatagctgatcagaacgccgacgccttaatgcgtccgcttgatcgtcaccctcccttctccatctcattctcagggaccttccgggaaccgaagcagttcccctttatgcaagatggcgggagcggcctcggcgcagcgcgccacgatctcctgcggcccttctcttccccagaagatggagccaacattaccacaacccgcagcgcatgcaacggcgtcccccacgggctggacccggagtgtgctctctctcttctgtcatcgtcgctgcatccctcccccgctgccggcatctccagcgcaacagctccaccgcagttcgccccctcttctttcagcagaatcgccgcctcgtcgcaagccgtaaccaccgcattcgcatcagatggaggatcagttgccggtgaccatgtcttggttcctgctgtcacatatgaagatccttcccaagcaatgccattctcttggcaggtgtagagcagaggctgtgattttgctgttcggttcgtcaatgaaaggttgatgatggtgctccggccgctcatggtgttgtagaaccgcatgtggacgttgacggcgaggaggaagatggcgatgagcgcgaagtagatgatggagtggacgaggatggagaggccgctggtctggaagttgccgaactccacgatcctccccttccccgggatctggaacagcagccccggcgacagcaggatgaacagcaccagccctatgaacaccggcccccaatccgccat

SEQ ID NO: 22171 - DNA, 4384 bp, Oryza sativa
  Clone ID: TF_OsC1735_1
ggaaatcaaccagaattatcctgaattaaaaaaacagaaactggattcatcagggggaataaacaaacagtgaaaaggggacaggggtttactaatttagggtttattttatgcgtcgtgatgatggtccacgattttttttttttgaggataaacctgtaatctgcctcatttgtatttagctacatgggtactgtcaacggtaccttccaaattacccctgctactatgtaaagatgacaaaagacagtttcatgctaaagcaccgtatagatacacaaaaatgtcaaaaaaaaaaagaggtaaagacatatcgatgtaattaaacaccatcttgtgatacattaagcagcagattcacaattgcaccagcaaaaaagaaatcaaggttacttactcattttagcccagaactaatagcgtccccatctcaccttgtgagggcacacttgatacattccttgtcacagaaactacttgccaactctgcgcagattcatccaatattttgtcagggtttctctgctcccccaaatgctctgcccccatccatccacacttcttttctgggaggggttcatccttacaattatatactctcccgttcttatcaaagttccaaggaaattcaaacagtcaaaagttgtctggtttcaaaccttctggctgttgcaaggtatttccttgataacaccacaaaacgattacaatacagcaccctctgcagattatatcgtaccaaaatccagcctctcccatttgaaggatctaccagaattaaaccgcagcaaagctcgcatgaatacacaaacacaaacacagactgctgctatcgcaagcatggaatggatataggggcgagcgagcaatccccgtgaatgcataggacgtcttagcaagccagcatccaaaatagcgcactggttgcaagatcttatttgcaatgcttgaattgcagatttatttttctcaccaacattccctgattgatccatatgaatttcctctttgccaaccattatagtaacttggttgttcttcctgtccaccaatttctgtgctacaagctcattgtacgcattgttgttcctcaacttggcataagtttcaggggactgaccatcatcatctagcgctgagtgccaacagctcaaaccaatctgttgaggatcatctgtcaaagcatcaacaatatccactgcatcctcaatggatgcagccaggtgcaatggagtcaaaccacctgggccagctacatttggaaggaaggggtacaatttggaatcatcagggcacacgacaacaaactgtacaagcaagcgcgccatgtggctacttttccttttcactgccctgttcaggagatggatctctgagagcatttccagagtttcctgtgatagttcatcactggccaaactcctcttggcaaggatttccagaagagttttagtaagagagcaccagtcccgctcacttgaaaacagcagaaggtatctgaagcgtgcagttgagaagtacatcaaatccaaaccagaagaatcagatttttcagcagatgtactggcagctgccttctggaagagccatccaagttcgtttagaaagtgcaaaacttcatcctttggctttagccgcctagcatcatgagcctgatcatctgaagagccgtcaacaaactgtgaaccctcaagctcagcttcaaggcttctcaactcctgacaaacacttgaattggcaatgataacaggaaagctgttccctctgaacctattctcgacctcaatgaagtaacgtccaagaataagatgtggttctccaggtaagtcaaaagtctcaacacctgaatcgtcatatattgttcctggatatgcagagcacagtacttcttttgatatgtacttccccgtactggtacagtggatttgggtgccaggaattgtcagattacggcccttaagaatgagggaggtctttctcccaccaacaacagcaattggtgagacaaaggtcaactctggggtattccatgttctccatgattttgataagcgggttgctccatctttgtatgacaccaactgggcatcagttcgaactaaaaaccttccttttctccagaagtccaaatcggaaccttggactaatgtgtttactcgctggagaagattttcttcaagttcatcccatgcaatagcaggcattgaaagatacattgatagtacaaggcaacctggccgaatgtatccctccatttcgttggggctgtgtttgagccaatttacaatctctccacgaaggttcccagggattgtgcttggctccttgccaaatagtttaaatatgattctaccagtacggtcctgtccatctgaatttgaagttgatggcgaatgatctgaacaagaggttgaggtataacaggattgatatgcaggatttggtggtgaaccattttcaattggccgttctgaatccttaaacagctcaagtggtggtgcacgccaagcccgacttgtgctaacctcaactgtcgcaatatcttccccgtagtctgcaatacgagcatcttcgtctaccgaacggatggggaaaaacttatgtgttacaggcggagatgatgatggagatctctcatccagaggattgctactctcggaagataagtacttatttgcagtgtccatcttacaaggaacatcctcctcggtgctaccaaagagccgtagtgacaagtatggcggggtttcttggtctggttgcttgtacatttcaggtgaccgttcaagagcatcattcttgcgagtggcagaaaatacccggatagatttctcgtgggaatttacaacattagctggctctgttgactgactcttgctcttgttattaccactgctgtcactgctcccttgggactgagacgtattgctatcagggtttgatgtcgcgagggcagttgataaaactgctagcaagtccatggttgatggcacagcttgcttgtcgaatccgtcagcttgcttgtcaaatccattcgtttgtttgtccaatccattggtttgcttctcgaatccattagttgtcctttgaacagaatcttgttgttggctatgtgacgcattcaaatcaacagcttctgatggaggagactttgaagcagagttcccgttatttatagagtttattttacttataatctggaccagattgtctttatctggtatcggagggatgctgggcagtttaccaacattactgccttgcaagcgtgcaataaccgtgatcagatttacaatatcctgtgtcctatttgctgcattttcctggtttccaggtagcagcagctgcgaagcaacatctgttggctgggtttttcttcgccgcctgttgtgaccggcgagcctacgtctgcagctcctcttaccctcatcaaactcagagagcgggtgaaatctactgcactgctgacagaagcgctgcatctggttgccaaccagcgccttcgtggtcttgccgtggatctcgcagactttgtgtctccggtgataatccttggcgttggtcagatccgccctgcagtcatccacctggcacatcgggtagcttccgccaccaccgcctgagtttccaccgcctccgcctccacctcctcctccactggcacttccaggcgatccagaccgaaccctcttgctcggcctaacaactggctcctgcgccggcgccgacgacgcaggcggagaaggcgaagaagacacggtagtagccgccgggctcacatccatcggcgtcgccgcgtcctcccgcaggccgagctgaaggttcagcccaccgctacccccgccgccctgccgcagcgcctcagcagccttagccgccgccggcggcgactgttgctgctgctgctggtggtggctcagcccccgcgttgacgcgcagcgcatcggaggacggcttggcggtgagggcgcggctatcccagtcccacatcctggggttccagttccctcctcccttagcctccgccgccgccaccgcggcggccggccacgggttcccgcgcttcttcgccgccgtggcatggggaggcagcggctggatctggtgtaggaacatcggaggggccacctgcggccccacttccctctgcatctctcaacaccgccgccgccgccgccactcgccgccggccaaaacccgatccacccctctccggatcttttcacgcacggcacctcacgcagcctctcttcaactcctcttcacgtcaacctcatcggaatcgagaaatggaagaatcggcggcgagaagtggatgaaggaagcaaccaaccaaccagggggatcgcgcggtcggcgtgagctggggaagagagaaggggag

SEQ ID NO: 22172 - DNA, 1255 bp, Oryza sativa
  Clone ID: TF_OsC53012_1
atggccgcgctcgccgccgcggcggccgcgggggacggcggggcggcgctgccgctcctcctcctccgccttccactccccctccccctcctctcctcggcctcgggctagccctgcctctctcctccccactccagccaccgcttccacctcccctcccctaggaggcacacaccacacactagcactagctcgtcgtcgatcgcgcgcgccaccggccatgggccgcggcggcggttcctcctcgtccgctgctgttgctgctggcgcgtcttctagctcctcctcctcctcggtggccgcggcggcgaggaggggcgcgggccgtgccggcggtggcgccccgtcgggcggcggcggcgggccgaggtgccaggtggagaggtgcggcgtcgacctcagcgaggctgggcggtacaaccggaggcacaaggtgtgccagacgcactccaaggagcccgtcgtcctcgtcgctggcctccgtcagcgcttctgccagcaatgcagccggttccatgagctgacggagttcgacgacgcgaagaggagctgccggcggcggctggccgggcacaacgagcggcgccggaagagcgcggcggacacggcgcacggcgagaactgccgccacgccgaccaggacgccggccggagccaccagggcaccgggaacccgccgttccagatcagataaacctacctaagcatgctccctctcttctgtcatgcagccatgctagtgtgagtgtgtgtgttcgtgccactactactactacatgtctacatcgatctatctacctatatatatccaccacctacgtcccttcttcctcaaatcaatcaaatctatctatctatctatttatctatccctgaatctatctctatccggtgtgctttgctgctgctgattaactggcagtgtgatcatctccctctactgctgctacatatatgcagtgctatgctggagaggcataaatgtgctatatatatgttctctgccacaaccctaagctaattgtaacctgttgattaagcaggtgttctagggattctctctctctctctctgtgtgagggtgtgtttgatgtgtaattgtactattgcctttgcccaacagaaacttgtaggctgcagtgtgcctatgtatgctgttgtgccgggatggcagtggtaatatatgctgtttgagtcaccgtttaaaaaaaaaaaaaaaaaaaactcgagactagttctctctctccgccggcat

SEQ ID NO: 22173 - DNA, 1377 bp, Oryza sativa; identical to SEQ ID NO: 12763
  Clone ID: TF_OsC324749_1

SEQ ID NO: 22174 - DNA, 1692 bp, Oryza sativa
  Clone ID: TF_OsC11432_3
gcagtggtgtggccaagcttgaatgctccagtgaggctgcttctctggctgccaagctgatggacgcgccgccatcgccagatcggctcgccggatcagtggagctccatgcttctccaggctgctgctgattgagagagagagagagagagagagagagagagagagagaaacagtttttttttttcaggaggaattcatcaggaatctgctgtgctccttttctctgggagagaagcaaagagcaggttggagcagcagcagctgggatctgtaactggcatgggttcttttgggatggactggaatcagaagagctcggtgttgtgggattgggagaatatgccgccgataggaaatagcgcgaacgagaatcccaagaatgtgatgctggctgaatcaaaacttgcaggtgttggggttgacataggccatgaatcaggccattcttctggtggtactttctcttctagctcagagattgggtatggttcatccaagagttccatatccgcgtcgatcgattctccgtccaaagtggggaacaccatagagctcaattttgcatctgcggaagagcatgataagaacatggacaagggtaagagtaaagttgatgacaccggaacttctcgatcaccggtggtagcagccaatcgtgtagagcccttgattggcctgaagcttggcaagagaacctattttgaagatgtctgtggagggcagaatgtcaagagttctccatctggtgtgagtgtggctaccccatctcctggtctggccaagaaggtgaaggtggctcagcagaacactcagaacccacactgtcaagttgaaggctgcaatgttgatctctcttctgctaaaccttaccatcgaaagcaccgagtctgtgaacctcacagcaagactcttaaagtcatcgttgcgggtcttgagcgacgcttttgccaacagtgtagtcggtttcacggtttagctgagttcgaccagaaaaaacgaagctgtcgcaggcgcctccatgatcacaatgcccgcagacggaagccacaaccagaagcaatttccttaagttcgtcgaggctctctacattactctatggtgatgcaaggcaacaggcaagttttctatttggtcaagctccttatggtcagatgggaagctgtgcaagttcttgggataacccagtaccaggaggcttcaaatttacagcaacaaaagctccttggtcaaggccaacaatagctgccggtgttgatgggacgcatgtatctaatcagcaggcatcgggcaatgtactgccacatggagcacatcatagttttgatggtctcatggcgttcaaagaaaccaacgcgaaggtccttaaccaaggcatggaagcttctgctgtcgcttccggctccgctagaggcccagactttgagcatgctctctctcttctgtcaatcgattcagtgggtgctgcaaaccttcagccaggttctcagattcaccctggtgtcaccgccattgccggcacctccaaccctgtcatgatgccatctccagcaatctggcaaggaggcttgtcccttgatcagcaggcgcagtttcaggctttcgaccgccttggcaacgacgacgacgaagatcatctccagctcccaaagccttcctatgacaactcccactatgatcagatgaactga

SEQ ID NO: 22175 - DNA, 951 bp, Oryza sativa
  Clone ID: TF_OsC148343_1
cacgagacgagaagactgattcattcgctcgcgtacacgcctaggcgctccgagaattcgtgagggaatcccgcatcgccggagccgatcggcggcgccgcgggcgggtgggggggggttagggttagggttttgggggtggcccaccggggatggacgcccccggcggcggcggcccacgcgtccgcggacgcgtgggcggcgagcccgtctgggactgggggaacctcctcgacttcgccgtccatgacgacgactcgctggtcctcccgtggggggacgattcgattgggatcgaggccgatcccgccgaggcggcgctgctcccccctgccccgtcgccgcagccggcggaggcggaggcggaggccgcggggccggcgtcgctgccgtcgtctatgcaggcggagggaagcaagcggcgcgtgaggaagcgcgacccgcggctggtttgcccgaactacctcgccgggagggtgccgtgcgcgtgccccgagattgacgagatggcggccgccttggaggtcgaggacgtggccacagagttgctggcaggggcgcggaagaagccgaagggtgccggccgtggtagtggtgcggcagtcggcggaagtggtggaggggctagccgtgggacaccggccgagatgaagtgccaggtgcctggttgtgaggcggacatacgtgagctgaagggataccaccgccggcacagggtgtgtttgcgctgcgcgcacgccgccgctgtcatgcttgatggtgtccagaagcgctattgccagcagtgtggcaagtaaggctccatttcctcattccaggctgctttatgaacttgtggaagatccattgggatcagtagcagtaggagggataattaagtgctttaacacttatacaatcattgttgctatatgatttggtgtttaatgcattataccttttctaaaacct

SEQ ID NO: 22176 - DNA, 2270 bp, Oryza sativa
  Clone ID: TF_OsC8701_1
tctgcgttttctttctttgcttttttttttcttttttttgttcctttttctttttttttttttttttggaacaaaacagatcatttcatgatcatgaacacttctcatccaatggcaaatatcctggtggtttggtttcaaaaatagaaataataaatcctggggttgcaggacaattcgcccccaaattattcagagtccatcactgacagggtaagatcatgaacggagtaaccagtcatcaacccgttccaaatagatgcagcagaatcagtgcagatggccatagccggagctgctgccattgccaggatgcatgaacgcctgagcctgcgaggcatgatcgagcggaggcgggtcgtcgccgtcttgccagaatcctcctcctccggtggacgggtgcagagcatgcatcacactgacagggttcgtcggggcggtgacggtggcggcggcaacggcgaggggcggcatcactccaccgggatgcacctgggagccggcctgaacgtcggccgggccccaggaatcgcttgacagaagagagagagcacgccgaagatccggggctccattcgagttggaggacacgacggcacaggctggatccacaccaaggcaggaagtccaaaaagcttgtaacagataattggtggatctagcctctctgtttttgtttttgtttttttgagaaacaatttgtggttctagcttgtccataaagcaagcttggttgaggaccttcggggtgtttcccttgaatggtatgagcccatcaaaatcatgatgatgcaccgtatgcgacacaacattgcctggcatctgcagggtagagaaattcagatcctcaaggcctatagttttcattggcttcatccaggggagttttgcttctgtaaatttgaagcctcccaggttgtcacatgaagaaattgcattgcttctcacttggccaaaaggagattggccaaagtaaatatctgtctgctgccttgcatcgtaaaacatcgtggcgagccttgatgaaccaaatgaaattgcctcttgttgcggtttccttcttcgtgcattatgatcagatagacgcctgcggcaacttttctttttctggtcaaattcagctaaaccatgaaaccgactacactgttggcaaaaacggcgctccagaccagaaacaataacctttggtgccttagaatgagcttcacaaactttgtgcttgcgatggtattctcttgcggaggacagatcgactttgcagccttcaacttggcagtatgagctttgtgtgctctgctgagacaccttcatcttcttgaccacagtagatggacaagtcacacctgaagctgcagaggagctcttgacattctgccctccacaaacattttcaaagtaagttctcttccctaacttgagtcctattaccggctcaccatggctaactgccacagctggagaagtgcccgagtcttcaactctaccggcctcgccatccttgcacatgttcttgccatgccctttgacagaagcaaacctgaactctaagctgttccccagcttggatgaggaatcgaacgacgctgacaaggagctcttcgatgaaccattggctagctccgagctagaagtgaacgtgccaccggatgaattggtggatccatgatttgcggccgcgacaactacacctcttggttcagggtgaggtatgctcttgggattttccattgtattcggaccgaaaggcgctggattttcccagtcccaaaacacagggctcttctgattccagttcatcccaaaagaagccatggctgaattaaggatctcaactgctgctgctcacacttgtatatattgcaaatctcaactttcctttctcccagaaaagaaacacagtggatccttcctctccctgcaaatcttgccctcaatcagcatgaccatgcatagcacaaccttgagcataaatcaaaccgatccgaggaggtgatgaataacaagtagcagcgttgaaagttgaaaccaattggctggcagaactaaagcaacagagactccattgttgttcttggctgagttctcacccacctcgacttgagagagatcctatcccacttgtttccccgacctaaaagacgacagcatcaaccccatcaaggctggcccccattcatcaccacaaccacccgctatttaaaccctttccaatctatcccccctgccgcttccccgcggcaatcagagctgcattatttgttccctcgtgc

SEQ ID NO: 22177 - DNA, 1075 bp, Oryza sativa
  Clone ID: TF_OsC152916_1
cctcctcctcctccgactccgatccacccccgggatcccgcccatggagtgcaaccccgtctcctccaccacctcctcctccctgctctgggactgggacgccaccgcctccgccgagccgccgccgccgcccgggaagcgcggcgggagggattcgtcgtcggcgtcggcgtcggcgaagcgtgggaggtcggcggcagcagcgggggatgcggcggcggtggcggcggaggcgccgcggtgccaggtggagggctgcgggctggagctgggaggctacaaggagtactaccgcaagcaccgcgtctgcgagccccacaccaagtgcctccgcgtcgtcgtcgccggccaggaccgccgcttctgccagcagtgcagcaggttccacgcgccttcggagtttgatcaggagaaacggagctgccggagacgactttctgatcataatgcccgtcgacggaaaccacagacagatgtgtttgcttttggctctggaacactaccgcgatcactgtttgatgataggcagcaaataagtttcgcatgggataataacgctccacttaaccatgcaaacaccacttcaagttcctcgtggacatctgacttacagctctcccaagtgatggacataagcaaaaggtcacgaaaagctggggcagacagtgcaaatatccgtttgtcaaatgctttgccaactctttgtcatgacacaaatgagctcttgccaataaaaggtgcagatgcatctgaaactgcttcaaaactagatggagcactagatgttcagcgtgctctctctcttctgtcagctagttcaaggggtttgactgaccccggacaccaaacatcttctatcatccaatttacgaattcgaaccaaaacagcacattgcccagtgtaccaagcgaaggaaactctaatgtacccttttgggttgatggacaacatcaagcagtagagcctcaggtgtttcagttcacaatggacaccggtaacactgtgtttccggatctagagcggatcaaaccttcctacgagtcttcaatgtttggtctgaaccagatacattga

SEQ ID NO: 22178 - DNA, 1543 bp, Oryza sativa
  Clone ID: TF_OsC1737_1
atttgctcggggagttcgatgaggagaagaggagctgcacgaagcggctcgacgggcacaacaagcggcgtcggaagccgcagcctgatcctctgaaccccggcaaccttttcgccaatcaccacggagcggcatgattcacctcgtacccgcagatcttctcgacggcacgcgggggcgcgggcgtctatttgttgcgcgggcgcgggagggggacggcgccgccgctactgctataaggagcgcgccgtgcaccgcctctcacaatgtcgaccgccgccgccgccgccgctgcccagagctggtgcttcgccactgtcaccccgcgctcccgcgccacagtcgtcgccagcctcgcctccccatcaccgtcctcctcctcctcctcctccaacagcagcaacctcccggcccccttccgcccccgcctcatccgcaacacccccgtcttcgccgcccccgtcgcccccgccgcgatggacgccgccgtcgaccgcctcaaggatgggttcgccaagttcaagaccgagttctatgacaagaagccggagctcttcgagccgctcaaggccggccaggcacccaagtacatggtgttctcgtgcgccgactctcgcgtgtgcccgtcggtgaccatgggcctggagcccggcgaggccttcaccgtccgcaacatcgccaacatggtcccagcttactgcaagatcaagcacgctggcgtcgggtcggccatcgagtacgccgtctgcgccctcaaggtcgaactcatcgtggtgattggccacagccgctgcggtggaatcaaggccctcctctcactcaaggatggagcaccagactccttccacttcgtcgaggactgggtcaggaccggtttccccgccaagaagaaggttcagaccgagcacgcctcgctgcctttcgatgaccaatgcgccatcttggagaaggaggccgtgaaccaatccctggagaacctcaagacctacccgttcgtcaaggaggggatcgccaacggcaccctcaagctcgtcggcggccactacgacttcgtctccggcaacttggacttatgggagccctaaatccgaccgtccgtccgttcagttcgtcagtttacgccaacgcttttgcataagtactacctgaggatatcgtccccgatcatcgatgtgaacgcgtggagtactactacgtacgtaccggatggttcgatatatgtgaatgctgtattaagtaataacaagaaatatatctcctctactttttcctgacgcggagttgtactgcctatgatgcataatttgatcgcagtgtgatcaaaagacatcagctataatgtcttaataatattattatgaagagtttacctttttactaccttttaaaaaaaaaaaaaaaaaaaagagaactaaaactagatgtagatcgcgagtccgtgcgccgactctcccccgtgcccgtcggcgaccatgggcctggagcccggcgaggccttcaccgtgcgtaacatgggcaacatggtcccagcttactgcaagat

SEQ ID NO: 22179 - DNA, 3175 bp, Oryza sativa
  Clone ID: TF_OsC113993_1
gcacgaggggtgcagcaggagaggagacgcgagcgacgacgacaaacaaagcagcgctcctgctcgctcgcatgccgtggctccccctccctgccgtcgctgtccatgtcctagtgaagtgtgaagccgccaatgaagacgatgtgaatatgctgtccattgcacaaggttgggcgagggcgggcggcggccagatcctgcctcccccaggatacttcggcccgcgttcccctccccccctcactcccacgggacacgcgccgccctacgcctcctcctcccttctccaactcccccaagactgcttgtgagagaagctactctaccctgctcggtttcttgattctctctctgcctgtcgtcggattgattgcaagatcaagataggctgcacagtggcgtgtgtgattaatcatgtgtgcctgatgcacttgtagctggggatgcaggtgaatctgaggccgttactgtaccaagaacaggaggatcactagaggggaagagattcttgacgaagcacacaaagggaggatcctaaattgatgtagcaggaatgtcgagtgggctcaagaagaagggcctggagtgggatttgaacgattggagatgggattcaaacctgttcttggccacaccatccaacgcttctccatccaagtgcagcaggagggaattgggccgagccgagggggagatcgattttggtgtggttgataagaggagaagagtctcaccagaggacgatgacggcgaggagtgcatcaatgcagcaaccacgaatggggacgatggccagatttctggtcagagaggaaggagcagtgaggacgagatgcctaggcaaggcacctgttctagtagcggtccgtgttgccaagtcgacggctgcacggtcaatctcagcagtgccagggattacaacaagaggcataagttttatggtaattatttgacatgccttgtcaggtttcactttcttcaagaatttgatgaaggaaagaagagctgtcgctcacggctagcacaacataacagaaggaggaggaaagtacaagtgcaggctggtgtagatgtgaattccttgcatgaaaatcattctttgagcaacacattactcctgttgttgaaacaactttctggcctagattctagtggtccatctgagcaaatcaatggtcctaactatttgaccaatcttgtgaagaatcttgctgctcttgctggtacacaaagaaatcaagatatgctaaagaatgcaaattctgctgcaatagcatcacatactggtaattatgttgcaaaaggcaatagtctacatgactcaagaccacatattcctgtaggcactgaatccactgcagaagaacctacagtggaaaggcgtgtgcaaaattttgatttaaatgatgcttatgtggaaggagatgagaatcgaacagataaaattgtgtttaaactcttcgggaaagagccaaatgattttccttctgatttacgtgctcagatcctcagctggttgtcgaattgcccaagtgatatagagagctatatcaggcctggctgtatcatcctaactatttacatgcgcctccctaattggatgtgggataagcttgctgccgacccagctcactggatacagaagctaattagcttgtccactgataccttgtggagaacaggatggatgtatgcaagggtgcaggactacctgacattgagttgcaacggtaatcttatgttagcgtctccctggcagcctgcaataggcaacaagcatcagatattgtttataacccctattgcagttgcttgttcttcaacagcaaacttctcagtgaaaggtctcaacatagctcaaccaaccacaaagttgaagatcttgatcaaagcagcctttcatttccctttgttgttgctgaagaagatgagccacatacgagctacatctgagactccaaaagattgtactgagggctttcctgctgcaagatttagatggttgctgtcctttgcagttgatcgggaattttgtgctgttataaagaagcttctggacaccttgtttcagggtggtgttgatctggatgtccaatcaacagttgaatttgtcctgaaacaagatttagtatttgtggctgtcaacaaacggtcgaagcctttaattgactttctgttgacatacacaacatcttctgctccaatggacggaactgaaagtgctgctccagctcagttcttgtttacacctgacatagctggtccatcagatattacacctcttcatattgcagccacatacagtgatactgctggtgttttagatgctttaactgatgatcctcagcagctgggaatcaaagcatggaagaatgctcgcgatgctactggattgactccggaggattacgctcggaagagaggccacgaatcctacatcgagatggtccagaacaagattgacagcaggttacccaaagctcatgtgtctgtcaccatatccagcaccacatccaccaccgacttcaccgaaaagcacgcgagccaatcgaagactacagatcaaaccgcatttgatgtggagaagggccaacagatcagcacaaagccaccactgagctgcaggcagtgtctcccagaactcgcttaccggcatcatttgaacaggtttctgtcaaccaggccagcagtactctccttggtcgccattgctgctgtctgtgtctgtgtagggttgatcatgcaggggccaccccacattggaggtatgagaggtcctttccgctggaattctttgcgttcaggccccaagtgatatggtagattgactgccaagcatctgcaaatacagttcagctgtatcatgcagcatggagatgttttgcttcgagtctgtatattcttgtaacatagatttatctttttacggaataactatatttgtttactactttactgtacaacatttagaattcgaaacttgcatatctagaaattccattggacaggcatcctgaccttgatagaatgcagtactatctgaatggttttaccgtgagcagagcagctgacagagtgacagtgcttccatgctctttaataatactccatccgtctcataatataacaaaaaaaaaactcaactagtctctcccctcgtgccgaattcctgcag

SEQ ID NO: 22180 - DNA, 543 bp, Oryza sativa
  Clone ID: TF_rsiceg_12459.y1.abd
ctgcaggaattcggcacgaggcctcttctctctccccctctcctggaggagagagaggagaagaggagggggggccgcgccaagagccacgcgcgctacagtctccttcccacccgcgaccgcgagcaatggagatggccagtggaggaggcgccgccgccgccgccggcggcggagtaggcggcagcggcggcggtggtggtggaggggacgagcaccgccagctgcacggtctcaagttcggcaagaagatctacttcgaggacgccgccgcggcagcaggcggcggcggcactggcagtggcagtggcagcgcgagcgccgcgccgccgtcctcgtcttccaaggcggcgggtggtggacgcggcggagggggcaagaacaaggggaagggcgtggccgcggcggcgccaccgccgccgccgccgccgccgcggtgccaggtggaggggtgcggcgcggatctgagcgggatcaagaactactactggcgccacaaggtgtgcttcatgcattccaaggctccccgcgtcgtcgtcgccg

SEQ ID NO: 22181 - DNA, 1203 bp, Oryza sativa; identical to SEQ ID NO: 12759
  Clone ID: TF_OsC300385_1

SEQ ID NO: 22182 - DNA, 3456 bp, Oryza sativa
  Clone ID: TF_OsC51748_1
atggaggctgcccgggtcggggcgcagagccgccacctgtacggcggagggctaggcgagcctgacatggacaggcgcgacaagaggctgttcggctgggacctcaacgactggcggtgggacagtgaccgcttcgtcgctacgccggtgcccgccgcggaggcgagcggcttggcgctgaacagctcgccgtcttcctccgaggaagccggggccgcgtcggtgagaaatgttaatgctagaggtgactccgataagaggaagcgggtggtggtcattgatgatgatgatgtggaggatgacgagctggtggagaacggcggcgggtcactgagcttgagaattgggggtgatgctgttgcccatggagcaggggtgggtggtggtgctgatgaggaagacaggaatggcaaaaagatcagggtgcagggaggcagtcctagtggccccgcgtgccaggtggagggctgcactgcggaccttactggtgtgagggattaccatcgacgacacaaggtctgcgagatgcatgccaaggctaccactgctgtggttgggaacactgtccagcggttctgccaacaatgtagtagaaagtcttacattgtgaaacggagggactattatggaagtaatgattttggatcgtaccttttgattttgaagaataattttagattccaccctcttcaagaatttgatgaagggaagcgaagttgccgccgacgtttagcaggccacaacagacgaaggaggaagacccgccctgaagttgctgttggtggttctgcatttactgaggacaaaattagcagttatttattgttgggtctccttggagtatgcgccaatttgaatgctgacaatgctgagcatttaagaggtcaggagttgatatctggtcttttgagaaacctgggggcagttgccaaatcattggatccaaaagaactctgtaaactcttggaggcatgccaaagcatgcaagatggatcaaatgctgggacctctgaaacagctaatgctttggtaaatactgctgtagcagaggctgcagggccatctaactctaagatgccttttgtgaacggtgatcaatgtggcctggcatcatcatctgttgtaccagtacaatcaaagtctcccactgttgcaactcctgaccctccagcatgcaaatttaaagattttgatttgaatgacacttatggtggcatggaaggtttcgaggatgggtatgaaggttcacctacaccagctttcaagacaactgattctcccaattgtccatcatggatgcaccaagattctactcaaagcccaccacagactagtggcaattcagattcaacatcagctcagtcactgtcaagctcaaatggagatgctcagtgtcggactgataaaattgtcttcaagcttttcgagaaagttcctagtgatttacctccagttttgcgatcacagattcttggttggttgtccagtagccctactgatatagagagctatattagacctggttgtattattttaacagtatatcttcgcttagttgagtctgcatggaaagagctctctgataatatgagctcatacctggataagcttctgaatagttccaccggcaacttttgggcatctggtttggtatttgtaatggtacggcatcagatagctttcatgcataatggtcaacttatgttggacagaccacttgcaaacagtgctcatcattactgcaagattttatgtgtgagaccaattgctgctcctttttcaacaaaagtgaatttcagggtagaaggcttgaacctagtcagtgattcctcaaggctaatttgctcatttgaagggagttgtatattccaggaagacaccgataatatagttgatgacgttgagcatgatgatattgaatatctgaacttctgttgtcctctccctagttcaagagggagaggatttgtggaggttgaagatggtggatttagcaacggcttcttccctttcataattgctgagcaggacatatgctctgaggtctgtgagctggagagcatatttgagtcctccagtcatgaacaggcagatgatgacaatgccaggaaccaagctttagagtttctaaatgagctgggctggcttcttcatagagcaaacataatatctaaacaggataaggttcctctagcatcctttaacatatggagattcagaaatcttggtatatttgccatggagcgggaatggtgtgctgtgaccaaactgctgttagatttcttatttactggactcgttgatatcgggtcccagtctccagaagaggtggtgttgtcagaaaatctgctacatgctgccgtgcggatgaaatctgcccaaatggttaggtttctgctgggatacaagccaaatgaaagcctgaagagaactgcagagacattcctattcagacctgatgctcaaggcccttccaaatttacccccctccatatagcagctgccacagatgatgcagaggatgtattggatgcacttactaatgatcctggactggttgggatcaacacgtggagaaacgcgcgagacggcgcaggcttcaccccagaagactacgctcgccagaggggcaacgatgcttacctgaatatggtcgagaagaagatcaataagcatcttggcaaaggccatgttgtcctcggcgtccctagcagcatacaccctgtaataaccgatggtgtgaagcctggtgaagtcagcctggagatcggcatgaccgtgccgccgccagcaccgagctgcaacgcctgcagccgtcaggccctgatgtaccccaactcgacggcgaggaccttcctgtacaggccagcgatgctgaccgtgatgggcatcgccgtcatctgcgtctgcgtcggcctgctactccacacctgtccaaaggtttatgcagctcctacattcagatgggagctgttagaacgtggaccaatgtgaggaggagcttagaatggaataagtgtagttgtgttttacgtaagtcgagagcttagtgtgctggctaagatcaaaataacagtactatgtgaggaggatgatcctttgtatttaaagcaggatcgtttcgtttatataaaagcttacataccgtcattattaattattattgattagttattattatttatattatatttaccgcctaacatgtaaacagaacatatgttccataaaattcatggtgtggttgtagaaaaaaaaaaaaaaagagcttcttaatggaggcatgcttctggctgctttcggttcactctagacatctagttttgtggctacaagattttgtcggtgttgtattgttgtaaactcggaataaaacttttttttttcgtcagcgttgtattgttgtaaactccgccataaaacatttttttcatgcgctttaaaaaaaaaaaaaaa

SEQ ID NO: 22183 - DNA, 2548 bp, Oryza sativa
  Clone ID: TF_OsC952_1
atggattgggatctcaagatgcctgtttcttgggacctggccgagctggagcacaacgccgtgccgaacatggcggcggcggcgagcgcggcggagccgggcattgccgcggtggcggcgtcgcgcggggcgccgggccggccggagtgctctgtcgacctcaagctcggcgggctcggcgagttcggcgccgcggacgcgctcaaggagcccgccgccgcggcgaaggcgccggtgtcgagcgccgccgccgccgcctcggtggcgaaggtgccgccgtccacgagcacgctgaagcggccgcgcggcgggggcggcggcggcggcgggcagtgcccgtcgtgcgccgtggacggctgcaaggccgacctgagcaagcaccgcgactaccaccggcggcacaaggtgtgcgagccgcactccaagactcccgtcgtcgtcgtctccggccgcgagatgcgcttctgccagcagtgcagcaggtttcacttgcttggggagtttgatgaggctaagcgtagttgtagaaaacgcttggatgggcacaatcgacgccgcaggaagccacaggcagatagcatgagttctggcagctttatgacaagtcaacaagggacaaggttcgcgtccttcactcctccaagaccagagccaagctggcctgggatcatcaaatccgaggagaccccatattacagccatcatcaccaccctcatccggtgatgaccagccggcagccgcatttcgtcggctcgccgtcgtcggcgacgacggcggcgttctcccccaaggaaggccggcggttcccgttcctccatgagggcgatcagataagcttcggcggcggcggtggcgcggcggcggcggcgacgctggagatctcggtgtgccagaccaccgtcgtcgcgccgccgccaccggagagcagcagcagcaacaagatgttctcctccgacgggctgacgacggcgacgacgacgacgaccaccgcccaccaccaccaccaccaccaccaagtgctcgactccgattgtgctctctctcttctgtcatccccggccaactcctccagcgtcgacgtcagccggatggtccagccgtcaccggcggcggcggcgggagccgcaccatgaccaccctccactccagcatagtactgcgcttagctaattaagcagcaacttaacttgatcttcgtgtgaccgatcgatggctcgcgcggcgaataataagtatgtggcggcggtgatggtggtggcgctgctgttggcggcgccggcgggagcgcggtgacatgcgggcaggtggtgagcatgctggcgccgtgcatcatgtacgcgacggggagggtgtccgcccccaccggcggctgctgcgacggggtcaggaccctcaactccgccgccgccaccaccgccgaccgccagaccacctgcgcctgcctcaagcagcagaccagcgccatggggcgacctgaggccggacctcggcgcccggcactcccatccaagtgcggcgtcaacatcccacaggctgtcaggctttcacgcggttacggccactgcaacctgccgccgtcaggccaccaccgccgaccgccagaccacctgcgcctgcctcaagcagcagaccagcgccatgggcggcctgaggcccgacctcgtcgccggcatcccctccaagtgcggcgtcaacatcccctacgctatcagcccttccaccgactgctccagggtgcactgagtggatcaacgtcaagtgatgccacaataataatggagagatggatccatcgatctgcggctctcattttgcggttgctatctgcaatattcgtcgtcgtcagagagatcgagctagaaatgcatgttactcctccgttctgttactatctgcttacctgttgcttcgtcgcggtttgatagtcgtcgttatagctagtgtaagagtgtgagggttgattttgatctgtctcctttacgggacgaggggcagacgaatcatgcatgaatcttagaggacctgcttgcattgtaccttactgcatgcatgcatgcttcaatatatatccatcaaatgaagagtcttttaataaaaaaaaaaaaaaaaaaaaaaaaaaaaaaaaaaaaaaaaagcagctgaacgccgtgctggtgccgggctccaacgagaacgagatgaactaccacggcatgtttcacgtcggcggcgagggctcctccgacggcacgtcgccgtcgctcccattctcgtggcagtagttttgtcagtaactgtatgttgctgccttagtttcagtagagttggttcttcatttcttttcagtgatcaaattatggtttctgttcttatctgccatggtaagttcctttttttgtcttcttcttcttgccttcatttgagttaattacagcattgatttgtgtgaacaaaattcatcataaatcagttcctcgcgagatcatgggtctcaacatgatggtgccaagtgagaactgcagtattgtgcagttttcagttttgagtctaagttgtataaacttgcag

SEQ ID NO: 22184 - DNA, 770 bp, Oryza sativa
  Clone ID: TF_OsC1528_2153
ttttttttttttttttttttttttttttttacatgtgaagaatcacaaagtcaaataataaatagatagacagaaagatatgtaaatgcaacaacaagcagtaaagttgatctctcccagtcacacgttaattgataagtgcaacacacatatatgcctcagtaagacttagattccagttacaccattacttctgatacttgagctaatgcaatcatgtaggagaaatcctgctttttatggttcatgcttgtgtaaattacctgccatatcccaaatgcttcccaaactgccaaaatcttgtccatcagatttaggccacctctgctcctcctcatccccatcatacttagcaatcggcgacaacgacgggcagcttggagagcgcctcacacaccttgtgccaccggtgctagtcgtggcacctgctcagctcctccttgcacttgtccaccgcgcaggtcacttcaccggcaccgaggccacagctgacaagtgacggccaagtgaccaactaaccagtagaggcagctgactgtagcagttgctccaagagcccttccttgtctaggttcaaatctcaaatccgttgattcacaaatcataatcactttaagtggcgtggatgatgcggatcggttgagctccgtgtggcgccgccgagctcctcgtcacatcgggcggcaagaggacacaggtggcctacgggctttctacgacggcggtggagacggacggcgggagaggaagagggacaagggggcggcgct

SEQ ID NO: 22185 - DNA, 3025 bp, Oryza sativa
  unsure (1)..(3025): unsure at all n locations
  Clone ID: TF_OsC98_3
tccggnaattcccggngtcgacccacgcgtccccacgcgtccagctagcggctatcaaacccccacaccactgctcgatcgatcgtcgcagccggagtaactaaggcagagatcagatcaggcgaattaggagcatatggcgctgtcgacggcgcagacaggggagtcgatgcactcctcgacgttcgcgtcgcggtacgtgcgcacggcgctgccgaggttcaggatgccggagaagtcgatccccaaggacgcggcgtaccagatcatcaacgacgagctgatgctcgacggcaacccgcgcctgaacctggcgtccttcgtcaccacgtggatggagcccgagtgcgacaagctcatgatggccgccatcaacaagaactacgtcgacatggatgagtaccccgtcaccaccgagctccagaaccggtgcgtgaacatgatcgcgcatctgttcaacgcgccgatcggggacgacgagacggcggtcggggtgggcacggtggggtcgtcggaggccatcatgctggcggggctggcgttcaagaggaagtggcagaacaggatgaaggccgaggggaagccccacgacaagcccaacatcgtgacgggggccaacgtgcaggtgtgctgggagaagttcgcgcgctacttcgaggtggagctcaaggaggtgaagctgacccaagggtactacgtgatgaacccggagaaggccgtggagatggtcgacgagaacaccatctgcgtcgccgccatcctcggctccaccctcaacggcgagttcgaggacgtcaagatgctcaacgacctcctcaccgccaagaacgccgagacagggtggaacacgccgatccatgtggacgcggcgagcggcgggttcatcgcgccgttcatctacccggagctggagtgggacttccggctgccgctggtgaagagcatcaacgtcagcggccacaagtacgggctcgtctacgccggcgtcgggtgggtcatctggcgcaacaaggaggacctccccgatgagctcatcttccacatcaactacctcggcgccgaccagccaaccttcacgctcaacttctccaaaggatcgaaccagataattgcgcagtattaccagctcattcgtctcggattcgaggggtacaaggacatcatgcagaactgccgggacaacgcgacggtgctccgggaggggatcgagaagacgggccacttcgacgtggtgtccaaggactccggcgtgccgctggtggccttctccctcaaggactcgtcgcggtacacggtgttcgaggtggccgagagcctccgccgcttcggctggatcgtgccggcgtacaccatgcccgccgacgctgagcacgtcgccgtgatgcgcgtcgtcatccgcgaggacttcagccgcggcctcgccgagcgcctcatcaccgacctcaccaagacggtggccgatatggacgcccacgccgtcaagaaggccgccgccgagccggccaagaagaccgtgcgggagatagagaaggaggtgaccacctactggcggagtttcgtcgccaggaagaagagcagcctctgggaggacgagggcaatggtggtagcggcggcccaagatgttgctcgtcgtcctcgccctcgcaattaccggtgcggtcttcgacggctcgcgagtcgctggaccacatctccatcaactgcactggcggggtcggggccacatccggctgccgctccgtccactcgcgccgttcagcaccgacgaggagggcgaggctcctcgtccccgctcagccgcggctttgcttggatagtcccgactggaggcagtcggcggcggggagggagtgggaacaggagcgggacgacggcgacgacagaagaggaagttggctcgcgtcggaatcttggtggttcgtaggcgatgatgccaccgccgccgctgccacccgagttcgacgcgagaaacggcgtgcctgcgccggggcaggcggagcaggaggcgatggagctgcacgggcgccgccatcctcctcctcggcgagcacgagggcggcggcctcaactccgggcggtgggatgcgcggttcgcgcatgcactacctacggtactacgacgcggcattcgacgcggtggacgcggcggggttgctggagactagacccgcgagggccaaggtggaggagatgttcgcgcgggagatccgcaacgcagtggcgttcgagggcgcggagcggtttgagcgccacgagagcttcgccgggcggcggcggcgcatggaggacggtggcggtttgcagtggggttcgaaggcggaggagaaatgtttattgccgtcgtcctccttggctcgtcgtcccagacgccaaccgtcgcccccggtttcgctgcgccccgatgggagcttgccaccagccgtcgccgccgctccactcgtcctcccactgccacgagcctccgcggccgagccgccgcgctgcgccccgatgccgccaaccgccgctcccctcgtcctcccgccaccgctgccaacagagaaagagagaatatagcgccgtcaagaaggccgccgccgagccggccaagaagaccgtgcgggagatagagaaggaggtgaccacctactggcggagtttcgtcgccaggaagaagagcagcctcgtttgctgatcatcgactcctgcactcgcgcgtacataaagtgcaggaacgaataattcttgacccgtcttgcattgagttcttcgtttgctgctgcttcttttctttttttttttccttttcacccgctgaattttgagttcagtttcaaattcgcttcgatagatttgtgtatgtcacaccgatttgtggcattcttgcagacaagttaccaatatgaaatgcgtataggcatgtacacgcagagacgtgtcaggcagaacagaagtgagatgcaccgatctgtaccggccatggcatggaattggtttgtcatgggctatagttggttgacagaataagttcattttgtgaccctt

SEQ ID NO: 22186 - DNA, 381 bp, Oryza sativa
  unsure (1)..(381): unsure at all n locations
  Clone ID: TF_8955113
atccggtacgagtntcanggggctcngtggatctctctccttcaggcccttgcnnccatncctgntggaccaccaactgtaangatcactggtatagatnactcngtgtcngcttangcnccaagcagcaggctatanctggtctgaaagangctgtcccncntcccctgcctgtncaaggtgcnttgaaattccncccacttganatctccgncancaaggtggnggcngancatcncgnaatcatccccggggaatccctcgccntgaactncaccctgcnagctgcaccacnttccagacgactcngtaagcncngccaacnnccntgacttnntcctaatgatcgtnaanancctgtcccctaaggtacccaccctg

SEQ ID NO: 22187 - DNA, 651 bp, Oryza sativa
  Clone ID: TF_OsC1713_4566
ctatagcgcgcccaggaacgcgtccgcgcgtgacttcgacggggacagcccggactccgggcttcgcctctccttgtcgccgcccgcgccggccgtggcgtcgtcgtcagacgccaggaggcagtgcagctggaggctgaagcagatggcgagggcctcgccggtcttcacgcggagggactccacatcgagggcatcgaggcgggacaccaccgggttgaactggaagggcacgtcgaggcgctctgcttctttcgtgagcgccatggccgtacgagataaattagcagcagctgcagcagcaggagctcgcggccgcgcaggaggagctccccgccagcctcctccccacccgccggtggcctgctgccgcatctcagcgccggcgacggcggcaccaggcgagcgcgtaggggcgacggcagcacctcgtgggtggagggccgccggcgacgggcggagcggctgccgcatcccggagcctcggcgcggctgacggcgggagcttccagatctggtacatccctctctctccagcctctccaccgcctttggggactcactttcgccggcggcaagtgacgatgacgatgggcggaggtcgttccggaactccggatgggggcgggagttcaacccaaacgtgatcat

SEQ ID NO: 22188 - DNA, 918 bp, Oryza sativa
  Clone ID: TF_OsC97073_1
tggtggctgagagtccaaggaaccatgccattgaagccaattaggaagatgaacccacatgtgttcattcatggggtggtgaatggatcttacaatgcaccattttttgtgacacgcttccgggaggccttgttccactattctgctatcttcgacatgttggagactaacattcccaaggataatgagcagaggttgctcattgagtctgctctatttagccgggaggcaatcaatgtgatctcttgtgagggactggagaggatggagaggccagagacatacaagcaatggcaggtacggaaccagagggttgggttcaagcagttgccattgaaccaggatatgatgaagcgtgcgcgggagaaggtcaggtgctaccacaaggacttcatcatcgatgaggacaacaggtggttactacaaggatggaaagggcgcattttgttcgcactgtcgacatggaagccagataatcgatcatcttcatagcttgttcagctctaattattgcatgatattgtaaatgtagacctgttcatatttttttggggggcatttggaccgattgttcctggtaggcaatatattgctaggtatgttatttgaacaaccaagtaatgggaaacttctgcttaggaattgtcttatatgatgatctggttaatctctgtccgtacataagatgaacccgcctgttcctagaatctctgcacatttgttgtgatcattattgttgcttccgacgggaacagttggttcaattttggtggagctgctagatatgttgaagttgtagaccttgggttgtcttatgtatggatgagccttgtacagtatttcttccaaacattcagtacttgtcactaagttctggttctggataatctatcatgcacgtgcattctctattcgtgc

SEQ ID NO: 22189 - DNA, 1437 bp, Oryza sativa
  Clone ID: TF_OsC348872_1
atggagaccatgtcatacccttgctcccttctcattcccttctccacacaatttgaagagatcagtagcagtagcctcctcctatggtctcctcaagcagaagaaaatcctcatgagaatgccaatatgtatgaatttgatgctgatcactctcatgatcagattcatcaagatcatcagttcttggacatgatggtcatccaagaatctgctaatgaatttgatggtgatcactctcatgatcagattcatcaagatcatgagttcttggaaacgatggtgatccaagaatctgctaatgaatttgatggtgatcactctcacgatcagattcatcaagatcatgagttcttggaaatgatggcaatccaagaatctgctaatgatttgctgcaactgcaagatgatttctctgtccccaatgctgatccattagcagctagctttgaatttgatgagagattagcagtggcagggcacgagaacggcaacgtggtggcaacccaggaggagagcgcaggtgaccttctcctcgccggcgccatggccgtggacgccggagacgctgtccacgcctcggcgatcatgtcgaggcttgacgacctcctcgccgacatcgccggcagaagaagctgtgaagcaacaagcccgggtgatcacctggcctactacttcgcccgaggcctcaagctccggatctccggtgcggccacgccggcgtcgtcgccgccgccgccggcggccaactggtcgtcgccggcgtaccggatgctgcaagagctgacgcctttcgtcaagttcgcccacttcaccgccaaccaggccatcctcgaagccacggcggatgacctcgacgtccacgtcgtcgacttcaacgtcggcgagggcgtccagtggtcgtcgctcatgtcagacctcgccgccgccggccgccaccgctgttccacctcacggacgctgaagcttctcctcctcggcacgatcacaatccttcaaccaaagctggtgatcctgatcgaggacgagctatcccgaatcagcaagaacccaccatcaccgtccctcgccgcgccgccgccgttcccggagttcttctccgacgcggtggcccacttcacggcggtgatggagtcaacggcgagctgcctcgtgagctacgacgacgaggcgtggctgagcctgaggcgcgtgggggaggaggtggtggggcccagggtggaggacgctgtggggaggtatgggtcactggcaggtggggcccagatgatggaagggctcagggctcgtgaggtgagcggcttcagcgttgctcaggggaagatgttggctgggctcttcggtggagggtttggggttgtgcatcaggagaaagggaggctcgctctctgctggaagtccaggcctttgatctcagtgtctctttggtgtcccaagtag

SEQ ID NO: 22190 - DNA, 2433 bp, Oryza sativa; identical to SEQ ID NO: 12807
  Clone ID: TF_OsC334805_1

SEQ ID NO: 22191 - DNA, 1443 bp, Oryza sativa
  Clone ID: TF_OsC39025_1
ccggccggaatgagaatgtgcgacgatgtgagattccaccaaaccaagccaagcaagcctcacaccctcgcccgcgtcgtcttcctcctagccgccgctgctctgggcaacgtcagcggcgcggtgtaccacgccgatcctgctgctgccgtgtacgcgtctctagtccctggcatggctgtggtccccgggcgtgctccgccgtccgccgtgcagatcgaggcggcgaggcggtggaaggagctggagaagatggccctgcggtcggtgaatctcatggtgacgtgcgccggcgccatccaggcgggcgactacgcggcggcggccgggagcctgtccgacgcgcgcgagatcttcgccaagatgcccaccacccgcaccgggatcggccgcgtcctcacccacttcgccgacgcgctcgccgagcgcctgttcccggcgttcccgcagtccgcgccgccgccgcccccgccacgcggggagcagcgcgagctcttccgcgggttctacgaggcggggccgtacctcaagttcgcccacctcgcggcgaaccaggccatcctcgaggcgttcgaggggtgcaacagcgtgcacgtgatcgacttcgccctcaccgatggcatccagtggccgtcgctcatacaggccttggccgtccgccccgggggcccgccgttcctccgcatcaccgggatcggcccccacgccgccggcaaccgcgacgagctccgcgacgtgggcctccgcctcgccgagttcgcgagatcttgcagcgtccccttcgccttccgcgggatcgccgcggaccagctcgacgggctccgcccgtggatgttccaggtcgcgcccggtgaggcagtcgccatcaactccgtgctccagctccaccgcctcctggtcgaccaggacgccgccgccgcggcgtcgttcccggcgcccatcgacggcgtgctagactgggtcgcgtccatgaaccccagggtcttcacggctatcagccgccatggcggcggcgacggggcgggcaacccgctcgccgaggcgtacctgcagggggagatcgccgacatcgtgagccgcgaggggagcagccgggtggagcgccacgagcagatgccgcggtgggtggagaggctgcggcgcggggggatgacgcagctgccgctcggcgccaccggcctctggcaggcggcgatgcagctccgcgagttctccggcgccggcttcggcgtccaggagaacggcggcttcctcacgctcacctggcatagccagaggctgtactcggcgtcggcgtggcgcgcgaccgcggggaagaagatgacgatgatggctagcggcgccgccgacgccatggaggagagtcagaacagcaacaccaacggcggcggcggcggaagcagtggtggtggccatggtgctctcaaccaaatcatgcagtga

SEQ ID NO: 22192 - DNA, 1464 bp, Oryza sativa
  Clone ID: TF_OsC545_37
atggtccgcaagcgccccgcctccgacatggacctgccaccgccgcgccgccatgtcaccggcgacctgtccgatgtcacggccgccgcggcgggcgcgccgacgttgtctgccagcgcgcagctccccgcgctgcccacgcagctcccggcgttccaccacacggacatggacctcgccgcgcccgcgccgccggcgccgcaacaggtggcggcgggtgagggtgggccgcccagcacggcttgggtggatggcatcatccgtgacatcatcgccagcagcggcgccgcggtctccgtcgcgcagctcatccacaacgtgcgtgagatcatccggccatgtaaccccgacctcgcgtccatcctcgagctccgcctccgctctctcctcaactccgaccccgcgccgccgccgccgccgccgtcgcatcctgctctcctccctcccgacgccacggcgccaccgccaccacccacgtcggtcgccgcgctccctccccctccgccagcgcagcccgacaagcggcgtcgcgagcctcagtgtcaggagcaggagcccaaccagccgcagtcgccgaagccccccaccgcggaggaaaccgccgccgccgccgcggccgccgcagcggcggctgccgcggccgccaaggagcgtaaggaggagcagcggcggaagcagcgcgacgaggagggcctccacttgctgacgctgctgctccagtgcgcggagtcggtgaacgcggacaacctggacgaggcgcaccgcgcgctgctggagatcgcggagctcgccacgccgttcggcacctcgacgcagcgcgtggcggcctacttcgcggaggccatgtcggcgcggctggtgagctcgtgcctggggctgtacgcgccgctcccgagcccgtccccggcgggcgcgcgggtccacgggcgcgtggcggcggcgttccaggtgttcaacgggatcagcccgttcgtgaagttctcgcacttcacggcgaaccaggcgatccaggaggcgttcgagagggaggagagggtgcacatcatcgacctggacatcatgcaggggctccaatggccggggctgttccacatcctggcgtcgcggccgggggggccgccgagggtgaggctgaccgggctgggggcgtccatggaggcgctggaggcgacggggaagaggctgtcggacttcgcggacacgctgggattgccgttcgagttctgcccggtggctgacaaggccgggaatctggacccggagaagctgggcgtcacgcgccgcgaggccgtcgccgtccactggctgcgccactccctctacgatgtcaccggctccgactccaacacgctcgggcccctcccgtccgcctccgccgtgcgtcccccgccccttgtcaactcgggaccccccggaatcatggctactttacaccctatacttctcattgacattgtgacctag

SEQ ID NO: 22193 - DNA, 3183 bp, Oryza sativa
  unsure (1)..(3183): unsure at all n locations
  Clone ID: TF_OsC65210_1
tttttttttttttttttccacatcaatgcaattaataattaaaaaaacattttcacacacatcaatgggcaaaaatgtttgaccctctgttgcaacatggatcatgaatagaccaaataagttggccgaaaagatagttctcaggttgacaacagcacaagactagccaaaacccagttcaacattttgagcatattacaatgttactgtctgccacagtgcagtaagcacctagtaaaaacagagtaactggtgtcaattacaaccggatcaactgactggattgatcgcaagaaccggtgacgctgcagcgaacatcatccggaccaggacctaagtctattttctaagtggtagtgtggcactaagctgcaacatgacaacagaagcaactaattaacatcacataaaaacatggatatctacatgcatgcttggttatcttatggcttcaacaacttgggctaccaattctccctcatagcctgcattgcatgaattggtttgaatcagaagaagaaccaacccattggaatcacaagtgcactccaaattctagataggcatacctcaagtcattgggtccatcaaaccaacaccaacaccatcgatcttcatacatgacatactgccactagccatcttattgaaatacctagatcttatatttgtcgcgatgccaaaaaaaaaaacaactaaaaataagagagagcatcatttggcgtccatgttgagatggcatagagtattcgtcccttccatccttgcaagagccattggtgatctatatctatcacgaagtccttgtggtagcagtccttgaccttgttccgcactacctgaacaatttctggattcaatggcagttgcttgaagccagcccgttgattccgcacctgccattgcttgtatgtctcagggcgctccacccgatctatgccctcacacgcaatgacattcagagcagctcgtccaaagatgttttgctcaatcagcagccgctgttcgctttcccttggggtagttgcatccagaacatcgaacaaggccgagtaaaagaacaaagcctcccggaaccgtgtcacaaagaatggtgcactgaatgagccattcactattgcatggatgaacacatgaggctgcatcttccggatgttgctgagcacaatatcccttgggctgtcgatcacaacactctcatccatcaagttcttaaattgatactggcaattcacaatgagcacctcatcaggatcaatgttcagatcctctttgcggactgactccatcttaaccgctgcaatggcattgtacttgaatggcaccccaaactcctgggcgtatttactgagccggtgccctgtctcctcaatacgctcagttggccggaaaccaggctgggggaggtcaatgccagtcatccttacctccggtggcccaccctccctttgtgatatccgccgcaggaagcacggccactggaacccatactgtataccgtaatcaacgatgtgtatcttcttcttacccaaggaagcattgtagatggtttgattggagaaaatgaaggacaccttcttgaagcagatggcagccatgtacagctggtacgcttggaggatgtccacggctgaggtgcgcttagccacgagcgactggtgcaccaggctgcccgtgccagcgatccgcgcctgcaagccctcagcaaagcaatgagcaaggcgctgcgtcgcgtcgccggtcggtttcgcgtgctgcttgatctgcttaagcagctcggtggcgctccggcggtcgtcggtggccacggcctgcgcgcagtggatgagcagcgtgcgcaggtccaccacgtccctcccgccccgccgccctcccttcaccttcccgttcccacccttcccgccggcgctggcctcgttcttggccgcctcctccttcatggcaatcctcagcttctccatcatctcggtgcaattctcatgggagggcatcatcaccttgtcgaacatggcgcgcgccgcgacatcgtccccctgaaccgcggtctgcttgctgctcctccctccctccagctccagctcctcgtcgtcgtacgggttcttccgccctcgtccgccgccgcccgaggcggttgccaccaccacatccactgaagcttgtcgtcgctgggcaggaacctcttggcctcctcgagacccctgaggtaattattctccgacgaggcctcgaggtcgatgatgagcttgttctcggtggggaggaacttgttcgcctcctccatccccttgaggaaggcggagtcatgaggtcggagttggccgcggcgaagaacgcggcgggatcgagctcgatgctctcgtactgcggcacgggcaccgcggcggcggcaacggcggtggcggtggcggcggcgtcgtaggagttgatggcgacggaagtgtaggaggaagaggtcggggaaaagccagggtcatagaaattggcggaacggagttgaaaaaggggtcagcgggctctagaggtaggctactcacctagcaccaccaaagttttggagatacgtggcggccttttgaagttgtagcgannnnnnnnnnnnnnnnnnnnnnnnnnnnnnnnnnnnnnnnnnnnnnnnnnnnnnnnnnnnnnnnnnnnnnnnnnnnnnnnnnnnnnnnnnnnnnnnnnnnagaggcgggggtcgtcggagttggaggagcgggagttggaggagggatcggagaggatctcgaggaagggctgctgcgcctggagcagcgccgggttgtcggggtagtcgtagaagaacttgtcgtcgatgtcctcctccatcagcatcctcgagatgaacggcagcaccaggtcctccggcgcctcctccccctccttcaccatcgtcgtcgccgtcgtcgtcggcggcggcggcgagggggggaggtcgaggtaggcggagggggagacgggggcgaggtcggagaggtagaggaagagggacggatcgtcctcctccccaccaccaccgatgccgtacacgtctcggattgcatcatctccacaagcggggaacgagtcggccgccgacgagcccatggcggcggcgaggcggaggagggggtttagtgggcgatgcggccgccgacgaggaagtggtcgcgcccgccgtgcgccgcccacgccggcgtcccg

SEQ ID NO: 22194 - DNA, 2323 bp, Oryza sativa
  Clone ID: TF_OsC65210_2
ctaaaaataagagagagcatcatttggcgtccatgttgagatggcatagagtattcgtcccttccatccttgcaagagccattggtgatctatatctatcacgaagtccttgtggtagcagtccttgaccttgttccgcactacctgaacaatttctggattcaatggcagttgcttgaagccagcccgttgattccgcacctgccattgcttgtatgtctcagggcgctccacccgatctatgccctcacacgcaatgacattcagagcagctcgtccaaagatgttttgctcaatcagcagccgctgttcgctttcccttggggtagttgcatccagaacatcgaacaaggccgagtaaaagaacaaagcctcccggaaccgtgtcacaaagaatggtgcactgaatgagccattcactattgcatggatgaacacatgaggctgcatcttccggatgttgctgagcacaatatcccttgggctgtcgatcacaacactctcatccatcaagttcttaaattgatactggcaattcacaatgagcacctcatcaggatcaatgttcagatcctctttgcggactgactccatcttaaccgctgcaatggcattgtacttgaatggcaccccaaactcctgggcgtatttactgagccggtgccctgtctcctcaatacgctcagttggccggaaaccaggctgggggaggtcaatgccagtcatccttacctccggtggcccaccctccctttgtgatatccgccgcaggaagcacggccactggaacccatactgtataccgtaatcaacgatgtgtatcttcttcttacccaaggaagcattgtagatggtttgattggagaaaatgaaggacaccttcttgaagcagatggcagccatgtacagctggtacgcttggaggatgtccacggctgaggtgcgcttagccacgagcgactggtgcaccaggctgcccgtgccagcgatccgcgcctgcaagccctcagcaaagcaatgagcaaggcgctgcgtcgcgtcgccggtcggtttcgcgtgctgcttgatctgcttaagcagctcggtggcgctccggcggtcgtcggtggccacggcctgcgcgcagtggatgagcagcgtgcgcaggtccaccacgtccctcccgccccgccgccctcccttcaccttcccgttcccacccttcccgccggcgctggcctcgttcttggccgcctcctccttcatggcaatcctcagcttctccatcatctcggtgcaattctcatgggagggcatcatcaccttgtcgaacatggcgcgcgccgcgacatcgtccccctgaaccgcggtctgcttgctgctcctccctccctccagctccagctcctcgtcgtcgtacgggttcttccgccctcgtccgccgccgcccgaggcggttgccaccaccacatccaccgcctccttcttcacgctcaccacaggcgccgccgccgcagcgaatccaacctgaagcttgtcgtcgctgggcaggaacctcttggcctcctcgagacccctgaggtaattattctccgacgaggcctcgaggtcgatgatgagcttgttctcggtggggaggaacttgttcgcctcctccatccccttgaggaaggcggagctcatgaggtcggagttggccgcggcgaagaacgcggcgggatcgagctcgatgctctcgtactgcggcacgggcaccgcggcggcggcaacggcggtggcggtggcggcggcgtcgtaggagttgatggcggcggaggtgtcggaggaggaggtcggggagaggcgggggtcgtcggagttggaggagcgggagttggaggagggatcggagaggatctcgaggaagggctgctgcgcctggagcagcgccgggttgtcggggtagtcgtagaagaacttgtcgtcgatgtcctcctccatcagcatcctcgagatgaacggcagcaccaggtcctccggcgcctcctccccctccttcaccatcgtcgtcgccgtcgtcgtcggcggcggcggcgagggggggaggtcgaggtaggcggagggggagacgggggcgaggtcggagaggtagaggaagagggacggatcgtcctcctccccaccaccaccgatgccgtacacgtctcggattgcatcatctccacaagcggggaacgagtcggccgccgacgagcccatggcggcggcgaggcggaggagggggtttagtggatttgtagaggcggtggcgcggcgagaagggtggggggggggggaagcgcggacgcgtgggcggacgcgtggg

SEQ ID NO: 22195 - DNA, 2454 bp, Oryza sativa
  Clone ID: TF_OsC2627_1
ttttttttttttttttttttgccaaattatcttatctattcacaacgaaatgtttccaagaacatgaagtggccaattgagcggagagcaacaacatagtggtaagaccctagaggccatagccactggtcacacactacagagacactcataccaagattgccaaatccattaggcctacctaataaacaacagagtgtgcaacaaccatgataataatttctttgcaatgtttaaattgcaagacaaaattcatattactggagttaaacatgcctgcaaatggtgtaggaatcatgatggtcgaggcaggtgtgatcagcatcgccatgctgagacggatacaagctcgccacgctgccaatagagtgcaaggcctgctccacgcttctccacatggaagcctcggacctgcacccgcttcaagaggcagtcagcctgtgcctccgcaaggttgctgagtggttgaggtgcaaaccctgctgatgttagcactgtccgccaagcgatcgctttgtcagctctacgccgcccaagaactgcatcctccactctgggctgaatcagaaacctctcgatcttactgacagcatccgcatcagtgccagcagcatcaagtgattcaagaagacatagacaagactgtaagcaattcaagaagtgttgggaaaatgggaggtcgctccgatcactgccatagtcaatagcaaccacaatcttaggagcaagctgtttcaccaactgaagcatagctgggagtggagtgcgtgctgagcaaccaactgggaggcttactgcaacaacctcatcagctgtaggagcaatgagttccataggatcaaatgcgtcgagattaatagcattgaactcaaatggaataccaagatcagcagcaaactgtgagaggttatcctgagtaagatgcagctcaagcgggtggtgggaggcggctgagacgaaggctgtgagcttcaacatcggcaaggacacaccgccagagccacagcggtgagcaagctcctgcaagaacgaagcccactggccgccgacaccgaggtcgaaatcaatgacgcggatacaagacgcggttgtgctggcgatctcatccagaagcgcctgagttaccgtgaagttggcaaactggagcacgggggagaggtcggagaaggatttgtaagcggtgagcttcagggcgacgtcgagcggagacgtgagacgggtggcggcgtggtggccgtcggcgagcgcgaggaggagggcgtcctttaggtaggaggcggagcggaggaaaggcttcccaattgggggaagctgctgattgagccgcgccaatatctctcgcgcgcctatggagttgccgacttcggttgccttcgccgccgctgcaagctcgtccaggaggtgttgctgctgcgccgccgccgccgccgcggttgacttcatcgcgttgcgcggatgctgcatcgaaggctggagctggaagggtaccgcgctatgtagcgttggaaacgggaggcattgcgcgggcgccggcggcggtggctggggctggttgtggaggaggaagagattgtcgggcacggagtggtggcgcttcggcggtggctggagcagtggctgttgttgatggtcggagaaggaggggaacggcatgaacaaggtggaggccggcgtcggctgatgctggttgaggagtagtgtgggtgatggcaagccaaggagagggggcttcatgtcagcgccgttgtggaaaggcgcagtagtcgccggcggcggctggagcgccgcttcgggcgacaggaggccgaaagcggaggtggccttgctattgctgccgctgctgcttgtgagcgacctcccgccggaggacgacaggtcggaggcgagggcggctggcgaggagacgccaccggggtgatgctgcagcgggaacccgaacccggcggcattggcgaggagctgctgctgcgagagccccggcgcctggggttccatgtcgccgggggcagccatgatccagttcaaaaatgtctgctcctggcctgccgccgccgcggcgtcgccgagcatggcgtcccagctctcctccgcgacgaagcccacatccagggcccccggtatgggcggcagctcaccgccaccgccgccgccgtgttcgccgggggccgcccatctggtggcttcggcggcggctgcgctgctctccgaaaccgccgccacgccggtagatatagaatccgccgcgccgctaccatgggacgaagacagcgtcgatgtggagttgggcgggctcgggctccccctgcagtccagcaccgacctcggctccaccagcaacgaccccccgccgcccccgccgccgccgcccttgtcctccggccaaagcagcgccgctatgctccccgcgagctccgccgccccgttcccgtcggcactgaagggtgccgccctcat

SEQ ID NO: 22196 - DNA, 1365 bp, Oryza sativa
  Clone ID: TF_OsC364342_1
atgggggtgatctctggtggtggtggtggtgacgacgacggctacggcggcggcgacggcatgctccggtcactccactcctcgtcgtcttctgacacggataacaacagcggtggctgcaagaacaatggcggcggcggtggcgaggccgccgccgccgttgagggtggcggtgatcagcgtgccgttgcggcggcggcgccgtcgacgcgggacttgctgctggcgtgcgcggacctgctgcagaggggggacctgccggcggcgaggcgagcggcggagatcgtcttggcggcggcggcgtcgccgcggggcgacgcggcggaccgcctggcgtaccacttcgcccgcgcgctggcgctcccggtcgcgccgttcctgcgtttcgcgcacctcacggcgaaccaggccatcctcgaggccgtcgacggcgcgcgccgcgtccacatcctcgacctcgacgccgtccacggcgtgcagtggccgccgctgctgcaggccatcgccgagcgcgcggacccggcgctcggcccgcccgaggtccgcgtcaccggcgccggcgccgaccgtgacaccctcctccgcaccggcaaccgcctccgcgccttcgcccgctccatccacctccccttccacttcaccccgctcctcctctcctgcgccaccacggcgccccaccacgtcgccggcacgagcaccggcgccgccgccgccgcctcgaccgccgccgccgccactggcctcgagtttcacccggacgagacgctcgccgtgaactgcgtcatgttcttgcacaacctggccggccacgacgagctcgccgcgttcttgaagtgggtgaaggccatgtcgcccgccgtggtgaccatcgccgagagggaagcaggcggcggcggcggcggcggcgaccacatcgacgacctgccgcggcgggtcggggtggccatggatcactactcggcggtgttcgaggcgctggaggcgacggtgccgccggggagccgggagcgcctcgccgtggagcaggaggtgctgggccgggagatcgaggccgcggtgggggccctccggcggccggtggtggcgcggcatcgagcggtggggcggcgccgcccgcgccgcggggttcgcggcgcggccgctcagcgcgttcgccgtgtcgcaggcgcggctgctgctccggctgcactacccgtcggagggctacctcgtgcaggaggcgcgcggcgcctgcttcctcgggtggcagacgcgcccgctgctctccgtctcagcgtggcagccgtcgtcgtcgtagccggcgacgaagacgacgatggcgacggcggcggcgaccacgggctagggtttgccaagctcgattga

SEQ ID NO: 22197 - DNA, 2251 bp, Oryza sativa
  Clone ID: TF_OsC13353_1
ttgtgctctggttttccgcagcgtcgggccgaccagtcgaattgtctcgcccagactggcacgacgctggtctgtgtgttttttttttttttttatgactatgcaagaatattattaactatggcagccatggatacatcatacattgaatcgcaaagaaaattattatcatacaacttctctacaaatctaatgtcaatgtttgatcctggtctataaatgaaggcaacacccgctgtcaatcaaactgagggtacatcaaagggtatcattctgtaaattggaccagggaatcggtatgtatatatatgctctctatcatttcttcttctcaacatactactgtcagtgccacgcagaagcagatatcagctttctgctcctccagccgagaagcatcgcgccgtccttctcatccaatgtgtatttatcggagtagcaggcgagaagcttccttatcaccgagttgacgtacgagctcaacgggtaaggcctgaagccggccatggtcagcctcgacttccacttgccaagcagctcatgcctctccaccctgtccttcccctcgcaggcgatgatgttgacgatgtccttggcgaggcagtgctgctccacgctgatcctctccttgttgtcccgcggcaggttggcgtcgatcgactcgaacatggcggagtagtactccatggtctccccaaacctcatcaagaaaggcgttgtgttggtgtgtgactcctgctctaccaaagtagtcaccttcggggacagccctttcaccatccggagcagaccatcgcgtgggttgttgacatccacgctctcgtccggggtgtggtgtagctggagtgtgaagtttacagacagtgcttcacctggcctgatctcaagcatctctttcgtgacttgtgtggcatagacagacagaggcgtaaactccagaggtattttgaattcttcagacatgcttttcaacattttccccacaatgtcaagaccttcaccacgagcatactctgacactgggtcatctatcccggtgatccgcacacgaggaggaccaccaggccttgcagctaatgcttgtatcagtgtgatccattgagtcccttgagcaatctgaaaatcaattatgtggatattgttctcagttctcaatgcttctgcaatcgccccattggctgccatatagccaaacttgaagtaagggcagatattgtatagaattctcatgtaggacaggagctccttgctctctggctcacggcacttcagagcacggtagatgtttgtgccagagtttccatgtctagcaaccaaaccctccagtaggtaagcacctagacgttggattggttccccgttgattgagaccactccacgagcctcctgaacaagcttatggaactcctctgtcctgtcctcactcagagcctcagcacacctggttaatagctgcttcacaattatctgagggtcttcccttaactccctttgccgtttctctggacgaaattcatagcttgctgtggggtatccaccagatgcaaactgtgaccgaccaactccaggtaacggctgccgtgattcatgactccatgttctcgaccgctgcctcacaagctgagcaggcttgatttcctcaaactcatgcttggtgctagttgttgcatcatctgtatcaggtgccatcagaacagtctcaatctcccgtaaggcgtgttgcatattatgtcttgatgtagcatacaacggatcagctcccacttgaatgttctcctggagaagaatacccgcctgtctatatgagctgtctgcttccaatggggagattggttgggctgaaatggtttctgtagagctctggttatctggagtgttggtaagagcagacaaattgtcacactcaaattgggaagagagaggggtgtatggggaatcgctgaactcgtacttcagtgggttagcttgccagggagagttttgcaagttgttctctgtaggaatttcgtacacaacgttagcgccagtcaatctgtactttaataactggtgcaagtccataataaatgaacggagattagtcgttcatgacctcctccgatctgcacagccccgacgccgcagcgatgccccgatccacttccactcctctctctctctctctctctctctctctctctctggttctcttttcgtgtgctgcgataattatgcccgagccgcctcgtgccgaattcctgcagcccggggg

SEQ ID NO: 22198 - DNA, 2064 bp, Oryza sativa
  Clone ID: TF_OsC134269_1
ttttttttaatggggatataatttactctttttccatatataagcattagctaccaagaattatgagttgctacaactaattaagctttaccagatcaataccaaactcactcaccaaatggaaaatgaaaaaaatggaaaaagagcgcgaattaattaagtgaccgatttggtgacggcaataatgtcgcggcatcccctggtctaacgccaggcggaggcgacggtgaccacgcgccccatccatccgagccggagcacgccgttctccgccttgacggcgaaccctgccgcgacggggccctgccgggccaacacctggtcagcaatgcccggtccgagcgccaccggccggaatcccgccatgccgaaccgggagcgccacttgccgaacacctcgcaccgctccagccggtcggcgccttccctggccaccgcgttcgccgccctcccgcccagcgccgcctcagcacgcgccctctccgcgctctcccgggggatcgtggcgtccagcgactccaggatggccccgtagtgcgcgcacgcgtcggtgaagcgcgtggtcagcggggccgtgttggagttcagctcctgctccacgagggccaccacctgcgggccgagggcgcgcacccgccggaggatctcgtcgcgcgggttcgccggcgagacgctctcgtcggggacgtgggagagcgcgaacgccaggttgacagccagcgcctccccggcctcgcaccccagcttggatgcttctatctcccctgctctgcagctcaccattttgaaccggtaatctatgcccgctcgctcggcgagcttctggaggtggagtgttgctgttacagactgcgtgaatggtgaggcgggatcggtgacggcggtgaccttcagggaggttccgggcaaccggcgagcagcgaggcacctgatgaggtcggcgtgctgcggggcactgacgtcgaagtccaccaggtgtatggcgcggtggtcgccgacggcgtcgacgatggccacgtttgcagcgtggagggcgaggcggaagcacggggatatgtcgtggaggagttgggacccggcgcgcgtctcgccgccgcagatgtccgggactgaggcggtctgaccaatgcgggaggacaacgccgccaccatcatagcaaccagccgctgctccacgtcgccgcgtgagttcgccgcgcgcttgagggcggtcagatgagtggccgccgtttcattgtgtccgtcggcgatggcagccgccgcctcggagagtagttgccgcgacgtggtggccgaggtcggcggcgaacaggaagccgaggaagacgccgtggaggtggacgagttcgagggcgaccgcgtcatacccacggcgttattgttgttgttcggggtcgtcgccgcagtaagtgggggcgacggcgccgcggtgatggagttgagttgctcctcccactcggacccggtgaccgcggagccggtcccgctcatcgcggcctccacctcatcgtcgtctccgagaagctgcttctcgagctcctgcaggatggacaggtcgctcgtcgccggcgctggaggcagcgccctcgccgttccaaaggcctgaacctgtggcgaggacgccatgtatgtcacctgctgctgccgctgcagctgtggctgcatgagcggcatcgccaccgccctggacgcggtggtgatggacgacagcgtcgacgacggcgatccgaaggcccctcccatgctggacccggatagaaccagaggctgggacggtggcccgcctagaacagccgcgatatccgccgaggtgagcggcgagacggccgccgacgccgcggccgtgcgctgcctcacggttcgcaggtacagctgctgctgcatcgcaatctgtcgctgctgatgctggtgctgctgccacctctccatgtcgccgaggctcctcttgagcaccccgccggccgcggccgcgtcggagcgctgctgcatcggcatctgcaccgccgatccgacgccatacaggtacccctggcgcggatcgcgccacggcgcgcctggctccat

SEQ ID NO: 22199 - DNA, 2525 bp, Oryza sativa
  Clone ID: TF_OsC82607_1
ggcacaccacatccccctcatccacctgtccgtgatgatactcccatagttgagacttgagattgcccttctcctcaatcttgttgatctcttctcccacctcgcgccttcgagctagtcgtgtttaggtttagccccattaatcttggtaagggtggtagtggttgttgctgttgttgttgttgttgccctgaagctttcttcctcaaggaccagaatttgtcttcagctgctaaaggagggcctaccactaaagatttgtgatcaatcccactttgatctattaccattgtggcgctgaatattcagtgataacaacggcaagatcaactccctattaattgttcggaagtgcatcattcctcagcgactccagcatataaataaaatccagaaggttgcaccagagaatatgtcaatgcaggcctctaaccgaccatacagatatccagacaattctcaaataccatactacagccggagttcaatgcatgtggggcaaaatggtacttaccatgtgcaacaaaatcatgaggatctttacgcgtcatctgatgatggttcacagaacggcaattctaaggctcaggggttgcaagcacagtactgcactctagattcatcctcaggcaattttgtgtatccagcacatagctctacatcctcccacataagtgggagccccatttctcagcaagatagccactcagagcacacatctggttcccctgcaagtgcttcatgtgttactgaagttccaggcttgaggtttacaacaattgaggagatagagaatgcaatgtttggacctgaacctgacacagttagctcggactgctccttacttactgattctgctttttaccaagataactggagggagcatctgggaatcaatacaggggacttgaagcaggtaattgcagcatgcggtaaggctgttgatgagaatagttggtatagggacttgctgatatctgagttaaggaacatggtttccatttctggagagccgatgcaacgccttggagcctatatgttggaaggccttgttgccaggctttcttcgactgggcatgccttatataaatccctgaagtgtaaagaacctactagcttcgagctcatgtcttatatgcatctcctctatgagatatgcccgtttttcaagtttggttacatgtctgccaatggagcaattgcagaggctgttaagggcgagaactttgttcacatcatcgacttccaaattgctcaaggtagccagtgggcaactatgatacaggcccttgctgcaaggcctgggggaccaccatacctgaggattactggtatagatgactcgaattctgcccatgcccgaggtggtggactggatatagtcggacggcggttattcaatattgcccagtcatgtggtctgccctttgagttcaatgctgtcccagcagctagtcatgaggttatgcttgaacatcttgatataagatctggggaggttattgttgttaattttgcctaccagctgcatcacactcctgatgagagtgtgggcatagaaaatcaccgggacaggatattgagaatggtcaaggggctctctccaagggtggtaactcttgtagaacaggaagcaaacacaaacactgcacctttcttcaatagatacttggaaactcttgattattacacagctatgtttgaagctatagatgttgcttgcccaagggatgacaagaagcggattagcactgagcaacactgtgttgcaagagatattgttaatttgattgcatgtgaaggtgcagaaagggtggagaggcacgagccttttggaaaatggagggcaaggctttcaatggctggctttaggccgtacccactaagtgcactggtgaacaacactatcaaaaagttgctggatagttaccacagttactacaagctagaggagagagatggtgccctttatcttggatggaagaacagaaagctggttgtatcttctgcatggcggtgaagtgctcaagttaatttggaagaagcttctttaggttctttcgtggcttcttggtggacgcatgaatccaaggtggaacctgatcttcatagagcagagagaactccatagtccagaacaatgtggtcgcttgcttgttggcacccatctctaaaccctcgtatgcttaccatccgtcagatttaatcgccataggcagaatactcttcctgacttcccatagtccagtccagtcgcaatataggtgtacactgtactgttttacctgctcatggtagaatgtccgttttatgtcgatcagtcaagtagagtctggtcaccagaatccccgtcttaatagaacgtctgttttaaaagtcagtcaagaagagagtctggtcaccagagtccgtttcttgatcctgctcgttgtacaatacaatgacgtctcaatgtgaattctggatcctatgctactacaaaaaaaaaaaaatcactgaattctggatcaaaaaaaaaaaaaaaa

SEQ ID NO: 22200 - DNA, 711 bp, Oryza sativa
  Clone ID: TF_OsC364882_1
ttatctctctcttttcttatccccttcggctgcggcggtgacgggcgggatgatgggtgctggagctgtggcggcggcgagcgggcgagggctggagcggtggcaacggcgggcaggttgcaaattcaaccgtgcggcatcttggatgacgatgatgatgctggcaagtagcaacaatctcacagtgaacaacgcaagctgattaatgcagttctccactccaatgatccaatccaaacaaactacgaccgagtgtggtggcggcgcgccgccgccggccgccacgcagagatggcgcaaagcggcctcttgtgccagcagaagaaaaaggcatggccgtacgaccccaccggctccatgccgtccgctttcatccgcgccgcccactgccgcgcccgctcgtgccgctccaccagctccaccccctcgcacgccaccacgccacgaatctcctccccgagcagcacgcgctcctctcttggtgcttgtgctcccctcgtttgcaggatgacccaggtgcggcgccggctccggcggattacccgctcccccgccctcgagtgcggccaaccccgagttcccgacatggtccatggctcgcgcaggcgggattttggggagccaaggaagaggaggggaatcggccgacgccccgctctggccctcgccagctcgccgccgccgccactccagtacacgtcgctgccatag

SEQ ID NO: 22201 - DNA, 3181 bp, Oryza sativa
  Clone ID: TF_OsC56535_1
tcatccggaggaagtgtcttgtgattggcgcacccatgcggagtgagcaaagaggattcgtcccatccatccctgcagcagccactgcccgtcctctcccagcagaaagtccttgtgatggtacttgttcacctcgtccctgattgtatcaacgatatctggtctcagtttcagctgctgcatgcctgcacggtggttcctggcctgccactgtttgtacttctcagggcgctccaccaggtctgcaccctcacaggcgatggcgttgagggcgtaaggccccagaacgttctgctccagcgccagccgcagcccactatcccttggggtggtcgcgtccagcatgtcaaacagagccgagtaatacaagagcgctccacgaaagcgtgacaggaaggaggcaccatagccaccattgatgatgccttggatgaacacgtctggctgcatcttgctgatgttacggagggcaacatccctggggtttggcccatcgcagaagatactctcgtccatcagagcactgaaactccagaggtcattcaccacaagcacctcatcaggctcgatgtgcaggtcctcggcaccaaccgtctcccactttgctgctacaacagcttggaatctgaatggcacgcggaactcattggcacagctgctcaggcaatgccctgcctcctcaatacgctgaaatggacgaaacgccggctgggggatgtcaacgatggtgatcctcacctccggcggcccgtcttccctgcttcccagccggcggagcaggtctggccagtgcagcccacagcgcgggccgtaatcaactatgtgcagcctcttcttcccttgcacagcttgcatgattgtcatggcggcaaacatgagtgccaccttcgtgaagcagcaggctgccatgtagagcttgtacaccttgaggtactccaccaacgacatgcgcatctgattctgatacagatgcttccctctgccagctagccgtgcctcaagccccttggcgaagtagtgagccactcgctgcatggcgtcgcctgttgccaaagcgtgctgcttgatcttcttcagcagctcgcctgcagattgctggttgtctgtcgccatggcctgtgcacactggatcagcagcaaccgtaagtccaccaccttgctactactgcctttcttgcccttcttgttgatcgtcttctctgcctcattgtccatgtcgatgcgcagcttctccatgtctttgatgcatgtctcgtgcgcgtgcagcatcagttcgtccagcaactcgcgagcaccagcctcctccgtccctgcattcgtcatggcagctaatttactgctcctccccagttcctcctccagctgctgctcgtccctgtcatggtttttcttctttcctcccctacaatgaccatcacttgatacttgatccaccgtctccagcgttctgaagctgttgtttctgggcagcaacttgctggcctctcccatgcccttcgagaacgccctaaccacttcactgcccggcaacatattgttggcctcctctgtgctgcccctgttgacacactgcaagttggtgacagcagcagaagaacccatctcatcctccatgagcatacgagtgacgtaggagagaagttggttgtccaacaatgacgagggatctgtactgccatcactgttggcgaggggtgttgcggggaggtcaaagaagacaggtggtggggatggtgcttcgttctccttgaggagggcctcccaaaagaaatcctctgggttggccatgctgataatcattcaatggtggtagcctttgctcttgctcgtcatatcatgagtttatatttgtcccaacatgatagaatcctaagtatttctgagaaaaaagaatcgtcattatatttttcaacattaatttacctaaaagctggtgttgggcaacccgagtacaccaggattagatcaagagtcccttcaaggggatatatccgccgttgtagagggaatgctgacagggggaactggactagtcatgtgctacccatgttgagtgggcacaagaggatgcggcccttccagccctgaagaagccactattgatcctcctccatgacaaactctttgtggtagtggttcttaaccatcataactttctccctgttcaagggcacctgcctcaacccgaattaaatttgaaaatatattgtttcatttattttttccccaaaaccagcccaaacgtaacatccagcaggtcgaactgcgccgcgtagtagtagagagcctcccggaagcgtgtcaggaagtaggtcgcgccgtaggctccgttcatgatgccatggatgaacacgtcggggcgcatcctgcggatgttccccagcacctcgtccctggggctcctgctgctgtcctcctgcaggctctcgtccatcacgttcctgaaatggcacaggctgatcaccaccaccacctcgtcttcctccgcctcgcccagctcctcccgcctcacgctctccttcttcgtcgccgcgatgccgtggaacttgaacggcacgccgagctcgtcggcgtacctgctcagccgccgcccggtctcctcgatgtgttggtcagggcggaatcccggctgaggtaggtcaatgccggtgatcctcacctccggtgggccgcctctccgtgccgcgagctcgcgcagcaacccaggccactggaacccgtagctgaggccgtagtcgacgatatgcagcttgcgcctcccggcgacggcgtcgtagatggtcttgttggagaagacgaaggccaccttcttgcagcagcaggcttccatgtacagccggtacgccttgaggaagtcgaccacggaggtgcgctgcgacatgagcgactggtacacctggctccccgtgccggcgagccgggcctccagcccttgcgcgaagcagtgcgccagcctctgtccggcgtctccccacgccgacgagtgctgcttgatctgcctcagcagctcgtgcgcgctccggcggtcgtccgtggccaccgcctgcgcgcagtggagcagcaggttgtgcaggtccaccggctcggtgtggatcacagtgcgtctcccccgcgccttcttgctgctgctgctcttggacttgaggctcagctgcttcacccccttcatgcaaatctcgtg

SEQ ID NO: 22202 - DNA, 1245 bp, Oryza sativa; identical to SEQ ID NO: 12835
  Clone ID: TF_OsC220696_1

SEQ ID NO: 22203 - DNA, 1575 bp, Oryza sativa; identical to SEQ ID NO: 12828
  Clone ID: TF_OsC98324_1

SEQ ID NO: 22204 - DNA, 1735 bp, Oryza sativa
  Clone ID: TF_OsC1713_5478
tcagatatccaaatatgatatctggagtactagtatgaagaacatgaagaataagtagaatccacagtggctgcaggctgcagctatgcggttaccgtggaaagcaaagcagggacgcttttgaggttggagctcccaactttggcagaagtttggtggaatttggaaacgccacgccaccggctgccgattccgtggaatttccgacaaggtgagctcgatcttggccgcttcttccgacacgttgaaattgctacgcccaaagttgaattcttgaagccgtcgcagccgaggccctgcgccacccgccgcgcctggagcagcgcgtagtagctgagcgggacgcggccgaagccggcgccctccagccgccgcgcccaccggttccagccgctcgtgccgctcccgccgctcgccgccgtcgcacgccacgatgttcttgatctcctccccgagcagccaccgttccacgcgcgcgcgctccaccgacccgcgcgccgcccccacctccaggcagtcgaacagcgccgcgtagtagttgagcgcctccacgaacctctccgtcagccccgccgcgttgtggctcgcctcctgctccgccaccaccatcaccttcggcgacagcccccacagcgcgcccaggaacgcgtccgcgcgcgacgtcgacggcgacagcccggactccgggctccgcctctccttgtcgccgcccgccacggcggcggcgtcgtcgtcggacgccaggaggcagtgcagctggaggctggagcagatggcgagggcctcgccggtcttcacgcggagggactccacgtcgagggcgtcgaggcgggacaccaccgggttgaactggaacggcacgtcgaggcgctctgcttctttcgtgagcgccatggctgtctgggtgaggagttccttgtgctcgtgcaccgacgtgaggcgcaggtgcggcgggccctcggggcgcgcggcgaggaggtggaggagctccagccattgcgtggcgtcggcgccgccgaggtcgatgacgtgcacgatcttctcggactccatggcctccagtatcgactggttggcggcggcgccggcgaggcggaggaacgggcagaggtcgaggaagtggcggcgcgcggcagcgacctcggccggcgtgggcgacgcgcggggcaggagcagcgcgcggcacagcccaggccacgccctcagcgcgcgccgcgccagcgcctccgcgaaggcggccgccacgcgctgcatggcgtccccgtcgggcgccgccagcgacgcgatgtgctcgagcgcggcgttcgcagcatcaagccgcccggccgccgccgccgcggcgcagttgagcaggagatggatgaggcacagcccgcgctcgtcggaacgcagctcccgcaccatccatggcggcgtgggcgacgccgccgcggccgggtggagcggcatgttggagaagttgtggagcggggaggatgtcaccgacgacgacgagccttcgtcctggaccatcagcctcgccagcgctacccccccaaaccttgaaatacaaaaaagctacaacctttgatccaatcgattctacgagcacgggcgcatttgaggttttgtgatgagtggagcccgcgaggtgagggtgcaaaaggctgcgagctctgcctcaaggaggagcagcagcagcgtccctagtccgtcccaagagaagagagaggatttcacaatctttcccggccgg

SEQ ID NO: 22205 - DNA, 2023 bp, Oryza sativa
  Clone ID: TF_OsC1517_1452
atgattggtgacactatgaagagctatgacgtcgcatgcacgcgtcgtagcttggatctctagagcggccgcagcgagatgttcgacgaaataatgttcaacgggtacgaggtgatcatgaaagggatggaggagctgcgcgtcgccatggacagcgaggccgagaagaaggcccggaacggcggcggggccggccggagggcggcgcgcgcaaaggcgggggtggtcgacctacacaccctgctcatccactgcgcgcaggcggtggcgacgagcgaccggcggagcgccaccgagctgctgaagcagatcaagcagaactcgtcggcgagaggggacgcgacgcagaggctggcgtgctgcttcgccgaggggctggaggcgcggctggccggcacggggagccaggtgtacaagtcgctcgttgcgaagtgcacgtcgacggtggacttcctcaaggcgtacaagctgttcgcggggctgctgcatcaagaaggtgagcttcatcttctccaacaagaccatcctggacgccgtggcggggaagcgcaagctgacatcgtggactacggcctcagctacggattccagtggccaggtctgttcaagtgtctgtcggagagggaaggcgggccgccggaggtgaggattacgggcatcgacttcccgcagccggggttccggccagccgaccagatcgaggagacaggccggcggctgagcaactgcgcgcgccaattcggcgtgccattcaggttccaagccattgctgcaaagtgggagacggtccgccgcgaggacctccacctcgaccgagaagaagaagaagaagaagaagaagaggtgctcgtggtgaactgcctccacttcttgaacgccctgcaggacgagagcgtggttgtggacagcccgagccccagagacatggtgctcaacaacatccgcgacatgaggcctcacgtgttcgtccagtgcgtcgtcaatggcgcgtacggcgcgcccttcttcctgacgcgcttcagggagacgctcttcttctactcgtcgcagttcgacatgctggacgccaccatcccgcgcgacaacgacgagcggctgctcatcgagcgagaacttcatttttttttttgctactatagtttaggcctgtgtgctcttctgtttgctgacaatctactatagtgccgaaaccctaaaactcatcgtagccggcttgctcctggaagaactcctcatcagcaggatccgcttcatcttcttcagcaactgagggggggggatatttatatagagcaaggtttgttaacctctgcagagggggtacactttacccacacgacattacaaacccgggtcacccagcccgtggggatcaaccacgtcgggagacctccaagctttcatgacaaggcatttcgaaagccgacacaggtttaccatatgccgacgagaggggtcccagaccaacaacagttttacccaagttgtttttcagattttaagtttgaaggcgtccgtcgatactcgcacagggtgcacgaatatcgagacgcaactagatggttacaaggggacatggctgagctggcgccgacgtggcgcctacgtggctgccacgtgggccggcgggaggtagacgacgacgccggccggaacggacgggcggacaacagcggcgagcggcggagcgaaccacggcgatacaggcgaaagcgagcacaccgggtggttgcacgagacgaggggagacgagccaacggctcggattcgcctgaggaagcttgacggcggcaaatcgcggcggcggcaactggcggggagggaagagggaaacggcgacgaggtcacgaggggccgattcccggcggtgagagcatctacgcggctacgggaatccgatgctagcgtcggattgggcggagctacgccgagcgaggctggcgacgagcgggtgctacggagctcgagcggcgacggcggcgagcacacggcgagcgacggcaacggtcggggcggcgccggc

SEQ ID NO: 22206 - DNA, 3723 bp, Oryza sativa
  unsure (1)..(3723): unsure at all n locations
  Clone ID: TF_OsC1321_1
tttgagtctcaccacacagaggataggagaggagagagggaccgtagcaagaggagtattagtagaggagagcagagagccgaggacttggccaggagagagaaggggtagggggagaccgggagagaggttgcagcagaggcagagccaactgcacaaggcaaggggcacgcagccacgcagtgctcctgcttgccctgcccctgcccacccccacctcctcgctgttctactgctgctctactctggctggcaacgcatcgcgtcgcgcgcccaagcaaaggctccatcaaacacacaccaagaaagaagaagaaaaaaaaatcccccgccacgccgggctgctccagatctctcagccgcgcgcgcgattatgtgggattaggtagatgagggcggcgctgttcggtgccgagaggagcggggtagtggaccacggcggcggcgataaggaggagctgttttggccggcggggaagggggggctggtggtggtggagccgaggtcggtgctggactgcacgcgcagcccgagcccgccgtattccacgtcgacgctgtcgtcgtccctgggcggcggctcggcggactcgaccggtgtggcggcggtttcggagagcagcaccgccgccgccggagccaccaaatggggagccccaggcgagcatggtggcggcgggaaggaggagtggggcggcgggtgcgagttgcccccgatacctggagcactggatgtggggctcgtcgggggcgagggctgggacgccacggccacgctcggcaacgcagccgggccggaccagtcgttcttgaactggatcattggggccgccggcgacctggagcagcctggtccgccgcttccagtgctccagcagccgcttattgacaatgcggggttcgggatcccggccgtggacaccatgggcttctctctggatcaccccctcagcggcgtcgcctccgacctctcgtcctccggtgcgcacactgccaccggcggtggcggcaaggcctcattagggttcggtctcttctcgccggaggccacctccctcgagcagccgccgccttcgatgctgtttcacgaaggtatcgacacgaagccccctcttctgggtgcgcagccgcaatttctcctgaaccactaccaaccccagccacccaaccccgccgcagccttgttcatgcctctcccgcccttccccgagcacaatcaccagtcgccgcatctccagccaccgctcaaacgccaccacgccattccagatgacctctacctcgcccgtaaccagcagcagtcatccgcggtggcgccaggtctcgcctattcaccaccgctacatggcccggctccgttccagctccatccttcgccgccaccgattcgcggggcgatgaagtcgacggcggcggaggcggcgcagcagcagctgctggacgagttggcagcggcggcaaaggcaaccgaggctggcaattccgttggcgcgcgagagatattggcgcggctcaatcaacagcttccccaacttgggaagcccttcctccgctccgcctcctacctcaaggaggccctcctcctcgcactcgccgacagccaccatggctcctccggcgtcacctcgccgctcgacgttgccctcaagcttgcagcatacaagtctttctctgacctgtcacctgtgctccagttcactaactttaccgcaacacaggcgcttcttgatgagattggtggcatggcaacttcctgcatccatgtcattgactttgatctcggtgttggtggtcagtgggcttccttcttgcaggagcttgcccaccgccggggagctggaggtatggccttgccgttgttgaagctcacggctttcatgtcgactgcttctcaccatccactggagctgcaccttacccaggataacctctctcagtttgccgcagagctcagaattcctttcgaattcaatgccgtcagtcttgatgcattcaatcctgcggagatagatttcttcctctggtgatgaagttgttgctgttagcctccctgttggcggttgcggtcgtgcaccagcgctcccagcgattcttcggtttgtcaaacagctttgtcctaaggttgtcgggcctattgttcatggaggtgttcgagcggaccttccagtctcgcagcacttccagtattgtttcgagtcttgcgggttcctggctgactcgcttgatgctgctggtattgatgctgattctgcctgcaagatcgagaggttcctaattcaaccaagagttgaggatgcagtgattgggcggcacaaggcgcagaaagctatagcatggaggagcgtttttgcagcaactgggtttaagcccgttcagctcagcaacctcgccgaggcacaggcagactgcctcctgaagcgggtgcaggtccgaggattccatgtggagaaacgcggagctgctcttacgctctactggcagcgtggggagcttgtatccatatcatcttggcggtgctgatcagccataagcttcactccaccaaggttccaccaccgtttgcaagcatcaaccactccagtaatgtccatttattcttgcaattaaatgttgcaaatgaaattgttgtcttgagctgttgaactcttcatattgcttttcgttgcagcttattagctagcctagtggatttagggtaatagttggttgtcagtctctctagctaatgatgttgctttaggttgttgccatagccatgtcaaggaagtagttttttctcatcgagctcgggtttaagcctgttccccccagcaaccattgccgaggcacaggcagactgcctcctgaagcgagtgcaggtccgaggattccatgtggagaagtgcggagctgctctcacgctctactggcagcgtggtgagcttgtctccatatcatcatggcggtgctgatcagccataagcttcaccccaccaatgttccaccagcgcttgcaagcattgtcaactccagtaatgtgcattttgttttgcaattaaatgttgcaacggaaattgttgtctcaagttgttgaacacctcatattgcttttcatcacagcttattagctaggcctagtggatttagcaatatcggtgtcaatctctgtagttaatgatgctgctttaggttcttaccatgctctgctctattagccattatcatcaaattcaagacactgctgatgagtagagaggataatttgacctatcaaatggttctgtggtacagaattgatatttgcttgctgttgctgtgttatcggagactagaacaccgaggagcgcccgcgggccgagccccggctgcccggggcccgggggtgggggggcggggcagggcgggggggaagggggcggcggtgggtgcgtgaagtgagtatggggcgactgggagccgtcggcgtggccgcccgcgcgtcccccggcgttggtgggtggaggcgtgggggtcgtcgatgcggagagggaaggggtgtcggtgattaggagtgggtggagaagagacgggcgcggcgtgggtgagagagcgtatgggcgaggagntggtcgcgaggtgccgcgggggaggccaaccgggcaagggtggcgggcggcgcgaaggctgggggcgcgttgcttcacgaagggacgtgggcaatggagcgctctaggtctgcgcgtgctgatcgagagctggtgtgag

SEQ ID NO: 22207 - DNA, 2835 bp, Oryza sativa; identical to SEQ ID NO: 12844
  Clone ID: TF_OsC112554_1

SEQ ID NO: 22208 - DNA, 2247 bp, Oryza sativa
  Clone ID: TF_OsC48106_1
gggaacgaatgatgaagcctatacgattatattacaagcttaatcatcggccaaaatactactcacaggaggaagaacgatcgaatgaagtagctagcagaaagaggataatgaatatgaccaagaaaagctgcgacaggtgaatcgacctggctgctactgcgatcatgtgatcaagaatcgtggctttcatggggggtatcgccggcgacggcgacgtcggcgtcggcgtcgccgtctgtcggctcccacgacgaggcggtgagcagggacaggtccttccacccgagcttgaggcagccgtcctcttcgacgagagtgtagcccttccatgggtacatgccaagaagcagcctcgcctgcgcggcggggctgccggccagggtcaccggccggaaccccgctcgccgcagctcgtcgccccaccgctcgacgcgcacctcgccggtgcgcttggggcccccgacggcgacgatgttccgtatctccgcgccgaggagctgacgctccaccgcgtgccgctccgccgcctcctcctcggcggcccccgcgccgtcgcccagcgcgtcgaacagcgccgagtagtagtgcagcgcctccacgaagcggcccaggaagtcgccgctgtggccgaggtcctgctccacgatggtgatcagcttcggccggaggctcttgagcaggcgcaccgtgccggcgtcggagcccgtcacgtcgtagaggcagtggtgcatccagtgcacaacggtggcctccccgtggtggcgcgggccgaggagcgcggcggcgtcggcgacgtgcccgatcttcccctcgatgggccggaactcgaagggcaagccgagcgacgcggcgaagtcggcgaggcggcggccggtggcctcgaggacgtcgagcgacgcgccgaggccggtgatccggagcgagcgcggcttggtggggcgggaggcgaggatgtggaagaggcccggccactgcagcccctgcatgatgtcgaggtcgatcacgtggacgcggtcctcgccgtcgagcgcctggaagatggcctggttggccgtgaagtgcgagaacttgacgagcggcgacagcgcgttgtacgcctggaacgcgccggagatgcggcggctctgcgcggcggcgagcgggcggagcgccagcggcgagtaggcccccaggtaggagctcagcacgcgcgcgcacagcgcgtccccgaagtaggccgcgacgcgctcgggcgacgacccgaacggcgacgccagctcggcgatctccggcagcaggtcccgcgcctccggcagctggtccatcgccaccgcctccgcacacctcagcaacaaactaagcagccgcagcccacgcgtctccgccgccgcctcctcctcctcccccgtacgctggcgcgcgcgggagggggaggccgcctgtgcggtttgtcgggttgctggtagctgctctcgcgtcccgtagcgggcggcgcccaggcagagggaatcaaaggacgggaccggtttttttttctactacacaataacacccgatttttctcacgatcgcgcgatggcgagggacgctaggtcgggtcgggtcggcagcagcaggaggccgtgggggaaagctgcacgcacacgagacgacgggggtgagttgatggacagcatgtgatcatttgatggtggaagagacgagcagagcagcgggcgagcgagcgcgaacagtgcgggggacgaggggacggacaaaacctccccctcggataccagcgatcgatcggtggccgttgcggaccccgctgaggcaaactgccgacgccgacgccgtcagtggagctgtgggcggtcttctccttgtccggcgacggggtgtccggcaccgcgggtggaggcgatgaggcggggttcttggagcagcggaggaggcggtggttgccccagctgaggttggggaacgagaaacgatggagctgcgtgcgcgatggcggcggcgtcctcgctctccccgttccctccccgccaggcccccgcgacggcggtggcgtccttgctccctccgtcccctccccgcggctgcggcggcggctgctgctcggcctcgagcgggctttgcccgagcggttgctcgccgctctcgttggctcgggctgcgcagaacgacggggcgaggcggagcgagtggtggaacgggagcgggaggaggcgggtggaggtggtgaagaggatgaggcggtgggggggggggggggggagtaag

SEQ ID NO: 22209 - DNA, 2278 bp, Oryza sativa
  Clone ID: TF_OsC84233_1
acgaatgcgccccaccaccaccagcaccaccacctgcttcctccgcggctgcgtgcgccgcctccccaacccttcgtcctccccgccggccgccgctgagatccgacgcgccggagcggagctcgctgagattttgttcctgctggatttctgaaattttactggaggactagagatatcaagacaccaacaacaaactagtacaaagttttccttccagttaatctgttcctggatctccttgccatacgcgaagcagtggatactatgcagtaattggttaggaggtctttactgaaccataatggctgatactccaacttcccgaatgattcatcccttcagcaatataccgagccaaaacctgaagcagttccagtattctgataatccacagcacccttgccacccttatagggcaccttcagacacccacgttgtgccacatcattatggcctaaagtcacattcaccggatgctggttatgaaagccaggctactcctaacaagtacacattggactcctctgaaggtgctggttgtatgagacatgattctccttccagtcaaagtttcacaaccagaagtggtagccctctatctcaggaagacagccactctgactcgactgatggatctcctgtaggcgcctcctgtgtcactgaggatcctaatgatctgaagcaaaaactgaaggatctcgaggccgttatgcttgggccagactcggaaatagtcaacagccttgagaattcggtggcaaaccaactttccttggagccggagaagtgggtgcgcatgatgggcattcctagaggcaacttgaaagagctactgattgcctgtgctagagctgtggaagagaagaatagctttgctattgatatgatgattccagagctgagaaaaatagtttcggtatctggtgagccacttgagaggttgggagcctacatggtagaagggcttgttgccaggcttgcctcctctggcatttcaatctacaaagctttgaaatgcaaggaaccaaagagctctgaccttctgtcttacatgcacttcctgtatgaggcctgtccctacttcaagtttgggtatatgtcggcaaatggtgctattgcagaggctgtcaagggagaagacaggattcatatcatcgacttccatatctctcaaggggctcagtggatctctctccttcaggcccttgcagccaggcctggtggaccaccaactgtaaggatcactggtattgatgactcagtgtcagcttacgcacgaggcggcgggctagagctggtcggaaggaggctgtcgcacatcgccagcctgtgcaaggtgccctttgaattccacccacttgctatctccggcagcaaggtggaggcagcacatctcggagtcatccccggggaagccctcgccgtgaacttcaccctggagctgcaccacattccagacgagtcggtgagcacggcgaaccaccgtgaccgcctcctaaggatggtgaagagcctgtcgccgaaggtactcaccctggtggagatggagtccaacacgaacacggcgccattcccgcagaggttcgcggagacgctggactactacaccgccatcttcgagtccatcgacctgacgctgccgagggacgacagggagaggatcaacatggagcagcactgcctcgcgagggagatcgtcaacctcatcgcgtgcgagggggaggagagggcggagcggtacgagcccttcggcaagtggaaggcgcgcctcaccatggccgggttcaggccgtcgccgctcagctcgctggtgaacgccaccatcaggacgctgctgcagagctactcggacaactacaagctcgccgagagggatggggcgctctacctcgggtggaagagcaggcccctggtggtctcgtcggcgtggcactagcgttgtgactttgtgaggtgatctgacgacgaacttcccttgtaaccatcttggctgggggctttagaaagctatagtgatcatggactggtaagggtagctgtaacaatggtgttgtaatggtaaggtagcggctagggtcaaactcgaaaatgggcaaaatgctgatgaggtgtagaagtgtagtacatgtttgagagtatatgtttcagtttttcttttaaaaaaaaaaaaaaaatgttgtggcacactaatgtctatgatcagaattatcatccactataagctaaaatatccattggaatcctgccggggcctcgtgccgaattcctgcagccc

SEQ ID NO: 22210 - DNA, 3069 bp, Oryza sativa
  Clone ID: TF_OsC54001_3
atggagagcgagctaggagcgctgtcgcacgtgcggcaggcagcgggcgcgcccgccgaggcggccgcatccgaggcgactacgtcctcgcccaccatcgggatcatccaccagatcttgaacctgaacagggacaaccacttccaccccctgcgcacccaacaagagaacgaacccatcacaaaatcagcaccaccggcggcggcgcacatcgcagtctctcctatgggattgcctgttatggagcatcttggaagctcaagcattgtgcgtgggagaggcaagaacaagaggatttggacgtactttgaggatgaggagctgatcaaggcattgttcgagattgctttggatccaagctggaaatcagaagggggtttcaaaaatggatactgccaagttctagagaacgtgcttgctaagaagttgccaagttctggccttactgctgttccgcacatagagtcgagagtaagacactttaggaccaagtttggcgcaattgaagtgatgctaaccaaaagtggcttttcttgggatgacaatagaaagatgatacaatgtgagaaacaacaatacgatgatcattgcaggaaaaacaatgaggcaaagggtctatatggtgtagcattccctcactatgatacactagctgcaatttatggtaaagacattgctactggagaaggtgcagagggtcttggtgaggctgttgctaatatggagaaagaaattgttcaagatattcaagatgaagaagatgaggaggatgaagagagagtgtctagagaaacgcctcggcggagcatcgattcagctgcagctcgacggagcatcgattcagctgcagctcgacggagcatcgattcagccacacctcgacggagcattgattcaactgcttcaagctctaagaagaggaagaaagacagcaacaaactgaaaaataccttgtcaagtgacccttttatggatgtctttgccaatgttcaaggtgatctgagggatgttacaaagcatgtgggagcaatggtggcatctatgcaacgtgaagctgagatccaagagaaggcaatggctgaggaggacccactacaaaaaattcagaacgaagctattcttgagtgtcaaaagattggattgactggtactgaagttgtcaatgctgcagctgcttttgtaaaagtgccggctcaaatgagtatgcttctcgctcttccagagtctctcaggagggagtacgtactgaaaatacttgctgaggatctgtctgaatccgccgacgatgcggtcctagcatacatcaatcagtttcttcttgaagatgaggaagatgaatcttgtcctggcaccatcacatcggtggaggactctgccctcctcgccgtcgagaagccattcgttgacatcctcactgctagccaagaggcctgtcaagagaattcttggatagattcttgttgtgatttcacggggaatggaggattgcttgatacgttcacaaccacacatgccgcttgccagccagcgccttgtgaatttgagaaggagaagggggagtgtgctgttcataaaggccggaagaacccgcatgatgattgcctattgttcgaggaagagagcaggaggagcaagcagttggcagtgtctgaggaggagactgtcagagagatgtttgacaaggtgcttctgtgtaatggcgaatgcgagctccgggcaccactgccagctgaagcacggaactgcggggtgtacgtgaaaggatctggaaataagagaggccgaaagaaaggaaaatctggagcatctgcagaggatgatgcggttgatctcactaccctactcattcattgtgcccaggccgctgcaatcgatgatcaccggaactccaatgagttgctgaaacaaattaggcagcgttcttctgcatatggagatgccggtcagaggttagcacattgttttgctaatgcgttggaggctcggctagctggcactggcagcaacatttaccgttcacttgctgccaagcgaacttctgtttatgacatattgaatgcattcaagctgtatgttacagcatgcccgttcaagaaaatatcgaacttcttctcgatcgaagccatcttgaacgcatccaagggtatgacaaggttgcacattgttgactatggtatacagtatggattccagtggccaatcttcttccagcggatctcgaagagacctggtggccctccaagtgttcgaatcaccggtgttgacttaccacagccgggattccgccctgcacaactcattgaggcgacgggccgtcggttgcatgactatgcccgtatgttcaatgttccatttgaataccatgctattgctgccaagtgggacactatccgtgtcgaagatcttaagatagacaaagacaaggatgaacttcttgttgttaactgccttttccggatgagaaacatgatggacgaaatggtgacagatgacagcccaagaatgcaggttctgaagacaataagaaagatgaatccaaatttgttcatccatggcgttgtcaatggcacctacaatgcgcccttcttcgtgacacgattcaaggaggctttgttctactactcttcactttttgatatgcttgaaacaactgcttcacgggtcgacgaaaacaggctgctgatagaaagagatctcttcggccgggaagctcttaatgtggttgcttgtgagggcactgagagagtagaaagaccagagacgtacaagcaatggcaggtgaggaacatcagggcaggcttcaagcagctaccactgaaccaagagacggtgaagaaggcaagatacaaggtgaagaaatcctaccacagggatttcctagttgacgaagataacaaatggatgctgcaaggttggaaggggcgtatcatctttgctctttcagcatgggaaccaaactagactagcaaactgtaaatatgactaactcagctgatttcttctgtggaggtaccactccattagttatgtctgattcctatttcaatgaattttgacctatttctgggc

SEQ ID NO: 22211 - DNA, 2148 bp, Oryza sativa; identical to SEQ ID NO: 12852
  Clone ID: TF_OsC1321_2

SEQ ID NO: 22212 - DNA, 1771 bp, Oryza sativa
  Clone ID: TF_OsC340632_1
ttaagttctctttttttttatcagatcagtagctgtaacggagaagagttcgtcctcgacgccgtccgccgcgaacacctctgaactgatggtagcgcaagccgccaccgccgccgccaccaccaccgccgctgccaccaccgccgccgtgccgatgacgaatttccagctcttcgggtccatggtgccggttccggtggcgtccatggcgacggctactgctccggcagctgtggcagcagccgataatggtggccatggatcgtcgtcggcgtcacagaacgcctctggctcaggcgaaggacaaggcggcagcatgtccttgtccttgcaactgaggccgctcggctcaacgccgacggcggctgtggctgtctcggtgccacccatggctgcggcgccgatgatggctggtccagcagcagcagcgccagcgccggcgccgccgttggcgacgatggccgttgcccagaacgcctcgctcgcggcggtggcgagcgcgctggcggcgcacaggaggaaccaggccacgcaccgctccgccgcgctgcacggccacctccggcgctgcgccgaggcgctggccgcgtcgcggccggcggacgcggacgccgagctcgccagcatcgctcgcatggcgtcctcggacggcgacgccgtgcagcgcgtggccgcggcgttcgccgaggcgatggcccgggtggtgatccggccctggaggggcgtgtccgccgcgctcttcccctccgacgccggcgccgccggcgacgccctcaccgcgtgggaggccgagttcgcgcggcagagcttcctcaacctgtgcccgctgctccacctcgccgccgtcgccgtgaacgagatcatcctcgagacgacgaggaacgacaagttcatccacatcgtcgacctcggcggcatccaccacgcccactgggtggagctcctccagggcctcgccacgcgccgcgccgcggtccgcccatgcctccgcctcaccatcgtccacgagcacaagcacttcctcggccaggcggcgcaggtcctcgccgccgagtccgaccgccacggcgtgccgctcgacctccacatcgtcgagtccagcgtcgaggcgctcaagctggacgccctcggggtgaggagcgaccacgccgtggtcatcgtctccacgctccagctccaccgcctcgtcggcgccggcatcctcagcaccacggcgccgccgtcgccggcggcggcggcggcggccagcatgatcacctccccgctgccgccggcgaacatgtcgtcgaaggtggacaggctcctccgcggcttccacctgctgtcgccgagggccatcatcctgaccgagaacgaggccaaccacttcgtgccgtcgttcacggaccgcttcgcctcggcgctgccctactacgagcagctcttcgccgccatggaggaggcgggcgccgccacggtggagcggaaggcggcggagaggtacctcctcagggaggagatcaaggacgttattgcatgtgatcacgacgggccgcgctgggcgcggcacgagacgctggggaggtgggtcgtccggatgggcgccgccgggttcgcgctcgcgccggcgatcaccgtggtgacggcggcggggcgggtgagggcggtggcggcgcggcttcccggaggaggggatgagaggaggtatggggtgacggagggcggcgggtggctcatcctcaacagggaggagaagccaatgttctgcgtctctgcgtggaggaggcagtga

SEQ ID NO: 22213 - DNA, 2309 bp, Oryza sativa
  Clone ID: TF_OsC4431_1
gaatgatgaaagaatttgattgtaataataatgttgtataataacagccggagacactaatagtgactgtgagagatgctgcccctgctaatctatctactgcttctttgctttctttcttctacatgcagctacattttgcaggggactctctctcaacagccaaaagaatatttataaagaattacaatctaaaaattgaattgaatttgatttaattgaatctttccacctatcaatctataaaacaaaaaactacacctttctttcttctttcttttctctgaatgtataaaagaattgtcatactgtatgaactaatcatcattaacaaaagaagcactgtaaaaaaaggctttgttctttctttctcttcacctaatcaccattcatcgtcagcttagctttgctgagaatgtgatgctgttgtggacgccgacacggtgctgcctcccgcgccgtcgcccgccggcgtccacgccgtcacggtgtacagcggctggtccagccaccggagcgtgagcgcctcgccgccgccgctgccgccgccgccgtgcgcctgcacggtgtacttgtccggcccgaacatcctcgcgatcatgcgcccctgcatcgcctcgcgctcgccgatgccggcgttcttgaacccgccgccgtcctccatgcgccgccgccacccggcgaagctctcgtggcgctcgaaccgctcggggccctcgaacgccaccgcgttgcggatctcccgcgcgaacatctcctccgccttggccctcgcggggctcgcctccggcagccccgccgcgtccaccgcgtcgaacgccgcggcgtagtaccgcagcgcgcgcgcgaaccgcgcctcccacctccccgagttgaggccgccgccctcgtgctcgccgaggaggaggatggtggcgcccgtgctgcgcgctagccccaggaagtcggtcagcgcggcgtcgtcgcggagcaggcggtgcatggcgaggacgcagttcacggccacgcactcgccgcgcttgacgtggagcatccacaggcggacgtcctcgagccggtcgaccacggcgtggaactcgaacgccaggccgagcgcggcggcgacgcgcgccagccgcgctcccgtctcctgcagctcctgcctcgactcgccgactccggtgatccgcacgtgcgccggaggcaccgcccgcgcggccaggctctggagcaagcccggccattggagcccctgcttgatgtcgaagtcgatgacgtggacgcgctcgtgcccctcgaactcgcggaggaggcgctcgttgagcgtgaagtgcaggaacctcgggatgggcgtgatggcgttgagtatccgcagcgccatggcgtcgtcgtcgccgccgccgaaggcgtcgtcggtgagctcccgcggcgggccgatgtcgaacatgtgcggccacatgcgcacgacgcggagcgcgagcgcctcggtgaagtaggcggccacgcggtgcatcggcgtgggccccgccggcgaggccatctcgccgagccgggccaggtagtagttggcggcctcgtggttgccggcggagagggagtcggcgcacgcggtgagcgcgcgcaccagctccagcgcctcccgctccgcctgccccggcgccggcacgccgttcctcgcgtcgaactcgggcggctgcggcggcggcatcatcgccgacgagccgccgtccgtgcccgacgaggacgacgagtcggacggcgacttgctgtactcctccttcttggccgcggccagcgatggccccgcggcggccatgccgtgcgggaacgccgccgcgctcggcaccaagaagaccttctcctcctccgcctcctctccttctcccgccgccgtcgcttgcatcgtccctgcaatggattgatggaaccatacctcatcgccgtcgccgcccatccgcgtccgcttggcgcgaacaatggggccatactcctcgaccgcgtcctcgtcatgcgcccgcttaacggcgcggtgggcgccattgccattgccgccgggctccggcttggcgccccaggacacggactgggtgaccggcggcgcggggtgcgtccggaaggagcaggtggtggcgccgctcctggcgtcgccggcgacccgcggggcggcgccgtcgccgcggctgccgcgcttggagaagccgcaggggaggatgtcgaaacgctgcgcggtgctcatctgatgcctcgacgacgagaacgagcaacccgccaacatcccggagacacgtcactcgccggaacgcgacgtgcacctcagcccggggatccac

SEQ ID NO: 22214 - DNA, 1913 bp, Oryza sativa
  Clone ID: TF_OsC545_35
atggtccgcaagcgccccgcctccgacatggacctgccaccgccgcgccgccatgtcaccggcgacctgtccgatgtcacggccgccgcggcgccgtcgtctgccagcgcgcagctccccgcgctgcccacgcagctcccggcgttccaccacacggacatggacctcgccgcgcccgcgccgccgccgccgcagcagcaggtggcggcgggtgagggtgggccgcctagtacggcttgggtggatggtatcatccgtgacatcatcgccagcagcggcgccgcggtctccgtcgcgcagctcatccacaacgtgcgtgagatcatccgaccttgtaaccccgacctcgcgtccatcctcgagctccgcctccgctctctcctcacctccgaccctgcgccgccgccgccgccgccgccgtcgcatcctgctctcctccctcccgacgccacggcgccaccgccaccccccacgtcggtcgccgcgcttcctccccctccgccgccgcagcccgacaagcggcgccgcgagcctcagtgtcaggagcaggagcccaaccagccgcagtcgccgaagccccccaccgcggaggaaaccgccgccgctgccgcggccgccaaggagcggaaggaggagcagcggcggaagcagcgcgacgaggagggcctccacctgctgacgctgctgctccagtgcgcggagtcggtgaacgcggacaacctcgacgaggcgcaccgcgcgctgctggagatcgcggagcttgccacgccgttcggcacatccacgcagcgcgtcgccgcctacttcgcggaggccatgtcggcgcggctggtgagctcgtgcctggggctgtacgcgccgctccccaacccgtccccggcggcggcgcgtctccacgggcgcgtcgccgcggcgttccaggtgttcaacggcatcagcccgttcgtgaagttctcgcacttcacggcgaaccaggcgatccaggaggcgttcgagagggaggagagggtgcacatcatcgacctggacatcatgcaggggctccaatggccggggctgttccacatcctggcgtcgaggccgggggggccgccgagggtgaggctgaccgggctgggggcgtccatggaggcgctggaggcgacggggaagaggctatcggacttcgcggacacgctgggattgccattcgagttctgcccggtggctgacaaggccgggaatcttgacccggagaagctaggcgtcacgcgccgcgaggccgtcgccgtccactggctgcgccactccctctacgatgtcaccggctccgactccaacacgctctggctcatccagaggttggcgccaaaggttgtaacaatggtggagcaggatctgagccactcaggctccttcctggcacgttttgtggaggccatccactactattcggcactgttcgactcgcttgatgcgagttacagcgaggatagcccggagcggcatgtcgtggagcaacaactcttgtcacgggagatccgcaatgtgctagccgtgggcggtccagcacgcaccggcgatgttaagtttgggagctggcgcgagaagcttgcgcagtcgggcttccgtgtgtcgtcgcttgctggaagtgccgctgctcaggccgtgctgctgcttgggatgttcccttccgatgggtacacgctcattgaggagaatggcgccctgaagcttggatggaaggatctgtgccttctcactgcctctgcttggcgcccaattcaggcttcgggacgttagtactgagggggaatttatagagctgaagtatcacttgatcttacttaggtgcaattacctagtccttttgcttcttttagctgctcaatttggtcaattctgagaaaagaaaaataaaaaaaattctgatc

SEQ ID NO: 22215 - DNA, 1482 bp, Oryza sativa; identical to SEQ ID NO: 12847
  Clone ID: TF_OsC33690_2

SEQ ID NO: 22216 - DNA, 2045 bp, Oryza sativa
  Clone ID: TF_OsC305550_1
tgcaggattcggcacgaggcacaactagctagtttagatcccctttgcatccatcgatgatcagttgttgcatcgatgatcagttgttgcaggacagtgtagtgaggtgagaaagattgttgtagtagctgctgtgctgtatggtggtagccagtgagtagctactacactgcactgcagtttgcaccccggccatatgttggctactactactgcaggtgtcttaggtctagatggataccctcttcaggttggttagcctccaccaccatcaccaccaccagcacgcggcctcaccgtcgccgccggaccagccgcacaagtcgtacccctcctcgcgagggagcaccagctccccctcctcccaccacacccacaaccacacctactaccaccactcccactcccactacaacaataatagcaacaccaactactattaccagggtggtggaggcggcggcggagggtactactacgcggaggagcagcagccggcggcgtacctagaagaatgcggcaacggccaccagttttacatggatgaagacttctcctcctcgtcttcctcccgccagttccactcgggaacgggcgcgccgtcgtcggcgccggtgcctcctcctccgtcggcgacgacgtcgtccgcgggcgggcacgggctgtttgaggcggcggacttctcgttcccgcaggttgatatcagcctcgacttcggcggctctccggccgttccgtcgtcgtccggtgctggcgccggcgccggggcagcgccgtcgtcgtcggggaggtgggcggcgcagctgctgatggagtgcgcgcgcgcggtggcggggcgcgacagccagcgcgtgcagcagctcatgtggatgctcaacgagctggcctcgccgtacggcgacgtcgaccagaagctggcctcctacttcctgcagggcctcttcgcgcggctcaccacctccggcccgcgcacgctgcggacgctcgccaccgcgtcggaccggaacgcgtcgttcgactccacgcgccgcacggcgctcaagttccaggagctcagcccgtggacgccgttcgggcacgtcgccgccaacggcgccatactcgagtcgttcctggaggccgcggcggcgggcgccgccgcctcctcctcctcgtcgtcttcatcgtcgacgccgccgacgcggctgcacatcctcgacctgagcaacacgttctgcacgcagtggccgaccctcctggaggcgctggccacccggtcctcggacgacacgccgcacctgtccatcaccaccgtcgtgcccacggcggcgccgtcggcggccgcgcagcgcgtgatgcgggagatcgggcagcgcctcgagaagttcgcgcggctgatgggcgtcccgttcagcttccgcgccgtgcaccactcgggggacctggccgacctcgacctcgccgcgctggacctccgcgagggcggcgccaccgccgcgctcgccgtcaactgcgtaaacgcgctgcgcggggtcgcgcgggggcgcgacgcgttcgtggcgtcgctccggcgcctggagccgcgcgtggtcaccgtcgtggaggaggaggccgacctggcggcgccggaggcggacgcgtcgtcggaggccgacaccgacgccgcgttcgtcaaggtgttcggcgagggcctccgcttcttctcggcgtacatggactcgctggaggagagcttccccaagacaagcaacgagaggctgtcactggagagggcggtcggccgtgccatcgtcgacctcgtgtcatgcccggcctcccagtccgccgagcgccgggagaccgccgcgtcgtgggcgcggcgcatgcggtcggcggggttctcgccggcggcattcagcgaggacgtcgccgacgacgtgcggtcgcttctccggcggtacaaggagggctggtcgatgcgggacgccggcggtgccacggacgacgccgccggcgccgctgctgccggagcgttccttgcgtggaaggagcagcctgtcgtgtgggcgagcgcgtggaagccatga

SEQ ID NO: 22217 - DNA, 984 bp, Oryza sativa
  Clone ID: TF_OsC138508_1
actatagtttactattttctccacatactagtactccatatcagttctagcagtagtgcagtactttaaaagcgatcaagaaattacctgacgtagcaggctaatgacagctaaggtaaactgaggtgggtatgaacaggttcactactccttaccaaaggagaaaaacgctaaaaatagaagcttatcaatcgatttgatcacggcaataatgctgcatgcgggctcaccttgtggattaacgccaggcggatgcgacagtgacgacgcggcccatccacccgaccccgagccggccaccgtcgggcgtcccgtcgcgccccggccgcgcgggcccggcccgggccctctcgcggccgccgatgtcctccccgatcgccacggcgcggaaccccgccatgccgaaccgggcgcgccacttgccgaacacctcgcaccgctccacccggtccgggccctcccggcccaccgcgttggccaccttgctcgccagggccgcctcggcccgggttctgtccgcgctgtcccggcccagggtcgcgtccagcgactccagcacggcgccgtagtgcgcgctcgcgtcggagaagcgcgccgccatcggcgccgtgttcgtgttcagctcctgctccaccagggtcacgacccgcgggcccagcgcgcgcacgcgccggagtagctcgtcgcgcgggttcgccggcgacacgctctcgtcgggcacgcgcgacagcgtgaaggcgaggttcacggccagcgcctctcccggctcgcaccctagcttggatgcctcgatctccggtgctcggcagctgactgccctgaagcggaagtctatcccggcttgctgcgcgagcttcttgagccgctcgcatgtggccgcgagcgattgtgtcatcgccggggtgaatggcgaggtgggatccgccacgacggtgaccttgagggaagtggcgggcacgcgccggtcggcgagggctttggatg

SEQ ID NO: 22218 - DNA, 1752 bp, Oryza sativa; identical to SEQ ID NO: 12788
  Clone ID: TF_OsC1517_1409

SEQ ID NO: 22219 - DNA, 1482 bp, Oryza sativa; identical to SEQ ID NO: 12785
  Clone ID: TF_OsC180166_1

SEQ ID NO: 22220 - DNA, 2964 bp, Oryza sativa
  unsure (1)..(2964): unsure at all n locations
  Clone ID: TF_OsC545_17
atggcagcgcatacagtgacggacccactggaggagctatggaaccacacgatgtcgatggacaagacgcacctgatgtgcttctacccgagcaagatcaccatgggtggcgtctggacgggcgacaatccgctcgacttctccatacctctcctcctcttccagatcctcctcatcacctccaccacccgcgccgccaccctcctcctntntcctntccgtctccccacctacatctcccagatcctcgccggcttcctccttggcccctccgtccttggccacctccctcacttctccaacctcgtcttccccgtccgtagcctcttcgtccttgagtccatggcccttctcggcctcgtctactacaccttcatcgtcggcgtcgagatcgaggtctccgccatcacccgcgccggcatccgtagcttcggcttcgccattggctgcacgctcccgcccttcctcgtcggcgctctcaccggctacgtcgcgctcagcactgacgacaaacacaagggtgacacgttcctcaacaagctctccttccccatcttcctcggctccaccttctcctccaccgccttcgccgtcctcgcccgcaacatcgccgagctgaagcttgccggcaccgacgtcggccagctcacgctctctgcgtcactcatcaacgacaccttcgcctggaccggcctcaccgtcgccacggtgctcggccactcgcgctgcaccatcacgcagaccacgtggacgctcacgtcgggcgtcgtcatcttcggcgccagctacctcctgctccgccccatgctcctgcggctggcgaggcgcgccgccgagggggaggcggtcggcgaggaccgcgagtgctggattctgatcggcgtcatggtggcggcgctggtggcggacgcggggggcacgcacgccatattcggcgccttcgtgttcgggctcgcggtgcccaacgggccggtcggggtggcgctggtggagaaggtggaggacttcgtgcggcctccgcaccgacaccncaagatcaccaacatgcattctgccgtgttgctcatggtcgctgccatggtcgctgcggtcttgaaggtcgtcgccgcaatcggcgtcgccgaccaccaagaacaacaccacctcgccgcgcccatggtccgcaagcgccccgcctcggacatggacctgccaccgccgcgccgccatgtcaccggcgacctgtccgatgtcacggccgccgcggcgggcgcgccgacgttgtctgccagcgcgcagctccccgcgctgcccacgcagctcccggcgttccaccacacggacatggacctcgccgcgcccgcgccgccggcgccgcagcaggtggcggcgggtgagggtgggccgcccagcacggcttgggtggatggcatcatccgtgacatcatcgccagcagcggcgccgcggtctccgtcgcgcagctcatccacaacgtgcgtgagatcatccggccatgtaaccccgacctcgcgtccatcctcgagctccgcctccgctctctcctcaactccgaccccgcgccgccgccgccgccgccgtcgcatcctgctctcctccctcccgacgccacggcgccaccgccaccacccacgtcggtcgccgcgctccctccccctccgccagcgcagcccgacaagcggcgtcgcgagcctcagtgtcaggagcaggagcccaaccagccgcagtcgccgaagccccccaccgcggaggaaaccgccgccgccgccgcggccgccgcagcggcggctgccgcggccgccaaggagcgtaaggaggagcagcggcggaagcagcgcgacgaggagggcctccacttgctgacgctgctgctccagtgcgcggagtcggtgaacgcggacaacctggacgaggcgcaccgcgcgctgctggagatcgcggagctcgccacgccgttcggcacctcgacgcagcgcgtggcggcctacttcgcggaggccatgtcggcgcggctggtgagctcgtgcctggggctgtacgcgccgctcccgagcccgtccccggcgggcgcgcgggtccacgggcgcgtggcggcggcgttccaggtgttcaacgggatcagcccgttcgtgaagttctcgcacttcacggcgaaccaggcgatccaggaggcgttcgagagggaggagagggtgcacatcatcgacctggacatcatgcaggggctccaatggccggggctgttccacatcctggcgtcgcggccgggggggccgccgagggtgaggctgaccgggctgggggcgtccatggaggcgctggaggcgacggggaagaggctgtcggacttcgcggacacgctgggattgccgttcgagttctgcccggtggctgacaaggccgggaatctggacccggagaagctgggcgtcacgcgccgcgaggccgtcgccgtccactggctgcgccactccctctacgatgtcaccggctccgactccaacacgctctggctcatccagaggttggcgccaaaggttgtaacaatggtggagcaggatctgagccactcaggctccttcctggcacgttttgtggaggccatccactactattcggcactgttcgactcgcttgatgcgagttacagcgaggatagcccggagcggcatgtcgtggagcaacaactcttgtcgcgggagatccgcaatgtgctagccgtgggcggtccagcacgcaccggcgatgttaagtttgggagctggcgcgaaaagcttgcgcagtcgggcttccgtgtgtcgtcgcttgctggaagcgctgctgctcaggctgcactgctgcttgggatgttcccttccgatggatacacgcttattgaggagaatggcgctctgaagctcggatggaaggatctgtgccttctcactgcctctgcttggcgcccaattcaggcttcgggacgttag

SEQ ID NO: 22221 - DNA, 2255 bp, Oryza sativa
  Clone ID: TF_OsC4418_1
ttttccccgcgcttttttttttttttttttttttaggctcccaagatgataaatatggcatattctagcaacacataattttatacatgaagcagagtcgacaagataattctaccccagaatacaacacgatcacgtgccaattctctaatacaacatagttcaactaactcgattattctgacaagcagacatctacgattaggtaagatcagttgacaagttcagtggttcacattttttacagtctctgcatcagatgctcctaaataacagcaagactaatgccaactcattctgtaagctctattgccatgcggaggagacgattagagttttctctccccagccgaagtgaagtcccccatggtcctcctcgaacttgtatctgtcacagtacgacttcagtaacgatcttatcccgctgatgacattgctactaaatgggcatggtgtgaagccagccattgtcattcttgccctccattttccagcaacttcatatctctccacacgatcaggaccttcgcaagccaagatgttgacaatttcacgagcaagacattgccgctccacattcattctatccggactttcccttggaagtgtcgcgtccagtgaatcaaaaagtgcagcataataatcataaacctcacggaaccttgtctgaaatggagcagtattggtattggcatcctgctcaaccagtgtgacgagctttggttgcagacccttcaccattcgaaggagttggtccctttcattcataattgaaacgctctcgtcaggaaggtggtgcagctggaatgcaaaattgacaactagtgcttccccaggacaacaatctagcattgcaggtgtaacatccccaatgttagcaccaactgccctgaactcaaaagatatcccacagtcctctgcaagtttctctagacgttgaccaatgaccttcaaaccgccaacggtcctctgtaccgtttcaggatcatccacaccagttattctcaaatgacgtggcttatttgcattatttttcagaaactgtatcagtgtaatgtactggctgccctgattaatgtcaaagtctataatgtgcactctatcttcacctttgcaggcttcaagtatagcataattagcagccatgaaaccaaatcggaagcacgggcagatttcaaagaggatttgcattgccgaaagctgataaagagtcgggggctctttgcacgacaaggccttgtatatgcctttccctgaagctactattcttgctgcaagaccttccactagataggctgcaatcctctgagaagggtccccttggattgagaccatctgccggaggtccgttatgattgcctgtgcttcatctacattataatcagataatgccattgcacagtcaaagagcaactgctttggggtccgtggttctccattgttgctaccagcacaactgatgcttgattccgattcttttggtgagttagggagtatgacattcttcattggatcagcccattcatcgttaatgctacctgcctgggaaatctcatacaagatgtcatcactatcatcaagtaaagcatgctccagctcctgaagcttcatcctgatatcatcttcatcaaactctacttcaagttcagaactctgattgtctgatatagactgagaattctgctgagatacattggacaccaatggtgagtcttttgccacatctgagcaggaattgtctgcagaagatggagaatggccatcagctgttaccatgtacggcattggtgaggcctgttgattgtaaaaggagttctcaggattgtatggttcaggcccataacggaacagctgtgtgtcggacgcatatcttcgtgcagcgaaatttgaatttggagtgccaaatttatgtatgtaaagattatctgcgtaagtggttgacgggtctgctcgcctgataaaagacattacttttctgtagtgcttctaaacctactaggctaaatactcaaactcaaggcacagcttcctctgattatggatattgaacaaatacaggaggagggggtagcttgcttccggtagcacacacaggagagcggcaggagaggaggaggaggaggagcggagaaggcgaggaggggaagcggagaacggaaatgggaaggagagggagcaggagggaaggaaggaaaaggggaagaagagaagagaggagaagagatgggcctcgtccgaatcctgcagcccgggga

SEQ ID NO: 22222 - DNA, 941 bp, Oryza sativa
  unsure (1)..(941): unsure at all n locations
  Clone ID: TF_OsC152890_1
acggaattctatcagctccagaccaagccggttcgtgagaacctcccgtcgcaatcttcgtcgttcgcgtcttcgaacggcagcagtgttactttctcagaaggattcgagtcgttgctgagcccggctggtgtcttgcctgatgttagcctgaatgattttgttgtgcagaaccaacaggctttgcagttccgccgcgggtttcaagaggcaagcaagtttcttcctgatgagagcaagcttgtgattgatgtggataagctctacagtggagatgaggggagtaggttccttggtgaggttagacaagagaagaagcttgtgaaggtgaagacagaaacctctgatgttgaatcagcaggtcaccgaggaaagaagcatttctatggtgatgacctggatgcggaggaagggaggtgcagcaagcattccgcgcaagggattgacactgaccaccttgtgagggatttgatggacaaggtcttgctatgcaatggtgagacatgctcaaaaggtgttaaggagttgcgtgaggctctgcagcatgatgtggcgaaacattcaggcggaggccatggcaaagggtccagccatggcaagggtcgtggaaagaaacaacccaagaaggaggtggttgacctggagacccttctcatccattgtgctcagtctgtggccactgatgacaggcgcagtgcaactgagctcctgaagcagatcaggcagcatgctcatgccaatggtgatggtgatcagcgtttggcacactgcttcgccaacggcctcgaggcgaggctggcaggtactggtagtcaaatttaccaagaactacacgataactcggcttccatgcactgatgtgctgnaagcgtaccagctttatttggcagcttgcccatttaagaagatctctccattacttttgccnatcaaacaatttt

SEQ ID NO: 22223 - DNA, 2604 bp, Oryza sativa
  Clone ID: TF_OsC6079_1
ggctctctcctcctctcctcgatcgcacgcaccgcatctccgatccgcagcagcagcagcagcagcagccgcgaggccccggagccacgcgcatctcgctcgccgccggcgagaaggccccggtaaccggtgggccgcagagggggaaaaggttttggagggagcgacgccgcgtgcgtccccgtctcggctgggaccgaaccggaggtgtgccatttttggaggctatcgatgggtctggacaacaatttcggggagctatctggcatgttctgtggcttgtcctatgatggctacacggatcacggcagccagagcgattacttcaggttcgccgacccgcagccggcgatcgtgccccagatggacgccggacccagctccgccgcttcctccacggcgtcgagggccgccgtcagctcggggaccgacaacccagaggactgggagttcatctcggacgagtcgctcaactatatcagccgcatgctcatggaggaggacattgatgagaaggtcagcatgtaccaggaggagtccgcggcgctccgcgctgctgcgaagccattctatgacattcttgggcacaagttcccgccctcccctgaccgccagctggtagcttggcccctcgacagcccgagtgagagtagcactagcagctatccacactccttggctagttctgttactagcagcaacattagtggtgcggtcgatagcagccaacgccgttatgttggacacagtgagtatcggagcttgtctggtcattcttctcaaccgccggttggcccatcaagtgatgttcgcaacgctatggagacactagaagatcctttgattagtaatggcaggatccctgagtatttgtttgagagctttccaacatgggatttcaggagaggtgttgacgaggcacagaagtttctcccgggtagcgataaggtagtgattgatttagaggctggtggtgttgcaaaacgtcaagaagcagggaaagctatttctctgaatgtcagcaaggcagaggttttgaaggtaaagaaaaacagacagagtgaagaccttgacgtgatggaaggacggaatagtaaacagtctgcattttgttctgatgaacctgattggattgagatgtttgatgttctgcttcgtcaaactgagaagaaggcaactgatcttcgaaaaatgatgcgttttgaggcttccaagaattcgcccgttgctcagccaaaaggaccaagtgggacccgatcacggggacggaagccaactaagaaggatgtggtggaccttaggacgctactcatccactgtgctcaggcagtggcagctgatgaccgccggactgctaatgagttgttaaagcaaataaggcagcatgccaagccaaatggagatggctcccagagattggcgtattgctttgcagatggtcttgaggctcgcttggctggaacagggagccaactttaccataaacttgtggcaaaacggacaacagcctctgacatgctcaaggcataccatctttaccttgcagcatgcccattcaagaggctctcacattttctttcaaatcaaacaattttgagtttgacaaaaaatgcatcaaaggtgcatatcattgactttggcatttacttcggcttccaatggccgtgcctgattagacgtctcttcaagagggaaggtgggccaccaaagctgcgtatcacagggattgatgtacctcagccaggtttccgcccaactgagcgcatcgaagagacagggcagaggcttgcagaatatgctgagaagattggtgtcccttttgagtaccaaggcattgcatcaaagtgggaaacaatctgtgttgaggatctcaatattaagaaagatgaagtagtgattgttaattgcttgtatcggttcagaaatcttattgatgaaacagttgccatagacagtcctaggaatagggtgctcaataccataaggcaagtgaacccagcaatttttatccatggcattgtgaatgggtcgtacagcgttcccttcttcatcacacggttccgtgaggcattatttcatttctctgcattatttgacatgctcgagacaactgtgccacgggatgatgcccagcgtgcactaattgagagagatctatttggccgggaagcactcaatgtgattgcatgtgaaggctcagacagggtcgagagaccggagacatacaaacagtggcaagtgaggaatctgagagctggatttgtccagtctccattaaaccaagacattgtgctgaaagccaaggacaaagtgaaagacatctatcacaaagactttgtcattgatgaagacagtgaatggctccttcaagggtggaaaggaaggataatctatgccatatctacatggaagcctaataacaattagggtatggtctgtgagctgtgcctggttgcccgttagcactagcaattaacgaagaaaagtaccttggcattgggctacatgcgtatgtacagggctgccttgggccttccactgcactgctgctcggttctctgtggttctactacagtgaaagattgaacagaagccgattgttgc

SEQ ID NO: 22224 - DNA, 1488 bp, Oryza sativa
  Clone ID: TF_OsC382432_1
ttaacagcgccatgcggagacggaggcaagctccccgcgttgccaatggaggaagagcgagccggcgcgcctctccagtcggaatcccctcaccggcagcttcttcaggagagactccgcctgcgcctccgccatgctgctcacttgcaccggcacgaaccccgccgacgccagcgtcgcccgccacgccgacgccgccgtcttgtcgccccccacccccacggcggcgcgcacgcactcttggatctttggctggacccagaaccgctcgatcttggccgccacgtcggagtccgtgcccatggcgtccagcgactccagcagggacacggtggagcgcaatgcctgcagcaggtgcgccgcgaacggcagctcgccgcggtcacagccgcggtccacggagacaaccagcttggcgccaaggcgcctgaccaggtgaagcacggacggcactgcggtggcgtggaccgagccgacgggaaggtggacggcaatggcgtcggtggcggcggcaacggcaagaaggggggtgaggtcggtggcgtcgaggttgaaggcggcgaagcggaaggggacggagaggtcggcggcgaaggtggagagggtgtcgtggatgagctgcagctggagcgggtgatgggaggaggaggaggcggtgacgttgagggcggtgaccttgagggcgacgccggggtggcggtgggcgaggtcatgcatgagggaggcccactgctcgccgacaccgatgtcgaagtcgaggaggtggatgcaggaggcggagggtgcgagctcgtcgaggacggcctggacgcaggtgaagtgggcgaagtggagcagcggggagaggtcggagaaggacttgtaggaggtgagcttgaggaggaggtcgtgcgggtgcggctcgtggaggggcgggggcggtgtagaggaggaggaggagtcgtcgtcggagatgagggctcggcgcagggcgtccttgaaatacaaggcggagcggagtagcggcggggcggcggaggcggggaggcggtagttgatcgccgggcgcgccaagatgtgtcgggcggccaagacgtcgccggcctcggtgagtttggcggcctggaccagctgctccacagtactagtgttgtcgtcggccgtcggctttgggtttgggaaagacgaagaagctgggtggtggtggtgcaggcctcgatcagcgaagaagaaaggtgcaggcttagcgtagtcgaggtcgacgtcatcaagatcaaggagtggatggtggtggtcgttgatgacccagtggaggaaggcgttgtcgtggtggtggtcggcgtcgtcgagccatggcggcggcggcggcgttgaggccgcgtgggtgggcgggcggaggccgggcgaagtcagggtgaatgaagaagaagaagcgttttggccgctagccgaagagccagcttgctggcttgaccgcccaatgtcggttcctccctcccaaaccgacat

SEQ ID NO: 22225 - DNA, 1561 bp, Oryza sativa
  Clone ID: TF_OsC316237_1
aagtgcacagccctctatatatgccttgtacaagcaccaaatccgtgcctcaaaccgctcaaagtgtactagctctgcgtctccgctgttttctaatcgcgtctctgcactgcttgcgccgcgctggtgccaccactacatgatgcagttcacgcacaccgcgccacctccaccgcctctgcaccctaatgggcatggactagggttagggttgtaccttgacgtcggcgcgacgaggggaggaggaggagcgcggccgtggtcgtcgtcgtcgtcgacgacgacgttgggtgggagcggctacttcccgtcgtcggcggcggcgtcgaagatctcgttggggaacctcaacagcacgggctgcatggagcagctgctggtgcactgcgccaacgccatcgaggccaacgacgccacgctgacgcagcagatcctgtgggtgctcaacaacatcgcgccggcggacggggactccaaccagcggctcacagcggcgttcctgtgcgcgctcgtgtcgcgggcgtccaggaccggggcgtgcaaggcggtgaccgcggcggtagcggacgccgtcgagtcggcggcgctccacgtgcaccggttcacggccgtcgagctcgccagcttcatcgacctcacgccgtggcaccggttcgggtacacggcggccaacgccgccatcgtcgaggccgtcgaggggttccccgtcgtgcacatcgtcgacctcagcacgacgcactgcatgcagatcccgacgctcatcgacatgctcgccggccgcgccgaggggcccccgatcctccgcctcaccgtcgccgacgtcgcgcccagcgcgccgccgccggcgctcgacatgccctacgaggagctgggcgcgaagctggtcaacttcgcgcggtcccgcaacatgtccatggacttccgggtggtgcccacctcgccggccgacgcgctcacgtccctcgtcgaccagctccgggtgcagcagctcgtctccgacggcggcgaggcgctggtcgtgaactgccacatgctcctccacaccgtcccggacgagacggccggctcggtcagcctgacgacggcgcagccgccggtgtccctccgtaccatgctcctcaaatctctccgggcgctcgacccgacgctggtggtggtggtggacgaggacgccgacttcaccgcgggcgacgtggtggggcggctgcgtgcggcgttcaacttcctgtggatcccgtacgacgccgtggacacgttcctccccaaggggagcgagcagcggcggtggtatgaggcggaggtggggtggaaggtggagaacgtgctggcgcaggaaggggtggagagggtggagcggcaggaggacaggacgaggtggggccagcggatgcgcgccgccgggttccgcgcggcggcgttcggcgaggaggccgccggcgaggtgaaggcgatgctgaacgaccacgcggccgggtgggggatgaagcgggaggacgacgacctcgtgctcacgtggaaggggcacaacgtcgtgttcgcctcggcatgggcgccgtcctga

SEQ ID NO: 22226 - DNA, 2117 bp, Oryza sativa
  Clone ID: TF_OsC165556_1
aaaagagaactactctgtatattagatcagagatgtgcacaaaagaaagacgtgcggttttgaacagttgaatcacaaggttgggggcttgcactcttgagcactcccaattttgtcattgccatacaaattgtacaagcatgccatggagcatgaattctcccaggcaagaaataattacccaattactactactagtgctaacatatcacaagcagctttggtttgatcaatttacccaaagctgaaaatattcaagatcaatgaacaccaaacatttgtagtacaagtgtaccaggcagaggcagctagcatcgccacgctgacaccgagacgagctccgaccgctgccaccacagcgccagcgccgcctgccgcttctccacatggaacccatggctggccgtgcgcctcagcaggcattccgcctgcgcctccgccgcattgctcacctgcagcgccgcaaaccccgcggacgccaacatggactgcaacggcggaggcagcttgtcgccgccgccgaccgcgaggcgctccacccgtggccgcaggacgaactgctccaccttggacaccacgtccggcgacgcgcccgccgcgtccagagactccagcagcgccgcgcaagactgcaggaggttgagggcgccgcgctcgcacccgtggtcgacgcacaccacaacggcggggcggagctccttcacgacacggaggtgcgcgggcgccggcgagaaggccccggagccggccgtgagatggacggccaccgcttcgtcgggcgcggccgagagtcccaagggcggggacgcgctgctgagggggtcgaacacgagggcggtgaactcgaacgggatgccgagctcggcggcgaagcgcgtgaggctctcgttggtgaggtggagctcgagtgggtggctggaccccggcgacaccaatgcggtcaccttgaggttcggcggcggcccagcagcgcggcgccagtggtgcgcgagctcctgcatgagaggcggccaatgggcaccgaagccgacgtcgaagtcgaggaggtggaggcggcgcgcggagccgagcgcgtcgaggaaggcctgcgtggatgtgaaggtggtgaactgcacggtcggggaggcgtccgccagggccttgtgcgcggcgagcttgagcgggacgtcgaggggagtagaggagacggggagggcggtgggcgggaggagcgcgtcccggaggagggcggcggcgcggaggagcggagggtgggcatggcccggaggcgacggaagagaggggaggcgatgattgagccgcgccaatatctccctagcggaagtggagtccccggcgtcgaggaggcgtgcggcgtcgaggaggtcgtcgacgagcggctgaggaggatggtcagagggcatgggcatggggagttggagcaggtcggagtcgaaggaggggtggtcgggaaaggtgtcggcgtcggcatagccggtatccatgatccagcggaggaaggaggagtcgggggcgggggcgggggcgagcatgtgcatgtgcatgtcgacgacggcgtcccagtcgcagtcgtcgtcggcggcgatggggggaggagggtcctccggtggtttggaggagcaggagccgagggaggtgctcgggctgctgcggttgtagagcacggaggtgggctccggcgacttgctgctgtccggctccggcagcggcagggtggtggggttgtggggatggcaagaggaggaggacatgagggcaatattgatcataggcagcatgtagagtactcctatcctccactccgtcgtcaagccgccggtcgtgcacggcgacgtcaagcccaacaacgtcttgctcgacacgtcgagctcatctagggcggaagcggcagcagctagggaatcgggctgctgccactcccaacatctccaccgctcgagggccgccgcgccacgccctcgtctccgccgctcgccgccgtctccgctgcccgccgccgtctcgaagtcgcgagctcgcaaaggggatccgatcctcgcccgcccgctgtcccaccgccgctggctcccggctcctgcccgccgctggcagcgccgccccagcagcgcgtcctgcat

SEQ ID NO: 22227 - DNA, 2378 bp, Oryza sativa
  Clone ID: TF_OsC33690_1
ccggccgggaatcgcggccggcgcttcgtcgtccaccgtctccctcggtcaccgtcgccgcgcacgactcccatccatggcgatcgagctctgcccatttaagcccggggcgcctctcttcgaggacttgcaaacgcttgctgcaaggattggatcctctggcttctgttgatttggggagcttttcatcgtctcgaccgaacggccagccgccgagatcgaggaaggaggagatcgaagggcagagtgatttggcagcggtggacatggatgtgaggtttgggcccgaggagcagatcgtgtggccggcttctgttcttgctgggatcctcatgtgcgcagcggtatatgatataactcgtgaagttagctcccggtgctacaagggttataatggactgaatgaattgcacaaacttgagtggaacaacaggggattctctaccttccacgcattagttgctgctgtagtctctttttatctgctggtgatatctgacctcttcagtaaggacgtccatggtgccatcataattgatcgaaaatcatggatgtctgatgccatgtttggtgtatccctgggctacttcttgacagatttgttgatgatcctctggcatttcccttctctaggaggaaaggaatatctcttgcatcatggattgtccatgtatgcaatctctcttgctctgttgagtggcaaaggacacgtgtacatcctcatggtcctcatcactgaagcaaccacacccttcgtgaacctcagatggtaccttgatcttgcaggccggaaggactccaagctttacctgtacaacggggtggcactgtttgctggatggctggttgctcgcgtcatactgttcgtatacttcttcgctcatgtgtaccttcacttcgaccaggtgaggacggtgttcccgctagggttctacagtatgatggcggtgccgccggcgatgtcggcgatgaacctcctctggttccggaagatctgcaaggggatggtcaaggccatgtccagcgccaaccgaagtcaatgcgccaagacagatgagggttgcgccggcgaggacgactcgccggagttcgtcgagccgccggcggcggcggcggcggccgggacgttcgagcaacggccggagttaggagcgtgcaaggaggtgtactccgaggaaggcggcgcggcggaggagaggacgggcgtggcgatggcgggggccgacgtcgaacaggtggcggtggaggatgaggaggaggctcacggcgtgcggatgatcgcgctgctgatggagtgcgcggcggcgatgtcggtgggcaacctcgcgggcgccaacggggcgctgctcgagctgtcgcagatggcctcgccgtacgcggcgtcgtgcggcgagcggctcgtggcctacttcgccagggccatggcggcgcggctggtggggtcgtgggtcggcgtcgtggcgcccatggcgccgccgccgtcgtgcggggccatcaacgccgcgttccgggcgctgtacaacgtcgcgccgttcgcgcggctcgcctacctggcgtgcaaccaggccatcctcgaggcgttccacggcaagcgcctcgtccacattgtcgacctcgacgtcgtccccggcggcgcgctgcagtggctctcgctcctcccggcactggcggcgcggccgggaggcccgccggtgatccgcgtcaccggcttcggcatgtcggcgtcggtgctgcacgacaccggcaaccagctcgccgggctggcgaggaagctgtgcatgtttttcgagttctacgccgtcgcgaagcgaccgggagacgccgacgcggtcgccgacatgcccggaaggaggccgggggaggcggtggccgtgcactggctgcgccacgccatgtacgacgcggccggcgacgacggcgcctccatgcggctggtgcggtggctggagccggcgcggttcgtctccgcgctgcaccactactcggcggtgttcgacgccatgggcgcgtcgcggccggacggcgaggacgcgagcaggcatctggcggagcacggcgtgctcggcagggagatcgcgaacgtgctcgccgtcggcgggccggcgcggagcagcggccgggaggggcccgggagctggcgggaggtgctcgcccggcacgggttcgcgcacgccggcggcggcggcggcgggcgcgcgcagctggtggccgcggcgtgtccgggcgggctgggctacacggtggcgggagaccacgacggcacggtgcggctggggtggaagggcacgccgctctacgcgccccaagaaatgaagaacggcctgagttggatagttgcatcaaagacttcaggaaataagatgagctatggatcttga

SEQ ID NO: 22228 - DNA, 1740 bp, Oryza sativa
  Clone ID: TF_OsC68212_1
cgggccgcggggctctttttttttttttttttttttttttattttccaagaactacaaaaggtaggacttggggtcttcagcgccattcacaaaccaaaaggtttctcgaacagtctaactgacaagtagacaagttctaaaataaagcacagattgtagctaatctactacgatattagtttagttcgttccgtgatgcacgcgtgcatcaaccccgtatcttctaccaagtcctttgatcatttcgcagcagctttccctcgtttcctcggatgcctgataccgcggcaatatttgcttccacatagacactgaaatgctttaacaggatctttgccatcaccaaaatcaataccatagtcccatgtgagctcctcaaatgcctccaccttcttggttgtgaaaaatgcaagatgataataatgatgatcaggcgtctccacttcaacaggtatctcaactaaattcgcatcatagcatctatggttgataaatactcccaaattcccataaaatgttgaatccaggggataaagcttcttcatctttcaacacaccttcagaaccccaatcagcatccaagagaacagggtaggtatgcctaccattgttcatgttttgaagtgtcctttcatgcagttctgtactagttagtacttccccaacatattcacaaacaaaggctccttttggcagttcatcaagagtgcgaagaccccaacccttcccttctcctgtgaaaaatacctgcagattgcatgtgatgccacgttgaaccacacggttaccacattgcatgttacaaccacatttactccagcattccttgataaatttcctagcaagatgtcctctgcaaggctctggtgaagcttcattcctagatctctcgagtgggcaggatgatttacagaagaacttgtgacatttttctgggaaacgattcatagaaacacattcatcaaggaatggtgtcctaaccagaccttctggtgtatacacatattcgcccccggtttctcttgtgcaagcacatggtataggtgcagacaagcagttgccaaagcaatcagcacaacaatcttcatcaccaattcttgcaacggagatgttgacataagcattttggaaaacaaggtttcctcgtatataataaaaggaaggaggacatttctcacttgcaaattcattggccaccgatatcctcactctctcttctcccttggatatatcagttacatcatggataggcttcaagttggcaagtgccaaatgagtctgctgtttagcaacacttgaattttctgagtcttccacaataaatgattctcctgcagatttacatttcctatttccaccatcctcgcatgctattggcttcacaaatggaatgctacctgtcattggctcattttgtgagcatctcccattgccagcaacatctgattctgtattatgttctgcaatatgatcactacccagttgtacaacacattggcatatctcattcatgaggctaccaatggaaaactcaggaggcagaatcttgtatgagtgaagatatttatcctccaccatcttgaaaactgcttctaaggaaggcatgcggaactttgggtcaacactgcatttcagtgacattttgacctcacccatagtggatgatgctacatcaatgactgaagatccttcccccgtgttcaccttgctacaaggttgaattgccctttttttaggac

SEQ ID NO: 22229 - DNA, 746 bp, Oryza sativa
  unsure (1)..(746): unsure at all n locations
  Clone ID: TF_OsC38528_1
tcgtacatcccccaaaggctcttcttctgctccgacctcacctcgcctccttcctccgccgactccctcccctccgccattgcagcctcgcctacggccttgagctcgtcgccgatccccgccaccgccgcgacctctgcctgccccccatgcctcggccggcgaaaatcaggaaaaaacatgagaatgtgtttgatcaattgatcaaggcgataaaagctcctgtggactttgatctgccgcctgtattgaaagaatggaagtcaaattactatgtgccaattaagcggaatgcttatattactcggaaacgcgttgaggatgatggcattttttgttcctgtaccccttctggatcatccgcaacttgtgacaaagattgccaatgcgggatgttgttctcttgttgttcgtcgacctgtaaatgtgagaataaatgtgctaacaaaccgttccagcataggactttgaggaaaaccaaattaattaagacagagaaatgtggcaatggggtggtagctgaggaagatattaaaaaaggagaatttgtaatcgaaatngnntggagaagttattgatgacagaacatgtgagcagagactatggaaaatgaagaggcagggtgacactaatttctatctttgtgaggtcagtaataaatatggtgatcgacgcgaccaacaaaggaacatgtcgcgcttcataaatcatagctgtgagccaaacacagagatgcagaaatggac

SEQ ID NO: 22230 - DNA, 2091 bp, Oryza sativa
  Clone ID: TF_OsC103012_1
ttagagtggttcatattccaaatagatgcaaacaggtgcagatctaataaagtcgcttccggcagtacggtgcaccacagaagcaaggcagctgacaatatttccatcaggcccaacaacactgtccaagacatagccataatcatatgaaagctcctgaagaggaagtatagtgtcagcagcaaagagcgtcacctttgccagcttaacatcattatgggagctcaagacacactggacaaaaaggttaggctcgcagctgtggtttataaaccttgcaaagttgccaatagagccagcatcaatgcaatactctggtgcaggtggatctgaatcattctccgcatgaagagacggcagatgcatgtcagagccagcccttttctctcttccatccagacccttcatagtttgaagacaatcaatatcaaatatgtaattgttctgcagcaaaccatctacttcttcagtcctcctcagcacaccagtgtactcacagatgggagccccagggaggatagtatcccaagtcctgacaccccagccttttgaagctgtcttaaatacctccaagcgatactgcagacctttctgagatgttctatttacacagttgttgttgcagctgcaattagcaccacattcaaatacaatagctttgggctccaccaacctgccaatgttcttgtgtgatacataaggtaaatcagaaccattgcgctgcgcgcatgagcagtttttgttgtttgcgcaatctccttcacagtcacagccattacaataagatggaatcttgatgccctttggaatttttagagatttggagtacacaaaaccagttggaggaacaggtgggtcatcaaccaaattagtagcaggaataggaagattctcctgcccaccagatatgtcatcacaaaccaacctagaaagtagcaaggcacaggtcatacaacatgatatcagcgtcactaagaatggcacactataaacaaagcatgaccaaacatagtaatctatctcagaagttgtcagtgatggctgtccctcaagccgctttaatttatatttgaaaacaacgtgcccttgtactccattctgcacccagtcatctacaaccttgtacagcccatcataggtgtagaccttcccagtgtagctattctttgatatatgtcctcggataactcttatgggattgccattatccttactgttcttcaatgccaaatttccacgttgcagttgttgagagccaatttggcgatgattaccgagtaaatcatttcctccttgaccagtataaataatttcatctgccttatcaagatcatcttcatatattcccgacatgacaatacaagttgccagtgggaaagttaggtttgcatactcctcctttccctgatatttcattcccatataatcaatgccattcagccaatgactatgaatgcccaaaacaaccatctcggcacgagaataaaattgatccccaacatcaacaccaggtagttcccctattatcttctctggataaagcacggcattgctttcttgcatctttgtaatggctttcaagtcaggccgctttgatggacgcttctggccttcctgtaacaccgcttgtgctcttttctgctcctcctgaaattccacaagtgcattgtcagataacatacgttcctggacaaggtgaaggtaatggctggtgaatgccctcaaggtttccttcacccgcagtttcgcactcttcccgttgccaaggacatcatcctcggcagcaggtcgtgcgaacccggcacaagaaaccggctccgccgcaattgcgggcatcggcttcccctccgaggagggcttcctctccgaggctgcatcgcccatcctgaccggcttcatggcgtgctgcgccaccggctccttcttctcctcttcccgcttcctcttgccgccgcgccgccggccagcactctccttgggctcctcctgctccacgtaagtgggacggcgcgtcctgttcaagcaccgaacgctgcggcgcagcgcaagcgccgcctccagtggcggcttcggcaccggcgagacctccat

SEQ ID NO: 22231 - DNA, 3320 bp, Oryza sativa
  unsure (1)..(3320): unsure at all n locations
  Clone ID: TF_OsC497_1
aagggggcagatgatttaggtgacactatttaagagctatgacgtcgcatgcacgcgtacgtaagcttggatcctctagagcggcgcgggcggtggcgagggcggggactctcctggcggcccagtcggcngaggacgtagggggcagcgagcagaccaattttttctccttccactcctcttcaaatcaagttggttagctcaagatctgtgatgaacgaccaagcttccctccttatcttcctcttcatatcctgcttaacctaaactatgactggtaaacaaacctagagaagatacaaaggaaataacggcataaacttttgttttgcaaaagattaacagtggcttaccatggctggaactcggcagacaacttcagttccgatggataatgcagcagttgttgatgcaaaacccttgcgcacattgactcccatgttccctgcggcacttggtctgcacactttcactgctaaagaaaactcatcttcgattgtctgtattaccccgtttggaccatatgctgggggcactgaacaggcaatgcctgctagtattccaccaatgtttgcatcaccggctgcccctgcagaccccaaccagaggcagccatatgctgttcacttgaatggagctgctcctgctaacggtacagcaaacaacacaggggtcatccctgatttgcaaatagctgtggcaggtacagtggaatctgctaagaggaagaggggcagacccaagcgtgtgcaagattcttctgttccttcagctcatttggttccttcagctccaggaggtaacatcactgctgtccagacgcctccttcagcaaccacagatgaatctggtaagaagaagaggggacggcccaagcgggtacaagatgtacctgtcctgtcaactccttcagctcctcaggtagatagtacagtttttcagacacctgcttctgctgtaaatgaatctgttacgaggaaaaggggacgacccaggcgtgtacaggatggtgcagatacttcagctcctccaattcaatcaaaatataatgagcctgttttgcagacaccttctgctgtcaccttaccagaagatggtaagaggaagagagggcggccaaagcgtgtgcctgatggtgcactgattcctttaagtcactcaggtgtttcgatagatgatgacagtggtgaaataataacagggaaacgtggacggcctaggaaaattgatgtcaatcttctgaatctgccatctttgttttcagatgatcctagggaatctgttgataatgtactcatgatgtttgatgcactgcggcggaggctcatgcagttggatgaggtgaagcaaggagcaaagcagcaacataacttaaaggccgggagtatcatgatgagtgctgaacttcgtgcaaataagaacaagaggattggagaggttccaggtgtcgaggttggtgatatgttctacttcagaatagagatgtgtctggttggactgaatagtcagagcatgtctgggattgattacatgtctgctaagtttggtaatgaggaggatcctgtggctatcagtatcgtgtcagctggtgtgtatgagaataccgaagatgacccagatgtgctggtttacactggacagggcatgtctggaaaggatgaccaaaagcttgaaagaggtaatcttgcacttgaaaggagtttgcatagaggtaatcaaatcagagttgttcgtagtgtaagagatttgacttgtcctactggtaagatatacatttatgatggcctttataaaataagagaagcatgggtggagaaaggaaaaactggctttaatgtgtttaaacacaagctgctcagagaacctggtcaacctgatggcatagcagtgtggaagaagactgaaaaatggagggagaatccttcctctcgagaccatgttatattgcgtgacatatcatatggtgcagaaagcaagcctgtttgccttgtgaatgaagtggatgatgagaaaggtcctagccacttcaactacacaactaaactgaactacaggaattctctcagctcaatgagaaagatgcaaggctgcaattgcgcaagtgtgtgccttcctggtgataacaactgctcttgcactcatcgaaatgccggtgatcttccatacagtgcttcaggcatacttgttagccggatgcctatgctgtatgagtgtaacgattcctgtacatgctcacataattgccggaaccgagttgtacagaaaggttctcagatccactttgaggtgtttaagacaggagatcgaggttggggacttcgtagttgggatccaattcgggcaggcacatttatttgtgaatatgcaggagaagttattgacagaaacagtatcattggagaagatgattacatctttgagacaccttctgagcagaatttaagatggaactatgcaccagaattactgggtgaacccagtctttctgactcaagtgagacacctaagcaactgccaataattatcagtgcaaaacgaactggaaacatagctcgctttatgaaccacagctgctcaccaaatgttttttggcaaccagttttgtatgatcatggtgacgagggatatccacatatcgcattctttgcaatcaagcatattcctccgatgacagagcttacatatgattatggtcagagccagggtaatgttcaactgggaatcaattctggatgtcggaagtccaaaaactgcttatgttggtctcgcaagtgcagaggttcctttggctaaaatgcgaaccctgcaacaaaaacattaaagcataatctgccattgcaagaagtaggcgattgttgtagaactatgaagcagcagggtgcattcagtgtttcaagatgccatgtaataaggttggccttcgtctggatgagaatgcaaaagagggtatttattgcagaaagcattggcattgtaccaaactttattggaataactagtatttagcgtagcatctgaattccgagaaggttggaaccgtgttactatgttcttgtagtgtagttgtttctcctgtttaagagaactttaccaactgtagaatgccatgcatatggttgcatcgcaagattttcctgggcttcgcatgccagtcgtgcactcgccgtatgtttttctgtaatattaatggctacataatgcatcctgtaataatcatggtagtagctccagtcatctgctgaggttgaaaaaaaaaaaaaaactgttgcataaaaaaatcacgctgttaattgctgcatgcctcagtaaaccagcaggtc

SEQ ID NO: 22232 - DNA, 569 bp, Oryza sativa
  Clone ID: TF_LIB4309-028-R1-N1-B3
agtaatctatttgtattgaaattttaacagagtcttgtacagttccaaaacacagtttaacgttttgaaaacatgattccgctatcttctaccatacaaaacattcatcaagttcattatattcattagacaatacaaatgaaaacaagaaagaatcataatgacacagagataaaagttggaggcgaatcatctatcaatagagcctacgcctacatacggcagcaccacaaaagcaaggtttctgcttgatattacccttagagtcacgtacctgatcgagcgcgtaattgtagtcgtaacagagttcttgaagcggaggtatattgtcctgtgcgaagaacatcacgtgagggattctagagtcttcatgatcatacaaaacgttttgggcgtacagatttggcgagcagctatggtttatgaacctcccaacattacccttacttgctgcatcaatggtgaatccactcgactcatcaccttctgccatagatcggcctgcctgtgtccccagcattagctctgacatcccttgagctaaagagttatcatatctgttaccaata

SEQ ID NO: 22233 - DNA, 1265 bp, Oryza sativa
  Clone ID: TF_OsC250784_1
cccccgggctgcaggaatcggcacgagggaattgtctagctccgcggggctcatatatacgggttctgggaggaaaggccatcgggaataaggcagctggagatcgaaggcttgagcgtggtaatctagctttgaagaattctattgaaactaagactccggtccgagtgattcatggattcaaaggtcatagtaaaggtgaagctagccattctaaatccaagcaaatctcaacatatatttatgatgggctgtgcatggtggtggattattggaaagaaggcccagagggctcgatggtctacaagtacaagttgcaaaggatcccaggtcaacccgagttagcattacacataatcaaggcaacgaggaagtccaaagttcgcgaaggtgtttgtgtgcctgatatatctcaaggaagggagaggattcccatacctgcgatcaacacaattgacgatacgcagccaacagcatttaagtacactacggaagtcatatatccacattcctatgcaaaagaacctctgaaaggctgtgattgcacgaatggttgctcagactctaatagatgtgcctgtgcagtgaagaatggaggtgaaatccctttcaattccaatggtgctattgttgaggcaaaacctctcgtatatgagtgtggcccatcatgcaggtgccctccaacatgccacaacagggtgagtcagcatggtatcaaaattccgctggaaatattcaagacggggaacaaaggttggggtgtaagatctctgagctctatctcttcaggcagtttcgtatgtgagtatgcaggtgaggtgctgcaagaaaatggagatgaacatgtagagactgatgagtacctttttgatattggtcatcactatcatgatgaagtttgggaggatcctaaatttgaaggcattttgggtctagaatcttctacgtccaagacaacggaggatactgaaggcagtaaaacaacggaggatactgaaggcagtactatcgatgcatcaaagtgcagcaatgttggaagattcatcaaccacagctgctcgcctaatctgtatgctcaaaatgttctctgggatcatgatgacatgaagaaaccgcacatcatgttctttgccaccgagaacataccgccgctgcaagagcttacttacgattacaattacggtaaagtcgaggataagaatggcaaggagaaggttaaaccttgcttctgtggttcgcctgattgctctcgcaggctgtactga

SEQ ID NO: 22234 - DNA, 3274 bp, Oryza sativa
  Clone ID: TF_OsC137835_1
gatccagaatcagaaaaatcttttgaagttgaactggcgacaggtgcagcagttacagaattcagggaaaatcaacgaatcgaatcgagggggccaacgaatggcaggaaagttttccttacggcgctaatcaccgtcagagttctcggtccccctcaccaataacgaaagaatcaaccaagacaacaaaagaatcaacggctgatcttcttcttcttcttcttcttcagtgggcgagcttctttgctctcccggtggaaggctgggcgtcgtccttggcaccgggcccctcgggcttgcgagcccacgccggggcccggtcgggctcgtagcggtagtcgtagaacagctcctcgcccgcgctgatccgctctttggcgaagatccccaccctgtgatcgcctgctaccatgatgaccttggcgtagcagtttggatcaggggaatggttggcgaacttcagcttgtcgcccattctgtaggcatcaagaacgtactcattgttcaagttgaaaaggaacgatgaattctcacggtcatatatctttccacgcttgtcagcttctttatgggagataagctccccagtgtactcgccaagatactcgtgcttcccaacactattcttgaggaaagctccccagccagaaacatcagatctcccaagtaagaccctttgttgctgtttaagcagcagtttcatgttccggcattcataattatcacctctttggttagggactcccaatgtaccatcaccgcaccctacccagcagtttctacacacatcaggatcacattccctgtcagcagcaaagcatggacactgccggctgcgacactgactctttgcgcaatggcaacctcggaagcgattcttgcacattttcgggcacccacagtatttctcacagcaggtaccatttgtgagacatggacattgcttcccacatgcagactggcaaccacaaggagtgtattgtcgacaaggctgatccttcctttctgtaatccttttccttataaaatggtagcctgcagttttccaggtgtacttcaaacggcggacccttcctcgccttctcacaaatcttgatcttgtccgtaattcattacccttcatatatcctttaacaagagaatcaacaccactaagagctccagatgcactgctgttttcaatgtaattcatatactgaaaaacatctgtgcatgttttcatcccacccagaaggttccgagcaattaaacaactgttctttccaaaaatctctaatcctttcaatagaagcccttgctcaatcactttccaggacctgccatgagcttcttgcctgcatatactctcatcaacacattcctctttccttgaactatcacaaccatctgttgctgaatgttcattatttgtatcctccattgaatcactctgagcatccacaaaagatgagttattctccatttgaagtgtgcccttctttctaaaactccttgtgcttggagaattacactgtgaggatacaacagaatccttaattccactcctagtatcagatctaagcttcatatccctaggccaatggcatccattaacaatagaattagagtccggtgacatttcctgttgcccctttttcacactcattagaattctctcagcaattcttctgttagtacttttcttgattccaccttttgcgccaagcttattttttgagaggccaggagagtgttgcggggatttattgcttaacagttgtacttcagactcactgctttctgaggaaacccttgcagttgaagaactttcactttgttgagattttgttttctgcccactagaaccaagctttttcttatttgaccctatctgatcctttagattgtccgatgttggctcctcaacatcaacaagcaaatgagaatcaatctccatgatagcatctggtttagagaccagtttgtaacagtgaataccacatggtgtaccctcatccgagctgcacaatggtgcctgcttttcagtcggaaatactaaatcttgagaacacccatgtagcttgcaatcaaaaaccaaacatcggcgacaaaagagattgtcaaaggaatccaatgctgcatccagatctttatcaccgtacacgtcttccattttgacattaagttcagacactttcttggaagaaccctcaggtttctccccttgtaggatctcatacctggcctttatatcatcaggagccctttcgatatctcgagctagagtttcaagcacagcatcagacatgccacattcttgaatggtcatccgaattatgcaatcttcagaatccttgaactcctttttctcttcctcgtcctcaacagcttcatcttcactatcactgcaaattaaagcttcgccacagtttgtatcatagtaaatccttcgacgaccaagtacagattggtcttcttgcatccgctggttcctgtccaaaaatatccaagttgtatatggagggagtgttgccacttctggtagtctaatcggacggacagaattcctcgcggatagatttccacccacaataacagtcgatgaacactcatcttggcaattggcaccttcactttcatcaggagatgactcacgactattcacagcacacagggcatcttctttcctctttgtgagcaaattcgagactaaatctgtactgttggatgtactagtttgcctattttttgacaaattgtgagagtgcagtgtaatcgggctaagcttaatgctattctcctctacccttttctggatgtaaacaaagcggtccgatgtgattttcttcttcagcgaatcaataacacatagaacatagcccgattcactgctcccttcctcgcaaaacatcggctgcggggacagaacaagcttccaggctcctccctcgctggcccacctcctgcatcctcgtccccctgcgccgcctctgctcctcctccgtcccaccccaacggcggtggggacgacatgatgcgcggcgcggcgacaatccaccgtgaggtccagcagcggcggctcgttcgggttccacacggcggtggacgcggcgcagcatgccatcgccaccgggcacgtggagaccgagggcgcagtgaacggcgtcggcctcaccaagctcatgggccggagagccggccgcattgcgctccacgccacgctcatcagccgcgacgtcgactgttggtggcggatgcagcgcctggccaccatgggcaattgcccgggctccat

SEQ ID NO: 22235 - DNA, 2576 bp, Oryza sativa
  Clone ID: TF_OsC3086_1
tgtttttgcaaaaaactacttcctgaaacttttattaggtcaaacagctcgaaactgagcaacagaaatgcaacgtccacttcctacaatctgtaacatatcactggaatttaagattgctactgttttgcatttacacatgaatatccacattgcacattgggaggtgacaattctacgcaacgggaaaaggcgctacattaaatcaatgatggatctatcagttaataatggaacacatctctacaaggtaaggggaggagggggctgtacaaatggggaaggtgagagagactgttgttaccctgccatctaaaagctaaatccccatgattaggtaggaaaggtgtgagtaggaagaaaaaagaatggtgtctgactaaaatctccaaaggaaaaaaaccaataccctctgcctacaattccttggctagcctaggaagacgttggatcttgtcttgagccaatgcaccatctccttgtcaaggggggaattattcaatacggcatccatcattggagtaccaaagaatcttgggtcactcttgaaaacccatatccggtccttgggccatggcctttgtgcctggttctccatgcgcgctaacatgaatctcacagttctgctgccatagactcgctcttgtgttggttttactgacttcacatagaaggaggatacatctggcaatgacatacaaccctttctagctcttgtcaatctagattcaggctccgcattctggctataccaataaatgagttgacctaagcaataattttctgggtatgtcttacagtactcctggaagcctggtcccagtttatctgcatatttgggacctaaatcaagaggactgataagaaccggtggagattttaccgtcttgtaatctcggactctgaaaaaacactttgtgtaagcatacatgtgaatcaaatcagcagcagcatcatgccgacacttgtatgtgcatgaaagagttctcagctcatcacgcaaccataaaagagaacttcggatttctccctcaatgtcctcggaaccagatggatcatgagcacgaattttggctttgaggtcagtaagtacatcttcctcaacatgaggttccattgactcaagaagttcatcaactaacgagccttcccctttccagatggcagaaactagacttctcccagttagcctcaccagtggaggaggagcattcttgggatccccaaatatgcatctcatgacatatcttaccttgtcaagtgtatgagtcaaattctgtaatcttgaattcagaactccctcggcctgaacctcggcatcattcttctcggaatccatgtttatatctgtgaaaaactggcgcttctcgtccacattgtgtttaaagatctcatgaggaagtttctgtctctcaaagaatataaaccgcaccaggtgagcagtgtaagcaacaagccatccaggcaaaccagcaagcaaacaggtaccaagaccagctctccccaagtcaattaagtcttgttgagaaacagagtttgcttcacaagcctgtaacagaagactatgtcgatcgagcacaccatggaattccatcaagaccttttcaaaagctccttccccagaaaaatttaaatagctgcccctgcatatttgacttccacagagacaaactgacgcttcgtgctcttctttactctcagtaacagagttgtaatcaaaagtgatttcctcgccttctgcaattggtcgaacagtgtaaattccaatctgataatgaccatccacagccgttacttttgcttcacagttagggttgcaggagtgacaaattctgctcgcatagttagccttatgcattgcatcaacgaaaaccaagtcatacccatcacggtctccctttggccgttctagcataatgttgtaaaactcaggagcttgatcgtcgctattgttttgtatatgcttaatgccatcttgtttttcataccatctccaagaagggtatacctccccaaagaactcgatgacaaagtcgtctacaccaaatccacccgttttgttacaaacaactccaagacccttcctataggcgacatagttatattctgggtggttcctcatggcctttagcattccaaggcacatctttgaagtccgtctgtcaccactctcctctgcagacttttggatttcttcaattacaggtttaagggggtaaaccatgggagtatttccagaaccagtgaactgcctcacttgcttattcaaggtgttcagaagcaactcttcaacaaaggtatgtttgtcagaggatggccaatcaagttcagtaggcatcatttcaagtaggagattatgtgtatatggatctattccatacacttcttgctcaagaacttcatccccaggtacttttctaggttgataatccttaacctctggtagttccaaattttcagtgccgttcttctgcgagagcagtttctctgaatagtcatcaggtaaagcgacccgcatctttctcagtacttcctcctcacccacgcgtccgcggacgcgtgggcggacgcaaggg

SEQ ID NO: 22236 - DNA, 2135 bp, Oryza sativa
  Clone ID: TF_OsC34869_2
actagttctagatcgcgatctaggagagaaggagagagaaaatcgcagaggagagagaagaagaagaagaagagcggaagagaaggaggagaggagccatggatgcttcagcgctcagcaacccgcggctgcaggccatgctagaggaggagaagaggaaggcaatggcaaacgagttcgtggcgaagctgactgatgtttgctgggacaaatgcatcactgggagcattggaagcagcttcagcaacagcgaagcctcgtgtctgtccaactgcgcaaaacgctttctcgaactgaagatgctcaccatgcaacgacctcaagaagccccagcttcattttctctgcccttaccaaagtcaccagttcctataaaagctacaccaatctcagcggcatttccaacaccgcaacatgaagatgaatcatcagatcaagattacaagcccttttgcaggcagaaaaaaccaacgctgccaaagagagccaagaggccccagcaagctgagaaatctaatgatgccaacatcaagcgcagatcaataaggaggagcctggacaacgagttcaacttgtgttcatcctcatcagacaacccaaaggaatcggtggaaggaatcctgatgatgtttgattcccttcggcgccgtgtactgcagttggatgaaaaggaggatgcaagcaggcgggctgacctgaaagctggcaccctcatgatgcagaacaacctcagaatcaacaatcataagatgatagggcatgtgcctggtgttgaagtcggcgatatcttcttctttaggattgaaatgtgcatcattggtttgcatgcaccagccatgggtggcattgattacatctcttctaagaacaaagatgagactctggctgtctgcatcatttcatctggaggctatgagaatgacgatgatgacactgacattttggtctacacaggacagggaggcaatagtcgtcacaaggagaagcatgatcagaagcttgagagaggtaaccttgctctcatgaacagcaagatcaagaagaatcagatcagggttgtgcgcagcgcacaagaccccttttgtaactcaggcaaaatatatatttatgatgggctttatcgtatcgaagacacttggacagacacggcaaagaacggatttaatgttttcaagtacaagctgagaagggacccaggacagcctgatggaatttcactttggaagatgactgagaagtggaaagcaaatcctgccacaagagaaaaggctatattgttggatttatcatcaaaggttgaacacctacctgtgtgccttgttaatgatgttgatgatgaaaaagggccaagtcacttcaattatgttgctggagtgaagtatttgagacctcttaggaagacaaaaccattacaatgttgcaaatgtcctagtgtttgcttgcctggtgaccctaattgttcgtgtgcgcaacagaatggtggtgatcttccttacagcgcaacgggattgctggcaaagcacactccaatggtttatgagtgctcctctaactgtcagtgttctcataattgtcgaaacaggatcacacagaagggtataaaactgaactttgaggtattctggactggagaccgtggctggggcctgcggtcttgggatcctatccgtgctggcacattcatttgtgagtacgccggtgaagtcattgatgaaactaagatggacatagatgttgaggaagacaaatataccttttgcgcttcatgtcccggcgataaggctttaagctggaatttgggagcagaattacttgaagaaaaaagtacggctgtgacaaccaagaactttaagaagctaccaatcatcataagagcaaacaatgaagggaatgtggctcgttttctgaaccatagctgttctcctaatctcctttggcaagctgtacagtatgaccatggcgatgacagctacccccatatcatgttttttgcaatggaacatatccctcccatgactgaactgacttatgattatggtacaagaggtgctccccctggctttgagggaaaacccttcaaagcttgcaaactcaaatcatgcctctgtggctctaagcattgtcgaggatattaa

SEQ ID NO: 22237 - DNA, 3582 bp, Oryza sativa
  Clone ID: TF_OsC55389_1
atgccgcactcgcgctccgattcggggtcgggttcccacggccctgacccttggcgtgggagtaagggggggaggctgttaatgctagaccagcaggaggaggagaaggggtcggggatcgagggatgcttggtgccagcatctcgcgaaatgaaggggtataacattggatggggttcggacccatctcaaatgacataccggggcaacctacagaatcagtgagccagccgctgtaaggcactgaactagtaaacattatgcaatcgtaacgtcgaggtagtgtatagcggctccgttttaaaagatgcaagttcccagaacgggatccagtgtgttgtggggcctttgctgcagcagaatttgtaatggtacatgtatatgaattggcttgggcagatgtgtggcccttacccacctgaccaactgtaagatgggttatccaaaggattcttgttttgagattgtgctatgactgccgtttttggtggaaaaatcgccatcgctgtgcccgttggttcaccgaaacagtttattccacaatggagttctgagtctgtggtcggcacaggcgacgaaacattggagaatatgaaaatggccgctgttaacaaattgattcttcctgatattctttcaagtgaagaatcaagtaagatgtttgaggacgcagatggcggcatctagaggctcaactctctccctgaattaccacattcacattacactagccgtcgccatggccattcaatgctctcccattctgatggaaagatgcgtgcatgtcgacttgaatcactaatagatcgctggagtggaggcatagagcattcagaatcttcagccaatgattctggggcactgaacgctttaatggatgatgacgttgaagatatcaccaatttgctgcactctgtgattatgaaatctgcccacacagtttttatttacgtcagataaataatgcatgagagtgtaatgaaaggttgggcgcccatctgcgcacggatggtctgcaagggtgccgtcgcatgtgttctgaacgagaatcttggttactagaagactaggttaattatgggcattcgtgaaggatcctctactcgtctaaaaatcattgactcgaataaatataaagtaccggatgatccttccatgggtgtacaatcaactgcaatgcagtatgaatttgctgatatattatcggcagattgggaaacaatttataacaaatccatgaagagtttctgagatgaagtactgtatgatcctgccatggactactgtgatgcatggcttaaaagaaaaaatgagtcgaatcttctctctacagttgttcctggagcctctgataaccaaaagatgcaagacacagatgaaatgtcaccaaaggcaatttgtgattcagatgctcctgaaagtgacatggatttccctccaggatttggaccaaatcaggaatctgctgagcattcccactctgcgtgtgttgagtatgttactgaaaaaacagatgggaggtctggatcaagtatcacgttgttttctggccccttaggacgagttcaggaacgaattcgtacgcctgttcacgcaccagaaccatccagtcctcctggaatatctgtgcatgaaacgcccagtcctgctgaaatgcctcgagatgaaatttcggatatggctgaaatggctcgagatgaaatttcagatatggctgtagatacaataccctgccctgctgatatggcggcatctggaacatcaactgttcctgaagtgacaacagacaaactgatcattccttacgtggaacatcaatcgccctctgcatctcatgcaagtatatttgaaaagttggatgcacatgaagaagctgaattggatgacagttttgatgaggtgcctcctggaacagaggctggcttagcttcattggtgattatggagaaaaacaaataccagccctcaaaatcagtagactcagtgcttgacatttatagatatactagttgggcattcttcaggcaaatactgcatgagagtgtaatgaaagagtgggcatctctcttctcaggtgctctcagcaattgttttgactcatggtatgccaggaaaaatattgtggctaaaaccatggatgatacattgagacccaaagaatatacttactacaggaagaggaaactgaggaaaaactgtgaagcatcatcatcagaaaaaccaatggatgagcagctctccagacctcttcgtgatcttgttgaatgcaaggttaatatgaaaaatatccatcgatcaagcaaggctgggatttcgcagagagtttctgttgtggagaagccctccaaaaagcgtgccaaaccttcacataatgataatattaatctgaatatccagcaggacttgaaactcctttccgacaaggtgccaaagagaaacaggtcttcccatcctaccagtaagcctcttgttagtagcaaagtgcctactgaggatagaactacatcagcaatgcctgcaaagaaaagaaagcagaaaaacttggccactgagtccaacctgaagacaaaagcagtaattttatctccagaatcacatggttgtgaagcgcctactgagaaaagaactacagctataatgcctgtaaacaaaagaaagaaaaacttgtctggtgaatccaaactgaaggcaaaaccgttaacaagtccagaatcgtatgtttgtgaagctcctattgacaatagaactacatctacaatgcctgcgaagaaaagaaagcagaaaaacttgtccaatgagtccaacctgaagaaaaaaccgttggttttatgtcctgaatcatatggttgtgcaagagcttctgtgagtggatgggaatggcgtgattgggcacgcaatgccactccatcagaaagagctcaagtgagaggctaccgagtgaggagtattctctcagctccagaaaataatgtattgaaaagttcacaagttaagggctcatctgcaagaacaaaccgggttaagctacggaatctgttagcagccgctgaaggcactgacctactaaaaattatgcaatcgaagtcaaggaagaagcggctacgttttcaaaggagtaagatccatgaatggggtctggtggctcttgagtctattgatgcagaagattttgtaattgaatatgttggtgagctgatccgccgacaggtctcggacatacgcgaggatcaatacgagaaaagtggaattggaagcagttaccttttccgtttggacgatgactatgtggttgatgctactaagcgtggtgggttagcaagattcatcaaccattcttgtgatgtgccgcggatcaatgaattaggaagtaaagtttataagtcaggaggtaactgcaattgggtgctaccccagtatgtatgtgtcatgcgtgcttgtcgattgtactgggcagaagttcactgcagaaatgttcttggatttactgacaggatggttagatggactaattcgggctatccagaggaaggccaacaacattattacattgactggattgaggatatagagtttacacggtga

SEQ ID NO: 22238 - DNA, 2473 bp, Oryza sativa
  Clone ID: TF_OsC96998_1
atggagatggacacatcgccatcgtcttcggcgccgtcgtcgccggcggcgtcgtcggactccatcgacctcaacttcctgccgttcctcaagagggagcccaagtcggagccggcttcaccggagcgagggcctctgccgctgccggcagcggcaccgccgcctccacctccgccgccgcccccaccaccgccaccgcaggtgcaggcggcgacggtggcaactccggtgccggcgacgcccgacctctcggcggcggcggtgatgacgccgctgcagtcgctgccgccgaaccccgaggaggagacgctcctggcggagtactaccggctcgcgacgctatacctgtcgtcggcgggggcggccggcgtaatcgtgccggcggcggcgccggaggcctccgcgggggcggtggcgcagcccgggtcggggtccggcgcgaagaagcggcggccgcggtcgtcggagctggtgcgggtgtcctcgctgagcgtgcaggaccagatctacttccgggacctggtgcgccgggcgcgcatcacgttcgagtctctccgcgggatcctgctgcgggacgacgagcgcgcggaggtgctcggcctcacgggcgtccccgggttcggcgccgtcgaccgccgccgcgtccgcgccgacctgcgtgccgcggcgctgatgggggaccgagacctgtggctcaaccgcgaccgccgaatcgtggggccgatcccggggatctcggttggggacgccttcttcttccgcatggagctttgcgtgctagggctacacggccaggtgcaggctgggatcgactttgtcacggctgggcagtcttcctcaggggagcccatagccacatctatcatcgtgtccggtgggtatgaagacgatgacgatcgcggcgatgtacttgtgtacacaggacatggtggtcgtgaccccaacctccacaagcattgtgttgatcagaagcttgagggtggcaaccttgccctcgagcgtagcatggcctatggtattgagatccgcgtgatccgtgctgtcaagtccaagcgcagccccgtcggcaaggtatacttctatgatggcctctataaggttgttgactactggcttgaccgtgggaagtctggcttcggtgtttacaagtacaaaatgctgcgcatcgaggggcaggagtcgatgggctctgtaaattttcgactagccgaacagcttaaggtcaatgccctgactttccggccaacagggtatttgggctttgatatttccatgggtcgagagatcatgccggttgcactgtacaatgatgttgatgatgatcgtgacccacttttatttgagtatctggcgcggccaatatttccgtcctctgcagtccaagggaagtttgctgagggtggtggcgggtgtgagtgcactgagaattgctcaattggatgttactgtgcacagaggaatggcggtgagtttgcatatgacaagctcggtgctcttttacggggcaaaccactggtatatgagtgtgggccatattgccggtgcccacctagttgccccaacagggttagtcagaaggggcttaggaatcggcttgaggtattccggtcaagggagactgggtggggtgttcggtctttggatctcattaaggctggaaccttcatctgtgagtttagtgggatagtgctcactcatcaacagtcagagattatggctgcgaatggtgattgcttggtgcggccaagcaggttccctccaaggtggttagattggggtgatgtctctgatgtctatccagagtatgtggcaccaaacaatccagctgttcctgacttgaaattttcaattgatgtgtcaagggcaaggaatgtggcttgttatttcagccatagttgcagtccaaatgtgtttgtccagtttgtgctgtttgaccattacaacgcagcttatcctcacctcatgatctttgccatggagaacattccaccattgagggagctaagcattgactatggaatgattgatgaatggggcgcggcgtttcccagctaggttgtcacgccaaggatgttggcatggcaaggctatgacgtagcacagtctttcagtgtgtcacgttccatcatgccagggcgaataacagaagcttgcatatgggatgatgtttcaagccttcccatgaggaaggcaaagtcacagctcattgtcatccactaggcatcaaccgtccgttgtatatttttgcatggtagctgcagtgccccgtggctgattccctctcacccttgaagcttgatgcttgcttttgtaggaagcttgttttgcgcagcaagcaccgagtttcatacttgacctctgtttttctttttttttcccttcaattgctacgagaactccatatgtacatatatctgtacattacatgacttcaaaatgtgtcccacttctgtctgtaaatgctggttggccc

SEQ ID NO: 22239 - DNA, 455 bp, Oryza sativa
  Clone ID: TF_uC-osflM202124b05b1
tgagattaagggttgggctgttagagccgcagaacctattccacagggcacatttgtatgtgagtacattggagaggttttgaagatgaaggatgatggggccataagacatgtagaaagggaggcaaaaagtggtagcagctacttgtttgaaatcacttctcagattgacagggaaagagttcagactacagggactactgcatacgtgattgatgccacaagatatggcaacgtatcccgttttattaatcatagctgttccccaaatctcagtacgcgtttagtttcggtggagagcaaagactgtcagcttgcgcacattggtttgtttgcaaaccaggatatcttgatgggagaagaattggcctatgactatggacaaaaattgctacctggtgatggatgcccctgccattgtggtgctaagaattgccgaggacgtgtgtattgag

SEQ ID NO: 22240 - DNA, 2180 bp, Oryza sativa
  Clone ID: TF_OsC3937_1
atggcgtctccgccgccgccgcctcgcctcctcactcccaagcccgaccccgacgcccccctacccccgctcccttaccccgaccccaacctcgtccaaagcatgctcttctccgcccagtccccgcaggcgcagccgcaggcgccgccaccccacatccaaccccccgcctccgcctccgccgaggccccctccggcgacgagaagaataagaagaagaagaagcgggcccgcgcctcccaggagatggtgcgcatcaccaaccttagcatcgccgaccacctccactaccgctccctcgtccgccgcgcccgcctcaccttcgaggccctccgcgccatctaccaacgccaggacctcgccaccgccgggggaatccgcaaccgcttcgacctccgggcctccagcaagatgctctccaagggcctctggatgcaccgcgacatccgcaccgtcggctccatccccggcctcctcgtcggggactccttcttctaccgcgccgagctctgcgtcctcggcctccacaccgcccctcaggccggcatcggctacatccccgccagcatcgtcgaccagggccaccccgtcgccaccagcatcgtctcctccgggggatacctcgacgacgaggacagcggcgacgtcctcgtctactccggcagcggcggccgcctgcgcaaccgcctcgaccacagcgccgaccagacgctccagcgcggcaacctcgcgctccactacagctgccactacggcatcgaggtgcgcgtcatccgtggccacgcctgcgaccacagccccagcagcaaggtctacgtctacgacggcctctacagggttgtcacctccaccttcggccctggcaaatccggccgcgacgtctgcaagttcaagctcgtgcgcatccctggccaggacgacctcggcagcaaggcctggcataccgcagcggagctcaaggatgcactggattccaagatccgcccgcccaagtacatctcgctcgacattgccaagggcaaggaaccattccgcgtgcccctctataacaagctcgacgacgacaggtcacccctcttctacgactacattgcctgtcccgacttccccaccacccagcagctgctcaaacgccagacccagaggggctgccactgtgccgagctgtgcggctccaggtgcagctgtgagaggaagaacaggggggccgacggccctgtgtacacctccgatggcatccttctcaggggacgccccttggtgtacgagtgcggacccctgtgtggatgccccatgacctgtcccaacagagtcacacagcaagggatgaagcaccgcctcgaggtgttccgttccaaggagacaggctggggtgtcaggacgcttgacttgatacagccgggtgccttcatatgcgagtacgccggcgacgtgctctccttggacagccactcaggtgacgcccctctgcctccgatggaggacgggagctccatcatcgacccgaccaagttccccgagagatggagggagtggggagatgcatccgtggtttacccggacagggtaccccatttccccctatttgcaggggcgcgctaccgactcgacgtgtcacagaggaggaacgtggcttgctacattagccacagctgcagtccgaatgtgttccttcaatatgtaatccgtggcaatgaggatgaatcctaccctcacatgatggtgtttgccatggagaccatccctccaatgcgggatctgtccatcgactatggcttggactagggtccatgaggggggaggagggatcaatggctggtaactggttttggcgggctgaggcaacgttaggaagctgcaaatggccccacagacagttggctcgtctttttggatattttgtaggtgagcaggtatctctttttgggtacccatagtgctctcattttggggtaactagggtgcaattgatgagtttgttctaggattggcatgaatgaagaactttgctaggtagcaaaaggggcgcatcaatactgcatcactggaaagaactattcaaaaccattagttgaataaactttgtgttagtttgcttatttatgatgatgaaaacatgatatatacattttttaaaaaaaaaaaaaaaaaaaaaaggacggccgctcgcgatatagaac

SEQ ID NO: 22241 - DNA, 606 bp, Oryza sativa
  unsure (1)..(606): unsure at all n locations
  Clone ID: TF_OsC4368_4
tttgttttttttttttttttgtttttttttttttttttgatagggccaacatttaactgatgacaaatggacaaattacatgagaagatctgaatattttgattatgccaccacaaagtaagttccaattttggtaccaataacaaatggaatgccagacctatgtcagaatagatgtacaattacaatggcattcttgggtaaatgggagcaaagaataattagcatttctcacatgaaaaactgaggcaaatttttgcaattttgccactagccccgaaggagcacagttcgcaatccagtaccctggggcaattttaaatacgatccctcagtctgatcattggtgaaataattcacttgtattgacccttattttggctgattgcccctctgattcaacatcgttaacaactccacggcattttgggaatccacaataacaaggaagtcgctgatcactcgaaacaaacctataatcataagtcaactcttcccatggatttatatcccgcttgcaaaaatgatgatatgctcatccccgagaacacttatgacgcgtgaataacaattcggctcacaagaatgattaantaaaatgggcaa

SEQ ID NO: 22242 - DNA, 3462 bp, Oryza sativa; identical to SEQ ID NO: 12874
  Clone ID: TF_OsC38685_3

SEQ ID NO: 22243 - DNA, 6420 bp, Oryza sativa; identical to SEQ ID NO: 12876
  Clone ID: TF_OsC61980_1

SEQ ID NO: 22244 - DNA, 1102 bp, Oryza sativa
  Clone ID: TF_OsC55389_2
gttaagggctcatctgcaagaacaaaccgggttaagctacggaatctgttagcagccgctgaaggcactgacctactaaaaattatgcaatcgaagtcaaggaagaagcggctacgttttcaaaggagtaagatccatgaatggggtctggtggctcttgagtctattgatgcagaagattttgtaattgaatatgttggtgagctgatccgccgacaggtctcggacatacgcgaggatcaatacgagaaaagtggaattggaagcagttaccttttccgtttggacgatgactatgtggttgatgctactaagcgtggtgggttagcaagattcatcaaccattcttgtgatccaaattgctatacaaaagtaattactgtcgagggccagaagaagattgtcatttatgcaaagaggcgtatatatgctggcgaggaactgacttaaaattataaatttccactgaaggaaaaaaagattccatgccattgtggttccacagaggtgccgcgggatcaatgaattagaaagtaaagtttataagtcaggaggtaactgcaattgggtgctaccccagtatgtatgtgtcatgcgtgcttgtcgattgtactgggcaaaagttcactgcagaaatgttcttggatttactgacaggatggtaattgtgtagcaaggtatgggatcgtggaacatactgtactgcaaaaagatcacaaagttgctgagctttctggcgcagaagaatttgaacacgttatttatttaggttagatggactaattcgggctatccagaggaaggtaaagcgctcaagtgtggactgatggacttgttggttgccttagtgtgtctcctgaacgaggttcatgtttacttgctgacaaggttaatactgccccttcttgtacaggccaacaacattattacattgactggattgaggatatagagtttacacggtgatttcttcccgggggtacatttgaatgaacccctggtcattttcaattttttttgaagcatctaattagctgtaaagttaaaataaaccctataacaataacaatgaccataataatatctgtcttcaccttttgag

SEQ ID NO: 22245 - DNA, 3256 bp, Oryza sativa
  Clone ID: TF_OsC1123_2
atggatagggcgtcgaatttcatacctggtccttatcaagaactcgtggatgccaaaccaattagatcgttagctcctatgttccctgcacccttgggaatcaatgtcaaccagtcaagcaccccgcctttggtatgtgtcactccggttggccaatttcctgtcggttttggttctggaatccttcctacctttggttcaactactgccttcactaccacagcaaatggggtttcttatacaagctacaccaataatggagctattgatgccactcctatctcggcatataagaccagaccaggcattgtatcacttgatggcgatgaaccttactcaggttcagcatctggacggaagtccaagagatcatctggttcagctgctgatggttcaaatggagttaagttcaagcgccctaagccagtttacaagaattttgttgctggcaaggagcttgcctttttaccaccttcatccagtgatcccagggaggttgtggaagcagtccacatgacctttgaagcacttaggcgtagacatctgcaactggatgaaatacaagagactagcaaacgggctgacctgaaggctggcgccatcatgatggcaagcaatatcagggctaatgtgggaaaaagggtaggacttgttcctggagttgaaataggggatattttctatttccggatggagctatgtatcatcgggttgcatgctcctagtatgggtggcattgattatatgagtgctaaatttggaagcgatgaggattctgtggcaatatgtattgttgcagcaggtggctatgagaatgtggatgatgacacagatacactggtgtacagtggttcaggtggcaatagtaggaacagtgaggagaggcatgatcaaaagcttgagagaggtaaccttgctctggagaggagcctgcataggaagaacgagatcagggttgtgcggggcttcagggatccattttgcctgactggaaaaatctacatatatgatggcctctataagattcaggagtcctggaaggagagaacaaagtctggtatcaattgcttcaagtacaaactgctgcgtgagcctggacagcctgatggagctgcattgtggaagatgactcaaggatggatagacaatccagcaagcagaggcagggttatattacctgatctatcatctgcggctgaagctctcccagtttgccttgtcaatgaggtagaccatgagaaaggacctgggcatttcacctatgccagtcaagtcaaatacttgaggcccctcagttctatgaaacccttacagggttgcggatgccagagtgtttgcctgcctggtgatcccaactgtgcttgtggacaacataacggaggtgacttaccttacagctcatcaggacttttggcgtgccgcaagccaataatttatgaatgccctgacaagtgaaattctacagggacctcagttctatgaaacccttacagggttgcggatgccagagtgtttgcctgcctggtgatcccaactgtgcttgtggacaacataacggaggtgacttaccttacagctcatcaggacttttggcgtgccgcaagccaataatttatgaatgcggtgatgcttgccattgtactacgaattgccggaacagagtgacccaaaaaggggtcagatttcactttgaggtcttccggactgcaaatcgaggctggggtcttcgctgctgggatcccattcgtgctggtgcatttatctgtgagtatactggtgaggtcattgatgagctcaaagttaatctggatgacagtgaagatgattacatttttcagactgtatgtcctggtgagaagacattaaaattcaactttggtcctgaattgattggtgaggagagtacatatgtatcagctgatgaatttgagccactgcccatcaagattagtgcaaaaaagatgggaaatgtctcacgtttcatgaaccatagttgttccccgaatgttttctggcagccagttcagcatgaccatggagatgacagccacccacatatcatgttctttgcactgaagcacattcctcccatgacagaactgacttttgactatggtgttgctggatctgagtcttcaggttctcgtagaactaagaactgcttttgtggatcatcaaactgccggggagtattttaattgatggatgtatcttcattgtgttggatcaacacacaaacctatttgccagaacttcctgcctgtacccccagattcgagctctggtattattccctgagaatgacgatgggtttcaacatgaactgtgaagagacagtaaattaccgtcgatttgaactgcatagacagttaaattatggttaaactctgttgtgttgatgccgcacttggtaacttggtggcctctgtacaccaccttttgttccatattttgtgggggcatgtatttgatattattgctgcaaatcgtctgtaatccatctgcacccatcctttgtaggctagcgtcagttttaactggaactctagcaattagttgtgacctgtcagatgcagtcatgtacaatgtgccggtttaggatcaccttgcattttcgctctacttcatttctatgtattctgcaacccagttttcagatgcttccatcagtaatatacttgataggagacttgcatcaaaagattatgactccatagaagatcaaagaaaccaaatagaagttgtagcaaaatatgagattccacttcctgtgttgaaaacaacgaacaatgacatatttccatcagcctctatctttgccaaccatggtatttcaaatggcaatctctctgctttgtccacaactgatgctttgcagatggagctccctttaatccaatttgatccaaacaaccagttcgtttactcaagggcttatgcgatgcacctaacaaactttgctttattaaatgatcaatcagaagaattactaaatgatactgatgtattgaactatgtggtgatgaaagaagagctttctggagggagtttgagtcctactattaatatgccatgtgaagcacataactccatggctgcctctaatgagctggtagtgccacaatatgaaggagatgctccacctcttcaagatgatttcacatcatatttctatttgaatgatactaatctatccatattcgaagacacaaatgaattgtttttggaaaacaagttggatactaaaggtaactga

SEQ ID NO: 22246 - DNA, 3007 bp, Oryza sativa
  Clone ID: TF_OsC2056_1
ccacgcgtccgagcagagctcctgacgctggcgccgctcgcgccaccgcaccccgcaccgccatggcgtcgtcctcgtccaaggcctccgattcctcttcccaacgccccaagcggccggatcaagggccgtcgggcaaggacgcggccggcctcgtcgcgctgcacgggaagctggcgcagctgaagcgtcaggtccaatccacccgcctcgccgcgatcaaggagagggtggaggcgaacaggaaggcgctgcaggtgcacacgtgcgctctgttcgacgtcgccgcggcggcggaggtggcgtcgcggggcgccgagggcggcaacgcgctgtcgcggggcgcggcggaggggcaccgcaggttcgtggggtgggactcggcgagcgggccgggggagagggagttggtgcatgtgcaggaggagaatctggtcgccgggacgctcgtgctctcgagctctggtggtagcggcgcctcgcataggaccgtcgtgcagcttgtgaagctgcctgtggtcgacaagattccgccctacaccacgtggatcttcctggacaaaaaccaaagaatggccgatgatcagtcagttggtaggaggagaatttactacgacccaattgtcaatgaggctctgatctgcagtgaaagtgacgatgatgttccagagccagaggaagagaaacatgttttcacagaaggagaagatcagctaatatggaaagctactcaagatcatgggttaagtcgagaggttttaaatgtcctctgccagtttgttgatgcaactccttcagaaattgaggaaagatcagaagttctttttgagaaatatgagaagcagtctcaatcttcttacaagacagatttgcaactttttcttgacaagaccatggatgtggctttagattcttttgataatctcttctgtcggagatgtttggtttttgattgccgtctccatgggtgctcccagaacttggtattccctagcgagaagcaaccatatggtcatgaacttgatgaaaacaagagaccgtgtggcgatcagtgctaccttcgaaggagagaagtatatcaagatacgtgcaatgatgaccgaaatgcttgtacaacatataatatggattcaagatcttcctcactcaaagttagtgctaccatattgtctgaatcagaagattcaaacagagatgaagataacatcaaatccacttctattgttgaaaccagcagatcaaaaataactaattctgaatatgctgacaaaagtgtgacgccacctcctggagatgcttctgaaactgaaaatgtgtcccctgacatgcccctaagaactttaggcaggcgtaagatttcaaagcatgcctccaagtctaacgatcattcacctgataaaaggcagaagatatatagctcaccgtttccttttgcaatgagtgtactgaacaagcaatctgttccagaaattggtgagacatgtccagattccatagaatctgcagttgatcaacttccaagtctggatgaccctaacaagaaaatttctaccaaagatatgtgtgctggaagcacaactaacactactgaaaatacattacgagataataataataatttgttcatctccaacaaggagcactctatttctcattggagtgctttagagagagatttgtacttgaagggaattgagatatttgggaaaaacagttgtctcatagctagaaacctattgtctggcctgaagacctgcatggaagtggccagctacgtgtacaacaatggtgcggcaatggcaaagagacctctatctggtaaatccattttaggtgactttgcagaggctgaacaaggttacatggagcaagatttggtggcaaggacaagaatctgtcgtcgtaagggccgagctcgaaagctcaaatacacttggaagtctgcagggcatccaactgtaagaaaaagaatcggtgatggaaagcaatggtacactcagtataacccatgtgggtgtcagcaaatgtgtggcaaagattgcgcctgtgtggaaaatggaacttgttgcgagaagtactgcgggtgctcaaagagctgcaaaaataggtttagaggatgtcattgcgcaaaaagtcaatgcagaagcagacagtgcccgtgttttgctgccagtcgtgaatgtgatccagatgtttgcagaaactgctgggtgagctgcggagatggctcactaggtgagccactggcaagaggtgatggctatcagtgtggaaacatgaaactcctcttaaaacaacaacaacgtatattgcttggaaaatctgatgttgcgggttggggtgcattcattaagaacccagtaaatagaaatgattaccttggtgaatacactggcgaattgatttctcatagagaagcagataagcgtggcaaaatatatgatcgagcaaattcatcgttcctatttgatttaaatgagcagtatgtactggatgcttatcgcaagggggataaactgaagtttgcaaatcactcgtcgaatcctaactgctatgcgaaggttatgttggtggctggcgatcatcgagttggtatctatgcaaaggaccgcattgaggctagcgaggaactcttttatgattaccgctatggacctgaccaagccccagcttgggctaggagaccggaagggtcaaaaaaggatgaagcatctgtctctcaccaccgagcgcacaaagttgctagatagtccaacagcagctccagatgataatatcaactgtaaattataccgtcattgaaacacatagttcaatcctagtccattatacggccaatcgttggcataataagcatattctatattccttagttccttggtaaataaactgagatatcgagtatgcgaataaaagaaaaataaggcactgtaagtttatttgtacaaagtttggaatttatgctatgtatagttttgcctgtaaaaaaaaaaaaaaaaaagcggcc

SEQ ID NO: 22247 - DNA, 2589 bp, Oryza sativa
  Clone ID: TF_OsC109084_1
atggggatcccggaggtggtggtgccgccgagggcggccggcccgcggaggtacaaggggctcgtgccgtggcgcttccagccgggcttcgtcaggccgcctccggtcaagccccctgccgccgccgccgccgttgccggaggaggggtcgcgggcacgcccggcggcaagggtcgcgggttgggggcgtcgggggaaggcgtcgggtccagtggaggccggggagatcctcaatcgaggagatgcacccgcagcgcgagcgcgaagggctctggtgatgcgcggagcgtggaggagggcggtccccgtgttgccggagacgacggcggttcgggcaaatccggcgtcgcggcggagggctccggatttgagggtttgaggaatggcaggggcggtggcgttggaacggcagctgccgaagattgtggtttggagaagtccaaccccgatggcatcgtcggagatgctgatgtgcatcttgagagcggcagcgatgcaagagatggggaatgcgtttctgagggtttgaagaagccttgtgtaaataatagcaatggttcttctgccgcggattgcgcgccgaaggtgaaaaagggaaatgacagtggcaatggaggtgccgatgagtgtaatgctgcagccaaaagtagcaacttagcatgtcctggcaacaatggcgacgaaacgaatcgtaaggggcggaaggtagtacttccatggaggttccaggttgggttcaagcggtcgttctcgaaagctttctgctccgatagtgaatcttcagggccctctggtactcaattctacagagcccaagactcttcgacaccgtgcactccagcaacaagaagttctgtccggtgttatgcgagtgctcattctggtgttagagtctcggccatgcgtgatttctcagtgaaaggtgagaaggaaacatcaactccatataagaagagcaaaactggcatggatggtcctagtcaagggatgccaaagaatggagttgtcctcgctagggaaaacattatgggatctctgcagaattttcgcttaatttacagggaccttttggatgaagaagaagagaagtcgacagaagcagtgattagacctgatctacaagcttacagaattttcagggagcggttcatcacagactgcgatgagaagaaatatattggcaatgtgcctggaatcaaagttggtgatatcttccacttgagggtagagctttgtgttgttggtcttcatcgcccacaccgggtgggtgtagatcatatcaaacaggaggatgggacttgcatagctgttagcattgtatcatatgcacaatcttccgatattaagaataatttggatgtcttggtgtattctggagcaatgacagctatagccaatcagaagatagagggtaccaacttagcactcaagaagagtatggacactaacacaccagtccgtgttatccatggtttcgtcactcacctcaatggaaactgccagcgaaagaagatccctacttatatatatgggggtttatatatagtcgagaaatactggagggagaaagagggtaatgatcgttatgtttatatgttccgactgagaagaatggcaggtcagaaacacattgacatccaagacattctgaattcaggacaagctgaatcatatggtggtattatcataaaagatatatcccgaggattggagaagatccctgtatctgttgttaattcaatatctgatgagtacccaatgccctatcgctacattgcacacctgcagtacccccgtaactaccagccagcacctccagcaggctgtggttgtgttggtggatgctcagattctaaaaggtgtgcatgtgcagtgaaaaatggtggggagattcctttcaatgataaaggccgcatcttagaagcaaaacctcttgtttatgagtgtggaccttcatgcaagtgccctcctacatgtcataacagagttggtcaacatggccttaggtttcgtttgcaagtcttcaaaaccaaattgatgggctggggagtaagaactcttgacttcataccatctggaagctttgtatgtgaatacattggagaagtgttggaggatgaagaggcacagaaaaggtcgaccgatgaatacttattcgctattggtcataattattatgatgaagccctttgggagggcctatcaagatccataccctcacttcagaagggtcctgataaagatgaggaagctggctttgctgttgatgcttcaaagatgggcaactttgcaaaattcatcaaccatagttgcacccctaacctttatgcacaaaatgtcctatatgatcatgacgacaagagtgtacctcacattatgttctttgcctgtgaggacattccaccccgccaagaactttcataccactacaactatacaatagatcaggttcatgatgccaatggtaacatcaagaagaaaaaatgtctctgtggctctatagagtgtgatggttggttgtattaggcttgagagtgtactatttccagaggcataattgaacttctttcattgggcatgaaaaaaaaa

SEQ ID NO: 22248 - DNA, 1572 bp, Oryza sativa
  Clone ID: TF_OsC380292_1
atggcgggccctcccggcccggcaccgggcacctcctcctcctcctcctccctgcccagccgccgccgccgccgcccccctccgcgcctcggccgacgccgcggcggcgatgatcaacagcccccgcatcctccaaaggcctcgtcggaggctctcccctgcgcggcctccccgcccgcgcggtgccgcggcggtgatcaccagcccccgcatcctcccgaggccgcgttagaggctctccgcggcgcggcctcccctcccgcgcggcgccgcggcggtgatctacatccctcgcatcctcccgaggccgcgtcggaggctctccgcggcgcggcctcccctcccgagcggcgccgcggcggtgatcgacagccctcgcatcctaccgaggccgcgtcggaggctccctccggctcggcctccccgcccgcgcggcgccgcggcggcgatcaacagcctccgcccgctgtggcggtggcggtgactagtgaaggcggcgtgggtccccgccgctcgttccgcatcagcctgcggcaccgcgtgcgtgtggtcccgtgggtgaagccacccgtggcgaggaagcccaaggaccccgcgaagcccccgcgcccgtcgatcgaggcgctcgcggcggaatgggcgaaggagaaggcagcttccggggcccccgaggaggagtgcgtcctgcctttcctccagaaagatgcgcctaagaagctcgacattgtaaaagttcttggactagatggatttggatatatggatacagtgatattgagcttgaagagttacaggaaaaacattcccattacagtaggaaatttcgtgattgtgatgcaaagctgcataaggcttgttctgaaaaaggtgatggatgctgtcctcgacatgatgcaggtccaacagatggaagccttccggcgcttacccctcccacacactttccaagagttcaacattgaccctataaagaaagaggaattggacaatgggacagaaccacctccatataaaattaagataattcctacaggtctctattggttagctgctctcgggcttgtcactgctcagatgagtgcactaacaaaccatttcgccgacagaaaaagattgagatcgttaagtggaatacttctgcagacacaatattgtggatggggatctagagcactggaagccattgagaaagatgattttgtcatagaatttgttggagaagttcttgaggatgagacttgtgaagaaaggcttgaggacatgagaaggcgtggagataagaatttctacatgtgtaaagtcaaaaaggactttgtaattgatgcaacattcaaaggaaatgattgccgcttttttaaccacagttgtgaacctaattgccagttacagaaatggcaagtcaatggcaagacaaggctaggtgtgtttgcttcaaaagctatagaagtgggggaacccttgacctacgactacagattcgagcaacattatggtcctgaaatagaatgtttttgcggggctcaaaactgccaagggaatatgtctactccatatatcctaaactttgagtga

SEQ ID NO: 22249 - DNA, 2847 bp, Oryza sativa; identical to SEQ ID NO: 12929
  Clone ID: TF_OsC361962_1

SEQ ID NO: 22250 - DNA, 260 bp, Oryza sativa
  Clone ID: TF_uC-osflM202075a05b1
cttccttcaattcccttcccacccaaaccctaaaacccaaatggtcatcgcaggacgcctggacagtgagccgttcccgagacacgtcagtgaggaaccaattgcgtgcggccccgagggggacatgatgaagaactgaagagctaaaagaacatctgctgtgaaacaattgaaagcacaacaccgtcttatccctagcggtccttcaatctagaataaagctctggagctctggtcactatttgacctctctaacgccc

SEQ ID NO: 22251 - DNA, 694 bp, Oryza sativa
  Clone ID: TF_jC-osroLIB3475042f07a1
cccacgcgtccgcccacgcgtccgcccacgcgtccgcccacgcgtccgcccacgcgtccgcaataatctcattacccccaaagaccgtctctcttaagacagtggacttcactagtgaagagcgtgctttctataacactctcgaagcagaatcacgagagcagttcaaggagtatgcagctgctggtactgtcaagcaaaactacgtcaatatcctgctgatgcttttacggctcagacaggcatgtgatcaccctcacttagttcgaggtcatgagtctacttctagttggatgtcttcattggagatggcaaagaagctgcctgtagaaaggcagcaatcgttgctggtttgcttgcaatcgtgttctgcgatatgtgctctctgcaatgatgcgccagaagatgccgttgttactatatgtggtcatgttttctgcaaccagtgcatactggagcaacttaccggtgatgacagtgtatgtccagtgtccaattgccgagtccgactaaattcaacttccttattctcccgaggcacccttgaatgtgctctgagtagatcaacctgtgagtttctgtctgatgattcctgtgaagacatggtgcaagggaagcaacctagatttgattcgtcttatgcatcttccaaagtgagagctgccctggatattcttctctcgttgcctaaact

SEQ ID NO: 22252 - DNA, 7168 bp, Oryza sativa
  Clone ID: TF_OsC11239_5
atgcagcccggcgaggcacccccctcctccgggggctcgccggcgacgtcgccgcggccgccgccggcggtggcgctggggctggaacagttagtgtgtggtttggaggcaatgatgcatcaccatgatcagcagcagcagcagcagcaagggtacccatcgggcgcgccgcatggtatgatgggaggtggtggcagcagtagtttccctccgtcctcaggcccaatgcccccgttccagggccagaggaacatgacactacccggtggaaccatgggactggcttgtggctagcagcataaccagacggcgacgcaacaagaatacctggagtacatcatcctgcagcagcagcagaatgcccatcggatggtcctactgcagcaacaggatgccaatatgaacatagcagacacatcgaagagggaccagagaggtgtctaccatctctgcaatagtcctggggcttatgtcccttcaggctcagtccccgtccccagatgttcaagagacaacaatctgagcatcttcaacaggcagagaagcaggcggagcaagggcagccgagcaatagcgagcaaaggagtggtgatatgaggccaccttcgatgccaccacaaggggtccctgggcagcagttgtcatcggcgggtatggtgaggccgatgcagccaatgcaagggcaagctggcatgagcaatgctggagctaacccgatggcaatggcccaacttcaagctatccaggcctgggccaaagagcacaatgttgacctgtccaatcctgcaaatgtgactctcatttctcaaatcctaccaatgttgcagtcaaacagaatggctgccatgcagaagcagaatgaggtaggcatggcgtcacagcagcagtctgtaccctcacagatgaacaatgatgcaccaggacatagtaattttcctagtcagggtgccccatcgaagccccgacagcctcttccaccaagcacctctgtttctggtggggcagagcctaagatgatgaatatgagcaacatgcagatgcaacaacagttagcagctcataacagagatagctcgaatgacagggctgcgaggccagccatgtcaatgggcaatggtggacaaatgatgcatatgccccaaagttctggacatgcaaacaagattcctgagcagcccaatccaaaaaatgcaaattccgaagcaatgcagatgcaatatgcaagacagttgcagcaggctaaccgagctactgccccttcagcaaattctggtgaaacaggaggatcacaggccccaaatcaagctgcccgaccacctatgggtttcaccaaacatcagcttcatgtacttaaagctcagatattagcttttcggcgtctgaagcgtggtgataagaagctaccaccagaagttcttgatttaatcatgtctggaccaccacctgattcacaagcgcagcaggtttctggacctccagtaacaaaccgtgaaagatctgctacaagcagcgctgatgaacatggaagacctgtggagagtggtggtatagctcctgaaagatcttccctgttgaaggcgccctgtttaccaaaggtggaggtttctgctccagaagacaaaactattcctgctagtggtcccatgcaagtgatgaaagcttcacccaaggaacctcttagaattggaccagtttcaatgcctgaacaaaccaacaccaccctgattaaatctgagcaggatccagaaaggggtatccagagaacacctgggagaagtgattacaatggtgaaagggggaaatctttgccagcagaaagtggttcagcagacgctgagcaggcaaaaagagctgcctcatcaagtagcgtgcctactcccaacagagatgtttcaagaaaataccatgggccactatttgactttccatcctttaccaggaaacatgattccatggtgtctgcaaattacaacagtaatctagcactcggttatgacgtgaaggatttgttagctcaggaaggcatgatagttcttggcaagaaacgggaggataatttaaaaaagatcagtggcttgcttgcaattaatctagagaggaaaaggatccaaccagatcttgttttaaggctgcagattgaagaaaagaagctgaaactccttgaatttcaggctcgtatgagggatgaagttgaacaggagcaacaagaaataatggcaatgcctgatagggtgtacagaaagtttgtcagacaatgtgaacgccagcgtgttgagcttacaaggcaagttcagcagatgcagaaagcctcaagagaaaagcagctcaaatccattttccagtggcgcaagaagcttttggaggcacactgggccattcgtgatgcacggattactcgtaaccgaggggtagccaagtaccatgaaaggatgctgagggaattctcaaagaaaaaggatgatgatcgaaacaaaagaatggaggcactgaaaaacaatgacgtggaaagatatcgtcaaatattattggaacaacaaaccagtgttcctggcgatgcagctcaaagatacaatgttctatcttctttcttgacccagactgaggagtatctctataaacttggagggaaaataactgctgccaagaatcatcagcaagttgaagaggcggcaaatgctgctgctgctgctgcccgagcacagggtctttctgaagaagaagtgaaggctgctgcacaatgtgctggtcaggaggttatgataaggaacacattctctgaaatgaatgcgcccagggaaaacacatctgttaataagtactacacattggctcatgctgtgaatgagagagttacaaggcagccctcactgctgcgagcaggaacgttaagggactaccagctggtgggccttcaatggatgctttccttgtacaataataagttgaatggtattttggctgatgagatgggtcttggcaagaccgtacaggttatgtctctgattgcatacttgatggaatttaaagggaattatggaccacatctcataattgtaccgaatgctgtcttggtcaactggaaggaggttctggctgtgaaattcaatgttcttgtaacaacatatgaatttgttatgtatgaccgttccaagctttcaagaattgattggaagtacattattattgatgaggcccaacggatgaaggacagagagtcagtcttggcgcgagatcttgatcgttatcgttgccaacggcgtttgcttctcactggcactcctctacagaatgatcttaaggagctttggtccctcctaaatttgttgctaccagaagtatttgacaaccgtaaggcatttcaagattggttctcaaaaccttttcagagagatgttcctacacatagtgaagaagaagatgattggctggaaactgagaaaaaagtaattattattcataggctgcatcaaattttggaaccttttatgctacgaaggcgtgttgaagatgttgaaggctcacttccaagaaaggtcgattgttctgcccttgtcacactcagtgatgctatttgtcactcagctctttttgtttgctacattgttaactcgtcatgtcatttgcaggagtcaattgttttgaggtgcagaatgtctggtattcaaggtgctatatatgattggataaaatccactggcaccatcagggttgatcctgaagatgagaaagcacgtattcagaggaatgcaatgtaccaggctaagacatataagaatctcaataacaaatgcatggagctgaggaaagtttgcaaccatccattgctgtcatatccttttatgaattactatggaaaagattttataatcagatcttgtgggaagttgtggaatcttgataggattttaattaagcttcataggtcaggtcaccgtgtactccttttcagcactatgacaaaacttcttgacatcctggaagaatatttgcaatggaggcaacttgtttacagaagaattgatggaacaactagcttggaagatcgtgaatcagcaattgttgacttcaacaggcctaattctgattgttttatattcttgcttagtattcgggctgctggcaggggtctgaatcttcagagtgcagacactgttgtaatttatgaccctgatccgaatccacaaaatgaagagcaagcagttgctagggcccatcgtatagggcagactagggatgtaaaagttatttacatggaggctgttgttgataacatctcaagttatcagaaagaggatgagttgaggaatgggggaagtggagatctggaggatgatcttgcgggaaaggacaggtacatgggttcaatagaaagtctcatccgcaataatatccaacagtacaaaattgacatggcagatgaagtcattaatgctggtcgatttgatcaaagaacaacccatgaggaaaggcggatgactttggaaacactcctgcatgatgaagagagatatcaagaaactgttcatgacgttccttcactacagcaagttaaccgcatgattgctcggactgaagaagaagttgagctatttgatcagatggatgaagaatttgattggacaggagatatgatgaaacacaatcaagctcccaagtggctccgtgttagctccacggagcttgatgctgttgttgcgagtttatccaaaaagcccttgagaaatatggcggctgggggaatttctcttgacactaatgaaaaacttgagaaacgaagggggcgacctaaggggtctgggaagtactccatctacagggagattgatgatgacgattttgaggaatctgatgatgattctgaagagaggaatacctcatctctgcctgaagaaggggaaataggagaatttgaagatgaagaggacaatgatgattcagtgcctgataataaggatcaatcagaggaagaagagcctatcaatgatgaagggtatgatttttcacatgggatgggacgcagaaaagcccatagatctgaagaagctggttcaacaggatcttcatctggtggccgtagattgccaccacctgcaccttcctcctcttcaaaaaaattgcggtctttgtctgcattagattcccgcccgggtgctttgtcaaagagaactgcagatgacctagaggaaggagaaattgcattatcaggggattcacatctggatctccagcagtcaggcagctggaatcatgaacgagatgatggtgaggatgaacaggtagtacagccaaaaataaagcgcaagcggagtatccgtattcgtccaagacctaatgcagaaaaactggatgatagatccggtgatgggaccgtccctcaacgtggtgttcatcttgcatttcaaggagatggtgattatgattcacaatttaagtctgagcaagcctttgctgatcctgcttccaggcagcaagacacagttcatcggacagtaaaacaaaagcgtaacatgccatctagaaaggctccccctgccactaaggctgggaaaatgactcagctgtctggatctggtgagggatctgctgaacattctaaggaaaattggagtaacaaggtgatagaatctgctggtccaaattcaagtggaacaaagatgtctgacagtatgcaaagaaaggtaaatctcgactgctatctgcttgcattagcaaaagagccaagtatgacgccgcttatttcatgtggtgttttcacattgttctacaatcataacaactgcaagaacgtgataaacaagctttggaggaggattgacaaagagggtcatcaaatcataccaaatatatcttcttggtggcgtaggaacgagaattcctcattcaaaggtttggctagcagcacccttgatctacagaaaattgaacaacgagttgatggatttgagtatggcggtgtgaatgaattcatagctgacatgcagcagatgctgaaaagtgtggttcaacatttcagctataggcatgaggtccgagtagaagctgagaccctccacaacttatttttcaatataatgaagattgcctttccggactcagacttcagagaagctaagggtgctatgtcattttcgaatcctggaggaggtgcaagtggctctgctgcgcaatcaacaaagcaatctgcttcaggccagaaacgtcgttcaagcaccagtgaagcggagcagcatggttcaagcactagcagacacaatcagcatgcaccagttggtgaggtttcaggccgggcccacacttcaaaatctgagaaggactcccggcattctggaccaggtagcagggaacagttcacggatagcgcagggctgttcaggcaccctacagatatgttcatagttaagaagaagagagatcgaaggccgagcctggggtctccatccagttcaggccgaactggaccgctctccccgaccaacgccgggcggatgggaccggcgccatcacctagaggtgccaggacgcccttccaaagagatccacacccttctcagcagtctatgcattcagctggatggggtgctcattctgtgcagcaatctgatcgtggggggagttcatcacccggcattggagacatccagtgggctaaacctaccaagagatcgaggactgatagtggcaaaagacggccaagccatatgtgaaaaagaaaagagggattgttattcttggcattgcggtgtacattccttagcacccttgaatcttgattgacctctctacccgctgctgattctggagcccattggcctggttttgacacccatttcttcgtcgccattcctgccatccttcaaagaagttatcacgaccgtctgggactgacttgtgttgtcatggacattgtgggaaatgtgggtaggagtaatcgttcttgtatgttggtattttctgtaaagggcaaacacatttaatcttgttctctgttgactgttaagtagcgctccatccaactggagatgtgatggcgatctcatgtcatgatgatgtagtttagtagccatggaatgaaatgaaatgaagctgagccggttataaataaaaaaaaaaaaaaaaaaaaaaaaaaaaaaaaaaaaaaaaaaaaaaaaaaaaaaaaaaaaaaaaaaaa

SEQ ID NO: 22253 - DNA, 2436 bp, Oryza sativa; identical to SEQ ID NO: 12909
  Clone ID: TF_OsC4787_1

SEQ ID NO: 22254 - DNA, 2082 bp, Oryza sativa
  Clone ID: TF_OsC1528_1974
ttaccgcagtatctgcctaagaacattcctgcagtatctagagtaaaaggccacatcaccaaggcaaacatgtaaatcagagtaaaaggccttccagccccatcggatggcctggttttgagaaccccggataacaaaccttcctgtagtgcctgactcactccttggatgtaaatttttgtattttttaatagttgcaccaccactcccgatgaccaaaccaaccttctccataggaacggagatctcctcctcaaccatagaatccatctcttgtaggaattcctttacaagattttccgccttgcttatttgatgcggggtgccagatatcttataaagctgttgtataggaatttcgataaatgtgctccttattgacttcagaatttctgcatctactggcatagatagttcgctgcgcttgcgacttgggccagctgtatatttgtgtttttcatttgtgacagggtcagattccctctgggaaaacagatgcaaatggtttgatacaccaacaacagattcatgtcctctgacttgcctgatttcagattcatcaagtgacggatcaaaagcacctccatgtatagctagaagctcaatcaaagttttggagactccaaaaccttcaggaggcatactcaggaccctccttgtcggctttgttatttcccgcctgctctgattttccttcgttacagctgttgccttctcacctttaatcacctggattaacattggtcgctgtttctgaggtgttttcccatccatgcgaatcattttgcttggatctactatggtggacaatgctctcgccaataaaccttttcggataatgtcagttaaagcatccttcttctcttctgattcacccctctgttcaaagtcagaaccaatcaccattactgggtgattgcagatactcctcgcaacttgagaagctgccaaaggtgtgccaggctcatctcccaaaacattgctcatgataagattggtgtaaagatattcttgagcagcagagatcttcaaccacacagtcaattcatgtttagtaccaagtttagaggcgctattctttaacatctctttcgtccttctcaatacaaaagggctaacaagtttcttcagcctctcagatgcttctattgactcttttatcaattgcgcagatgcgcctctatatctagccctttcaattggcatgctgaagttttcatgaaattgtccggactctccaagtagattaggacaacagaagttcatcagcgcataaaattcagtagctatgctttttagtgcaatgcagtcggttcttctatcataacggaacactttgataaccagcacaccaacaatattaagttctttgcgccaggtttctatcaccgtgactgggcaaatgatcattgcgttgtgtatgacatctgcctggagcaaaccacgaagaaaagcagctactttcctgtagactaaacatctcttgttccaccccctcccaagctcggttgagctcttagccagcagcagcaacagcaccggttgctcctccttcccctttcccttccccctctccacgcagcagccccccggaggtgcgccatgtccgacgctcggtctcggcgttcggtcgcctcgagcactcggcgtcagcaggacgccgagctcgccgcagcagaagagcgcaggcgagcaacggctcagaccgctgcagcagcagcgagggcagccagactggcggcagcggagttggcagcagccagggcggaggcggaggcggaggcggcggaagatgcggcacgtgcggcggaggtagaggttgagaccttgcgcagcaacatcaacggctccatcgccggcgacatcaccgccgacagggagcttgaggagctggcaagaggaagggcacgggagcgagcagagcggtgagcagcagcccacgtccacggcggcggcggcggcccaagggaccgcgcgcccgccgacgggaacccagacgggcgcaggcgtgccggcggcagcccggagcccgcacgcggcccttgcaggcagcacggctctctctcccctgaccggcgccat

SEQ ID NO: 22255 - DNA, 12922 bp, Oryza sativa
  Clone ID: TF_OsC35792_1
atggcctcatcccaacaagttgagcttgaggctgcaaagcttcttcagaaactcattcaagagtcaaaggatgaacctgctaaattagcaacaaaactttatgtgatatgccaacatatgaaactaagtggaaaagagcagtcactgccatatcaggtcatatcaagggccatggagactgttgtaagccaacatggaatagatatggatgcgttgcgatcatcgagaatcccattagctggtggtccacaagcaggagattctagtggtgctatgcctaaggataaggagatcattggcagtcaacctcccatggttggtactgatgcatcccaaagtagtgcgcatgctggattatggaattttccatcaggttcagcagatatggcacgtcacagtgcatctatttcaggcagggtcccagcaggaccaaataggagcgatgttgcaggagctgatattcatcaaggctccatgtcacagaagagtggaagatcctctggaatggaaagccctgccagtctgcaaatagaggatactagatctatgaattcacatgattctttgaagtcagatgaaaaaacaagcaaaaaatcatcttctaagagaaaaagagtggatccaaaagcagcaggggacttgcattctgaagacaactcaaaatcagatgccatgtctaccggacaaaatattagaaagggaaaacagcctggcaaagctggtactcagggtcaactttccaggacagtcgaacacgatccatcacatacattacaagttggtaatgctcaggtgccaccgttacccagtggtgcacctttctttagggctcaccaggaaggaccatcagcttcttctgcaaggactatagacaagactaaaccatcaaatccattcacaatggcacaaatttcaaattttgctgaaggactagcttctggcaacattcctgctgagttgcagaaaagtatattgggaggagcaaatctacttaatgctagttttggctggaaccagaatgcacaaggtccagttatgaagaatactcaagggtctgttcccaacctaatgagacctggtgttaatgtcgaagggaaagttaacttaggatcacaaggaacttttaattctatgtctgcatcacaaatggattaccccacagttcctccttatgtgtcttcttcctttggaggtggtccacagtatcttgacaaagggaaagacttgacttcaggcaatactggcagtgaactaaattcttctaaagctggagctcagctggggatcatgcatatgcattttgacacacaaatgcggtataactttcagggcagtccaatgcaagaaaggcacggaattgtcagagcacctcagagagctggttcatctcaaatgtctcaaacctctcccagcattccattcaaagagcagcagttgaagcagctcagagcgcagtgcttagtatttcttgcatttagaaataatctgcagccccggaaggtacatcttgaaattgctttaggtgttggtccccctgcttcagaaggtggcagtgcaggtcagagaggtagtgagagcagaatggctgatggttctggaaaggaaaatggaaacagccaggaaaaccctgctatttttggtaggcaaagtgatatttctagacttcaatcaacatctacaggcagtgttgcggatgttgattccgcatcaaaggacccagaaattgttaaaaagaagatcaagatagctgaacatgagaaatcatttgaagcagaaaatatccagcaaaccgttcctatacagggaactgattctgaaatgcattctcaagaaacgatatctcccatgccatctgggcaactgcattactttcagggagatacaagaaaaactacccctgagatctacaaggctgatgcagaaaatttgaataggaacttaggctgggtaggaggccagggaccatctcctttgggtggtaataggcatactagtatggaagttggcctcttggccaaagatgaagtgtccaaagaaccatttgcagttttgaggcctcatcatatgcctgttgatggtagcaaccacaatttatctggaaaggatcaaactcctgagacagctggcaatgaaattgataatggtagccacatgggagagatgatatttgagcgatctgcagatgaaggagacgaagatctttctgagcaagatgatttaccattatctcctccgaagtacacaatgactgataaatggattttggatcatcagaagagaagatatgaagaaaacaaaaggaaggcattagagttacagaaggcacacaggagaatttcagcatcctatgagaagctaaaggaaaatgttagttcatcggaggatctttctgcaaaaacaaagagtgtcattgaattgaaaaagcttcaacttctccaacttcaacgtcgtgtgcgcagtgaatttttgcaggactttttcaagcctaatactactgatttggaccgcataaaatcagtaaagaaacatagacatggacgtcgtgttaaacagcttgaaaaaattgaacagaaaatgaaggaagaaaggcaaaagagaattcgtgagagacagaaggaattctttgctgatatagaggcccacagagagaaactggaggatagcttcaaggttaagagagaacgcttgaagggtttcaatcggtacgtaaaagagttccacaagaggaaagagcgaattcatagagagaagttagacaggatccagcgggagaagatcaacctgcttaagaataatgatgttgaaggatatcttaggatggttcaggatgcaaaatctgatcgtgttaagcaacttctgcgagagactgagaaatatctacagaagcttggtgccaaactacagggttccaaatcgatggatggccgtgtttcatatgcttctgatagcacagcaaatgatattgaagatgagagctaccagccgcagcattatctagaaagcaatgaaaaatactatcaattggcccacaggtaccagatgaacggcttgcgttggctggtttcattgtacaataataatttaaatggaattttagctgatgaaatgggtcttggcaaaacagtgcaagtaatctctttgttatgctacctcatggaaacaaaaaatgaccgggggccattccttgtggttgtaccatcttctgttcttcctggatgggaatcggagctcaacttctgggcacctagtataaataaaattgcctatgctggccctccagaagaaaggcgcaaactattcaaagagatgattgtacatcagaaattcaatgttcttttgacaacgtacgagtacttaatgaacaagcatgataggccaaaactaagcaaaatacagtggcattacataattatcgatgaaggacaccgtataaagaatgcatcttgtaagcttaatgctgatttgaagcattatcggagctctcacaggctattgttgacaggaacacctctgcagaacaatcttgaggagctatgggcacttttgaattttctgttgcctaatatatttaactcatcagaagacttctctcagtggtttaacaaaccatttgaaagtaatggtgatagctcaaccgaggaggttgaaaatgaattgccggagaagattgaaagacttgtaagatgttggccatctgcttatcagaaacttctaataaaaagggtggaggaaaaccttggtggaattggagcagttaagattgagggttatttacctagacactacctgccatcaattctgaggctctgtggaaaacttgagatgttggatagattgctgcccaaactcaaagccactggccatagagttctgcttttctctacaatgacaagattgcttgatgtaatggaggattatcttgtatggaagaagtataaatacctccgattggatggtcacacttctggccaggagagaggagctcttatcgacaaatttaataatcctaattctcaagctttcatttttctgcttagtatccgagcaggaggtgttggtgttaatctccaagcagccgatactgtcatcatatttgacactgattggaatcctcaggttgatctgcaagcacaagctagagctcacagaattggtcagaagaaggaagttcttgttttacgtttagaaacagtccaaacagtggaggagcaagtcagggcttcagcagagcataaattaggtgttgctaatcagagtattacagctggattttttgacaacaacacaagtgctgaagatcggagagagtatcttgaatcactgctacgtgggggtaagaaggaggaagcagctccagtgttagatgatgatgctctcaacgatcttcttgctcggagcgaagatgagattgatatatttgaatctattgacaagcaaaggagagaggaagaaatgatatatgagtcatcaaatataaaaagtgtgaaggttgtaaggaggaagggtgagcttgggggtcttgacacacaacattatggaaggggcaaacgtgctcgtgaggttcgctcttatgaggaccaatggactgaagaagaatttgaaaagctttgtcaggttgattcccccgattcacctcaacctggtggtatatcaagggatgcagatgtccctaaagtggttaagttggaagtacctccagagagttcaaaagaaccagagcaagccaaaaaagagccagcttcttctgttggagactccccgcctgctaaacggcgacgaggtcgacccagaaggtctgatgcttccttatctcctgttacagctccaccaaatactggcaaacaagaggcaggaactataattgatggcagttcttctgcaccaactactaccattcattcggttgctccagatgttaccattgattctactgcactatctgctacgggcaatccagatgttggtactgagattaagggtactacaccagatggtaccatcaaaccagtaatttgtactgacaataagggtaccgcatcaattgctgttttggaagggtctaatgcaaaggaggttggtataccagcacacagtgttcatgaacctgtatccagttcagcacctcatccaccaacccctgctacatctagaggtagaaagacccaggcaggagaaacacctcgcaggcgaggccgaaaaccaaagtctcttgctgctagtgcaggagatgttattctaagtcctgtggttgcagttggtagtggagaagcatatgcgagttctgtggtttcatcatatcctcaagggaatgtgtcctcatcacatgcaaatgctatggcaggtttgcagaaggatacaatcatatataaacctgctgcattattgccagaaggagttaaaggcactctaaccccatctggaggagataaagatgaaatggttaagacacctctggcagaagacatatatgctggaactgtaactacctcaggaaatgccaactcacagctgccaatgatagctcataatgaaaatgctggattggttcaagggggcactgatcaaaacttgtccgtagctacacctaccatacctgtggtttcagaagggtcaacaaaaatatcagaggttgtggttgcggataaacctgctgagaagcaaggtgctcgtcgccgcagaaagaaaacatctggtactggtagtgaggacactggggtgagcactaggcaaagagcagctagcaggagattgtacggtattggtaccgctgatattgcaggtactgacatgagcacaggggagaaaataggaatagtgaaggaaatagatggtagttgtcaagatacttctaagggattaccaaatattatctctccatcatatgagaaatctggatatgactctcaaccaagtacgccgatagctgttcctattaacgaggctgcacttcctagtggattcagcgaagcccatgctactcattctgaactacatcctgccagagaatccattagttctgttggccatgagaaactagcaggtgcgcacttggaagcacctccatctgtttcattccaggctccagtgcagcatgagacacggaaggattatgtgggagtacattctgaagtcgcgactactcatccggaaacaattactacccactcatcagtgaatcctgttattgatcataaactagcaaatgtccaatttgaatcacatgcttcacttcatacttcgggcaaggatatcaccacaatgccatccgaggtcgatagtggtgctccgagcaaggcaccaggtaggaggaggaaaggttcagctcgggaaccccgcaccagaagtaattctgcaacagctgcatctgaacgtcgtgctcgacttgctggatcaaagcagccagatgatattaaaatggcagagatgtcaggaaaccccagcactgcagtctgctcttctacacagcaacaggaagacaacactttgaaagctgcgcatgctactggttctgttggtgaagaacagaacaatgctgagaatcgtgtgcgtgaagtgtcaatgccagcaggcatattggaggcaaagttagagctgactaaacaaactgaccaggcaggtcataattcagagcaggaacaagagatggtttcggcagcaaaatcagcatctgcaaatgatgaggagcataaggtgcatgaagtacatcaaataattgctgatcacaatgcacttccatctagtgcacagtacactcttcaggataaaattgatagcagtgcggatgcgggcctggtcccttgtgacaaaattgctagtgtggttattgcagtagatgaccaagaccctagcaatgcctcagataaggatgctcctgcctccacagaagatgatggaaatggtctgcaaagtgaatgtgttcatgttgatttggttctggctaagcaagataatacgaaagttgaagatacgcaaaagtcgaatcaaccagcagaacaaggggaaagcttggagatgactgggtctaaatttagatcggagacgagactggaaaaaacagaagaaaccgtggataagagtggtggtgacaatctaccaactattgagaaaaatgatgattctcccatagaaaggtcatctccttcagcagacaaaattgcccaagtagcatatgggggtgaagcaggaactgaaacaactacggtggaggccgtttctgctatgaattctgatggcttacaggatgttcgcaatgccttgtccacccatggcttatcaaccaatgatattactgttgcttcggaagaacacagggatcctgagagtcatttgtctggtgaagtgtcaatgtcaggtggatcctcagagctcaagttagaatcgctaaaccaatcagaatctgcttgccagtctggtgaagtaactctggaagatacacatgccaccttggacattcagattcctgcattgattgaatcagaagaaaaaaagtcacctggaggcgatgtgcatggtagtgaagaacaacacatgcatgaagtacttcataatactgttgatggctctatctctccatccaatagggagcaggacaagctgcaagttcatattgatactaacactgacgtagacattcctagttctgacaaggaccattctactgatattgttttagcaggttgccaagccccttgcgatgcctcaggtaaggataagctgtccacctgtgatgcctcaggtaaggatatggctgcccctacagacgatgatctcaattgtctgcaaagtgaagatactgtcattcctgtggctgatgctaaggacgagactatgctagtcaaagctattcagaatgacgaaatgtctatgggctcttctcatggcttacctgctaccatacaatcaactgattcagatcgtcttgcagaagaaggggagagtgcagaaattactggctctaaattttcatgcgggatggaacaggagaaaatggaagagcccttggataagagtgtcactgacaatcaaaccagcagtcagataaatgatggttcaaacaacatggattcacaaaaagtggatagttctttgcaagcagccgatggtggtgatcttttggtaagtagaggaaccagtgttgaaaccaccactgctattaatactgatgcgtcagatgaaagtatcagtgtgtccactcagtccgtcaaagaggctagcacagtagaaattggtgcatctactaatgacatagctcctgcttgtgaattaagaaaggattttgagtctcatgtatctggttgtgtgtcaaagccagtaggattgtcggaactcaggttagaagagctgagccaaacaaagtctgtttcgcagtctattgtagcaaatgctgaagaaacaagtaccaggtctgacattgaaactcctgcaatggatgcatcagaaagtaaatcacctgaaagcgatgtgcatgagttgagtgaaagggtggagttcatgggaccaacgccaagtgcaaatgagaagagtaatgaacttcatagtcaagaactagtgaagatgatttcagctgcagaaacagcatcaacagaaggtcatcgcgaaaaagacacgtgtgaagtagatcataagattgattgcactatattttcaccaattggggatcaggacacacgaaacagaattgatggtgacacagattgtggtgtgccctcttgtcaaagaaatgcagcttttgactctgaaaatgaagtctctgctgagattaatttaacaggcagccaagcaccttgtgatgcccccaataaggccactcctgctcccacagaagatgatcacaatggtcaggaaagcgaagatactgtgattggtgctgagcaaggcactgttgaagttgaagctatgcagattgatggtatctccaaaagctattccagtgattcccatgccactttacaatcaagtgactcaaatcagctagtgaacagtgactcaaaatttgaatcatcaaagaaacatgacaaaacagatgaaacttccaatgaaagtagaggtgacaatccaacccacagttgtacaaacgatgattcccatgataagaatttagtaggatgttctccttcagaagacttaaatgaggacaattctgcccagttagctgatggtgatgatttagtgggaagtaaggatactactgctgcacacgccagtggcttaaaggagcttacctctggcaattatgttgcctcatcttctagccatgttgttcaagatgtaacatccatctcgaaaatggagtctgtgcaggctggtagtgaggaaatctatcatggctactctgatgaaaccatccattctgctagaatcaaaccagtggttggtactgaaattacggaaaatgcttctgttgcttctgcaccagttattaccatccaaccagatattgaaactgaagctggtgttactgcgtctttgactgttttggaagggtctatagcagaggaagttgatacacaagtagaaagtggccatgatctggtcactagtacagcccctctttcaccagctcctttacccggtgagagtcatgcgtgcactgatgtatcatgtcctgtggctgtggaggtatcagagacaaagctagagtcagcaaaccacacagctagccagttaggtgcagcttgtacagaaacaccaaatgccttgttgaacactctgatccctgcgttacctgaatcggaggaaacaaaactttctggaagtgatacagatggaaagaccattatggcagagcttgcatcttccagtgatgaacatgataaggtgcatgaagtaggtaatgaaactggtgatgataataaacttccatctagtgtggcagaagatgcagtgcaaggtgaaattgatggcagtgctgacatggacagtcaaataattgctggtagttccgaagcagaaatcaacaattctactgtggctactatagctgacagccaaataccttttgatccctcagataaggacactcttgcagaagatggcaatggtctgcaacgtgaaggtactactgtggatgtgactggttctaaggaagatgatatggaagctgaagagaagcagatggatgatagtcatttgcccgctgctttacaatcaactgagtcaagccagcccacagaacatgctgcccccacacaagatgatggcaatggtctgcaatgtgaaggtactactgttgatgtgtctggttctaaggaagatattatggaagttgaggagaagctgattgatgatatttccggaagcccttctagtcatttgcctgttgctttaaaatcaactgagtcaaatcagcctgcagaacatgctgtccccgcagaagatgatggcgatggtctgcaaagcgaaggtaccgctgttgatgtggttgattccaagaaagatgatatggaagttgaagaaaagcagattgatatctctagaggctcatctagctttctgcctggcgctttagaatcagctgaattaaatcaacctgcagaacatactgcccccacagaagatcatggcaattgtctccaaagtgaaggtactgctgttgatgtgccttgttccaaggaagataatatggaagttgaagaccagtttgacggtatttctagaggcccatctagcttttctcctgacactctagaatcagctgagttaaatcaagctgcagaacatgctgcccccacagaagatgatggcaatggtccgcaaagtgaaggcacttctgttgatgtggctggttctaaggaggacaatatagaagtcgaagagaagattgatgatatctctagaggctcgtctagtcatttgcctgatgttttacagtcgactccaaatcagcgtgcagagcaagagtgtttagataatagtgatgacgtgaacacatctgttgtttcctcccatgccccattaagtggccccaaatttacatgtgtgaaagaacttgaaaaggcagatgagaccttggaaacgagtgatgcccaagtagcagatgaagtctgtttacagacaaatgatggtgctcacaatatggcttcaggaagttgttccactttagaagacaaaaacgaggacagttctgcccaaatagctgattgtgaagatttattgctaaggaaaggaactactgttgatgaccttgatggctgtgtcgaaggtcacagtggcttgtccacccattccaatgatgaagtgcgcaacctggtagaaattgtcaagggtatgaatgatactactgctggcagtgaagtgcatgtggatcctgaaagtcatgtatctgatgaagtgtcaatgccagttgcaccatcagagctcaaggtagaattgaagaaccaatcagaacctgcctgtcagtttggggcagtgatcgtcgaggaatcaaatgtcagcttgggcattcagactcctgcattagctgaatcagaagaaatgacatcaggaggtttcatgcacggtaaagaagtttgtgcttcagaacaaacgaatataggtgcggctgcagaacctgcatctacaaaagatgatcatgatatgcatgaagttgataaagagattgttcattgtacaatatcttcccccataggggatcaggaaaatctgcaaggtaacattgatggcaagatggacgttggcctggcggcttgccagacagagtcagattttgtgagtggaaatgaccattctagggagactgatttagcaggcagccaggcaccttatgatgcctcggataaggaagatactgctgctgatttgattggtcctaagcaagccactctcgagatcgaaaaaatgcagattgatggtattcctgaaggtccttctagcgtgcctgctgttttgcagttaactgactcaaatcagccagcagaacaagagagattagagaatagtgactctaaatttgcatcaacaaaggaccagggcagagtggatggaacttccaatttgagtggaggtgataatgcaaagtgtagtcttaccaatgatgattctcaaactgtgaatctagtaggatattcaccatcagaagactcgaatgatgatgattctgtccaagcagctgatagtgatggcgttctgggaaataaagaaggtactgatgatgttatctctgctgcatgtaccgatgatgtatccatgctgaagactgaatcaatagatcgtcatggttctgacgaagttgatcattccactgccccgtctgctgccatcaaacaagagagtggtactgaagttacgtgtgacgcttctgttcctgtttctgaaagctctatatcaaaggaaatcggtacatcgcctgagtgtgatgatgatcaagtggctacagcagcacctcatccaccaacgccattatctgatgctactgatgtatctgctgatgtgcaaatcccagcaggaatatcggaggcaaagctagagcagccgaacgaaacgactagcccgtcgggtgctgctactgaagaaaataatactgtcgtgagcactcagattccaacattagctgaatcagaagatagaacacccgccgatactgctattcaaggtactgaggttgacagcgctgagccagcatctgtaagtgatgacgaaaacaaggttacagcagctgatgatagtgcactcccgtctactgggccagaggatacagcggacgataaaattgatagcagcgctgatgctagtgagaagtaggttatgacagactgagtatgtaaatgatctctctcaaacctagttgtaaatgttactgctgaactgatacagcccaactactatagtgccttagttataattattattgcatcttttgctaatattatgttaaaaaaaaaaaaaaaaaaaaaaaaaaaaaccacgtgcccccctcgtgccgaat

SEQ ID NO: 22256 - DNA, 723 bp, Oryza sativa
  unsure (1)..(723): unsure at all n locations
  Clone ID: TF_LIB4371-027-R1-K1-E7
gccagttctagatgcacgtgctaacataggaaagggtgcccgcccgtattacaagatttttcaagcatttggccttgtgaggaaggttgagaaaggcataactcgatggtattatccatctatgcttgatgatttggcatttgattcggctgcacttggaattgcccttgaaaagccgctggatttggtgaggctttatttgtctagggcaaccttgatagtggtacctgctaacttaattgatcactggacaacacagatacagcggcatgtttcctcggacacacttaatgtttatgtatggggagatcacaagaaaccatctgctcacaaccttgcatgggactatgacattgtcataaccacatttagtagattaagtgcagaatggggtccaaagaagagaagtgttttaaagcagatccattggtttagggtaatattagatgaaggacacacattaggttccagtctcgccctcacaaacaaattgcagatggctgtttcattggttgcttctaatagatggattctaactggtacccctacgccaaacacaccaactagtcaagttgctcaccttcatcccatgcttaagtttcttcatgaggaagtttacggtcaaaactaccagtcatgggacactggaaatcatangccttntgaggcacanatggaaagacgacgcagtcgtctcctgcagctacttcagaggactatgat

SEQ ID NO: 22257 - DNA, 3825 bp, Oryza sativa
  Clone ID: TF_OsC11525_1
atgggcggcgacgaggaggaggttgccggtgacgtgcgccgcaagttagggggctacctccccgccgtcgtctccgtttcatccgatgtgggcgtggaggcgctcgcgccgctttccccgtgctcgctcttcgcctgcgggggcgtctccctcgcgccgaaccccgacggcagtggcgcgacgcctcggtccaatgggagggcgtgcggcggagggggtgtcgtgcggcagctgagggcgctggtgtcgagccggtgcgtggaggtggaggggagggtgctgagggcggtggcgaggagggggagggagggaggaggaggggatggggaggtggaggcgagggcggtggtgctgttcgacgtgtacctccccgtctccgtctggtcggggtggcagttcccgcggtcccgcgcggccgcggccgccgcggtcttcaaacacgtcagttgcaattgggatgccaggaatgctttgcttgcttttaactggacctctcctgacaatccacactgtgatgaccagtatatttggacctgcaccgattgccacgtccttggttgtgaggtacatcagataccatctgtattgaataatgataagtcgtttgacctgcatgaaatcttcaaaactctacctagtgttatggtggagaagaggatgcagataacaagaataacaccagatgaggcagcatcgggagtgggtatttggtctgtccctgatgatgtcttgtataaggtgctggttcgactgaaacccagagatttgattagagttgcagctgcttgtcatcatctaaggaatctttctgcttctatcatgccttgcatgaaacttaagctttttcctcatcaagaggcagctgttgaatggatgctaaggagggagcagaacttgcaggtcctagaacatcctctatacaagggtttgtgcaccatggatggtttcccttattacataaatgttacctctggtgaaatatccactggtagtgctccaactgtacatgatttttgtggaggtatgttttgtgatgaacctgggttagggaagacagtgactgcactgtctcttattctgaagacacatgggactctggcagtccctccaccagggatgaatgttatgtggtgcatgcataaaccagataaaaaatatggatactacgagcttagtgctagcaactcttctaatggaaacatctttttgtcgggatcaaaaaagttgcgaaaggacgtgattagagaagatacatgttcaagtgagtcactgaataatggtggttcagttgttagtacaaggtcatcaagaaagagaggcaggttagtaaaccctgatttgaatatgatcgctgcacatccgagtgggaagtcgccaatgtcagcaccaactggtgctcattcaactccagctactcatgtgctaaagattaccaaaaacttgaaacatgttaggaaaaacctcatggaggcatatagcgatggttcagttggcaataaaaggaagagagatgccacctctgagttaagtgaaacctgggttcaatgcgatgcttgcagaaagtggcggagattattggacggaactgcacttgattccagtacagcatggttttgcagcatgaaccctgattctgcacgtcagaagtgcagcatcccagaggaatcttgggatttaaagcgaaagataacttatttgcccggatttcacaagaaaggtacaccaccaggaaacgagcaaaatgcatctttttttacaaacatattgaaagagcatgctgctttgatcgattcagaaaccatgaaggctttgttgtggttggcgaaactttctcccaagaaacatatcgagatggaagcagttggtttgacacggccagttctagatgcacgtgctaacataggaaagggtgcccgcccgtattacaagatttttcaagcatttggccttgtgaggaaggttgagaaaggcataactcgatggtattatccatctatgcttgatgatttggcatttgattcggctgcacttggaattgcccttgaaaagccgctggatttgatacagcggcatgtttcctcggacacacttaatgtttatgtatggggagatcacaagaaaccatctgctcacaaccttgcatgggactatgacattgtcataaccacatttagtagattaagtgcagaatggggtccaaagaagagaagtgttttaaagcagatccattggtttagggtaatattagatgaaggacacacattaggttccagtctcgccctcacaaacaaattgcagatggctgtttcattggttgcttctaatagatggattctaactggtacccctacgccaaacacaccaactagtcaagttgctcaccttcatcccatgcttaagtttcttcatgaggaagtttacggtcaaaactaccagtcatgggacactggaattcataggccttttgaggcacaaatggaagacggacgcagtcgtctcctgcagctacttcagaggactatgattagtgcaaggaaacaagacctgaaaaacattcctccttgcataaaaaagataactttcctggacttcagtgaggggcatgcgaaaagttacaatgaactggctgttactatccgcagaaatatattgatggctgattggaatgacccttctcacgtggaatcacttctgaaccccaagcaatggaaattccgtactacaactattaagaatgtgcgcttgtcttgttgtgttgcggggcatatcaaagtagcagaggctggtcaagatatacaggaaacaatggatgcattaatgcagctgggccttgatccttcttcgggggagtatcagtccataagatatgctcttttaaatggtgccagctgtttcaggtgcagagattggtgccgcttgcctgttgtcacgccctgtcggcatctgttgtgccttgattgtgtagctcttgatagtgagaaatgcacgttacctggctgtggcaaccattatgagatgcagactcctgaaactcgtgcacggccagaaaatccaaacccaaaatggccagtgcccaaagacctaattgagttgcagccttcatataagcaggatgactgggatccagactggcagtcgacaacaagcagcaaagttgcttatttggttaataagttgagaagtttgaaggcagaaaacataaaacatgggtactctaggaacatggccaatggtgcttgcctttctagtcaatcttcttgtcaagaccataataatgtggagggcaggttaccacacacaatgcctgacaaagtaataatattctctcagtttctggagcatatccatgtgattgagcagcagctgacgattgggggcataacatatgctggaatgtacagtcccatgccattaggcagtaagagaagttcactgacgaagttcaaagatgatccagcatgcatggccttagtcatggatggaactgcagcactgggccttgatttgagttttgtctcttatgtttttctgatggaaccaatatgggataggagtatggaggagcaagttattagtcgtgcacatcgtatgggtgctactcgtcccatatttgttgagactttggccatgcgtggtaccatcgaagagcaaatgttaaaacttttacaggattccaatgcttgcagacaaatggtgaataaaggaacaagcagcactgataatgaaggtgctcggcctcaccggagcctgcatgattttgcggaaagcagttatctggcgcaactcagctttgtgaaaggatctgacgcggcggaaaaattatag

SEQ ID NO: 22258 - DNA, 3708 bp, Oryza sativa
  Clone ID: TF_OsC3788_1
catcgtatgtataaattgctcgcgcaaaaatgatgaatatttaatgcgatcatccggccgcacagagcgcacaaccatggatatgatccattgcagaaacctagctagattaacaccgatcgctcgatagattaccaataaacaccactcccaaaacacgaccaacagtataattcttcacaccagaaagccactctgccactggatatatcacggcgagacgaacagtacatctactttataccagaaagccaactacgatgttttagttctgatggacacaatttaataccaagaaatccatacaataccactaatcctaaaatttgtaagcttaaatgtaccctaaataccccctgttaatttctatccaggagcactcctttctcaaaggagaggattcaaacaaatgcatcagggcaacaacattcctgaatcccaagattagaatgccgagcgcccttttgaatctgaggaattggagaagtggcttgaccttttccttctaagggtcttccatgtaaaactgcccccctgcaaaacacttgtggtggattcatcttcggcatcgtcttcattctcatccttgctatatgaagaaaccccagcccttactttttctggtgtccacattggaatgctggcatcatctgcaatgttcactagagatttatgccttttcctcctctcactgaaatcgacttcttgtacatcagacgaataagcgctccgctttgctcttggagccatccttggagtctcttcaactacatcatctgctttcatccactgatcaccaaaagagtctgagtagacaacctctttcctgcgtctcttcgtagttagcagaacattctggggttcatctgcaggtatcttctctgttaaagtatcattggcaaacacccagtctggaacctcaattccctccatgagcctcggtttgtagttttctctttgccgcctttcttcatccatcttctcaaccaaccagaattcttcatcattacgagcagccaaacgatttatttcacgctcactagggatatcagttcccagtgagcttgttcctctcctcaggatctcctgcagcaatgctcgcctatcctgagctgtggaggttgtgttgaacagcccagcctggataacttttgcatcaatacccatcttctgttttgcacggtccaagatctcttcttcaattgagccaacactaacaagaacgaatacacgcacttcattcttttgtccaatacggtgggcacggtcttcagcctgctgatccatttgaggattccagtcactgtcaaaaataataacagtgtctgcagtctgcaagttcaacccaaggcctccagctcgggtgctgagaagaaacaagaaatattctgagtccttcttgttaaaatctgccaataatctccctcgctcttcagtcttcgtagatccatcaagcctcatgtacttgaactggtacatttgcaaatatacttctaagatatcaagcagttttgtcatctgagagaaaagcagaaccctgtgaccagctctctgcaattttggaagtagccggtcaagcaattcaaacttccctgatgatctaacaatttcctgccgttgatacatgttataatgctcaacgaatagatagggatgattgcaacattttctaagttgcatcgacagattttgcaaagcctttgatttgagtccagatcctagactaacccttccattgctagtgacttgttcatagtatgctttttgccaagcagacatgtcacacttgagtattacttgtgttttcacaggaagatatttttccacttcatctttcttcctcctcagcaaaaatggacgcagcacttgatgcaaacgatgtataattagcagctgttcctcatcattaaggctgacttcacatgcaaatggtgcattaaaccattcctcaaaattcttcttcaggaacttcagatctttcagtatcaagtcatagtgcgtgagcaaaacattaaactgccgttgtccaaaattcttttcccttagagccttcctatcatctggacgaccatcatacagaattgtcccaatgctaggagcccaagttttgaattcattagaccaatttggtaacacggcctttggtgctattattaagtgtggtcctgtaacctccttcttctccaatagataggcgatcaaagctatggtctgaattgttttccccaaacccatttcatcagccagaataccattcaaattattgttgaataaagaaagcatccattgcaggccctctaattgatatggtcttaactccccaccttcaagagctgatggttgttccgttaccttctcttcaatagagtggacggtagaatcaagcctatggccagcattaaatttactatgatcagcagaactatgatggtctgcatcaacatctgatggggactcttcatcaggggattcaaccttgaggcctgatatttgagaacaatcatcagattctgacccttttggcagttcagatccatcagggcgactaacatgctcagcatctttttgtctctgcacagctttccctattccttcaagaagctcatttgtttttccaaggagcagtttcaggcgctcgttcttgctctcctcaaccatacgcaaataagcttcttggtcaccagccttcaaaacttgtaatctactcttttccatgcgatttatacgttgacgtgcacgaacatgccatgccagaactccatcattgcgctgtttttttcgtttgtaagaagccggtacttgtagctgatactccctagcagcattaagaatttctgaaaaaaatttcctcttcctgatctctgcctggttcttttcctcctcttcaagtcttgagatcctctgttgttcccaaataccaaaaagggagtcctctgagaatctctttttgcggttgatatcatcagcatccattgaaaaactatctccaattccatacatggtaaaaggataccgtatacgcatcatcccccagtcaaacaattgcctatcagggtgtgcacattttttgtgtagccagtattctgcactgatatcagtccttactttcttctgcaagtctaataacttaagcccgtacaattcaagcaaacacttcatttgcaaatcttcacccctagtagatggtaatccttcaagttcagtcagcctatgctgaatggaagtgttgaagcggtcttcttttaaagcagtcaactctgagtatgacatatacggtccttgattcttcaatacagcatcttcaagctcttgaatcaaggtgactccccaatcatcgcagtgacaatatggtgctttgaaactacaaccctcatccgcaccgggagaagcatccgcgcggtcctcctccccctccccgctctcgccgcatccatccccgacagccgccgccgccgccgccacctcctcttcacccccctcctccccttccccctcccacgcgtcgccgccgtggtagatggacgagacggcgtgcaggacggcgggcggcagcgggaggttgcgggagagcaggttgagcgcgccgatgagcgtcctggcctgctccgacgccccgccgccgccgccgccgacgacgacctcgtcaccgcccacggaggcgggcggggccaccaccgccgccgccgccgcctccaccgaggcagccat

SEQ ID NO: 22259 - DNA, 961 bp, Oryza sativa
  Clone ID: TF_OsC12040_1
tttggtcgcaatagttctgctaatcacagcgaatttgctaatggcattgatatgcaaggtcgtctgaacctggaaaataggattatagattctgacgagagagcggtgtaccaggaagcactacagaatattatccaggataaaagggaagatgatctgcctgagggtgttctgtcagtacctctgcttaggcaccagaaaatggcattggcttggatggtttcgaaggagaatagctctcattgtgcaggtggaattcttgcagatgatcagggtcttggcaaaacagtgtctacaattgcccttatacagaaacagaggatccagcagtctaagtttatgtctgttgattcagatcgtttaaaagctgaagcgctaaaccttgatgatgacgatgaggcagcgcctgttgcggataataagggggagcagactaagaatgatgaacccaggaaggatctaggagctggttcgtcatcaacagcagctggtactggtgacgttgaaacatgtgctagcctaatgaatactgctccagataagacggttgaaagaaatgttgaacgtaagaagaagagtaaggcaagcacatcatctactatgcaatccatgacaaggcctgctgcaggtactctagtggtgtgcccagctagtgttcttaagcaatgggcgaacgaattgactgacaaggttggtgaaagtgctaaattgtctgttttggtctatcatggtggctcaaggaccaaagatccaaatgagttggcaaaatatgatgttgttatcactacatacacaattgtggccaatgaagtgcctaaacagaatgccgatgatgacactgatcagaagaatggtgaagaatcttctgctggtaataagagaaaacaaccacccaaagcacagagcaagtcgaagaaaaaaaaaaaaaaactcgagactagttctctccctcgtgccgatt

SEQ ID NO: 22260 - DNA, 532 bp, Oryza sativa
  Clone ID: TF_uC-osflM202005g10b1
tcgatttggtgcgaccttattttcttaggcgcaccaaggaaagtattgaaagccttttacctaataaagctgatcttgtcatctggctgaagctaacgccatatcagatataattatatgaaacatttatgaagagcaatttgattgataagacagtgaagggatcaacatttgttgcaacaatgctgctccaaaagatatgcaaccatcctcagaacttgacagctgtagattcctgtgaggaacaattagcgttgaaagaaaacaggacgttacagggcattgtcaaaaaacttgaagctttgattgcaaagaataccacaaagacatcaaattgtctcaagttcatgcaagcttacatttatactgcaattgttggaaaaacttaaggaagaagggcacaaggtgctaattttctcacagacgcgcctaatgcttgatgaaatagaggaggcactaaccaacaagggagtacattctgctcgtatggatgggactgttacagcttctaaagagaagctattattaaggg

SEQ ID NO: 22261 - DNA, 4301 bp, Oryza sativa
  Clone ID: TF_OsC4554_1
tttttttcattagaacttttgagcaaatttcattccccataaactatcatgtttgatcaactgaaaaaaattgtcgaagacaagttcagcttaatcttttacatggtttatgatgtacaaccatacggctgaaatgcgaagctcaagatgagttaagattgctggtgaaaactatgtacaaatatggcgttagctaatgacgttctcctttgtatcttcatgatcaaaagacaccactgcagctcatcgaaaaattacctgatgagttgccacttgcacggagaaaaaatgaatcgcaccacaatgccacctttaactacaaaatctgagcacctgtacaaactagaaacactagacgcctagagaaatgctatctcctgacagatatttcacctatagatgcaagttacaccatcccacgagcaaaattgtgtccaatctcaggagaaatgctaaaccataaacaaatagttcaagtcttccaccgtcaatctagtttgatgggcaccagatttgtcttccccaaatgcagaagccaccatctcccgttttttctcctggagagccaaaatacgatcttcaacggtatcttttatggttaaccgtgacactgtgacaggtcgagtttggccaatacgatgcgctctgtcaacagcttggtcttctgtagtaggattccaccaaagatcaagcaaaagtacatgacaggccgccaccatattcagaccaagacttgcagctttgagagacataatcataacagaaacctctggatttgtgttgaagtcttttacagctctatcccgagctgcgacggacattgttccatcaagcctccgataagatagatgagaagatttcaaatgaacctctaccaaatccagcattctagtccattgagagaaaacgatggccttctcagttattttggtgccagcatattcagagggagtactattcccgttaattttgtcaggatgcacaattttatttttgtcatcactcatatgggttaaatccagtttaggcaacgagagaagaatatccagggcagctctcactttggaagatgcataagacgaatcaaatctaggttgcttcccttgcaccatgtcttcacaggaatcatcagacagaaactcacaggttgatctactcagagcacattcaagggtgcctcgggagaataaggaagttgaatttagtcggactcggcaattggacactggacatacactgtcatcaccggtaagttgctccagtatgcactggttgcagaaaacatgaccacatatagtaacaacggcatcttctggcgcatcattgcagagagcacatatcgcagaacacgattgcaagcaaaccagcaacgattgctgcctttctacaggcagcttctttgccatctccaatgaagacatccaactagaagtagactcatgacctcgaactaagtgagggtgatcacatgcctgtctgagccgtaaaagcatcagcaggatattgacgtagttttgcttgacagtaccagcagctgcatactccttgaactgctctcgtgattctgcttcgagagtgttatagaaagcacgctcttcactagtgaagtccactgtcttaagagagacggtctttgggggtaatgagattattggttttccatcaagcatcgttgcttttgtcctcctcagcattactgtcttcagaacaacctgaagcttcttgtacccagtaattgggttcctgctgattggtgtttttatcatgaagcaaaattttttgtattcagcatatggatcatatctgagaaatctgaaatagctatagagatcctcaacagcattctgtataggtgtccctgacaagcaccatcttcttttggctcgcagaccccagcatgccctagcaacctgggttcgataatttttaatactttgtgcttcatcaaggataactctaaaccatgcaacttttgcgagaggtttctcaggcaatttactctctggtgtgcttccacttttgttcttcttagaagaggaagtcttccgttttttgctgcctgaggagccaacaggagcaccatacctgtcaggcttccctttctcttcatcatcactatcaggacttgattgttttggtacttccatgcttactatagaatatgtggttaacacgacatcgtatttagtaagatcattaggatcctttgtgcggttgctaccatgatatactaaaaaggtcaagttagctttactggtgactttattcctcagttcatctgcccactgacgtagaacactcgtggggcaaacaaccaaagtcccagcagctggtctagccttaacatttgcaataggattttctgtcttaatggtactacttgtcgcttcaggtttacatgtatctgctagatgtgctagtgccggtttcttcaaatgaggctcagcatcgtcatcctcatcgtcatcgtcaagggttacagcttcgcatggttcttgcttaacagctgaagatggaactggtgacctttctgtcaaaatcagtgatatagtcgacactgttttacccaggccctgatcatctgcaagaattccgccagagcaactcgaaccatttctctccttttgtaccatccatgacaaggcaattttctggtgcctcaataaaggaactgctaaaactccatcaggtggattagcctcagactttggctgagaaatatcaagcaaactggatgcaagaggtgcatcaagtaatggctgtaatgcaagccgcaaagtcattctttcctcatgcggcctgtatctccctccaaaccgaggaagattaggattggcacacacagattgttgaaagttatgctgcaatccttggggtggcaacacatgtccactagcaagacttctactaccctcaagaatacataaatcagaatcacgattgctatctaaactgaagcaattccttgatgagttacccagaatagaagagctgccatttctaggaatgtcatactttttatgaaaagttggatgcattggatcacttgagttcatgaatgagtgttggtgttgggtactgacaggaaacatggaattctgcaaatgttttggtgcatctccaaagtatttatcagcatcctcagtggtggagtttctgcttgagggcaccggagaagagtcagtgctagactcactccggaaacagatatcttctgatcggttctgctcgctggacatcgactctatcgaagatacatcatccatgtaataatccgacagagatgtatcatcacaatattgatctggagagcccacttgcattgaactgctttcacatatattctgtggtaattgttccagctcatatgactgattgttttgtggcaaatcatgcagcactatttcattagccatatcaaacgatccataatctggctgaggatactcctgatactccccctgcagatattctccttgtacagttaggcaactgccatttccattctgcatgcttccaggcacatcaccgatgttcaactcggtgtaaggaatatcaggtataacagcactatggtcaaacataggcactgacgtgaaatggttaccctcctgctcagaattaccaagcatgggacctgtgccctcacatttaacttcacttaaaccagattgctctgcgaacatatcacatcccgaatcatagtataaaccatttgtataatcttcatatggagggacaatttcttcatcaacagttttagcatggtttaatgcatccattggtaaatgcatctcaggattaccattccttgaattttccaaaaaatcattgctaagcaatctataagaggtatcctctgagtgatcaaaagattctccaccattgttaagttccaccattacatccatctgactatgtgaaggatctgtatgcgagtagtttgaccaattttctttattctcaaaaatttcttcatggttttgaaatgcattttcagaacttgtgctgtccactggcatctctaaaccttgattgccctccgtcccaaaatacttgtcgttttgagtttttgtttgtaatgcttgaccattcattaccaagctgcttcctgtttgaccttctccaatcccaacagcctgatggccatttatagcccatcgccactcgtgctgctgctccttccagtcctcgttatcgaggaaggccatgaagtcgccgaggggcatggacaggttgtcctccccggcgccgccgaagccgccatcgaaatccgccgccgccgccgccgcttcctccat

SEQ ID NO: 22262 - DNA, 524 bp, Oryza sativa
  unsure (1)..(524): unsure at all n locations
  Clone ID: TF_LIB3432-034-P2-K1-D8
cggacgcgtgggcggacgcgtgggcggacgcgtgggctaaaataacatctgctgtgaaacaattgaaagcacaacaccgtcttatcctcagcggtactccaattcagaataatgtattggagctctggtctctatttgactttcttatgcctggatttcttgggacagaaaaacagttccaagctacatatggaaaaccattgctagcagcaaaagatccaaaatgttcagcaaaggatgctgaagctggcattcttgctatggaggcactgcataaacaggtcatgccgtttctacttagaagaacaaaggatgaagttttatctgatcttcctgagaagattatccaggatagatattgcaatctcagtctattgcagctcaaactttatgacaaattctccaactccaatgccaaacaagagatttccactatagtaaaagaaaatgaattagatcaatccacttctcaaccaaaggcaactcgtcatgtgtntaggcactgcaatatctattaaaacttt

SEQ ID NO: 22263 - DNA, 3021 bp, Oryza sativa; identical to SEQ ID NO: 12921
  Clone ID: TF_OsC257752_1

SEQ ID NO: 22264 - DNA, 3078 bp, Oryza sativa
  Clone ID: TF_OsC138576_1
ttttctggttttttctttctccgggctttctctttcagccttactcagccgaccaacaaagatacaagcgcccaaatccagagaaccagcaggagaaacagcgatttatgtcaaacccaaaagacaaaccactatgggtctgatcttaccttacaaatgcaataaatgaagaaaaagaaaagaaggaaataagatgatctgaacatgaaatgttcctccccttctgatagcctgtgccaagccagagaaagagtggatggggcagaacaggagaatagaaggaaaacatcggtggagcaggaaagggctatctatatgagggaagcattatccatactccctatggcttactttgcattcctgtagcggtccaatacttcatgtcgttgcaaaggcgagacagacagcaaccacttactaaactcaaggtcgttcatacccatgaaagatgcaattcggctgaattccttctttttctgcaccagtgagtaagattttgccttaattgtatgcattgtttcattcttcttactttgcagctcctctaagtgccttgggacagttttatcttctgcacagttgcttgcttcatttgtcctcgtgtttacaacatcttcatttcggtgagcataaactattccacaatggtacaaattcttgttctcgttatgtattgctgtcattgaggatttcatttgatcttgcgtaccaaatatatttgtatcaactatttctcgaattcctattgtttcagctgtattacccttcccatgttctccatgcatttcaatgatctcactggtgaaaagcttatcagacaagtcgcgaaacagattgcatatcccaaagagctcaccttgaaattttttgtcatcctgcactccttcaaagtaacgtttttctatttttccagagaccgcaatattggaaagctgttgcttatatatttgtcgagaataaataagctcttcaagggaaccagcaccaagtaggcgaaatacagtgacatgccgcctctgtccaaatcgaaatgacctgtcttgcgcttgcaagtcttgcgcagggttccaacttgggtcaaaaatcaccacacgattagcactgaccaggttgacacctaaatttcctgcccgtgtagatataaggaaaacctgtttgcttgggcatctattgaactcatcaattagtaattggcgtgcattcatgggagtcgttccatcaaagcgagaaaagcagtaacccttccgtataagaaatttctctagtatgtcaagcatcctgactgaatagctgaaaagaagaattttgtcaccctgcagagtccataatgacaatagtctttccaacgcacgcatctttccacaatgttctgcatcactgagacccatgaagttttcacttttagcacctccaccaactaattcaatatctgtgtcaaagacagcagctgcaagctcagcatctttcttctgcttctcaatttcgtctttcaggtttggctttatcagctccagatggttactgatctgctgaagcttcccaaggcaaggaagaacaagacagaaggggcacagagaacaaccctctggattgtctctgtgaagataagaccagataatgccatgtggttcagttctcttgcagcattccacctgagtcaaaggacttccacagctacatgggagatccttgtttataaggatttgcacgtcaggctgttgcagcattcttctgtaaacgcgcttttgaacgtcactcattctgcagaaaacaatattatcctcctttccaagcatgagatgcccaatggtctcttcctttgttcttctcaacagaaatttgctaagaactgaaacaaggtgcttcttgcgcttatcagcaacttgtacaaatctctcaggagcactgaacctctggccatgttttaaaggctcgtcataatatactcgaaagtgttctcgatcccccaagcaaccaggtacaatccagtcaaacagattaaataattccattattttattttgcattatggttcctgtgagaccaaaccgctttcgagtagtaatttccaagcaagctgtatataactttgatttttcattcttcagccggtgtgcctcatcaacaaccacaaggtcccacgagatgccacacaaaatcttgccatgaatcctaaaagtgtcaaaactggtaataactatctctagtctttgagtttcaaccttttgaagaaccaggtcacgatttgggccatgatagacagcaacagaacatcttgcccactctgcaaattcattttcccagtttcgaattactgatgtggggcagaggatgagtataggggcaatctttcttccttccactaattgatcaccgtggtcattatcttttccaataacagctgataagaaagcaattgtttggatagtctttcccaaacccatgtcatctccaagcacaccgccatggttgtttctatacagattgtataagaatcttacaccatccctctgatgcacaagtagcctgcaatttatcgaggagggtacctggacgacggggcgctctccgggcggcgagagagcaagcggttcgtagggcccgcgggagtcgagggaggccgctggcggaagggaagcgcgggggcggatgcaggggacctcgtcctcctcctctggcagcggcggcgcatcatccgccgccgcatccgaggtcggggaagtgcgagggggcggtggcggcgagacggaaaaggaggaagaggaggaggaggcatcaaggcggaggagctgctgcgagagggacgtttttgggggcctcctggcgaggagaggaggaggtgatcggggttgggactcggattggggctgtgaaaaggaggaagactggagggtttctttgaggctgtggagcgacatggcgttgcttggcaggggaggaggaaaccggtcggcggggggcaacgccagcactggcgaggaagcgacgttggtagcggcaggtgcagaacccgtctccagtctcccccgccggcgaggaggaggcaccatcgatgctgagctgctagatctgccctga

SEQ ID NO: 22265 - DNA, 7810 bp, Oryza sativa
  Clone ID: TF_OsC43095_1
ggagagaactagtctcgagtttttttttttttttccaggcaatatgtacaaggagctgcagcctttgattaattattataatgagcagatagtatatacaactcctctcaagactagctctatctctctctaaaccctcctaaccaaaagctcaaaagacaaaaatttgagatcaccatctcaagcacctatatgttagccacattgctctagatcttgcgatcttcctttttttttcccttcttccgtatgaaacaacaaaaaaatttctgactcctgatcgccttgccaacaaaatctggcaacctgtacatcacacgccccaattcgctttacactggacaggaccggttagtctttgttcagccgttgagcttcgccaagaactggttgagatcgtactcgtctgcatactgagactgatcccatagctcgtccagaccattcagaatggactcaaaccgttcccaccagatttccccttggaatctttactctgatcaccacccgaactgcttgggagtacagacgcttttctggaagcaggtgtcgaagcaaacagatcaagcagttggtcagtgttcattgtcttcaggctggcgttctcagcattgatgaccgcattggccaccgacaccttgaacctttgaagactcatcaccttctcttccagggtaccgcgcatgatgagacggtgcacgtttaccactttcctttgacccagacggtgtgctctgtccattgcctgaagatccttcattgggttccaatcatgttccataaagaccaatgtgtcagcagatgtcaaattcaatccaagcccaccgacatgagttgttaataggagcacatcaatggttggatctgagttgaatgccttcacaatttcaaatcgcttctctggttcaacagagccgtccaaccgtaaatatgtaacgcttctcatatgggattgaaacaggtccttctcaataatgtcaagcaaagccttgtgttgagcaaaaatcaaaactctgtgttgcccaatagctgcagaagcatcagggcttgatatttctgaccctataccacactcctgaagtatctcttggagagcaacaagtttaggggaatggtgtaggtcatgaagctcatcaccagttcccataccgatttcctttagaaggtccacaagataatcaggtgggctttccccagttacaagtaaaggatggctacaaagttttaatagatattgcagtgcctgaaacacatgacgagttgcctttggttgagaagtggattgatctaattcattttcttttactatagtggaaatctcttgtttggcattggagttggagaatttgtcataaagtttgagctgcaatagactgagattgcaatatctatcctggataatcttctcaggaagatcagataaaacttcatcctttgttcttctaagtagaaacggcatgacctgtttatgcagtgcctccatagcaagaatgccagcttcagcatcctttgctgaacattttggatcttttgctgctagcaatggttttccatatgtagcttggaactgtttttctgtcccaagaaatccaggcataagaaagtcaaatagagaccagagctccaatacattattctgaattggagtaccgctgaggataagacggtgttgtgctttcaattgtttcacagcagatgttattttagatcttgagttctttattatgtgcccctcatccagcacacaatagttccaaaagacattctcaagaaaatcaatatccttgcgtataatatcatatgacgttatgattacgttgaacttatcaaactgagaacggaggataatcctatcttgtgatgaaccgatgtactgaagaggtttcatgatagagctgtctatgtacttctctatttcatattcccagtgtgctactaatgtagaagggcagataatcaaagatttcggatcttgctcatcattccgtgcacgtgactcagcaatatcagctgctacaatagcagacgcctggagtgttttgccaagacccatgtcatcacataaaattccatgtaacttgaaccgtctaaggaatgctagccagttaattccttcttgctggtaccttcgcagttcaacactgagatcaatgctgagcttgtaatcatcaatttgggagttgtcgaggagctgctctagaaactgcgcatcttctgcactgctagataagcgttcactcagtccatccggtaacaaagaaccttttgctaatggcaacaaaggaaccagagcagcaaaactgtgagttacagtctgtctaacagaaccatcaggatcactcatacaccttagaagaggaacaacaaggaaaggagcataaggaaccaactccacagccaaaccctgaacaagaaggctcaaaagcatcccagctccttgccttgcacagacagaagatgaatctgacaacatcggtatgacattttctatcacaattaccattacattagcagtcaatgattttgccattgatgtgatgcaccttgcagcagctaacctgacagcgacatgaggatggcgcacacaaccaagaatacagggaaggagacttagcaattgaggcctcaagggctcagccaaatgaggtgtaaccgaacgaacaacctggatattatttataagggactgcggttccttgtcctcacaagatcttcctaactgcgcaatacttggatcttctttcataagatcatctccagtcttgacgggtttaagaaactccgtaaggcaatcccataacttgggaagcttttcaaataaggatgctccaaatttctcacaaagatgcttaaaagccaactccgatccacgccggcttataaaaccctccgacttcgattcaccaccggaagtcatctggcccctggatttgtgattgctaaaacgcttaccaatcgacagcaagttttggtcctcaataacctgaattgagtttataactgcagcttgaggtgtctcacttgcatcagtgcatgttaacgtgcagaggttctttgttagtttgtcgtttgggccaggtttgcggccaacacaactaaaaatgagctcagcaagtgcatctgcagctttgtcctgaagtatttcctcctgttccctttttacagcagccattaaaggcaaaatgactgggttcaacttactaggcagccctgccatccagactacagcagaggccactaaagaggaaactgtcacatgcaaattattctgaacacatttcaagtagcctgacgtagacaatagaccttgttttgctgactctatattgttcaagacaattttatcactgtccaaactaaaatcaggttcagatggtaacaaaagctttgaagtgaagttaatagcatcatcaacactcagcatgtcagcttcaaagtttaagttgcttgtatactctttaagaagagcacaagattctattgactggaacaaattattggcttcattgcgcatcttcctgtatgttcttgcaagctcagcatatggaagcggagaatcttttgtaggaaatgaagggtcagagcaagccagtaagtccaacatccaccctttcagggaggataagaaagctagcaatgtacccaccgcagcaggatcactttttctgaggtctttaaaccaagaaacaataaccatagaagccacctgtctctggactcctgagagagacatgagatcgcttgctagtggaccaagaacaacttgccacgacccctctggcaacttagaggcaaacagaccaagggccattgacgtcagcactcgcgtatgagtaacagatttgtccgaatcagaccccacaattatttttgaaacactcaaggaagcttcagaatgcttttcctgtgaagtgttctctccggtagaaccaaaagatatcattctcgtattttcatgttctaaccttgcagatttgatctttgcagcagctcttgaacgacttcctcgtggaagtgcaactggcaaaaacatttttgcagaatccaatgctgtgccatatggagtagtggcaagttgcacccaattactaaaatatgaacttgcagcagactcaaggtcctccgtagggcactgaagtaaaagtttccaagccctttcagaagatcgaataatctcatcatttgactccaaaagaagattctggaagacaacttgcagcgcatcacctaatatagatgcaagccatagtttagctgaattcctggtgttcccaacctcgagaagcctctccaatgttcgtacagcagaacgccggactgatgtaatactatgtctcataaaaggccacaatcggggtgtcagagcggctaagacataaggattatcattagaacccattttttcttcaccggcaaccagagttacactgtttagatcaaattcgttgtctccacctatggctgttgtgccaagcatctttggaaccatctctggttgagaatatatctcagctaacaaattcatcacactgcttgtagaagggcttagatcatcaaggtcaagcaatatatcccaaagcaacatcacaattgaatgtagcatttgatcatttagtctaactaaagaagcagcagctgggatcagagcctctgcagccacagcccggacatcatcatctggatcctccagaccagctttacaggcatgaagaacataattaagcaagtctttaagcatttcctgacgaacagcaactaaatacttaattccaaggagactcccatgacgaacttcccactcctgcctgcgctgcatttgcagcaaaatattcagtgtatggcatactagagtcggatgcatgtacttcagaactgcaccaagagcttgagcacaagtttcacgaacaggagcaaccacttgatcagatacataatcaccaaagcggtccaatgaaagtacacaaaggaaacgaattgcacagtcttgaagaaattcccaattttttaccgctgagtagttcgctagtttcatcagctttataaattttgaattttcagggagatgggtagaactcagtttgggcatggagttgagtgtttcgtgaggtggtgtacaatatggatccaccttagatgggttagctgaaccatcaacctggaagggtgattcaacctttgcatgagcaagatttggttcaccactagatacagtaggctcagtactcagacttgcctctgttttggaataatcaccgttacttggctccttatccaactgaatgtccataacctctggattagactcctctttcttttgtcttttcaaaactggctcgagctgtcccgaatcaatgtcttcattaagatcaataccatgtgctcttttcagggagtccaaattgtttttatcatcaaggtcagcgaaaggtgagttcagatcaggaaaatatactccagcacaagcaccttgatgcgtcaaaatttccctcaaagccataatggtgccatggcgaacttcccaaatagggtcaaacatgtcatgaataagttgatctacaaactgttgaaaaggccatctcccattctcactgtactccagattgtcctcatctgtgattgcatcaactgtatcctgaaaaaatgtaagtggggtgattagatcatcacagattgaagacaaagccatcccaacagaatgctccagtgcaattgcactgggaaccatagatgcaaccaagtgctgaatattctgaccagtattaaatgaatagaatccattgttttgcatatttgcaccccaataattcttttgggcaagaaggtcctcgtctttgataacatcattgaaatccatgaactgctcacatacatccagacctaaacgacgccggagattttgcttttggcgagctaaacgctctgctggatttttgccgttatcatttgcaatgtcatattcctgtccacctgatgccaataaaggagatccaaattccaacaccctgtttatatcgaagcttccaaaagcaagctcagatgttgcagtagtatcagcatgccgcaacgttgacccaacatcaccaattccagacaacccagaagcatgtttttctgcttctgcagatgcgaacaagtctttcaccgatgtgtgtttgacgttctctgctatggcaccaatcgcatgggctgctgcgacccttgtgtcccaattcttactacgtaaatatggagaaacccttttccttcttaatataatgataatgcagatatcctttttgagtaagacatttagctcctgggggtgggacttggcaatttctccaatttgccgtgcagcagcgaaccttgtcgcttgcgtggaaccagctagttgtgttaaaggaaactttgcacaatagatagataaaccaaaggggatatcaaatgatatatgttcgaagccgctctgctcataagcattctgtaccactggtggtggctgcaggggaatagcaggtgatctagttttgtcatcagcatcattttctagtaatgcgtctatggattcatgtctgtcctccagttcaatagcttcgttgagatcatcaatagcatgagcagccatgccagtggagggcaaaacatgtctgacgggagaacctttgacctgcaagttaacaaaatatttgcttttttcatcttcccataatttcttcttcaaatataaagacttggttgcctcagtccccttacttgttttatcaaaatctgtaacatctgacctatatttatctgacctagtcattgtatcagagtctcgctctcttctcttcttcacagctttcgcttcttcacttgttgagtatgggattgatctctttttagttgctgcagtattaggactcctttcgtttaggtcttcattgacactggacccctcttcattagcaccacgcttcaaaatatctgaagcaagcaaatcaccaagcctctcgaaacgagcttgtgaccttttcacttcttcttgtgccttcaaaaaccgagcatgagctttaataaacttcttcatctttgaggtcatcctatggcattcatctttctcccttctaagctgcacctcaagatcattaactttgctagagatcttgcgcacttcatctatcttctcatccaaaatgacctccatctgagttttatcgtcacgcaaagcctccatatccagccgtatttgtttcagctgcttttcgtggtcttctttctcatcaccacttgagaatttgtcctttttcttttcatcgttgttatcagagagacttaaactcctagatgagttggtttctccatcgtcagtcttcttttcatgcctcctctcacattctcttcctgctaggagatcgtgaatagctagaatctctttctcgagaagatggccttctatcataaaggggacgatgacccctggactctcttccaggggaatgcctcctccgaggtgaaaacctcctatcaatcctgcctctgaaatcaccggctctataatctcttctccaagttcaccttctggtacagcacaagcattatcgtcaacacaaatcgtcgaaataccaagtgaagaatttatgaaaaaggtcatgctatcctctggcagcagttgagtcaacatatctgcagagtccgggtggtgcgtgaaggcgccgcgggaggacggcgggcggcggatgtcgccgtggccgtgggcgaagctgcaggtgtcgcggttgcagttgccgcgctgccacagcgcgcacagcttcgtcttgtacgccggcccgcggcgaggagggcccagcat

SEQ ID NO: 22266 - DNA, 4780 bp, Oryza sativa
  Clone ID: TF_OsC72210_1
tttagctgaaactagtccgcttattcatattaagattgggtttagttcaacaaatattggaccaccagaaatgaaccaatagcattattatacatcgcatctggagattcattattatacacaagaagatttttcagccggcgaccttgtgccgattctagattggttgatgctttgcacccattatgtaagaactgactagtcctatttgatcatgcgtgacataatgcaacccaagatccattatttgatagagtatagggataccacagcctgctgcatcaggaatttctcagtgcatgccagtcaactagaactatttaactctggaccacggatgccatagcaatagtatgttcttccagtgcgattacacaagggttcaccttataattaatgaatcatcatcttaaagaatgaatccatctgatgccagtcattattaacttaactcaggagcaatctggttgtaagtaaaaacaatgtttgactcagttggtggataatgaatctttaaaaacatgcctttcagctggtcatgggaagtcatttcctccagaaccttatcctcggatatcaacttagaacagtgctccatttcagcttttgaaagcatgttcctaacattactgaactcgtcttctgtagagaagaccaacttggacaagtggtccttttctgcttgcctatcatatttgtcaccttcacctgttccataagttattaaattgtatgtatatacaaatttcttctgtcctatcctaaatgctctgctgatagcttgccttccaacagctggattccagacaacatctagaagaacaactctagaagcccctgttaggctaatcccttcacaacaagctcttgtagatgcaagtaacaccctcgcgtcactatccggattattgaaaacctcaattgaattttgacgatatctcgggaggatcttcccatccatttggagaatctcttttccttctctccatttgaaaatcttacgaagatgttcctttatcaattctaatggctgaataaattgactaaaaatcaataccttttctttcaatgcttcacacaaacgaacaacttccattacaaaccttgtttttactccttcataaggattagaccttaatctttcaagcataggtttatcaataagggaagcttcttcttccgtcatgttaattgcgtttacaagtgaaggatgtgtggaggctaaagaaataacatactcatgttcaaaattgttaccagatccaacattttctacctttctaatgatactcttttgaagcggtagaggtttcagaactatcacacactctctgagccccggaagagttcgaagaatagtcccattatggatatgaacaaatggtttcagtattgatcttaccttttctgcattatcatcagttacattactagttaaggaagcccaaactcctttctcatatttatcagaaaatttatcccgttgcttctttgagacacagtgccttcgacccactcttgttttagtcaaaaacatttcaccaaacctaggcctcaccaaacagagaatattgtaaagctcaagaaaattattttggaaaggagttccagatagaattatacgcttctcggttttaacttttcctagtgtcttccaaataacactgcgctcattcctaggtgtgtgcccttcatcgagaacaagcaaaccagggttctcaagaagaatagttctcactttgttttctccagtgcagccaaccttttcagatgttagtttcatatatagaccataactaattccaagaacaccatgacccctgttccatgaaaacagttttacaagcctagtcaacttttcagtccgatgctctttctttattaatctacatatatctctgtcttccttcccagagtaatcagtagtgttcattatatgaaaaggaacgttgacattccatttcttgaactcttgttcccaagcaaacagcatcccacgaggtgcaataatcaccggtcggcagtctgggaacaccttcatgtatgtctggataaacacaatagccaaacgagtctttcctgtccctggggcatgacagatcacacatcctccaacaacatcaggcttagccccatgctttatttcattaagcctaatatcacccactagatttgtccacataaactcaaatgcctcacgttgatgctgatacatatcagtaatgacgccaggaatgagatcccacacagttccatttatatggaaatcttgagattgtccatcaccagtccctgtttgttcataaagatcaggacacatcaacgcagtcttcaaacaagagctgtttcgccatgcaggtttctctgcaaaattggaggccagcaatggtaaaataaatctgatttccagatttaccaaggagcagtatttgcatctgattcctatttgctcatcaataataaattcatgcttccctctagaacaaggtgtaataggagcaagtgcatgatctagcagactgtcctcttggccctcatcatcataataagtcccaatgttctctgactctaaagtgaagtctaaatcagcccatagcatatcaagtgcagcatcttgctctgacctatcagttggactaggatcatcgtccccaaatgaaaaaaccaacggatgcaaatccttgaaactatactcaatctggggcttctggtcaaaaggagtagacttcccatcatcattgctacacatcttgtccatcagaagcttcataagagactgcctctttaacatgcggctggatttcttaccagattttgataatggattcttccttttcctcccagttctgtgatcaccactcccttgacatccattttttcgattctgactagaatctgatgagttggaatctgattccaggtctcgttcatacaaacgatgattcgtcatcatgccaagcttcagttttttcctcctctcaagctcccatgtaaatcgcgatctcttctgttgctccgtaaaagcctcgctgcccacaggggcctcactgccatctttctgaaaggtaagtggccgagtaaaatcaacctctgggtaatcctcctcccaatcaatgccacaatctacagcatcatcaatcatctcatcatcagatgagtcaatccctttcttttgctttctcctttgagcttcttcctcttcctcctctctttcctcttcttcctcttcatcttcttcatcacagctagcactattgcaatcgtcatcgttttcatcgtcctcctcatcatccaattccacttcagtgtcatcatcatcctcttttggctcatcagacaatacctcgaaatatgtattgtaagaaatcctctcctccttcataccccatgatgaccgagttctccatgcaacacaagatggcacaatcggtagcttcgctggtactaatggcttccttctcaaggcattccctgtgtcattgaccactttgacttcctcgtcagagtcaagaatttcaatataggagctcccttcattaaaactgagagatccttttccctttgactccatctcatccttgatagcctcctcatcctcatgaggcctcacttcactaacattaacattgtggctcaccaaatcttgtgtttccaccttagaaaagtcatgcatttgtacagatttgtcaccttcatccgcatcacccccaaaattatcaccgtcgtcatcagcatcattatcattatcatcatcaaattccatctcatcctcagcttcccagtccactacatttgtatccaaatcagcaaattccatctcatcctcggcttcccagtccactccatttgtatccaaatcagcgccattgctgtaagcacgaatgacatctccgacaagcttttcctccaacatttcatcgtcgtaatcatcctcatcggaagccaactcttcattcactggatccaccactgataactccgtgttcccacgatcctctgtgccctccccagcgatgatctcaccgccatcacgattcgaattggcgacactggcttccacattaccgcagtgctcctcaattcgatccccaccagcgacgctggcttccccattcccgtagtgctcctcctcaattagatccccaccagcgacacttggacgctcctcgcttgcctgatcaatgccatccgcgttacacacgcgagactcgccattaccattgtgcgaagcgtcatcggctcgcccgctgctgccacccccgtcaacctgtgacacctccatcgattctccgcgagcgggagtccccgcctctgcttccgcttcctcctcagcctctgcttccgcttcctcctcatccgcctccgcctccttgcgcttgcgcgcaccacgcccgcccgctgaccccgaggatcgcacgcggcgcttcgacggccctccgccacccgcctccgcactcgccgcccccttcctcttcctcctcctgctcggcgcctcctccgccgcagccggcggcgtgacgggcgcctgctgcgccatcgccatcctccgcgatcgcgtccgcgtcgccacggcccccggaaccaccaccctcctcttcaccgccgccgccgctccacccccaccgccggcggagtcatcagcagcgtcctccccgtcgtcttcgacatcgatgaccaccaccggccccgcgtcgcctccgcggcggcggccccgcaccatgcggtattcagccacggtcacgccgccgccgcggcgggcgaggcgcgcggcgcgatccat

SEQ ID NO: 22267 - DNA, 689 bp, Oryza sativa
  Clone ID: TF_LIB4309-046-R1-K1-A2
gtctttccaaagtatgagcgccgcctcctcgccgccgcctccctcctcctctccgccgatgcgcagggccaaccaccccacgccgccgcccaactcggagtcggagtcacggccgagctcaagccgcaccaggtcgatggcgtcgcgtggctcatccgccgctaccaactcggcgtcaacgtcctgctcggtgattttttgggacttggcaagaccctccaagcaatctctttgttgagctacctcaagatccactccatctcacctggaccatttttggtcttatgtcctctaagtgtcaccgatggctggctctcggaattcaataaattttgtccttctttgagggttatccagtatgttggtgataagttgcaccgtcgtgatctccggagaatgatgtttcaggatgtccaaaaatcttcatcgtcatctcattccactgagttaccgtttgatgtcatgatgacaacctatgacatagccttaatggaccaagaatttctttcacaaattccttggcactatgttgtcattgatgaggcccaacgtcttaaaaacccatccagcgtactgtataatgtccttgagcaacgctttatcatgccaagacgtctgctactaacgggcacccctatccagaataacctttctggactatgggcattgatgcacttttgcatgccctc

SEQ ID NO: 22268 - DNA, 743 bp, Oryza sativa
  unsure (1)..(743): unsure at all n locations
  Clone ID: TF_LIB4309-004-Q1-K1-B9
ggccttacgagtgcctacaggtttgacttttctgcgaaaggaggtgaagaagaacaagaggatagtgaagagaagagaaaagtcgatgttgtttcaaagcttcatgccatattgcgcccgttccttctaaggcggatgaaggaggatgtagagcatatgcttccacgaaagaaagagataatcatttacgctaacatgactgaccatcagaaacaaatccagaatcacttggttgaacaaacatttgatcaatacctgcatgaaaaatcagaaattgttctgcggaaacctggcattaaggcaaagctaaataatctgttaattcagttgaggaaaaattgcaacccatcctgatcttnnctggagtctgcgtatgactcatcagngtctgtatccancctgttgagaagctcttggaacagtgcggcaaatttcagctcttgaacagattgctaagtttgctgcttgcacggaagcacaaggttctaatattttcacagtggacaaaagttttggacattatcgagtactacttggaaacaaaaggccttcaggtttgccgaattgatgggagtgttaagttggaagagaggaggaggcagatagcagaatttaatgacttgaacagcagcatgaatatctttattctaagcacacgggctggcgnggcttggtatcaatcttacttcagcggatacctgtatcctatatgatagtgactggaatcctcagatggatttgca

SEQ ID NO: 22269 - DNA, 4230 bp, Oryza sativa
  Clone ID: TF_OsC1528_2146
atggcgatggcgcgatccatcctcctcctcctcctcctcgccgccgccgcctccgcctccgccgacgcgcccttcctcgtcgcgcacaagaaggtttcgctctcccgccccaagcctggcgtcgagcgcctcgccgtctccctcgacctctacaaccagggatccgcaactgcctatgatgtgagcattaatgatgatacttggccaaaggaggcatttgagcttgtctctggagagatgtcaaagacattggaaaggcttgaccctggtgtcactgcttcgcatgcatttgtcttggagaccaaagtacagggcaggtttcaaggttcacctgcggttattacctatcgtgttcccacaaaggctgcgcttcaggaggcctattcaacccccatccttgcacttgatgttcttgctgagaggcctccagaaaagaagtttgaatgggctaaggtgactagctccatggaggacgatgacgatgaccaacgcttgcttcacagccttggtgtcacgtccgcagacatccacgatattgaaaggagaatcatatcacaggcaacaactgatcctgccgactcatctggaccaaccatcaatggaggtcatcagcctgatgatgctctcgccaaactgcatcacaaactgcgctctgtgcaaattgaaattgatgctgtagcctccaccatcaaaggagctaagcttaagcaaccatccggaaataaaccacatgagcataaaggcaaggaccagccagatcatcatggagcaggacacctccagcaagcccttgctgccgaccgtcttacaagcctcaggaaagctaaagcacagatacagaaagagatactacagtcacatccttctccatctgcctccaatcgaaaagataaaatgctggccatgctggtccaagacgagccgaggcacaaaaagccacccgtagggcctaaaaacatcgtgaaacgcccgatgaaaactgtcacctatgatgatgacaacaacttcgatgcagtgcttgatggagcctctgcgggatttatggaaactgaaagggaagaactgatcaggaagggtttgttgacaccattccataagttgaagggcttcgagaaacgtgtggaactacccgaaccttctcatagacaagatgattctgcaggacaaactgaagaagccatggaagcttccaggattgctagagttgctcagtcgctaaagcagattgcacagaaccgcccagcaaccaaattgcttgattcagagtctttacctaagctagatgcacctgctgccccatttcagagacttggaaaacccctaaagcgtcctgtctctcccagttcagatgagcaggaaaagaagagaccaagaaataagaccaaaagaccactgcctggcaagaaatggaggaaagcaaactcaattaaggaatcatcattggatgacaacgatgttggagaggcagctgtgtcagtttcagatgatgatgaagatcaagttacagaaggctctgatgagttaactgatgttacccttgaaggaggtttgagaattcctggcacactttacacgcaactatttgactaccagaaagtgggagtgcagtggctatgggagttgcattgtcaaagggctggtggaataattggagatgaaatgggcctgggaaagactgtgcaggtcttgtcatttcttggttccttgcataacagtgggctctacaagcctagcattgttgtttgtcctgtaacccttttgcaacagtggcgaagggaggccagtagatggtatccaaagttcaaggttgagatcttacatgactctgcaaacagttcatctaaaaagagcaagaggtctagtgattctgacagtgaagcttcctgggatagtgatcaggaagaagcggttacatgttcaaaacctgcaaagaagtgggatgacttgatttcacgtgttgtgagttcaggatcaggtttgcttctgaccacatatgagcagttaaggatcctaggggagaagttgcttgatatagaatggggatatgctgtattggatgagggtcaccgcattaggaatcctaatgctgagattactcttgtgtgcaagcaattgcagaccgtgcacaggataattatgacaggtgcacctattcaaaacaaactttcggagctttggtctctctttgattttgtgttccctggaaaactaggtgtcctgcctgtgtttgaggctgagttttctgttccaattactgttggtgggtacgctaatgcaacaccattgcaagtgtccacggcgtatcgatgtgctgttgtcctacgtgacctggtcatgccgtaccttcttagaagaatgaaagctgatgtcaatgcacagcttcccaagaaaacagagcatgttcttttctgtagtctaactactgagcaacgtgctacttatcgtgcatttcttgctagttcggaggtggaacaaatctttgatggtaacagaaattccctttatgggatagatgttctaaggaagatatgcaatcatcctgatctacttgagagagaacatgctgctcagaatcctgactatgggaatcctgaaagaagtggaaagatgaaagtggttgagcaagttcttaaagtatggaaagaacaaggtcatcgtgttcttcttttcactcagacacaacaaatgcttgacattatggagaacttcttgacagcttgcgaataccaataccgaagaatggatggacttacacctgcaaagcaaagaatggcacttattgatgaattcaataacacagatgaaatttttattttcattctgaccacgaaagttggtggactgggtacgaatttgactggtgcaaaccggattattatatatgatcctgactggaatccttcaactgacatgcaggctagggaacgtgcatggcgaattgggcaaactagagatgtgacagtttatagactgatcacgcgtgggacaatagaggagaaagtctaccatcgtcagatatacaagcatttcctcacaaacaaagtactgaaagaccctcagcagaggcggttttttaaagccagagacatgaaggatttgtttacgctgcaagatgatgacaataatggctcaactgaaacatcaaatattttcagccaattgtctgaggatgtgaatatcggagttccgagtgacaagcaacaagaccagctatatgcagcctctgctacaccgacaacctctgggactgaaccgagctcatccaggcatggacagggtaaagaagaccattgccctgaccaagcagatgaagaatgcaacattttgaagagcctttttgatgctcaaggcattcatagtgcgatcaatcatgatgccataatgaacgctaatgatgaccagaagctgcgcctagaagcagaagctacacaggtggcacaaagggcagctgaagctttacgccaatcacggatgctcagaagtcatgaaagtttttctgttcctacatggactggaagagctggtgctgcgggggcaccatcctctgtccgcaggaagtttgggtcaacactcaatacccagttggttaattcttctcagccatcagaaacttcaaatggcaggggccaaagtcttcaggtgggtgctctaaatggcaaagcactgtcctccgctgagcttctggccaggatacgtggaacccgagagggagcagcttcagatgcactagaacatcaactcaacctgggatcagcttccaatcacacatcgagttcatcagggaatggccgtgcatcaagctcttctactaggagcatgatcgtacagcctgaagtcctaatccgccaattgtgcaccttcatacagcagcatggtggttccgccagctcaacaagtataactgaacacttcaagaaccggatactgtccaaggatatgctgctgtttaagaatctgctgaaggaaatagctacgttgcaaagaggtgcaaatggtgcaacgtgggtgctgaaacctgactaccagtaatattagctatagctgcaaagttttggctaggtgtagcgaacagcataaattaatttcattcagattggagatgcaaaaatcgatgagggaaatgcctctaatgcctttttgatgaagactgaattctttttgtaggcaatatacaacttttgtagggtagatatacaaatctgaaacaaaaacatgtaggtcacaggttgt

SEQ ID NO: 22270 - DNA, 5156 bp, Oryza sativa
  Clone ID: TF_OsC4180_1
ctcctctcaaacacaagcctaagaggcacccgagatcagcatgtgttccgttccgtggtcgtcacaattagtacaagtagcatgcaaaatgtcacgccttagtgactactagcatgcaagcatggattttaagcaaaagaaacagacatgccctacgctacaaggatagaagacagaagcggcaggctcaatctatccatgtcgcatctctgcttcaacctctccgccatttcaccaaacttggctctcaactcacccacatcagccagctccatgctcttgttcctttccagcatctgctcactctcttcaacttggtcggaatgcacatcgtcggtagagatccttaactgccgcagatggcttctcagccacatgtttgcgtgtagggtccctttgagaggcggcgcctgatggtgtttaaggtcagggttagggcttcgtctatgtgaggagccccgtaggttcgtgcgcgtgtggctcagctgccggttcatgatcctgttgcctgtcggtgtgccgacgtgcttcgaagcaggacaggagcgcttctcttcaatgtcgctcccgatgtcgcggtttggactggggtctattgatctcattcctttcttgttcttgcgcgagagcgggcaatgacgttggaggaatggaattcttttttcttcatagtattggctgtcctaattcaagcagagtcccatgaccctccgctgtactttctctaggtgcttttcgtattgcgagagatggccaacacatcattatcattcaatgttggtaagattgcgttcttagaaaacagaaagctgtgatgtctcaaacccgctatgccttgttgattctgtaattgtctttactacatcaaggagtcatctatcataatttgatgtccatgctcttctggccattgcttttgtgtcagcaaaacatcacacccttgttgagggcgaatttaaagctctagggtcgaccttttgcttagctacgattggattccaagcaggatcaactactataacccgatctgccttggtgagtgtattgccaagtccaccaacatgtgaggtcaacaacaatattggactgtcaagcccctcttgaaagtccttcagaatcttcttcctctcagatatcttggtggtaccatcaatacgcaggaacttatggccctcgatagatacagcatcctgaataaggttaagcattacacgtgtctgtgaaaatatcaaaacatagtggccctcttcaacaaggttcctcagtaagggaaggataaaagctatcttgcaggaggcgccttggacaatctgtagtcttttgtcagcataaaggttatcttcaagaatcctttccaccatgcacatatctcggttattcagcatggcacccatttcttccaggaaatcatcagtatctcttttagtcaaaagtagagggtgatcgcatattttcctcaaaatcgtgctagcttccaaggatgaacccttcaatgctccagtttgtgaacgaactggatctttattcaggaaggcttcatacaatcgcctttttgctgcatttgaagccatttgcttctcttgatcagtagcattcttgtcatttccacaaagaattggcttctcgtacctaagttcgaaccaggacatctttaatttattttgaataggtgttccagtgagtacaatgcgatgagcagaaggtatttgaaacaagctctgtgccctttgcgtctttgtattcttgacaatgtggccctcgtcaagaataacatagtcccacagtggttcttcttcgttgttgtcaacattgttaccgttgccattgcctcttagtaacatgtaattattccggacgatgtggtaggatgttagtagaatgccaccctcctggatggtcttgccgagtcccatgtcatcggcgaggatccctccggtggcggtgcagtgcagcgcccagagccaggcgaggccgtcgcgctggtgcgggtagagcgaccccaatacgcggcgggggatcttcatcttcatcttgatggcgccgacgccggcttccaccaccatgttgactagctcctcatcctcatctacctccacctccacctcctgttgaggttgaggttgggaagtcggggccattggaacgaatcggccgttggcggcggcggcggcgagggctccgcggccggtggtgaaagtggaaggaactttaaagacaacaagggtactactagttgagtttaaacggaacggagttgagtttaattcagatcccttcctgccttcaccccgcgcccgcccgcccgcctcttcttccttcgctttcaaactttcccaatcctttaaagttcgggcttccgttggacccttcctctccaatggctccggagaagactcgatcacggtcagcttttcgtccagctcatttatctgcctccttatcttgtctccacgatctggtagcttcgccacaagcaccgtgtttgcaagggtttgcgaaagccggttgattttggccttgatttcctcaggactttctgtgcttgtgctgttcggggagtatgttcgagcaatgaactcttttggcttcatcgcataggcagcaccattggcaacatagtcagatgaggctcccttgtagtagtgcttggccattggcatagctcgacgactgctgtccaaaccatcattatcattcagtgtaggtaagattgctgtcttagaaaacagaaggctgtgatggctcacgcccgctatgccttgttgctccaggaattgtatatgcttcctcaaggagtcgtccatcacaagttgttgtccatgctcttcttgcaattgcttttgtgtcagcgaaacatcaaaaccttgctcaggcagactgaaaagctcttgaatatccctcttgctgaaataacgagtttgttctttgtgctctgtagctgtcctaaacagagcccccttgaagacctgcaatttgtatatcttttcttcgatggttccagatgtcataaggcggtatacgatgacatctttcatctgcccaattcgataagcacgatcaacactttgattgtccgtacttggattccaagcaggatcaactactatgacacgagctgccttggtgagtgtaagtccaagcccaccaacttgtgtggtcagcaaaaatattggagctccaggaccctcttggaagtccttcacaatcctttccctctcagaaatcttggtggtaccatcaatgcgcaaaaacttatagccttctaatattatagcctcctgaataatgtttagcattttacgagtttgcgagaagattaagacgttgtgtccctcgctaacaagattttggagcaaggacatcataaaagataacttgcacgagacatcctgaccaacttgcaattcaacgtcatcatcatcatgagccatatctgcaaggttcatggccattttctcaaccattcccatttcttgattatttaacatcgcatccatgccttccaaaacaccctcagcagctttcttagtcaacaacagcggatgatcacatattttcttcaatatcgtgattgcggccaagggtgacccttgcattgatgaatgaactagttcactgttaagaaaagcttcatataattgcctctggcaagatgttaatttcagccagataattagctcattcttcttagcaagctttttatcttctcccgtgccgctatcaagaaacacttcattcttcatgcgtcgcaaaaagtatggctttatccgttctcttaattccttgctttgaaccttcaagttattttgtatgggtgttccactgatgacaatacgatgtgcacagggtatttcaaatagactttgagccctctgagtctttggattcttgataatatgcccctcatcaagaataacatagttccataatgtttcttcctcgtcatcaaaatcattggtgaagttgccttttatcatcttgaaattgtttcgaacaatgtcatatgttgttaaaaggattccaccctccttgaaggcatatttaagctcatagttgcgagcatttgcattgggaccagagtagtctctgatcttatctttgaggctcacaactgaaagttccttggtccaatgagtcagaagcgtctttggagctacaactaacactctcttgattaaacgggaatggaacaatccagccaggaatgcagaaacctgcatggtcttgccaaggcccatgtcatctccaaggatccctccagttcccctacaatgcagaacccaaagccacctgagaccctcacgctggtgggggtaaagcatgttgaatatccttcctgggagattgtagggcttgcgcgttacacctgtcccagtgggctccatcttgaagtcctctgtcttctcccaaccaacatcatcagcatggttttccttcccattctctgcatcttggtcgatgtcgtcttcatcgtcatagtccccaaaaaattttgaggccttggattcggttgtggttttccttgacaccgtatcaaaggcataagctcctttggctttcatcttatcatcgttgccgcggcccccaaaagaagaagaggccttgaacaccttcctggtgacctcctctttaacaccaaaaccaccgtaggcacctcccgcatcatcgtcgtcgtcatcacagtccacaaaggatgaagagggtttggtcccatcattaagctgagactgagaggggtcggggtcggcatggagggcgcagggaagtggggacacgtggggtctgggccttgcggtgggcctgtcgactgacagggagtcgaggcgggtggtgagatcgtccagtatgtcgcggatgctgtcgtcgtctccggcggactcatcgccggcggtagagagcttgcagaggcggcggcggccggccagcttgaccttggcgggttcgggctcttgaggaggcggcggcggagggggtttagggttagggttagggttagggtttgggttttgggaggggccccgttggtgcgtgcgggtgaggcggaggaggcgatcgttgaggccgttgggtgtcggagcggcgagcggcgtcggcgcaggaggggtggggtcgtcgtccaggtcgccgcagatgtcgaagggcggaggggacgccat

SEQ ID NO: 22271 - DNA, 664 bp, Oryza sativa
  Clone ID: TF_LIB4309-030-R1-K1-F3
cttcgtttgctgcggcgacctggacgacgaccccacccctcctgcgccgacgccgctcgccgctccgacacccaacggcctcaacgatcgcctcctccgcctcacccgcacgcaccaacggggcccctcccaaaacccaaaccctaaccctaaccctaaccctaaaccccctccgccgccgcctcctcaagagcccgaactgctagtgtaagctggccggccgccgccgcctctgcaagctctctaccgccggcgatgagtccgccggagacgacgacagcatccgcgacatactggacgatctcaccacccgcctcgactccctgtcagtcgacaggcccaccgcaaggcccagaccccacgtgtccccacttccctgcgccctccatgccgaccccgacccctctcagtctcagcttaatgatgggaccaaaccctcttcatcagtggaacacccatacaaaataacttgaaggaaatgtgggctctgttttatttctgttgcccagaagtcttgggtgataaggagcagttcaaagcaaggtatgagcacgctatcattcaaggaaatgacaagaatgctaccaatcgacaaaagcacataggctcaaatgtagcaaaggaattaagagaacggataaagccatactttttgcgacgcatg

SEQ ID NO: 22272 - DNA, 1934 bp, Oryza sativa
  Clone ID: TF_OsC55194_1
atgcagtgcgacggcggcgcctacatgcggtgtgccgacgcccaccgttgtaaatccgctccaattgactctaccaacccacccgtgctctctcctgccgtgctcgtcgacagcaatcagaactcggaagccgaccgggaagtcgccgcgccgccatcgtgctcgccgccggtcgccgtctcggaggaggtaaagatcccgccgccgccctccctcccctccgcgtggtcggcgccgtgctccactaccccggccggcgcagatgatattgtgcacttcttctctccatatggaacagtagttgaccatcagatcactcagaaggatgaaaataaactttctgaaggatcaggcttctggtgtgccaagacaaggcatgattctctagcgcaggtgctaaaggaaggtggtgttctgcttattacgtatgatctggtgaggttgtataatgaagaactaaacggcatgagcagtaaaagctcaaagatgagaagagcttgtccttcatgggactatgtgattcttgatgagggtcacgtgctgaagaacccaaatacgaaaaatgctgctgcgctgaaaagcttatctcgtgggcaaacagttgtcctcacaggaacaccggagttccgcaaaatggtgcgaccttattttcttaggcgcaccaaggaaagtattgaaagccttttacctaataaagctgatcttgtcatctggctgaagctaacgccatatcaggtttgtattgctgtagaagctggcgatgatgtagaatttgtgccagtagaaattgggggcaccacccgccagtctcgcgctggcgcgctgccgcgtgcggggagagggaaaaaaatcggcgactcgcccagtcctccaccaccctcgccgaacgcctgcacttcagcctcggaccccgactccgctcgcctctgcctcggcccccgcctccgcgggttcgcgtcgtccttcgcctgccacttccccgcacaagcccgatcgcagctcttctcccgcatgggctccgccacgtctttcgttccggcgtcgtcaccgcgccgccggccgaggacgaggacttcgccacagctgctgacctccagttcgagccgccgctcaaggtagtgaagtaccccgacccaatcctacgggctcgcaacaagcgcatcaataccttcgatgacaacctccgcagcctcactgatgagatgttcgacgttatgtacaagactgatggaattggtctctctgcaccacaagttggggtgaatgtacagcttatggtatttaatccagctggtgtgaagggagaaggagaggagattgtccttgtcaacccggttgtatacaaaatgtcgaagagattgttagtgtatgaggaaggctgcttatcattccctgggatatatgccaatgtggtgagaccagacaatgtcaaaattgatgctcaggatgttacaggggcaaagattaaagttaaattgtcaggtctgtctgcaagagttttccaacatgaatttgatcatttacaggggattcttttctttgacaggatgtctcttgatgttcttgagagcgtgcgtgagggactgaaggacctagagaagaaatatgaggaaagtacagggctagtaagccctgaaagtattgagaactacaaaggaagaaaggatctcattagtttctcaagatgaatagctttcggttctggcagtttttcaaaacatcctgctgagcttcacattgaagattgtgtattagaacagttgccagtatcacatattcttctgtcattctactttttgccagtcttgctgtatctagttttgtgcaacaccagtgatattacaaccagaaattatgctagtgatgaatgagctgtatttcctaagaaggaatatgtgaacaatattagtgtttgcaaaaaaatgattttttag

SEQ ID NO: 22273 - DNA, 4299 bp, Oryza sativa; identical to SEQ ID NO: 12932
  Clone ID: TF_OsC112724_1

SEQ ID NO: 22274 - DNA, 2039 bp, Oryza sativa
  Clone ID: TF_OsC73310_1
tgaagatctccccttggagggaaccccgcccaagaatggcgggtctcggcggcggatggggcggcgggtacgacgacgacgacgactgggggctgagcgcggagcagctcgaccagctcgagcgggacgcctaccgcaagctcgccgagcgcaaggcctcctcctccgccgcctccaccgccacctcgccgctcccctccgcggcctactcgccggtcaagaacagccaccaccacccggcatccagggtttcccaggagtcttgcttcggcaaggtagaatcactttctccttctcggcttagtcaaccaaatgcatcgggaaatgcagttaataatagtcagggcaatatgtctaaggtatcagtacatcttttccttcattctactggtgtgatcgcagcgaagttccagtaccaccagaaacttgtgaatatacccaaggaagacatcatggtcaggttgccacgaactggaggattaaataaagccggacactgattggtataatcaaataataaaggggtttgtaatctggatggggtagtcaatgtgatatcataagatgttgtgctggttaaacaggaactaactccttctttatattccggagatcttctagatttggatggcaagattccaactgatgttgagtcaaagcttatgccgtttcagcgtgaaggtgtcaggtttgctttacagcatggtgccaggaccctgatagcagatgaaatgggtcttggcaagacattacaggcaattgctgttgcttcttgccttcatgatgcctggccagttcttgtaatctctccatcatccttgcgattacattgggcttctgtggtgctaccacaaactggaggatcaaataaagcaggatacagattggtatattcaaatactaaaggggattttaatctggatggggtgttcaatgtgatatcttatgatgttgttcccaagataaaggacatgcttctggacttggattttaagattgttatagctgatgaatcacactttctgaagaatgcccaagcaaagagaacaatgcattcacttcctgttctgcagaaagctaaatatgtggttttgctaagtggcacccctgcgttatctcgccctatcgagctgtttactcagctccaggcattgtatccaactgtatacaagaatgttaatgagtatggtaatagatattgcaaaggtggcttttttgggctttatcaaggtgctagcaatcatgaggagcttcataatttgatgaaagcaactgtcatgatccgcaggttgaagaaagatgtcctttcacagttgcctgttaaacgcagacaacagttggagactgtgaagatcaaaatccagtcctgtgactcccaggagacgatggactctctcaaatttgctcaaaagaatcttattaacaagatctacaatgattcagctgaagccaaaattccagcagtgctagattacctgggtactataattgaggccgagtgcaaatttttaatatttgcacatcatcaatccatgcttgaagctattcaccaacatctcttgaaaaagaaagttaagtgcataagaattgatggtcaaacacctgtacctgtaagacagactctagtcacagatttccagaataaggatgacatcaaggcagcagtgttatccataaaagctggaggtgttgggttaactttgacagcagcaagtacagtaatctttgctgagttatcatggactccaggtgaccttattcaagccgaagaccgtgcccatcgtattggtcaggtttcttcggtgaacatatattaccttcttgcaaatgacactgtggatgacattatatgggacgttgttcaaggcaaacttgagaatttgggacagatgctggatgggcaggagaaaacgctggatgtgtcccagagcgacactaggcccagcccttccaagcagaagacgctcgacgcctacctcaagcgatgcagcaattccacagaagctgatcagcccaagctcaagaaccctaggttctga

SEQ ID NO: 22275 - DNA, 3663 bp, Oryza sativa
  Clone ID: TF_OsC5164_1
ttcggtttttaggaattaggcacgaggtttttagaaagggtagaggcctttcatgttaagaagagccactatatacaaaatgttcagaccagaatggagatatatccacaaaatcgaatgggcacatagtttcacacccattccatccccattcacaggtccgaacccttaaaacattggatcatttcccctaaaatgctagcaagtctccagggaacaaaatatgaactgtacaacatcctgcaaactcatgatcaagacttctcatgtaaacagcatcttcagttgctcgatacgagcggagcggacttcatcgtcggtcagcgccccagagatcatcctctgcttgcacgcttgcaccttctgcatccgctcctcgaccgtatccttgacgatgaagcgccttacttggaccgctctcttttgcccgatacggtgaattcgcatgatagcttgttcttccactgcaggattccaccatgggtccattaggaacacattggaggcagcagtcaaattaagtccaacacctccagccttgagtgacataagtagcaccagcttgtccttgctttcactgaactccttcagaaccttttctctgtgtttctggctgagcttcccatcaaacctcaagaatttgatccctttctgattgaagggaacctcaagaagatcgaagaaggaagtgaactgactgaacacaatgctcttctccctcttctcctgaaggccctccaggatcttgatgagttttatcaccttacatgagtccttccagttattctcagggtcaacctggaatcgacactgactaggcaatgtgatcagctcagatttggtaatggggcttcggcaaagtgggcatggtcctccagaaggcgtcctccagctagagagcaggcactcacggcacatccggtgcgcgcatggtgtgagcactggatcatcagaagctgattcaaggcagattggacactcagtagttgcgccctggcggatttcttcaacaacctcttctacatacgcctgtgaaggtggcgcactgcgtctcgcggaatcacgttgcaccccatcaaggaacctctgtgctagctcatcgaggtcagtatacttctgagtatcagctcgactgatcactagaaaagggtggtcgcagcactgccttagccgaaggagtaactcaagaatattagcgtagttgttaagaacactgccttgtgctacaaatttatcaaattgaacctttgatctcctgaaaagcgcttcatagaaatcgcgttcatcttcagattgttcgcactccacaatctcaatattagctggtgggaggactagtatgggatttcccattttgtcttttgtttccttcgttctcctcagcatgagtggcctcagaatagctctgacaagtttcaatcccctctcatcaccattctcataaggtctttgaatcagcttattccaccaacttgcgtcaccccatggttctacatgtaggaagcaaagaagactgaaaaggtcctccaaattattctgcaatggtgtacccgtaaggcaccatctgcaatgagaagttaattcataagctgctcgtgctgctttggttctgggagatttgatcgtatgtgcttcatcgagcacaactctataccaatctatcctgtgaaagatactgctgccatcattcttgtgagctgattgaagaacaccataggttgtcaagacaacactatgctgagccatgaatctcaggtcagtggttctgtcgccaccatagtagacaaacacagaaagagctcctggtgttgaatgtgcctccaattcatccttccactggcctagcaatgccattggacagattataagtgtgcctcctcttacagaggatctcgaagtttgtgccttggtgtcacgatctctagtacccctcttatcttgttctaactccccccttgggtttgatagtattagagcaatagtcatgacagttttaccaagacccattgcatccgctagtatccctcctcttgctgactgagttacactttgaaactgggttgttgcctcgccagtgaaaacattgacatacactgcaggagctctcttgtcgacgattttgtaggcactccaacagggatgaagggtttttttggcttgatcaccatcaatacccttctccaattgagacatccagaacagagcttccttctggtatggttttagaacggagacaagagtgcttgggggctctgcttcctccaagtcatatgtttcagcagtgccaacaattttgtttaatgcagcctctgaaatagcttgctcatcagtgccttgctcaggaaatgtttggccagctgtgcgtcggttttccaatccaactatagccatgggttcatcttcatcattgtcatcaccccttagattccgcggtctctttcctgcagcaagctcctcaggagtgatatcagccttggtgaatgcccttagcttgagcaatctgaacagcctgtaaagagggttagtggaataatcaacatttgcaggagcaagcaggtcccatgatgagttgttgccgcttgcggtgaatacagaacggtggatgtagaagctaacatacaacaaaatctcctgcatcaatctcaattccaccgtgggaaacacaatcttcccctgaatcttcaccttggatgagcttaccagtggcacgaggcacttggtccattctgtagatagcttcccaatctctccagctcgattggtggagaagcgcacgatctccgccaaagcagccgccttcttgttcgacaccttgatcccaccataggtcctctccaatgaggggaacgagaaatggacgagctcgccggcgtccagcctccgcctcccgcggttggtggacaggccggtgacgtacgacctgccgacgaggaaccagtcgcgctcctcggggaactcgccgaactcggcatcaggcggcgccaccaccatcctcagatcactcgacggcggaggcggcctggcacgcacacgccgcgactcgagcatctccatggcctccggtggcggcaccgcccggatcggcctcgggttcaggtacggcaccgggtgggtcgccgtgaggtcgatggtgtccgcctcgtcgtgcacgcgagacctcttcttcggcctcggcaccaggcttatgccggcggcgttcgccgtcgccgcgcctcgcttggccgcgacgccgtcttcctccttgacccgatccggcatcggaggcggcgctttgacgagcagctcgtcctcccgctccttcttgaccctcgcggagcagccgttcgattcttggctccccaggggctcgtcgtcgaggacctcaaccttcaccggaggcggcggcggcttcggggcggcgccaccagcgtcgcgttccgccttcaccggaggagcagccgtcttggcacctttacccttcttgggctcgggtttgtcctcgacgccggcggtggcgtcatcgaggagcgcgttgatggcgcgctcggcgttgcctccgcagcgggagattgcggcgacgacgcgggcctcggggaggcccgcgccaagaaccgcgcggacggcggcgatctcgtcggcgtagagcacctcctgggacggcgactccggccagtcgccgtgcat

SEQ ID NO: 22276 - DNA, 599 bp, Oryza sativa
  unsure (1)..(599): unsure at all n locations
  Clone ID: TF_LIB4309-023-R1-K1-C11
gtctatttgaaataccctgtgcacatcgtattgtcatcagtggaacacccatacaaaataacttgaaggaaatgtgggctctgttttatttctgttgcccagaagtcttgggtgataaggagcagttcaaagcaaggtatgagcacgctatcattcaaggaaatgacaagaatgctaccaatcgacaaaagcacataggctcatttgtatcaaaggaattaagagaacggataaagccatactttttgcgacgcatgaagaatgaagtgtttcttgatagcggcacgggagaagataaaaagcttgctaagaagaatgagctaattatctggctgaaattaacatcttgccagaggcaattatatgaagcttttcttaacagtgaactagttcattcatcaatgcaagggtcacccttggccgcaatcacgatattgaagaaaatatgtgatcatccgctgttgttgactaagaaagctgctganggtgttttggaaggcatggatgcgatgttaaataatcaagaaatgggaatggttgagaaaatggccatgaaccttgcagatatggctcatgatgatgatgacgttgaaatgcaa

SEQ ID NO: 22277 - DNA, 1948 bp, Oryza sativa
  Clone ID: TF_OsC86959_1
atatgttacacagaacaacattatatgagatttacagatacaccaccagatggatctcttgataaaacagggagcaatggcagaattctcctacaagctggggtcaaatattcaacacaggctagcgactaagcctactacatttcgtctagcaaatcagagcatgacaaaactggagctgctgcgagccatggaaggacacaaatccgcagtacctcgcaccaaaatactcagcagcggtacacagctgttggagttgcatctaggcaaagatcacaggctactatacaatgtcattgtatcgcaaagatcacgggtgcttccaatcaaaacctaaatagatacttcagatcatccacggtgagccgagtcgcgtggccacccgatttgtcttcgccaaaagcagagctaaccatggctctcttttcctcctgcagagctaaaatgcgatcttccaccgtatctttaatggttaaacgggagacagtaacaggacgagtctgaccaattctgtgtgctctatcaattgcctggtcctcagcataaggattccaccaaagatcaaggagaattacatggcaagcagcaaccatattgagaccaagattacctgctttcagtgacatgatcataaccctgacctctgggtctgtgttaaaatctttcactgctttatctcttgaattgagggacattgttccatctagtctcctgtactgtatgagattgctattcaatgaaagctccagcaaatccagcatgccagtccactgggagaacacaatggctttcactggggccactcggctaggatttgattcgacggtatcactgtcggtaagggcataggtgttaatgatcgaattcagtatatcgattgccgcctgtatctttgaggatatgtaactagtttgactaatagaagatgactcgtcatctaatgatgaactccctgatgcatgagaactggatacaccagacatgcaaatccttaacgctcctgacgaaaatactgaatcggtacttaatgtgtttccacaattaggggagggacacatattctcatcagtagttatccgctcgtatatacattgatagcagaagacatggccacacatcgtcacgacggcatcctcaggtacatcactgcatacagaacaaaactctccaacttccagctttgcaagcaaatttattatcatttctttaggaagttgctttgccatttctatagaaccatcgcctttatactctgactgatgccccttcacaagaagaggatgatcgcaggcctgcctaaggcgcaacagcattagaagaatgttggcatagttctgtttgagtgtaccagcagcagcgtatgccttgaactgttgccgcgagcgttcttccagcgtcaaatagaaagctcgctcctcttttgtaaaatctactttatccagattaattgtctttggaggtagctttatgattggctcaccatcaatcagagtttcttttgtgcggcgcaggagaactatcctcaacacagtctgaagtttcttatacccatgaactgcatttctagcaatcgggtgctttatcattgtacaaaatgaattataagtagaatatggatcgtatttcaagaaatggaaatagctgtagagctcatcaattgcattttgtataggtgttcctgataagcaccatcttctttttgcacgtaatccacaacaggctttagccacttgagttcgaaagttctttattgtctgagcttcatcaaggacaaccctaaaccatcgcactcttgcaactgcgccactggcaaggtaaatgtctgaatccttaagtttctttttctttttcttcgacttgctccgcgcgctgggtggttgttttctcttattaccagcagaagattcttcaccattcttctgcctcgtgccgaattcctgcagcccgg

SEQ ID NO: 22278 - DNA, 3382 bp, Oryza sativa
  Clone ID: TF_OsC1528_2344
atggccgctgccggcagggacccgccggcgacgccatcctccagaatgtattactgcaggcaaaggaaggcttcttctgaggtcaatgccaatgtgtttgtgcctgggggtcagaatggtatttcatttcctgcatcaaatagggctcatgattggggatatggcggtgttcgcgaagaatgggaagctagttatgctcgcaaactccagttgatcaattttctttcttcactgcatcaacgcactgcaaattctttgataaccactagaatggatgctaacatggacactcctttggagcaaaaacaaaaggacagctcagcaataatagttcttgattccgatgatgaggacgaagcagaaagatgtgaacagctcgcatctgagaacaataaacaacaggcaccatctggacccactagtccttgcacaacatggattgtatccagtgcgaaagaccaagtaaatggaaccttgcatgttgatggagtccaaagcactcaaattgttccatatggtcaaaatgcacctttaataaatcagtcccctttgcaaaccagctggcaaccatctatccaatatgaaagggttatattgcagagaagacctgaggagcaacgcgttcaagatcttgtggcagcaagccatgcagagaagatagcagaaacacaagttttccttactctgcctactcttcctaatgagagaaaacgaaggaaatcagaaccgaccaccctggtagatggagatggtggaactaacctagggaaaggaaaaaggaaaaatcatcaaaatcaagcagcagttgattcaatcttggatttgcaacaaactgttgttcctttgcaacaaaatgatgttccttcacaaagctacaggactatgatagaagaggagaaacctgtaaaagaaagtgatggtctcgaggatctttggaaagatttttcattggctgctgaatgtacaaagcttgatacaaatgaagacatgtccaatgaaaaagatgtggatgatgaaaacgagatggatgacgattgcaatcatgacattcggattcatgaagatctaggccatgtatgccgtatttgtggcatgattgttagaaaggctgaaacaataattgattatcagtggaaaaagaaaaacctgctatgggggatcttctctttactgaaatacttcctaaaatgggagagtgttttcattaccaactatattgatattgataccgctttggagtatatagcttcaaggacaagaacaaattactatgaatcacgttcaaaggatgctgatgatattgatactggtgctgttaaagtttctgaagatttcattgtctctgatattgccattcatccaagacatgcgaagcaaatgagaccacatcagttggaaggattcagcttcctggtcaagaatctagttggagacaaacctggaggttgtattctagctcatgctcctggttcagggaagacatttatgctcataagtttcattcaaagcttcttagcaaagtatccttctgcaaggcccctcgtagtgcttccgaaagggattttaggtacttggaagagggagtttcagcggtggcaagtggaggacataccactatatgatttctattctgttaaggctgataaaagaacagagcaactggaagtcctcaaatcttgggaagcccggatgagcatactatttcttggatacaagcagttctcacgaatcatctgtggtgatggagatggaaacattgcagctgcgtgccgggacaggctgcttatggtccccaacctacttatactagacgagggtcatacaccaagaaatcgggaaacagatgtactggcatcactaaaaagagtccaaacaccacgcaaagtggtcctgtctggtacacttttccagaatcatgtttcggaagtgtttaacatcttggacctcgtgcgccctaagtttctcaagatggaatcatcccgtcctatcgctagacgtataatgagtcaggtagcaatatcaggtatcaggagtttaaaaggggttcatgacagtgcattcactgagtcagtagaagacaccctgctgaatgatgacaacttcactagaaagtctcatgttattagaagtcttagagaattaacaaaagatgtgcttcactattacaagggtgatatcttagatgaactacctggcctagtggattttagtgtgttcttgaaactcagtaccaagcagaaagaaattgttcacaagatagaagcctatgaaaagttcaaaagaagtgcggtggggactgcattgtacattcatccctgcctgtcagaaatttcagagggtgatgctgcagatagggcgaccaacttgacagatgccactgttgacagcttgattgagtctatcatcattaaagatggggtgaaagccaagtttttctttaacattctgtctcttgctaactctgcaggagagaagttgcttgccttcagtcaatatatacttcccatgaaatttttggaaaggttgttggttaagaggctgggctggcatgtagggaaggagattttcatgatatctggtgatactagtgcagacgacagagaagtggcgatggatcagtttaacaactctgccgatgcaaaagttttgtttggttccatcaaggcctgtggagagggaatctcccttgttggtgcatcgagagtcatcattctagatgttcatttgaacccatctgtcacccgtcaagcaattggacgtgcattcaggcccggacagcagaagaaagtgtttgtgtacaggcttgttgctgctgattctccagaggtgaagttccatgaaactgcgttcaagaaagaagttataccaaagctatggtttgaatggagtgagctctgcactactgaagacttcaaactgaatcaagttgatattgatgactctgaagatgaactattggaggctaatgctattcgccaggatatcaaggctttgtatagaaggtaacaagctgtatgtggctgctgtataccatgtacataatgcaatgctgatctttctggatgatcattgctgtgaaggtgtggcagtagccccttctagtgccggcgttcccttcatgctaggatttttcgttaacctccgtcatttccctacctgttttgaaccactgtccgatttgtaacatgtgccagcttggtgcagcggttagcgtgctgatcctagtctcatttcttactgaaaatctccaggattaataactatggtttctgccgttcctgcttgcggcaacaacttaaataatgccactgtttcctgaaaaaaaaaaaaaaaaaaaaaaactcgagactagttcttccctgcagcccggggatccactagt

SEQ ID NO: 22279 - DNA, 4911 bp, Oryza sativa
  Clone ID: TF_OsC52680_1
ttaggctgaaggagtccgatcttttgcctcttctgtatcattatcgtcaggagatatgttattctcagctgcttctgccggattgtcaccatcagtcgttggttcctgttctggttccttgtcctcgttcaagttcttcatcagtctcttcgatcttttaggcctaggagctgcaatactatcttcatcctccacttcaccgccttcagcctctgcattcttgtccacactaccattatcctgcaactttggaagcttcttttgggagcttttcttctttttgcttgatgtgttatcatgttctgcagcccctgaagtttgatcatccaagtcttcaagcatcaaatctccttctttgtcaaccttgatgccctttgtacgcctcttttttagtcggtcctttgcctgcattgatatttcttttaatttgtgcgatatctgtgtgtcatcaataagtaatgaaacaacatcctcttgtctcatcagatgatcatcctggacatgttttcctttcatgaccaactcttgcactgcatttttctgctttgccctctgcaatatcttctcttctattgtatctttgcatataagtctatacaccgttacctcctttgtctgaccaagtctgtgtgttctatccattgcttgctggtcttgtgttgggttccaatcaatttcataaaaaataactgtatcagcagcagtcaaattaatacctaggcccccagctcttgtgcttagcaagaaaacaaatatatcgttccggttctggaagtcccggaccatgtcacgtcgatcagatattgccgatgacccatcaagtctgaaatacttgaattttctgaagttcatgtagtcctcaagaatgtctaacattttagtcatctgagcaaataagagcacacggtgattctcagctcggaggcgccgcagcagtatatctaaggtttggagcttcccagaatctgtaagcattttagctgggtcaaagttactcataggtggagatgacccaaatatcctatatggcagttgtagcatcggctcggggaatggcaaatcagtatgtaattcttctatcagagaatgagggctggttggttctctagggccattgaactcagaagttcgagcaaatcccagaaccagtttcttggccaatggatcatgcatctcatcagttaacttgtaggcaaaatttcggtctgcgcaccagacatttatcggtggtgctctagcaggtggaataaaagcatatgttgaacgaagaagtcttatgttagacacaagcctttcatggtgagaaagcactagtgcttcatatgggctatcactcgggcctgtctcaatctttgttcttaggaaactggactctgcttttgtaggtgaaagcaacaagcgaacaacagcacgaactgttgttaaatcattatgagtggactcaagatcagtactttctgagtcaaggaatacatccacaagttcatcggtgtacttcttgttccatcgcactgctgagaatgctagtctgttgaataatgagcaagtggccaggaaagaagcttcaactggggagagatttattaaacgtgtaaaaccgaatgcaccagataacagaacagtattatttggtgagatagcttctggaaaagctgattgatggatgtagcttggcgaaaatatattaaacatcctgttgaaagatccatatagaaatccacaaccacgcacaggcatttccatgttcgagacgattcctttgtagactaactttggaatctcaaacattattggattcctcttccctgcataatgcacatcttgcaattccccaaatgcaggagaaagaagtgagttcgggatgtcagcaaagtaaaagtaagagctcccctcattgcgctcaaacagctctggatgattgcagaccttccggagctgcatcacaatattcatcaggctaagtaatttcttatcatttagattgccacgacttccatcaagcaactcgttaagagatattttattctttatggcttgatagaagacttgctggcgagaactcaatctgcagggcacaatttcttctttctttttggtcatttctgcaatgacatcaatcttaactcgacggagcatgaagggctttaaaatagcatgcagtcgactaagctgatgttcattcagagcacctccatgttcggcatgaccctcaattccttttgagaaccactcattaaactgttcatggctgtcaaacaaagtaggcatgatgaaatgaagaagcgcccataactcagccatgttgttctgtataggtgttccagtgagaagcaagcgatttcgacagttaaaactcagtaatgtcttccatcgctggctgcttgaacttttaatagcctgggcctcatccaaaaccatgtattgccacttaacacgtctcaaaagcttctcttcattcacaagtatctcttcagcccaattattcacaacagatgcgggagccacaacaagaaagggaccccatatgtttttgtcctcagccaaatgtgctaagaatgccatagcctggacggttttgccaagacccatctcatcagcaagaataccatttaatccctgctcgtagcaattaaccaaccactgtaaaccttttaactgatattcttttagtgcacctttaaacaattctggtgtctgcacagacgacttctcaggcattgttgaggggtgtaatagatcaatcttgttaggctccatactagctaaatcatcagttggaataccagagtcagatgattgacgaagcctcccagtttcactatcaaacgcatttgtcatccttttctgttgggagacagcatgttgcgcagctctcaaggcctctctctttaattcagcttcctcaggatcttcctcatcctcttcagggacagatgcctcatctgatggtgctgattcaccagccttattctgcataaagtgactataaagctcagtttgggataggagaaagttgagcctctgttgctgtctttttgcttcacgtagctcctcttcacgcttcaaagcttcagccgcctccttttcttctcttttcctcaattcatactgctccttgtcaactcgcttccaaaatatcaacatatccctagccagcctccgtgtacgtatggcggcactcctcatcaatttcagtgacctgcttactttgaactttacctcccgttggcaattctcagaaaaacgcttagcatctacttgccgtttcttcagcaaagccatgaaattcctgtggtgcctaggaatgcctttaacagcaatagcatgccaaagtttaatagtcttttctgactcttctcttgcaatttcagaaggatcctttcttattatttgcttctttggcaaactacgctcgataatctcatatgtatctcctttttccaagactttaacgtaatgaacatgcaaactgccggattccgaaataataaatctccgtatcctcccagctgctccttctggaattgcgaagggatcctcagttacttgaagagaaaatttctgcacctttaccctttcctggagtgattcatattgtggctgaggttcagctaatccaccacgattggttgtctcaaatttttggtccgtactgagcattgccgctagagtgcgtaaatctagtgtgccattcaagaaagtttcctcgacacgtatgtcagaaaaaacaggtagattaagggatagtgccaacttatcatacccttctgggattttgtagcttacattatctcccatatctaaataggaagaatccagtgaagctacaaccttattgaaaccaccatatgcattagtagattttgtcccattatactcagctgtggcttctaccccacccaacattgcaacattccttgtatcacttctgtactttgtaactcttgcactaccatttttgtgtttctgaggaactatcacctgaggaggatcagaactaaaaacatcctccttaaactttgaccttctgtacttctgaacgtgttcactcagcattgtacggtagtgctcctcagttatttggttactgtaggcatctacctcatcatcatcgctagcaccatccagattccttttgcgcttccgatgtagcccatgggaagcatcattaattccattatactggtctgacaaggacccttgaccttggctactcatactcccatttgggctactacgcctatagcgatcaagatcttccggcaaggggaccttaaagttcagcaaaggctcgaggttgaagagggtggagtaggagagcccgccgccgttggcggcggcgcccccgcgcgacggagggctccttcagtctaactgaccaattaatcggataacaaacacagggtgctaaatggcaaggctagtgtgatctatcctgcccgatttatgacatgggcacgacagattgcatggttcattgtcaagaggaatagtcgttggatcttcctgaaggtgtcacacagttcaataagtgtttatgtgcacatctttttcggaagcctgggaactgggttagttgtatattcgattgtgttagaaggcatcagtgcagtggcatcggttgctgttaatcgtgacatgggcgaatcctctagctgttgctgcggatgttggaattgtggagacctgaccgctgatatctgtgatgctggctgtggccattatgtaaataatcatgaaaaatattgcatcacatatagaaataattttgccgtgtaaagagagtaggtgactatattaaccataagttttgtattgatagctgaaagagaacatagcaggaaagctgctgtgcttccaaattggaaacattttcgaccatttatgaacgtctatgctaatccctatgct

SEQ ID NO: 22280 - DNA, 2406 bp, Oryza sativa; identical to SEQ ID NO: 12901
  Clone ID: TF_OsC303753_1

SEQ ID NO: 22281 - DNA, 5878 bp, Oryza sativa
  Clone ID: TF_OsC10987_1
ccccctgaattcccgacgatgagatcgatgaagaggccgggaattcacctccagatttgaggggatcgatggtggaatctccttctccctttcccaccaccactaccacttctgctgctgctcctcctcctcctcgtcggcggcaaccaccacctcccgccgctagcctgccttcccccggctaacctcgccctcactcactccactactacttttcctcttccgccccgccccctacatcctagatccatccatgctcatgctcatggacccccccgcccgcagccgcaggtgcactctcctcacgcgggccctcctcctcgccgtcgccgccctcgccctccgcctcatctacgccgccttcctcgccggcatggcgctctacccgcccctccccgccgccgccgtccttggctccaagacctacctccactccgccgtcgccacccccgacgcctggcgcacccgcgactggcggaaggccgtcgactaccacgccaccctcctcgccccccacctcgccgacggcatcctctccccgacctcccgcgccgtctgcctcggcgccgtgcaggaggccctcgccatgcgcgagctcggcgtctccaccgccgtcgccgtcgccaggaagcgctcccccccgctcgccgtcgccgggaacgaccgccgcctccccttccaggactcctccgtcgacttcgtcttcgccgcccgcgccctcgactcctccaagcgcccggctgacctcgccgccgagtccgcgcggatcttgaagccagatggacatctcgtcgtcctcactaccagcgccgccgacgcattcagcctccgcgcgctccaggcactcctcccctctctccgcttgctccgatctcgccagatcaaaggccccgacgactccaccctgcgggagctcgtcttccagaagatccaggactccactgacgatcctgtaaacaagtgcacaattggggatcacaagctccaactcctcacacatgcggagccactcatccaagaggagccgcgcaagccatggatcacgctaaagcggaacatcaagaacataaagtatctcccaactctcgcagacatcagcttcaagcgcaactatgtgtatgttgatgttggcgcccgtagctatggctccagtatcggcagctggttccggaagcactaccccaagcagaaccatacattccaggtgtttgccattgaggccgacccggccttccactctgagtacgccgcaaagaaggctgtcacgttgcttccatatgctgcttgggtcaagaatgagaccctcaattttgagatcaatgctgatcccgggaaggaggatgaggccaaggctaatggccgcggcatgggccgcatccgccccatggctggcaagaagatgtccggtgaggtgcggagtgtcccggcattcgactttgccgagtggctcaagcgcacggtgtcggagcaggactatgtggtgatgaagatggatgtggaggggacagaattcgacttgatcccaaggctgtttgatacaggcgcaatctgcttgatcgatgagctgttcctcgagtgccattacaaccgatggcagaaatgctgccctgatagagctgaagcatttgagatggcaaaaggggtctcatgcttctactggagtattcagtttccaaatttcaaagaccacctctgtttcagaaactgcagcaatgctagtagtacaaggcacttcagttacaggtctcttttgatccgaacagaaaagccagttactactagaaaccatgcatatgcagaagtagttgtatttgtcttggatcagaatcctatgtttttcctattcctccgttttttctaccctgcgattcaaaggggccctaactgctggtcatctgctaactccacagtgatgaggcaagcatttgaggtgttttatgatggatcatggcatggggtaaattgtataaggataaggaacggcaacctgtttgttaaatttatctactctggatcaacagtcgagcataatgttgatggggattgtctacgcttacggtcgagaagggcgacttgttctgattgttcaaatgttctcaagccaggtgttgatgtctgtgtgcagtcatctcatacacccgaagcaagttcacaaggaggaacaaacgcttctgtgttactgcgtcatgatgcaaggcttatcacaatcaagaagaatcatcaagaagataagtgtctctgcttgtttgttgttatactctacaagaaccagtgtcctggcaatgcagaaaaagtgataactgatagaagagcagaggtagtaaccataaacgatattttcctcctgcaaaagcttcaacctgaggtccatgaaggaagcatgaaatggagtttttcaaaggatcgcctctctcttaataaaggcaggctaataagtgctagattctcctcagaaattacacatctgatagtcttgtcgatcttgaggggaatggaattcaacatcaaattggtagaaggccagatcgtttatcaaataatcaaaggagatcaagcacaatggaatcttgattccatggccatccctccaggcttcgggaatacaatggagataatatcattccaattgcgtgatgaggccttgcgcccaacaatcacaaatatccctatcactcatgtgaaaaagaacaatatcacagaagacatgagattcactgtgaagagtgaaatggatagtgaactggatagggcattagatgttgagatcttgtatgagcatgtggatctgaggcgttcaaagcgcttgaagactcagccagatcgctttacaagttacgatacacctaggttccttagtggctacaagaagaaagaagcaagttcatcacccaccaagcatgtaaggggagctgtgcattgtgattcaccggtagacgattccaaaaaagaagtagaatcatgctgtgtagagattccagggaatgttacacagaagcaaacaggtgtacactctcccatggtcgatgaaaagtcaaactctccagaaggacagcataagaacacaactaagagaactacatgctctcttgtgaaggaaaaagcaagctctccagaaggacagcatgagaaaacaacaaagagaactacatgcgctttgcctgtgaaggaaaaagcaagctctccagaaggacagcataagaacacaataaagagaactacgtgctctttgcctgtgaaggaagagccaagctcagtggaaatagaggagaaaagctcaaaagagcaaagtgcaccggagtttcacattccacggacacctgcacagaataaagagaagcataatcgtcctcctttctcatgtaagccgaagctatttacttcatcaggcacccttggtgttaactgtgaaccagcattctgccaaaaggtgggcgggaaaagaaagaggcacatgtgcgagagagaatacaaacaaatgattgaccaatgcataggaaacattgagagtgaaatggagagggactctatgtttaacttcgatgccaatatgatgaattacgttcagcattcttatcgagaagaggattttacatggccaccttctgctgataaccaagaggtggaggaggatgagcttgaagaactgtggaaagaaatggattattcactgacgacattagcacttcttgagcaaaagcaggtgatggctcaaagtaggataaacatgctggtggataattttgatgggttgaggctggattgtttaactttgacggatgattacagatgctattatcaaaaaaaagaaaagtttgcagagtcaggatcagttaatgagagcaccgattattttggaaaagttggaggaataccatgccatcatgaatgcatactggatgaggagcttggactagcatgcagattatgcaatgttgtatgcactgaggcaaaggatatatttccagaaatgttcaatggaaatgactacaaggacagacctggatgcagcaatatttgccttgatgatgatatacttgatccttctcttcttgcaaacttggcaccagagttgtcagaattgaagaactcagggagcgtgtggagtgcaatatctgatcttgatccaaagctgcttcctcaccagagaaaagcactagattttctgtggaaaaatttggcggggtcgatacaggttgaaggaatggataactcaaatgtcagtacaggtggctgtgtgatagcacacactcctggatctgggaaaacactgctgcttatctcatttctggtgagttacatgaaagctcacccaagaagccggccattggtccttactccaaaagctgcaattcatacatggaagagagaatttgagaaatggggcatttcacttcctttacatgtgttccaccatgctaacagaagtggcaagccgttgggggcaatggattctaaactgcggtcgttattaaataattttcacagaccaacctggacaaatatgcgccttatggattctttggacaaactattcaagtggcatgcacatccaagcgtcctcctcatgacatactcatctttcttagggatgacgaaacaagactcaaaagtgcgaaaccgataccgagaatttatcgcagaggtcctgatgaacaaccctggactcttgattcttgacgaggggcacaacccaagaagcaacaagtccaagttgaggaagctgctgatgaaggtgaagactgagttcagaatcctcttatctggcacggccttccagaacaactttgaagagtacttcaacaccctatgtttggccagacctcggtttatcggtgatatcatgagtgaactagtgccagagaggaaaagagaaacagttggcaggagagccaaacatcaagaagcagtggcacgccgcgcctttgtggagaaagtgggccagaagattgagtctgacaacaaacatatcagaagtgatggtatcagtttgctaaacaagcttactcgtggattcatagattcattcgagggagcgaagctgatcaaccttccagggatacatgtgtataccgtgttcatgaagcccacggacattcaggaggagatgctggcaaaggtaacaatgcccaagctcgggtcgtcccggttccctctagaggttgagctgctcatcacgattggctccatccatccttggctcataaaaacgacgaaggccgtcagcaccttcttcagtccagccgaagtgaagaaggttgagaggtacaagcgagacttcgcggcggggtgcaaggccaaatttgtgatcgatctgctgcacaagtcgtcgttcagaggggagagggtgctgatattctgccacaacgtgtccccgatcacgttcctggtgaagctgatagagatggtgtttgggtggcggctcggggaggaggtgctggtgcttcagggtgatcaggagctgcctgtccggtccgatgtgatggacaagttcaacggcgacagcgcggggaagaggaaggtgctgatcgcgtcgacaacggcatgcgcggaggggatcagcttgacaggcgcgtcgaggctggtgatgctggactcggagtggaaccactccaagacgaggcaggcgatcgcgcgggcgttccggcgtgggcaggagaggacggtgtacgtctacctcctggtggcatctgggacatgggaggaggagaagtacaacagcaacaggaggaaagcttggatgtccaaaatggtgttcctgggacgctatgttgatgattcctcgcaaaaccgtgtcactgacatcgatgatgaggtcttgaaggagcttgccgatgaagatcacaccggcaccttccatatgattgtcaagcaagactga

SEQ ID NO: 22282 - DNA, 3447 bp, Oryza sativa
  Clone ID: TF_OsC108092_1
ctacaagtaaataaatccactacaatgctccacttgccactgctggaattccctcttccatgtccctaagggccttgcagtggaatgtcttgtcatgaagccttgaatgaaactgataagcataaatatttcccctgaaccacattcatggcatacacgacccaaatcttcataaacatgaatatcgtggttgtaattgttcaactgttttttattattcacttccgatgtgtcgagctgtgtgctctccacagccacatagaaagcaccccaacgatccttaagacaatctgctgctggatctacctctcctttttgttttctctccctagggatggccatagtgctatcactgaaatgaaagtcctggtcagatttctgatgtttttcttccatcttctccatgttgccactggccaaaattattgtttctctttcttctgctttctccacggaacaattgcaaattcttcctagaacttctgtagtgttgtatccccatccacaaatcttgttttcaacagaaacttgttgcagccaattcttaagcgtatgcaccacctttcttcccttcccaaagtagtatagcagagcaaaaggcacagcagagcagagagaaggaagaggtaatggtcctgcgactgccaatagatggggaggggttgcagctgtcactgccagtaccactgcttcagttagccatggatggatacttggatacctccagcttttgcaagcttcttgcttatccttgatgctgcccttgcttgcaagcaaggcaatctgccccttttcgtcgtacaaaatacgaaagatacgtataagggtgatttttcccatccacgaggaaataccaaattttacactagaaaatggtacttcccgggtaccaatcaagaaccataagatttctctacatattgagagagaacatgttgtatttacagggacacagacgaaggagaacacatgaacaaagtggactaacatagtttcagaggcaatgcttaagtaccggtttttttcagaatcttggtcaccttggcctataacattaccgccagtatcatggacactgagtcctgagctggacacattattaaaacaaactgttgcttcactgactaaacccatgtcaatactttgatacaaagccttgatatcctgacgaataacatcagtctccaacaattcatctctggagccatcgatacagacttgattcagcttgaagtcttcagttgtgcagcgcccgctccattggaaccatagctttggtatgacttccttgttgaatgcagtttcatgggccttctcctctggagaatcagcagctacaagtctatacacaaacactttcttcttctgtccaggcctgaatgtgctcccgatggcttggcgcgtaacagacgggttcaggtgaacatctaggatgacaattcttgatgcacccacaagggagatgccctccccaaatgccttgatggaaccaaacagaacttttgcatcggcagagccgttgaactgatccattgccaattgtccatcttccatgctagtatcaccatttatcacaaaaatttccttccctacatgccagcccatctccttaaccagcagcctttccaaaaatttcatggggagtgtatactgactaaaagcaactaatttctctcctgcagagttggcaagcgcaaggatgttcagaaaaaacctggccttcaccccatctcccaggttgatgctgttgaccaaactatcaactctgtcatccctatcaacatcattagcttcagaaatttctgaaaggcaagggtgaacatagagtgcagcccctacagcgcttgttttgagcatcccatggtcttcttctaacttgcaaagaatgtctttctgcttgggactgagttccaagaacacactgaagtctagtaagacaggaaattcattcaagtcctcacccttacagtagtgaagcacatctttggttagttctccaagacttctgataacattaacttttcttgtgaagttatcatcattcagcagggtatcttccattgactcagagatctctgttatactcctggcacttgatatttctagttgacccatcatacgtgtaacaatgggccagaatgtctccgtcttgagaaaacctgggcgtacaagatccaaggtgttaaacacttccttgacatgattatggaagagtgtaccagacatgaccactttgcatggcgtttgcactttgcgcgcagattgtagcatatcagtctcatcaatgctaggtgtatggccctcatcaagtatcaacaagctggggaccataagaagcgtgtccctgcattcagctacagcattttcatccctatcatcgcagacaatttgggtgaaatgcttggatccaacaaagagtatgctcctcttagagctccaagattttaggacttccagttgctctactctattgtcagccttaatagaatcgaaatcatacagtggtatgtcctccacttgccactgctggaattctctcttccatgtacctaatatcccttcaggaagcacaacaaggggccttgcagtgaaatgtcttgccatgaagccttgaatgaaactgataagcataaatatttcccctgaacctggggcatgaacaagaatgcagcctccaggttcatcagtgaccaagttattaaccaggaatttgaatccttccaactgatgaggccggatattcttggcatgtcttggatgaatggcaatatctgaaaatatgaaatcttcagagagactaatagcatcagagcctaccttcttcaagcaaacctcattcacatttgttcttttccttgaagcctttttccactgatagtgaaataatgagtcagctttcctcacgaccaaaccacattcatggcatacatggcccagatcttcataaacatgaatatcgtggttgcaattgtccaactgttttttattattcacttctgatgtgtcgagatgtgtgctttccgcagtcacatagaaagcatcccaaagatccttaacataatctgctgctggatctagctcgccttttctttttctgtccctagggattgatttctgttgtttttctcccatcttctccgtgttgctaatggccggaattactgtttctctttcttctgctttctccacagaagaattgcaaattcttcctagaacttctgtagtgccaagagcacaacctcccccatctctctgccttgcaccattcctgcccctcccaggaaccaccacctcctgtgcttctttgcaccacaccggacaaagacaacaccacctttcacgaatcagatcgcaacgccttcgtttccttcccacgatgccactgctgtcgctgcctccgcctacgatgagggcaacagtgtctaaactgttgccagaaccagacat

SEQ ID NO: 22283 - DNA, 3743 bp, Oryza sativa
  Clone ID: TF_OsC3901_1
gcactgggagagctccagaattgggctcgagtttttttttttttattaggtaatagcaacattggtttttgtttgtttgatgtctccaaaagagagatcaagtacttaaaatggtagcttcgatgagatcacttctacgttgagttggatattccatagtacatctgattcctaatgcatagggtagccagggcggtcatcaaatccccgcagagaaaacatatagtattatttatcagtacactagcatactgaataagatctgggtgaagatgtaagtgcgccttgggtttctagacatcccatagagcggccctctcaatgcatttgcggagagccaccaagctttaatcagatcagcaggccacgtccgctcaacctcgcttacgccttcccgagcccacatagtcatccataagggactggcgtcgcctcttgaaagaattcgatggagtagtttcaccttctgaaacccttaacgcagatcgctttgtcggtgtcatgttcttagccatccttttgtccttccttgcctgcctttcttgctcatcatattcctgattctctttctcaactagacggataagggtatcacatctcctagccaactcctgggtggttctggacttgacaaaccaatcaaatcggaacaaaggcgacatgcggaaggcagctttcagttcatcccagtttccataaccaagcttatgcaccatgcaaagcataaaacggtcgcattcctcattatagaacttccctttgttctgtccatactggattttcaactctaaccatggattcttatagcggtctaacttcttcccgatggctctcataatttcatccttccgtgatatcctggcctctcccctttcaatattcttgataattctatcataatcactcagttccttgtatctctccttgaaaactttagcatatcgttgaacttcctcctctgtcttcccctccatttcagcggcaatactcctaatatcatttcgaccatacttctcacatgcacgaataaatgtgttgaagtctctcctcgtccatgttgcaaaaccctcttctaacaactgctctttctcttcctgctcctccgcagtcaaaggctccagctgatcttcatcttcaccatcaatagtatctttcttctggtttgcttgcataaggtaccggacttccttttcatacaattcattgagcctttggttgttgaagaactggaaatcatgtaggtgcggcattcttggaattcgtggttccctaggttttgcaggtgcaccttggcgaagtgcttgcttaaagtattcagactcagagtagtttctcttcctttctcttctaggtggctctatccagttatcactgaccagtttcttaaaatcaagcttgttttcctccttcaagaaatcaagaatgtaaatggaattaagtaaacttccaaacttatcatcatcaaaatcatacaattccgcagtgtcatccattttaaatttaatagcatcctctgtgaactttttcatttttgcatcaagctcagctgttgtttcctctcctttagctatgatacggtcaatatcctcatctgtaattgtgctgtccttggaactgaataccatttccgcaccaaatcttaccatttgcaacagatcatccttattgacagtcttctgctctgccagtcggccttgttgaatgaccaaagcatccaatgcaagcttcttgtatgccctctcaatcactttctcctcgatggtatactcagtgcaaaatcggaaaacttgaacttctttcttctgacctatcctatgtgcacggtcttgagcttgcagatcagcttgtggattccaatcactatcataaagaaccacaacatcagcagtagcaaggttgatgccaaggccaccagccctggttgaaagcaaaaaaacaaacttttcactgcctggtttgttgaaagcttcaatggatgcatcacgatcttctccaccagtatttccatctatccggcaatactgatagcctctgtacataagataatcttccaatatatccaaaagcctggtcatctgtgagaaaatgagcaccctagaatcacgatccttcagtttgggcagcaatttatctaacagaaccatttttccagcattctcaactagatgttcaccagttgtgtaaggtggaccaggttctgctccttggaataaatatggatggttgcagcacttgcgcaactgcatggctatgttaagcaatcttttgcgttcaccaccagcattaataacctccaaatctttctgaagcagggcacgatagtactgcttttgcatctgagacattccaaccttaaggatagtttcctttttggggggtaatcccttttcaacatcagatttaagccttcgaagaagaaatgggcgaagaaccttatgaagctgttgaacaacctcctgctgatcattttcaccagaaatttgaaaccattcatcaaatgtttcagcagagctaaatatttcaggcaacaagaagttgaggagagaccaaagctcatggagattattctggagtggtgtgcctgtgataaggagacgataattagtattataaatcctcattgtcttggacagaagagaattctcattttttatgcgatgtgcttcatcaataataatgtaacgccagctgaaacgcttcagtgtagttttttctttgattgccatttcaaaactagtgacacacacatcaaattttcctggctgcaataggttctcccttatatggttcctctcttctggattccctaagaatttcacagcacgtagaatagggcaaaaccgttgaatttcctttatccagttgccaagagtagactttggtgcaacaaccatgtgcggaccagttattcccctgaattcatgcagatagcccagcagcgaaatagtttgaagagttttcccaagacccatttcatcagccaatataccattgataccattctcgtacaaccgtatgagccaattaagcccagctagttggtagtctcgcatcttcccctttatacatgaaggctgtgaaagcaagcgtgttccccctgaaccagcaagggcatcttcctcttctttaaggtattcttcatcttcctcctcttctgtcatctttgaggcatggcgtccccttccacgcggtttcttctcttttgattggttccctttggcaaaatgtgcaaatatttcagtttgctgcagtaggtacttcaatcgtcctttccctttattgttcatgtcagcatcaactgcagcattctgtgtatccaatatttcttgtattttctgcttcttcaatttctgcatttccttgagcctggctttctcacgtttccctactactgcacctccttcagcctcatctgcgtcgtcgtcctcccccacgacggcctcgtcgtcctcagtggactgcgactcctcatcgccctccccgggggcggcggcggccgcaccgctttcctcctcttcctcgtcggcgccggcaccggtggtgacggcttcgatctcctcctcatccacctcctcctcttccccaccagccgcctcgccggccgccgccgcgggcgcctcctcctcctcctcatcctcctcctcgccagatccggacccggcgccgtccgactgctcctcctcctcctcgccggaggacgagacctcctcctcctcctcgtcgtacttcaccggcttcgccat

SEQ ID NO: 22284 - DNA, 3594 bp, Oryza sativa
  Clone ID: TF_OsC3901_3
gagctaaagctactgctagacaattgggatgtatctggggtttccccttgggtttcatgtcaacctccaaatgagctccctaaatgcatatggggggaggaacgaacaataatcagatcaccctcgccttctccttcccgagcctgcattggcttcagtgtaggactggcgcctcctcttcgaagagctttgtggaggggtatcgagcgaccttgatgaagaacgctttgctggcgacatattcttcttatctttcctggccaatctctcacgctcatcatattcttggttctccttctccactagacgaatgagggtctcgcacctcctagctagctcttgggttgttctagacttcacaaaccaatcaaatcggaacaagggcgacatgcgaaaggctgctttcagttcatcccagtttccgtatccgagtttgtgcaccatgcataacataaaacgatcacattcttcgttgtataacttccctttattctggccatactgaattttcaactctaaccaagggttcttatagcggtctagctttttcccaatagctttcataatctcatccttccggtatatccttgcttctcctttctcaatgttcttaataactcggtcataatcatttaattccttgtatctttcctggaaaactttagcgtaccgctgcacctcctcttctgttttcccctccatttcagaggatatgttctttatgtcattacgaccgtacttctcacaagcacggatgaatgtattgaagtccctccttgtccatgtcgaaaagccctcttccaatagctgctctttctcttcttgctcctccacagtcaacggttccagttgatcttcgtcatcaccctcaccaaccgtatcctttttctgatttgcttgcacaaggtatttgacttccttctcatataattcattgagtctctgagtgttgaagaactggaaatcatgcaagtgtggcattcgaggaattctcggttccctaggttttgctggtgcaccttggcgaagtgcttgcttgaaataatcagactcagagtagtttcgcttcctttctcttctgctggttggctctatccagttgtcagtgaccaacttcttaaaatcaagtttgttttcatccttatcatcatcaaaatcatacagttcagcagtgtcatccattttgaacttaatagcatcttctgtgaacttcttcatttttgcatcaagttgtgctgttgcttcttctcccttagcgatgatgcggtcaatatcttcatctgttattgtgctatccttggagctgaataccatttcagcaccaaatctgaccatctgcaatagctcatccttattgacagctttctgctctgccaatcgaccctgttgtatgaccaaagcatccagggcaagcttcttataagctctctcaatcaccttttcctcaattgtatactcagtgcagaaacgaaaaacttgaacttctttcttttgaccaattctatgtgcacgatcttgcgcttgcagatccacttgaggattccagtcactgtcataaagaataacaacatcagcagtagcaagatttatcccaagaccacctgccctagtcgaaagcaagaaaacaaatttttcactccctggcttgttgaaagcttcaatcgaagcatcacgatcttcaccaccagtattcccatcaattcggcaatattgataccccttgtacatcagataatcttccaagatgtccaagagcctagtcatctgtgagaaaataagtactctggaatcacgttcctttagcttgggaagtaatttatctaacagaaccatttttcctgcattctcaattagatggtctccagtggtatagggtggaccaggctcagcaccttggaataaatatggatggttgcagcacttccgcaattgcatggctatgttaagaaggcgtttgcgttcaccaccggcattgacaacctccagatctttctgaagcagagcacgataatattgtttttgcatctcagacattccaactttaagtatagtttccttttttggtggtaaacctttctcaacatcagatttaagcctccgaagcagaaatggacgaagaaccttatgaagctgctgaacaacttcatgttgatcattttcccctgagatttggaaccaatcatcaaaagtctcagcagagctaaatatttcaggcaacaagaagttgagaagagaccaaagttcatgaagattattctgtagtggagtgcccgtaatgaggagacgataattagtattgtaaatcctcatagtcttagagagaagggaattttcattttttatccggtgggcttcatcaataataatataacgccagctgaaacgcttcaatgcagttttttctttaattgccatttcaaaactagtaacacagacgtcaaacttccctgggactaacaaattttcccggatatggttcctttcttcggggtttcctaagaacttgatagcacgcagaacaggacaaaaccgttgtatttccttcatccagttcccaagagtggactttggtgcaacaaccatgtggggaccggttattcctctaaactcatgcaaatatccaagcagtgatatagtttgaagggtttttccaagacccatctcatcagccaatattccattgatgccattctcatacaagcgtatgagccaattaagtccagctagttggtaatctctcatctttccttttatgcatgatggttgtgaaaccagacgggtccctcctgcaccatcaagggcatcttcctcctccttgagatactcctcatcttcttcctcctctgtcatctttgatgcatgacgtccccttccacgtgatttcttctctgtcgattggtttcctttcgcaaaatgagcaaatatttcagtttgctgcaggagatacttcagacgtcccttccccttgttgttcatgtcagcatcaatggccttattttgggcatccagtatttcctggattttgtgcttcttcagcttttgcatctccctgagctttgctcgctcccgcttcccgatctctgcgtttccagtagcatcttccaacttgtcgccatcttcaccgccgccatccttcccggcggcgacctcgtcgtcctccgtggactgcgactcctcctccgcgcccccgtcatcgcccacttcttcgtcgtcgtcgtcccctccggcgccggtggtgaccgcctcgatctcctcctcatcaacctcctcctcttcctcttccccagccccctgctcctcctccacctcctcttcctcctcctcaccctccgcctctgcttcctcctccccgacactagactcctcctcttcctcctcctccacttgctccccatccgcctcaccctccacctcctgctcctcctcgtccccgctaaacccctcctcctcctccccctgctcctcctgctgctcctccccctcttcctcttctacctcctcctcctcctcctcgccggcggaagacgaaggggagagctgctcctcctccgagtcgtcgtcgtcgccgtcgccatacttccccggcttccccat

SEQ ID NO: 22285 - DNA, 2877 bp, Oryza sativa; identical to SEQ ID NO: 12904
  Clone ID: TF_OsC1528_2264

SEQ ID NO: 22286 - DNA, 167 bp, Oryza sativa
  unsure (1)..(167): unsure at all n locations
  Clone ID: TF_LIB4506-028-R1-K1-C10
ccacgcgtccgggagtagtcgacactacacaagctttgagaacaagtaaggacacagagaactaattgcgttaacgtggactctccattgcagaataatttgatggaatattactgtatggttgattttgttagggaaggttatcttggaagtngccctgngttccg

SEQ ID NO: 22287 - DNA, 403 bp, Oryza sativa
  Clone ID: TF_LIB3431-031-P1-K1-H7
tcggagccctcttgtcttgttaagcaagaggggggctggtctgttcaaaaaggcggcggagctggctctgcttttcttcttttatatgtagcttctggtaatgtcatttcactgttaactctacaagttcttttcctccagcatggaacgctccattgatcggtattaggatcatctatggagccaggaaagttcctaacaattttatgtcattcagcaacaatgatgaaaattcctttttatactgcaggcttaaggacattacgggttagtatctgcagaacactttttactacgtcgtgtgctcttcagttaaataaactcattaaacttgtgccaattgctgtgtggtaaacgtcatccaggaatatgtggctttaacataatggtgaacggagttcga

SEQ ID NO: 22288 - DNA, 487 bp, Oryza sativa
  Clone ID: TF_jC-osflLIB3477P006e01b1
cccacgcgtccgcccacgcgtccgctctttcgcttcgcgagattggttgattcatctcgcgattgatcgagctcgagcggcggtgaggtgaggtggaggaggaggaggaggaggagatcgggatggggagagggagggtggagctgctgaggctcgtcaacaagatcacctggcgggcgccgttcgcagaatgcggtgattgggctgctcaagaaggcgtaccagctctgcgcgctctgcgacgccgaggtcgccctcatcatctcttacaaccgcggtcagctctacgagtcctgtagcggtcaaagcatgaccagaactttggagagacacccgaaagcccgttatggtgggccagattctgctatacacaacaaggaaaatgaatcagtgcaaagcagccgcaatgagtacctcacactgaaagctcaggtggttatttacataggaccctacggaatcttcttggcgaagatcctgagacact

SEQ ID NO: 22289 - DNA, 542 bp, Oryza sativa
  Clone ID: TF_OsC39886_2
atggctcgcaagaagatgaagcttctgcggatcgtcattgatgtgaagcggcgggtgacatttaggaagcatctgaagggcttgatgaagaaggttagtgagttcgcaacactgttcctcatggtgtacggtgaggttgaggtgcaagcaacgaaggtttggccgtcggtgtgggaggcgaccagagttctcgagcacttcaaggccatgccgcagctgggcagatacaagaagatgatagacctagagggcatcctcaacaagcagatcgacaagctcaaggagaagttgcacaagctgggacgcgaagctgatgaaagcgagaccaagctactcctcattgaagccatcaatggccgccacccaagcctcgatggtctcaccatcgagcagattatcagcctcggaaggatggcaaattcacgcctcaagattgtcaacgaccgcctcaagaagctccgtgccccctcctccttcgccagcgtgttgccctgcccgccgccgccgccgccgccccgccgcccagcgtcgccgccgccgcc

SEQ ID NO: 22290 - DNA, 2658 bp, Oryza sativa
  Clone ID: TF_OsC1664_1
atggagtgggcgccggtggccgaccacaagatgaggaagaaggtgtggggcacctgtggacaagctggtgcgggaccccatacgcacaacacatttgcacgctctactacctatacatagcaaaagatgggcgtctggttagttgatcaatcgagagagcgaagatgggccgacggaaaaggcaggtcaaggagatagggaaccccagaaaccgacaagtgaccttcgccgagcgaagagatggcctgctgctataaggacgttcgagctctccggcctctcgagccgcagagatggctcttttggatcagtcgccggaaggctaccaaaatgagagcgaaggagataaaactgcgcaaggacaaggaagcgttacgagaaaggcgaaaaccaaacgaacggaaggagtccgtccggccccacctcccgccgccgcgagccgtctcgaaccggtggcgttcgacagtggcctccaccggacctgtcgaacaatcggcgtgctgggtgaagagttggatggaggtcctatagaagccctgcgtaacctggaggtcgagctggagcgacggctcataagcatacatggaaatgaagacaatgttgcatgacgaggaggacttcaaagttgcggtgaagaggtggaaatttgtccagaaccgtgaggtcaaggccaaaaactcgagcaaacacatggccatgtttgatgaggtgaatgtccgtggcgagaatgttcaccgtcacgctttctggacatttgcgaacgtgaacgtggcctttaaaaattacatacctatggtctgtgttgatagaactctcatgagaggcaagtatggagaaacaattctagcggcgctccatttctacgtggaaagccaggaattaagctttatctttgcgttggtgaaaagagataatgcttggcatgcgctgacaccaaaccatcctaaaaacagaccccgctgtatattttacttacccgtattgtcgtccatggatgcgaaatgctagacgcatatgcacccacccattcagcaccaccaggcagaaacccttcgatcggcagactccactacccatctaaatctaaatcgagagatctcaagtgtacaaaggcagagagcagctaggttgttgacgtttgcacggttggtcgagccttcacgtgcaaggtccgaacgaatccacattgacgcggcgcttatgagtgctcttgtcgatagatggaggcctgagacccacactttccacctcacagttggagagatggtgcccactctgcaggatgtgtcttatttgttggggctgccgatagctgggccagcagttggcccaacaatggtgaatgctggatgggcggatgaccttctggccagttttggtggtgtgctgcctgttgcactggaggatctcacagatgggcacgggcctacgaaaagttggttgaatcagtttcgacaggatgtcttccctgatgaccaggaggagtggatcgtgcagcggcacttagtcgcttacctgttgtggttgtttggatgggtgatgttcacgggaactcacgctgactccgtggacaagcacttcatccactttgcggagcagattgcagagttacctatcgcggagattccacagtacagttgggggtcggcggtacttgcggcgacatatgccggactgtgtgatgcttgcgtgaggaacagcaagcaaagttcactccctggatgcccgttgctacttatgttgtgggcgcacgagcgcttcgacattgggaggcctcagcttgactcgtacgcaaactacggtttgcgagagatgtacaggtctggtgttgatgacatcgacgatcgtcccactatgggatccttgtggacacaccgtgagccgcagtgggttagcgggacgacacgtcgtgtctacactcagtttgtagctgactttgatcagcttacgcctgaccgtgttcggtggactccctacactcagcacgatgtcaatgatcgtgcaccgcacggtctcgcggatctttgcacgcgagatatgcaactctggaggacgacttgtcacctcgtgctggacgtgcacgtcgagccacacaatgtccacagggttctcaaacagttgggcatgtatcaggacttccctccgagagatggtcgtcctttggcagatagtcttcataggtacttcagaaaggggctcgggctttcctacgagctagttattgtgaccacggttcagccgacggtacaagagtgggagcacgcagctgataacttggcacttcagacacctccagacgatgggagttattatggagcttaccttcgttggtaccgcagtgttacacgatggaggtgttttcctccacaaagagatagcaccgtcccccaccaggcagcgattactgacacgtttgcccctcagcctagatcagcttacaagtcaatggcggaatttgttgagcacgttcacgtggagtccgacaccctgctgcaaagactagaggcgagacctccagtcgtcaggtctgacgacgtggcgagtgtccttcgcaacttccgtgcacgtgctgccgcactactacgtcgtgtctcctgtcggagcgcggcagatgtggtgcagacgtcgggccgacggctgtcgcgcccagaaatttag

SEQ ID NO: 22291 - DNA, 1424 bp, Oryza sativa
  Clone ID: TF_OsC76961_1
atcttttcttggttcgacccagctcccagatgatttcatcctgaatcatcgtcgtcgtcgtcgtcgtcacaggcaagaagaggagaaggaattacacctgggattatcgattggttgttcggattttcttttggatctattcatgctcgctctgtgcgccggggattcgatcgttgggcagggcagtgatctctgcgtcgagggtttcgacgaattggactgcagattcgtcgccatctcttcgcagaggggattctgcctccgccatggggagggtcaagctcaagataaagaagctggagaacagcagcggccgacatgtcacgtactcgaaacggaggtccgggatcctcaagaaagccaaggagctctccattttgtgcgacatccctctcatcctgctgatgttttcacccaacgacaagcccacgatttgcgttggcgatcacagcagcatagaggatgtcataacaaagtatgcacagcaaactcctcaggaaagggctaaaaggaagttggagagcttagaagccctaaagaagacattcaagaaactagatcatgatgtcaatattcaggactttttaggctcagggggtcagactgttgagatgctgattaagtcaattgtttggcaggaattatcgagccatcttggtgctttgcaatgtcaaatggcagatgtcgaaaagcgcctcagttattggagcgatcccgagaaggttgagaatattgaccatataagagcgatggagcaatctctcaaagaatctctgaatcgcatccggattcataaggagaactttgcaaagcagcatctgatgagcctacagtgtgcagctgctcagttccagaacgacatgaagctcccactaggactaacaggtgacccgaacacttcatcgtggttccatggcggcggcggcgcagaggcgcagcagccaatgatgctacctgaagaccccagcttgctccatcagagagacatcgggtgctcagcgagcacgtcgttgcagagctacccgggctacttcagcatgggcaagcagtccaccgacaacgccggcggcggcgagcagcaccaccacgcggcggtgcagcagcagccggagttcagccaggccgactgcctgacgtcgctgcagctcggcgcgcagttcccgtacccgtcggcgttcgacaacgccgggctgctcagcgaccggctgttcgacaacgcggcggcggcggcggcggcgatggacttcggcggccactacgacctgccgaggcccggcgacgaggccagcttccagaactgggcgtcggcggcctgcggcgccaccatgtatgatcatcagcagcagcagcagcaacagcagcagcctgcccaaattatgactgaatctctgacccccatcagctccctgcagcagcaactgtag

SEQ ID NO: 22292 - DNA, 1487 bp, Oryza sativa
  Clone ID: TF_OsC12322_1
gataaataactcgatcttactggataatatcttattacatgctagtacgtaacattatcttacattgtgcatggtgtattatatggatcatataacattaattgtggcacacccagcccatcatgatcaaagaaaaaaaattccaaactaaaaatccttagcttcaattcctggcacactagtaacatgacaacactatatattccataaatttctagtacaaaagcatctaattaaccaacgttaaccggagcaatgtcctcagctgcgtataacccgttgccatcgttagccggcgcttgcgagcagcccgccgtcgccatatcctccaccggcggctgctggtcatggatgccgggcatcaatagcggtgatgacgccaacatcgggcccatcgtatcctcgtcgtcgagagggaacggcgtgggcgggattagcgcgttgaggaactccgccgacgtgtacgcctgccagtcgtcactctggttctgctggtccacatggcacatccccatctccgggaccactgtctgatccacacatgcatcttgtctcatcgtgtcgtacaccgcttgatctctaaaagacatcatggaatctgaagttccggcgaatatcgacgccaccgacgaggttgtcggcggcatcccctcagagacccacgaggccacctcatcgcttccaaacccattatcagtgatgtccccgtgctgatgctgctgcggtagatacagatgctgcatggcagatgttgacgccgtcacgtcgaacgagcccatgctgcacagcaaatacctcttcctctcctcgacgcggctgaggatgccggcgatgaacttctcgctggcctcgacgtcctccatggatgcagacctggccgggtccggctcaaacatcctcaatgttggagttaaccggcgccttactgctcctggatcagcaagagcaccgagattaagaacaaacacgaggaagagtgctaggttcaggttaaaatctcgttgtgaaacttttccgtcgaagaagtttacgtaccctcctctgtcactttctgggagattgatgtaccttgtgagcacgtcctcgatcctgcggcggccggagaagtggctgaggcggccggagggggagaacatgaggagggcgatgtcgatgtcgcagaggacggacagctcgtaggccttcttgatcagcccgtttcgccgcttggagaacgtcacctgcctgttcgggatgttctcgatcctcttgatctgcagcttcacccgtcccatggccgccgccggcgattcagctcgatctacagctatgttccggccgtcgtccgtcgatcgatcggcgaggcgaggcgatgggggaggatatggttttgtacggtttatgtagcgtggctggcaaatcgatgtagcgagtgaaaggcgaggaggttttgtcgggttggggggccactcgcgatcggctggctggagtggacggaccgcgtccat

SEQ ID NO: 22293 - DNA, 482 bp, Oryza sativa
  Clone ID: TF_uC-osflM202089a01b1
gtgtctgaatcgccggcggcggccatgggacgggtgaagctgcagatcaagaggatcgagaacatcccgaacaggcaggtgacgttctccaagcggcgaaacgggctgatcaagaaggcctacgagctgtccgtcctctgcgacatcgacatcgccctcctcatgttctccccctccggccggctcagccacttctccggacgacgcaggatcgaggacgtgctcacaaggtacatcaatctcccagaaagtgacagaggaggaactatccaaaacagagagtatttgatcaacatgctcacccagctcaaatgcgagagcgacgtcaccgaggatctcactaacacgagcagtaaggcgccggttaactccaacattgaggagcttcagcatgagatcaggagatgccagcaccagatgcagctcacagaggagcaattgaggatgtttgagccggacaccgccaggtctgcatccatgga

SEQ ID NO: 22294 - DNA, 1293 bp, Oryza sativa
  Clone ID: TF_OsC1638_1
aactagtggatccccgggctgcacgccgcctcctcctcccccacttctccccaccaccacaccaccacacacacgcacgcacgcacgcacgcctccgttttcccccaccgacgagaggcggagagggaggggagctagggtttttcggggcggggatggcgcggagggggagagtgcagctgaggcggatcgaggacaaggcgagccggcaggtgcggttctccaagaggagggcggggctgttcaagaaggcgttcgagctcgccctgctctgcgacgtggaggtggcgctcctcgtcttctcccccgtcggcaagctctacgagtactcctcctccagcattgaaggtacctatgatcgctatcagcaattcgctggagccaggagagacctgaacgaaggaagtacaagcatcaacagtgatgaaaatgcaagtatacactccaggcttagggacataacggcctggtctctccaaaacaatgctgacgagtcggatgctaatcagctagagaaactggagaaactgctgacaaatgctttgagggatacgaaatcaaagaagatgttggcaaaacaaaatggtgaagggagtaggagcagagcaaactccagtggctctagggggcaggaggaaggaagtgcatgagcaggaagcacaggtgtcctgtgcataagtttggcagtgcatgcacctcccaaattaaaaagctaataaaaaaaagagaaaatggtgcatgctctgtttgctgccagtttctcccactgattgatcccaggtagagaaaagagttgccatggcctctggctctgcttgttagatcaagggggggagatggaataaaaggatggggaagtattcaggttcttgtaatgaagacctatgctgtggtgttttagcaatgtttgatatgtgtgctacctgtgtttgactggttgtgttgcttgatgtgtcatctgaccatgatactgaaagcctgataattgcactgacttgtgtatggagtttgtttcaacctattggtatgaatctgtttgattctgtaggaactgtggtttgctgtttgccagatctgattattacgcagtgatacaatctgtccttattatgtctagggacccttatgtctatgtgtgttgtttattcgaatctggcagtgaacaatctgacgaggaactgaaaataactgatagatggttacgttgctgtatctgtaagtgtgagtgagtggatgcttatacaatcttatttttaaataattataagttgtgcctgcgtcgggagtattcat

SEQ ID NO: 22295 - DNA, 828 bp, Oryza sativa; identical to SEQ ID NO: 12958
  Clone ID: TF_OsC330374_1

SEQ ID NO: 22296 - DNA, 439 bp, Oryza sativa
  Clone ID: TF_uC-osflcyp126b06b1
aattttgagtcgtggtaaagaagacggatggacggggggatgggcatgggcggggagcgatggacacgacgcgacccatcctggtttcccgaaacgcgctacgctgccgagcatctagggtttcccacccgctggagatcgatcgggatggggaggggtcgggtggagctgaagaggatcgagaacaagatcaaccggcaggtgacgttcgccaagcgcaggaatggcctgctcaagaaggcgtacgagctctccgtcctctgcgacgccgaggtcgccctcatcatcttctccaaccgcggcaagctctacgagttctgcagcacccagagcatgactaaaacgcttgagaagtatcagaaatgcagttacgcaggacccgaaacagctgtccaaaatagagaaagtgagcaattgaaagctagccgcaatgaatacc

SEQ ID NO: 22297 - DNA, 1173 bp, Oryza sativa
  Clone ID: TF_OsC49770_1
gatgtgaactttatgaccagataatttattcatcagttctgctgtctacacaatgccgacatgcgtgtgcgttgccacgtgtcctcaagcttgctagacttttgacgccgcgattatatgggattaattggtagcgatcgtcggcggccagggataaggatggggagggtgaagctgccgatcaagaggatcgagaacacgacgaacaggcaggtgacgttctcgaagcggcggaacgggctgatcaagaaggcgtacgagctgtccgtgctctgcgacatcgacgtcgccctcctcatgttctccccctccggccgcctcagccacttctccggccgccgcggggtggaggacgtgattctccggtacatgaacctctcggagcacgacaggggagaagccatccagaatcgggaggagattcagcaagagatatattcttcccagcaacagctgcaaatcaccgaggaccgccttaggatgttcgagccagatcctgcggcgttcggcacatccagcgaggtcgacggatgcgagaagtatctcatggaattgctgacccgagtcgtcgaaaggaagaacaacttgttgagcagtcacatggcgccgttcgatgcaacgacagctgcgatgcagggtgcagatgggacgcagatgtacgtgagccaggcggacgggttggccacgttcggtggtgacgctgccatgtggggcccagatggaggcgcggatcctggccatccgatgttcagtgcatctgatccgttgatctacctcagggaccacgacgtgtacgacgccaactcacaggtggccgggctgcacggcggcgacccgtgcgcggccggcggcgccgcggcggcggcggccgcggtggggtgcgtcgacgacgacgtcgccggaggccacgccgccgccgccgacgcgtggaggcaggcgtacacctgcaccgagttgctctccacgctcatccccaccacgccgttccccctcatgccgcattgcctggggccggaggaccagtacctgtcgatggagcatggcatggtggcggcggcgcaggagccggtggaggcgtcgacggcgagctgctcctacgttcccagcgacgagaactccggcacgccggtcatggcgtacgacagcaacccgccgccggcgaacatcgcctga

SEQ ID NO: 22298 - DNA, 828 bp, Oryza sativa
  unsure (1)..(828): unsure at all n locations
  Clone ID: TF_OsC39886_1
actcctatgggcgattgggatcctcgaggccggccgggacatcaatctaaccatctctcctcaatctacaggtgcattcttgctagaaagtagtgaactgcgtaggccatggctcgcaagaaggtgaagcttcaggggatcgtcattgatgtgaagcagcgggtgacattcatgaagagtctcaagggcttgacgaagaaggttagtgagttcgcaacactattcctcatggtgtacggtgaggttgaggtgcaagcaacgaaggtttggccgtcggtgtgggaggcgaccagagttctcgagcacttcaaggccatgccgcatctggtcagatacaagaagatgacagacctagaggacatcctcaacgagcaggtcaacaagctcaaagagcagttgcacaaggtgggacgtgatgctgatgaaagcgagaccaagctactcctcattgaagccatcaatggccaccgcccgagcctcgagggtctcaccatcgagcaaattaccagcctcggatggatggcaaatgcacacctcaagattgtcaacgaccgcctcaagaagctccgtgaggaaggcctcatacctgcatccgtgtcattgtcgagcacggaagtaccaatccagagggagggattgctggtggatgttgcaaggggcattggctcaatggggtacaatcggttcggaggtagcagtggaagcggcactgctggatccaatggtgacatggcttagcctttcacagtngtacaggattctcacaggccaaatcagaattttcatttgccaccccagtatgcgagactcattatcacttgattgcct

SEQ ID NO: 22299 - DNA, 1754 bp, Oryza sativa
  Clone ID: TF_OsC8260_1
atggcggcggcggctgcaggcatgggcggcggaggaggggtgcagcatcaggagacgacgacgacagtggtgcaggtagcggcggaggcgagtcggaagaaggtggaggtgagatctgcagggcggcgcgggcggcgggagatgcggcggatcgaggacgcgacgagcaggcaggtgacgttctcgaagcgccggagtgggctgctgaagaaggcgttcgagctgaagaaaaaaatccccaaatcgaatcgatcggaatttgcttctccgttgaggcgaggcgaggggcgaagggggaacgaagtggaaggagatttggattgattggttggacgccggcggcgcagatccccaattcgatctcctcctcttcgatcttcatcctaccctgcctgccagtgccagtataagattcttatgagctggtcggctgtggttttccctcaattctggtgctactaagatgggtcaggagctcaccacaaacaagcctctcacaaccctcttaccaacggatgaaatagcaaccgcctaccatttctccctcctcctctcacctgtcgtctccttttgggactgcatcttccgcaagataagatactcattcagacctgagtgggtgtagcatcctgcactgcctgtttctttttagcgctagccagtgctttgctttctggcctggatcactccaaacaatgaactttgaagcttttgctttcccgtaattacaattacagtcactagtggagtttagctgaaaatagtacatagttgtcatggaaaaggccgcggccaatcaggcgggcaaagtcttgaagaaaggtaagaagaaacaagccaaggatgaattagatcgccagaagcaggctgagaagaagagacggcggctggagaaagcgcttgcaaactccgctgccattatatctgagctggaaaagaagaagcagaagaagagggaagaacagcaaaggctggatgaggaaggtgctgcgatagctgaagcagttgctcttcatgtcctcattggtgaggactccgatgaaccctgccatttgatgctaaacaagcacagaagatgcaaccattgggatcactcagctggttttgatttcgccgtggatgcacaaggcgctgatatttatcctcctgatggactgatacagtgcgctgatcatgtttatgctcccaaagggaggtgtattgattgggggattggccagccattgccatcttggggagaggtgaaggacttgcagttgcaggcaccgtgctaccaaggaatgttccaccagtcagttgcatgcccaggtttcatagcagctcaagcggtctcctccttgcaaatcggaggagattcgtcagatattacctctccaagccaaggagcgactgtcgttaataggatgcttggtgccaccaacaggctcaacctttacagagagatataaaaacatacacttcacgatattattattgtatatagtcatcaaacttgtgttgactactttgcctgcagtatatctcataaccaaagaagaattggatagaacaccttgtttactgtttctgtgagtctaaaaggatatcttatatcagtcaaattggtattgtaatgaacatattgttttgattccctgttgattttcttggaatgtatcctgtgtcgacttgatgttcaaaaaaaaaaaattgtgctttcttttacaactattactatatctaacttgagatgtcaaaaaaaaaaaaaaaaaaaa

SEQ ID NO: 22300 - DNA, 427 bp, Oryza sativa
  unsure (1)..(427): unsure at all n locations
  Clone ID: TF_OsC354917_1
atggccgtcgagcttggccctgagctccttggcgccctggcgaactctggcaactcggcctccccgacctcgcccacgtcgacgtcccaccagaaccgcccctcggccttcgcctgcaagatcttcgccgtgatgccgcgcatccgcgccttctccgccgcgacctccgccctggtctcccccaccgcctacctcagcatctcgaggtcgacgtccttgcctaacccgccgctgtggacgggtgcgggctcagcatcctccccggggacggggccgtaggagaggaggacggcgtcgacggatgggtcaccgaaggcgtaggcaaggttggtctcggagaagacgacgacggcgatgctcgcgccggcgagcagggcgagctccgacgccttcttgannnnnngccccgccgcttggtgaaggtgac

SEQ ID NO: 22301 - DNA, 307 bp, Oryza sativa
  Clone ID: TF_uC-osflcyp174g12b1
ttgtatctgaggccatttgtttggctgaacaggaggaaagatgcaccaacctgatcaatgggtcgtgggagagtagagctcaaaaagattgaaaatccgacaaaccgccaagttaccttctccaagaggaggatggggctgctcaagaaagcaaatgagctggccattctttgtgatgcacaaattggggcgattgtgttctgaagctctggggagatgttctagtgccccacgcccccttggaggattgcaaatatctttgatagatacctgaaagcccccagcacccgttttgaggagatggatg

SEQ ID NO: 22302 - DNA, 1815 bp, Oryza sativa; identical to SEQ ID NO: 12974
  Clone ID: TF_OsC341899_1

SEQ ID NO: 22303 - DNA, 234 bp, Oryza sativa; identical to SEQ ID NO: 12975
  Clone ID: TF_OsC392063_1

SEQ ID NO: 22304 - DNA, 781 bp, Oryza sativa
  Clone ID: TF_LIB4506-004-R1-K1-A10
ggtccggattccgcgtcgacccacgcgtccggccgtttctagctgtatatcgagctgagtcgccggcggcggtcatgggacgggtgaagctgcactatcatgaggatcgtgaacatgctgaacaggctggtgacgttttccatgcggcgaaacgggctggtcaagaaggcctacgagctgtccgtcctctgcgacatcgtcatgggcctcctgatgttctgcccctccgaccgactcagccacttctccggccgccgcaggatcgaggacgtgctgacaaggctcatcaactctcccaggaaagtgacatgaggaatgaactatgtcaaatacatgagagtctttagatcacacatgctcacccagctgaaatgctagagcgacacttaccgaggatctcactaacaccagcagtaaggcgccggttaactccaacattgaggagcttgaacaagagatcaggagatgccagcaccagatgcagcttacagaggagcaattgatgatgtttgagcctgacccggccaggtgtgcatccatggaggacgtgcaggccagtgataagttcatcgccggtatcctcagccgcgtccaggagatgaagaggtatttgctgtgcaacatgggctcgttcgacgtgactgcgtcaacatctgccatgcagcatctgtatctaccgcagcagcatcagcacggtgacatcactgatgatgggtttggaagcgatgaggtggcctcttgggtctctgaggggagccgcctacaacctcgtcggtggcgt

SEQ ID NO: 22305 - DNA, 375 bp, Oryza sativa
  Clone ID: TF_OsC345886_1
atggttcatccgcgcgggaggccgagcaaggggcggcaggcgatcgggatccgccgcatcgaggacaagcccggcggcacgtcaccttcaccaagaggcgggccgggctgttcaggaaggcctcggagctctccatcctcaccgccgctgctacgcgcccgcccccgtgtccacgactgcgagcccgaggcgttgaggcgggcggcggacgaggccaaggtggaggtggcgcggctgcgcgacgtcgcggggaggcggttctggtggtggtgggaggccaccaacgtcgaggcgctcggggaggcggagctgccggagttcgccagggcgcttgggagggtcagggccgccgtcgtgcgccgccacgcgctctga

SEQ ID NO: 22306 - DNA, 1353 bp, Oryza sativa
  Clone ID: TF_OsC91_2112
tcacgttgatggggaggggagggtttcggtggtgattgggtctgggggagcaatggctaaggtgcggtgcgagacgacgaagctattggtggcgtggcgcagcgaggggtggtcaggagtggcgcccaacagcggccggaggcggtagagttggtggcggcttgggttcatagtggagagggcggctagggggatggaatggaggagcagtgtggtggccgagcttgcctgcggggcggcgaagctggggatggcggtggattggcgcgacggcggcccattcttggcagaatcatccgtgacatacctcgctttgaggttgtaccggacatcccatataattttcttcttcgagctggttgggactggtgtcgccaggagaccattcccacggagcttcttgaggcgttcctctaccatcgagttgaggctagtaatctgcttgaccgtgaggcccacaaggctagggaggcagcagtcaaggctgttgaggaggaggagctttgtctcgagctcatcgttctcatgctttgccttatccaccttctcttggagattggcgatgcgctgcttgaggaagccctccaggttagtcgtgttctcgtattggtccttctgcggcaaggccctgaagcgctcgatcacacgccttgcctctggtaccgatggccacaccatcataggttgcgcctcgccttcagcatacatcacaacgcatgcatccacgccatatagcgtcgagagctcgcttgccttcttcattaggctcttttgccgcttcttgaacatcgcccgacgaattgtgtagttggcgagccgctgtaggttcaccttctgacgagctatggccagcacgattctccgttcatatccactgcctccaccgtcctcctcttcgccgcttgctgcctccatagtcctcctcagcacggcccactggccgccgtgccctccctgcgccgtcgcctccctcggcttcgcaagggtgagagccgacgctttcggtctttgccacgcctccagcaaccatccatcgtcgactccgtggtcgccggacctcgccgtatccactgttggcatcgcagcagtgaggagaagcccggcagccacctccgcgaagacgcaagccatcggagcaccgtcgtcaccgtgaagccgatttgttccatcttcagccgcgccgttcgtcgccgtccatcgccgccttcgttcaccgtcgccaccctcgggatcgcaggagcgaggtgaagaccgtccgcccctcggttgcgtggttcgctggtaactgccgttcccgtgcttgcgggcgtcgatcttgcgtggcagccatgtcatcgctgacatgagcgtcat

SEQ ID NO: 22307 - DNA, 1651 bp, Oryza sativa
  Clone ID: TF_OsC256615_1
ctataaatttccatcgatagtgtccaattcagcaagccagtcgatgtcagccaaaaactggtcatcaataggaggagaacacaatggttcagcagtagcaatgccatcatcgctgacatcagccaacaactccaaaaggaaactgtcgctgaaggttggggtatggactgcattgtcattctgaggttgctctacgggagtgcatgcttgcacttcagcgggtggctgatccccaaaacgcatttgccattgcgtcagcaggggaaccgccgatgattgattagtaagtggctgttgcaccaatggagcatgcattggaggaggtgccactgtgttctgcggcggtgatactggtggtaattgttgggatggcactaactctggagaaggaaacagtggtggccgtagcggaaatatctgagaccatggtgagcccggcactggaggcggaggtatcatcggaactcctgatgtccctccaggaagtaatggagtgaatggacggtgtgaggccaagaagcgagaacacgagggctgctgatgtgcccacgcacttgatccaccaatttgcagcttgctgccacgacgtaggggaggcagccgcttcttgaaatcttgctggagcggcaagagtacatctaaaagttcacgcatatcatcgtggctgagatcctctagcctggagaatagatgcttggccatacccatacctaagctctcttcttgggcctccttgaagcgctggattgattcttcagtcttcttgtccttctcttcttcttcattctctagctggaccagctcactttgcattgacgtaagcttggccttcagttgttcatcggcaaatggctctgcctcagatacaaaagcatcgacaacaggtttcaccgatggtgccccaaagaattgtgccttattgctgtcatgtaggcaaattgcgacgcttgcatcagtgagaagggagaggtcatttgcaagcttgaacagcccatcacgcctcttgctgagggtgaggctgcgatctctatcctcttcgatgtacctcacgcctttccttctacccctcctcaccatacttgacaggaaatgtgctccaatgattgaaaaagaagtttcaatccttggaaattgatgcctaaattctgtctcataaatgtcaggtggtacatccttcacattggcatggtgagctccattgtaagtaccagttacgaagttggtctcactgagattgtgttcaaatgtgctattgtattgagttttggcttcccttgcagaaagaagaacgtcgtgtggaacttcaagtgggattacggtgagcgagcgggaagccactcctgggaggcagtctgtgcatttaactggaatggtttttccttttggagttgctgaatgctgattgttgacttctagaaaggtaccaaattggcaaatttggctctccatctctccacagaattccctctccatattccagtgcactccaacagtctctccatatcccaacggctagttcgctctccatattctaacacactccaacagactctccatattccactctccatatcccaacggctagttcgctctccatattccaacacactccaacagactccatattacaacagctagttcccaacagcta

SEQ ID NO: 22308 - DNA, 301 bp, Oryza sativa
  Clone ID: TF_uC-osflM202096e01b1
atgattcttctcttcttcttcttccactagctagtaagctttactccttcagcttgcttgttgcatgtatggcatgggaagatctggactcgcatcgtacgtcgtttagcatcgagcggccaggatggggcggaggaaggtgcagctgaagcggatagagcacaacatgaacagggcggtgagcgagtccaagaggaggcacggctgtgataaaaactgccacgagatcgtcgctcgtgtgaagggcatggtggtcctgatgcgcctcgcggagacgggggagctctacgagctctccatt

SEQ ID NO: 22309 - DNA, 325 bp, Oryza sativa
  Clone ID: TF_uC-osflcyp139b07b1
ttgaataattcgcttcgcgagattggttgattcatctcgcgattgatcgagctcgagcggcggtgaggtgaggtggaggaggaggaggaggaggagatcgggatggggagagggagggaggagctgaagaggatcgagaacaagaacaacaggctggtgacgttcgagaagcggaggaatggtctgcacaagaaggcgaacgagttttacgtgctatgcgacgccgaagtctgcctaatcatctacagcaactagtggtaaagctatacgagattttagatacggccaaagcatggatccagtaactttggaaagattccaaaaa

SEQ ID NO: 22310 - DNA, 807 bp, Oryza sativa; identical to SEQ ID NO: 12943
  Clone ID: TF_OsC383105_1

SEQ ID NO: 22311 - DNA, 1045 bp, Oryza sativa
  Clone ID: TF_OsC136517_1
aatccgaagatgtaaacagttgatcagaagattgacacaatatcacttaaattgaagatgacggcatatatgttatttaacttacataatcttagtttttagcccaatgcttgaagtcaacttgatcatttaataagagttgtgactgcataaaactatttgacaacagcagaccatgcaaacagctttaacatgatctattattcatgaatgtcattattagccaacagcaggttgtataaggtccaaaacaaaagggaaagagatccagagaaattgtttcagtacagagagccaggaggattaacctgtagcattatcacagcaacatggcacggaccactccaagctgatcagaaactattgactgcatcactggaagccggtaagcaaaagggggttgattatagagcttgcctgtagggcttaggtcctcccaaccgtagctgccaccagggctcccttgagctgggatcctatcccatctctcctggattggattgttgcctccctgtgcgacggcgcccctgagcttatggagcgccctttcgaacaccggcagctccgcctccccgagcgcctcgacgttggcggcgtcccaccagaaccgccgcctccccgccgccatggcctccgtgatctttccctcgacgccgctctgccgcgcgtcctccgccgccacctccgccgcggcctcgtccgtcgcccgcttcagcgcgttcagcacctcggggttgtcgccgccgtcgtccgcgaagacgtcgccgccggcgtgggcgtgggaggtggaggtggaaggcccggccacgacgtggcggcggaggacggcgtcgacgctcggcgagccgaaggcgaagacgttgccggccttggagaaggagacgatggcgatggacgcgccggagagcgtggatatctcggacgccttcttgaagaggccccggcggcgcttggagaaggtgacctgccgtttctccttgccgtcgatgcagcacatctcgatcttctgcttccccttgctagtcccccctcgcggccgacccat

SEQ ID NO: 22312 - DNA, 468 bp, Oryza sativa
  Clone ID: TF_jC-osleLIB3474029f03b1
cggcacccgtgggcggtattgggaggaggatggggaggcgggggcgggaggagctgcggcggatcgaggaccgggtgcggcgcgggatctgcttccggaagaggctcgccgggctggagaagaaggtggaggagctcgccgtgctctgcgacgcccacgtcggcttcgtcgacctctcctgctccggcgacgacgccaacccccaccacttcgccgcgcccgccactattgaaaacattgtggaacgttatgagcactctcaagcagcacaaaaaggagtacatggcaggtgcattctgcaaaagaggaagagcaaggattttcaagttctcaaggaaacaatagataaaggaccaatcaatgatgacatgcgacctattgatgaaaaagacatatccacattaaacatggaccagattagccaaaatgaaatataattggaagatgaactgaggtggacaagggcaa

SEQ ID NO: 22313 - DNA, 1452 bp, Oryza sativa; identical to SEQ ID NO: 12945
  Clone ID: TF_OsC373794_1

SEQ ID NO: 22314 - DNA, 625 bp, Oryza sativa
  Clone ID: TF_OsC42645_1
atcccaaactcatctatagcctctagttgtagcagtagtcagatcgaagagaggtgttggatcgatcatggtggcgagtaggcggaagatggagagcgaggaggcacggaaggtgtgcttctccaagcgccgtgcggacctcttcaagatggcgagcgagctgtccgttcatttcaacgccgacgtggcggctgtcgtcttctcccccgccggcaacagggcctactccatcggcgacccgtcggtcatggaccgcttcctgtcgtcgttgccggcgccggcgccgccggcggagaccgagccagagccagaggtggattggtcggtgatggaggagctgagcaggctgtgtggccagctgcaggccatggtggacgcgcacaaggcgcgcctggagaaggcggaggagaagcttcgcgagagcggcgcggcggcgtggatgatggatctggaggcggaggtgggtcgcatggcgccggaggatgtgctggccctggtgactaagctggcggtgctgcgggacggcgtggcggagcgcgcccacgagatgctgcgcgaggcgctgctcgctgtcgctgccccgaccccgaccacccccaccaccccgccgcccgcgggcttctga

SEQ ID NO: 22315 - DNA, 446 bp, Oryza sativa
  Clone ID: TF_LIB4309-018-R1-K1-C9
cccacgctcccgaccatgtttgctttaatagtactacattttggaaggaaccgacgtaacgcacactggggttatgaacatatctatctagtctcttagattgattgacactatgtcagtggcgcactatataatttcatactcatttgctgcaatttatgttgtagtttgcttcctcctttcgtaaacagcgttatgctgcttttatcatgagactaagagaaccaaaaactacagctctgatatttgcatcgggtaaaatggcatggttcaacttcttgcaccgtgactgcaaatgttctgttttgttcatctgcttattgacttgtgaattggtttgctatctgtccaatggccagctgttgatcttgtagctattatcctgcatattgattcatgaactgcttttgctggtgtgcaactgcttttgctattagcatactatc

SEQ ID NO: 22316 - DNA, 726 bp, Oryza sativa; identical to SEQ ID NO: 12980
  Clone ID: TF_OsC714_2

SEQ ID NO: 22317 - DNA, 1197 bp, Oryza sativa
  Clone ID: TF_OsC714_1
gcgccgccaggcacgcctcctctctcgtcgagagcgcatagataaccctagcctcccccttcctcttcctctcctccttctctcgatctctataaaagacctcggatttcgaattcctccgccccgcgcgcgcgcgccacctcccccacgcccgtcgcgcccttttttttgggggtgggattcgcctggtcaagtgccatcgtcggatcatggcggcggaggcggcagcggcgctggaggggagcgagcccgtggacctggccaagcacccctccggcatcatccccacgctccaaaacatcgtatcgacggtcaatttggattgcaaattagacctcaaagctatagctttgcaagctcgcaatgcagaatataatccaaagcgttttgctgcggttatcatgagaataagagaaccaaaaactacagctctgatatttgcatcgggtaaaatggtctgtactggggcaaagagtgaacaacaatccaagcttgcagcaagaaagtacgctcgtattatccagaagcttggctttcctgctaaattcaaggatttcaagattcagaacattgttggctcttgtgatgttaaatttccaatcaggctggagggacttgcatattctcatggtgctttctcaagttatgagccagaactctttcctggtctgatatatcggatgaagcaaccaaagattgttcttctgatttttgtttcaggcaagattgttttgaccggagcaaaggtgagggatgagacgtataccgcctttgagaacatataccctgtgctaacggagttcagaaaagtccagcagtgaaaacttatggaatacacaagtacaagcttccttgagattttgctgcctagtgactgctaatcttaactgtacatatggtctggaggagcgtatagcatcttgtaatttatgtgagcccctcgatgcacgagtgttgtagacttgttgtagtaggcttgtagcttgggtgactgagagacttgagtatcgcgttcagtcgaacgaggtggagacgtggagttatcgtactttagcccgtgctgatttttttcccttcacaaatagatctgtagcgaaacattttattacagaaatgggcggctaacttttaacaaacagaacaaaaaaactgtggatgcgttgcgttttacagtagaatgtcatggactgtttggat

SEQ ID NO: 22318 - DNA, 520 bp, Oryza sativa
  Clone ID: TF_uC-osroM202023b12b1
tccgatttccgatctctatataaaagacctaggatttcgaaatttgtgggtccccctcccccttcgcgcgcgcgctctcttcccgccctttttttttccttcttcttcaccggtgggattgattcgtggggtgcggatctggtttttgggggtgtgtatggcggcggcggaggcggcggcggaggcggcggcggcgctggaggggagcgagcccgtggacctggtcaagcacccctccggcatcatccccacgctccaaaacatcgtgtcgacggtcaatttggattgcaaattagacctcaaagctatagctttgcaagcacgcaatgcagaatataatccaaagcgttttgctgcagttatcatgagaataagagaaccgaaaactacagctctgatatttgcatcgggtaaaatggtatgtactggggcaaagagcgaacaacaatcaaagcttgcagcaagaaagtatgctcgtattatccaaaagcttggctttgctgctaagttaaggacttca

SEQ ID NO: 22319 - DNA, 942 bp, Oryza sativa
  unsure (1)..(942): unsure at all n locations
  Clone ID: TF_OsC104933_1
cctaacccgcgatccnnctccgccgccgccaccaccaccacccacccggatccccacctccctccccgatctcaccacntccgtataaaggcggctcggtttgaaaaatctttgcctccggaggangngngggggatggctgccgcggcggtggatccgatggcgctggggctggggacgagcggaggaggaggaggaggcgagtcggcggtggggggtgatggggcggagccggtggatctcgtcgagcacccctccgggatcgtccccaccctccagaacattgtttcgacagtaaatctggactgcaggttggatctgaaaaaaatcgctctacaggctcgtaatgcagagtacaacccaaagcgttttgctgcagttatcatgaggataagggacccaaagacaacagccctgatatttgcttcgggaaagatggtttgcactggagcaaagagcgaagaccattcaaagcttgctgcgaggaagtatgcgcgaatcgtccaaaagcttggcttcccagcaaagttcaaggatttcaagatccagaacattgttggttcatgtgatgtcaaattcgcaaagagatttacgctccctttgagaacatgttcccggtgctcactgaatacaggaaaactcagcagcgctgagggaatgatttgtcgacagaatggggagttcgctcccgctgtacataccatcttaaggacctgccctggcccagattttgagacatgcacctggcgtcattcctttttctttcctttgttcttcgtagcagtagggtaggagagcaactgcgtaaaggagagtatgtaaacaagttgatcaaagtattcttttgataaactaatgctgacatgcaagaaatgcatcctgacttgagatcaaaaaaaaaaaaaaaaaaaaaaaaacctgcagcccgggggatccactagt

SEQ ID NO: 22320 - DNA, 511 bp, Oryza sativa
  unsure (1)..(511): unsure at all n locations
  Clone ID: TF_LIB3434-047-P1-K1-E1
gcaggttggatctgaaaaaaatcgctctacaggctcgtaatgcagagtacaacccaaagcgttttgctgcagttatcatgaggataagggacccaaagacaacagccctgatatttgcttcgggaaagatggtttgcactggagcaaagagcgaagaccattcaaagcttgctgcgaggaaggtaatagccaatagtcatattgtttcatcactatttatgcttaggaacgcttgttgtttacatcatgcagggagaaattgttcactgatcctattttcggcttttgctgaattgctctataacaatttttatctgattatttgttagcgcagtatgcgcgaatcgtccaaaagcttggcttcccagcaaagttcaaggatttcaagatccagaacattgttggttcatgtgatgtcaaatttcctattcgcctggagggccttgcttattctcatggcgcattctctagttatgagccagagctcttncctgggctgatttaccggatg

SEQ ID NO: 22321 - DNA, 1462 bp, Oryza sativa
  Clone ID: TF_OsC12862_1
ctactgcccggactcctcatcggactcgccgtcatcgcggtcatcctccccgtcctcctgctgctgttgatggtgttggtgatggtggtgcgggtgtggcagttgaccagtggcactggcgccgccgacctggtggtagaactggctgagcgaccgggcgaagagcacgccaatgtggccgtcctgtgagtgtcctagctctagccccggcatggccgccgccacgtgggcggcgaacatggtcgcgaacccgatgtggcaccggcgaacgccgcggcggcagcccacatgtggtggtggtggtggtgcaacctggagagggcgcagtttggggaagggagggagggtgcgacggatgtcagcgccgacacccgtccccatggcagtgacgattgccggctccgcctgctggagcagccactggacggtttcaccgtcggacttgtggccgagctcccgcgttagctgggggcccccggctgctctcttcgccggttttcgatgactaggatgccacgtcagcaaaaccatttttttttttttttttttttttaaaacaaatgagcagtgatatctctgaactttcgcttacacatagatagcaagcagtctagtagtggaccaatccggccttctgcacgcatacagtcactcacacgctactacgctatctttacatggagaacatatacatatattgcgacatagaagtgcatatgacatataattagtgtgcacatgtgtgcatgctgctgctgcatgcagcgctagattattcgttcgcagcaggtagcgaagttgtgtgatcagttttgtcaggcgtggtccggctcaccaggaagagcagcgagaacatcaggaggagcagcgaatacatggcggtctatgtcgtcaggtggactagcgaacacttggtccggatcatggtctacgtcatcatgggggctagagaacacgtagcggtggtccggatcatggtctacgtcatcagggggactagagagcacgtagtggccggcgcggagaggcctcggcagtctggccgccgccgtggtcttgcagccgtcgtagcactgcccgaagcaggcctccacggcgcccttgccgtccggaaggaggcggtggcaggagcccaaggcgcaggagagttggcactccatgtcgccggcgaggcgggacgacgacgacgacgagtacagcgtgggcttgtccggctggcacgtcttgtcgcaggcgtagctgcagtagtcgaccatgttgttctccctggccatgcagtccttgaagcagaagtcgtagcagtcggcgtccgcgccgccggcgaggaatgtcagcgccaccaccacggccaccgcgccgagtgcaacaactcgtcccgtcgtagtagccgccatcgatcgcttccaactccggacttccctgcggacgcgtgggcgtggttcggtaccggcaggtgcagcag

SEQ ID NO: 22322 - DNA, 816 bp, Oryza sativa
  Clone ID: TF_OsC420086_1
atgcggcagcggcgacacgggagaagaggagggaaggcggcggcaggagcacgaggtgctaaagcagcctccattaaaatcgagcagacgaagccgaggcggatttcgcaagagctagcgcaagcgtcggccatggaggaggtcgtcgtcggcaaggagcgcaagcgcccgcgctgcgcgctcgtcggcgtcggcggccacgacagcgacgtggcggatgagcccggtggcgtgcgggcgagaaggacaagcacagcaagactgtcggtgccaacgtccatcgcgttctacgacatccaggaccgcctcggcgtcaaccgaccaagcaagtccatcgagtggctcatctgcgccgctctcgtcgctcgactcctccttcgtcctccccaacgccgcccagctcctcacccgcggaggccgtcgagcgggcagccttcggaggaacaggcgcgcacgaggaaggctacggtggcggtgtcacctgggaagtcgggggagaagaggcggaagacgaggtcggggtgtgcagcgcggaaggcggagcgcatcgcgaagttgagagtgtggagggaggggtggatgccgaggcgcgaggcgagcacctcggcgacgtcgggcggccagagctggatcaggaagccgtcgacgccagggagcggcgactcgtgctcgtgctccgatgcgaagccggggaagcggcggtgggcggagaaggccggggaggtggtggcgcgggaagccgatggcgcggagcggggtggtggcggacgacgacgatgacgatgatggcagcccgcgcgcgcagctcctcccccg

SEQ ID NO: 22323 - DNA, 1671 bp, Oryza sativa
  Clone ID: TF_OsC45299_1
tccgtgcttttttccataccctagatcgagcgccgctttttttatttttttttgaaaggttcaaaattcagaacttattaattattacacaagccaatacatcaattacttctttgcatataaaaagaagtaacaaatccgtattgcacacaggcatatgcagcaaagccctgcatatttcattgccctatgtttcagagcaaaagaaattagcagccagctagctggcagtatcttccttcttaaatcttaacccacaagcttaattgttcccttgaaagaaattaatacatagatcaaagcaatgcacacacttgcactagctagcttagatttgttcttttggtagagctcatcgatccttaccttgtcgacgatcgaagagtgttgttccagtgtgtgtactgtgtagatggagcttgcttagcttcctgtctgatcatggaaagctctcgccgagctcagggacaagccctgcgagccaaggttgtctactgtgaactgctcggcctcggaggagtagaacaccagctgatgatgcggccctggagccaaggaaagcagtgaagggaacggcgaggtgtggtgagccgcggcggcggccacctgcggcgagccggcgccgctgtcttgcacgctgccattattccatgactcaccggcgtagtggaacggcatggcggcgccggcggcgctgttgaccatccccagcgggttgttcagccccatgaaccggtggtagccaccggcggggaacctccccactatgtgcgccgctccgccgccgcccccgccgtcgacgtcgtctccccctcctcctcctccgccgccggccgccgccgcctccttctccgcggccagcgcggccgccgccgccgcgacgtggtacttatcgtcgtcggcgtggtggtggtggccgtggtggtgcatcagcggcatggccgacggcaggtggtggtggtgtcccatgcagaggtggtcctgcggcgggaactgcagcggcggcagcttgtcgatctcgtggcgcgccgcgttgagcagccagtccaccaccttgctgggctggttgagccccagccggtcctgcaggtcgtacagctggatcgccgtcggcaccgacagccgcacccgccggtcgcgcagccccttcaccgtcttcaccttgctgtgccggtccttgccgccgaacacccgcgacacgcgcacgatccgcgactccgtctgcgccgaccattgccgcgacgtcgccaccgccgccgtgtgcttcctcgctagctccgccgcctcctcctccgccgcagctgccgcagccgcggcggcggccgcttggttgcttcctagtatcattcgtgctgttattgcttgtcatcttgagctgctcatgattagacaagcatgagcaagagggcgcttctccctcctctctctccccggagatatagatcacctcaattagcctcctgcaagcttggaattaatcaagccggccgattttcagctaggtgatgatgagcccaacagcctcgccgtcgccgtcgccgtcgccggccgggagagagggagcagcaagagggaattgaaccctagctctcagctagctgatggtgaggatcctcgtgccgggtccgcggcccgggggtccgctagtggagctcagagtgtgcctcgtgc

SEQ ID NO: 22324 - DNA, 1784 bp, Oryza sativa
  Clone ID: TF_OsC903_2
gagctgtggggttcccatggccactgtatcttttttccctctcataggatggcgagctgagctgagctgtgctgggctttactaaccccatgcgcgggcagaatttagcttcttgttttaattttcgctcttctcctttccggttaactgtgggtgagagggagctcaagctggaggaagacaagaaccagttgtccaagggcttagacccttggacgagcaaccctaccgccagcgcgagcaccttgcactacctgctccaggagaaggagagggcgcagcaagcgcatgagcagcttcagatctaccagcagcagcagggattcggcagcttcctgcaacaccggatcaggcagccggcgagccgggggccgggaggtggaggcggcggcggcgatggcggcggcagcagcggcgagtcgacgcccgtcgaagcgctggccactgcattcggggcaggccgcatcgtgcggtccgcggccgggcgcaaggaccggcacagcaaggtgtgcacggcgcgcgggctgcgggaccggcgcgtccgcctcgccgcgcacaccgccatccggttctacgacgtgcaggaccgcctcggctacgaccggcccagcaaggccgtcgactggctcatgcgcaacgccaaggccgccatcgacgagctccccgaccgcgccgaggccccgccgccgcccgccgcggcgtcgacggagcagcccgaggccaccgagcaggcgacctcgacgtcctacgggttcggcaacactaccggcggcaccatgaccagcgccgcgtcggccgctgctggctccttccttccacattcgctgggggcagatcgagtctccgacagcgtcaagtccctgttcccctcctcgtccacagccagcggcgccgcctccgccggacacgacgagtacaggggatccccgccggacctcctgtcgcgcacgacaagcaaccagcagccgcaggagctgtgcctcaccctacagtcgaaccagcaccagatcttcagccatgtctcgtcgaaccaccacggtatgatctcgagtgcaggcgttccaggttggcccgaccacagccagagaatgcaggcatggcatgccccggagaacagcacaggagacggccgcggcggcggcaatggcgacggctacatgttcgccatgccgtcgcggcaagggctggaccagagccagctcttctcgcatggggaaccccttcagtccagcggtcgcgggtgggcgtcagcccgcgcatggctagaccccctcgcagtcgcagccatccaccaccagccgtcgacaatggctgccggacaggtcggcttcggccatctcgttggcggcgccggtggcggcggcgggtttatggggtttctcgcgccggcggcgcagcggcttgagggcgaggaggagcacggaagtgaggtgatcaggtgatgagaagagactgaagaattgatgcatggcgcgcatgcaggaggtgtgtgctttctattaattaacacacttcactgatctgcttaagggtacgtgtatgtcatttcatgtaggattttggctgatgaaatttccctcattattatctgctgtcttcatgcatgtgtaaccaaggcttaattaattattaagagtacgttcccttggaactaggcagctgttgctgttgcattagttgctattgctgttttcccctttattctcggcatggacaagatgtgatgatgaagagatgatatggtctatgatcttgaaaaattaaaaaaaaaaaaaaaaaaaaaa

SEQ ID NO: 22325 - DNA, 1198 bp, Oryza sativa
  Clone ID: TF_OsC12862_2
ttagatgagatggtaaaggttctccctaacactacacttaactggcatctcctcacaacttctgttgatataccagtagtggctagagacctgaatatctacacaacgacctgcaataacaaataaagcactcactcgacagcgatgatccagtccatccagctctcggctattatacacctggtggtagaactggctgagcgactgcgcggcgagcacgccgatgtggccgtcctgcgagagccctagctctagccccggcatggccgccgccgccgccgcgtggctggcgaacatgggcgcgaacccgatgtggccaccgccgccgccacccccaccccccaacccccccgctcccccgccctggagctcgatcccggcggggatccccatccgctgcatgatcccgccgatcaccccggagtcggcgccggagaaccctgcaccggcgaacccggcggacgccgtgggcggcgctgccgcccacatgtggtggtggtggtggtgcgacctggagagggcggagttgggggaagggagggagggggcgacggaggcgagcgcggacgccgggatggtcccggtccccgtggcggcgacgatggccggctccgcctgctggagcagccactggacggtctcgccgtcggacttgtggccgagctcccgcgtgagctggaagatccgggcggcgcacagcgccggcatccggatccgccgcccccgcccgtccaccttggtgtggcggtccttgttcgagctccgcttcggccctagcccctgcatcctcctctcccccgccgccgccgcaaccaccacctgcatctgctgctgctgctgctgatccttccctccgcctccacctccatcctgctgctcctgctgctgaggatgaacttgaatctggaggcgatgctgctgctgctgctcatcgtggtgatgctgctggttggtggtggtggtggtgggctccgttttgtttagcggtgggggtggggggaatttggggtccattagctgcagtagtcgaccatgttgttctctctgaccatgcagtccttgaagcagccgtcgtagcagtgggcgtccgtgctgggcttgacatcctccaccgccactgtgaaggctttcttcgtccccccctccatcggccaaagtgtcccccagagaagccagggagctcttatgtcgagttgag

SEQ ID NO: 22326 - DNA, 177 bp, Oryza sativa
  unsure (1)..(177): unsure at all n locations
  Clone ID: TF_5003300
gggaaggaccgccacagcaaggtgtacacggccaagggcatccncgaccgncgcgtccgnntctccgtctccaccgccatccagttctacgacctcnaggatcgtntcgggtatgaccagccgagcaaggccatcgagtggctcattaaggccgccgcgncgncatcggcaagctcc

SEQ ID NO: 22327 - DNA, 969 bp, Oryza sativa
  Clone ID: TF_OsC12862_5
agaaaacaaatgagcagtgatatctctgaactttcgcttacacatagatagcaagcagtctagtagtggaccaatccggccttctgcacgcatacagtcactcacacgctactagcctctaaaaatgtatatgcatcatatttgcgttgcagaaacagcccgtgggtgaggatcagtttgacggacatcgtatttgtcgcacataagcggatcatcactctcgtaaaaaggaaaaaaagaagacctctctaactgcaaaaatacctgaatatctacacaacgacctgcaataacaaataaagcactcactcgacagcgatgatccagtccatccagctctcggctattatacacctgcaaaaatgaacacaaacacagatacataagctcatcaagcaacctttcgaagagcatgtcatgtgctgactgtggagtgaaaaagattgagctttcacctaaacacttggagggggataaaccggcgaccatccatggagcagcaggagtaacaacggcggcactagcgtcgccgacctggtggtagaactggctgagcgaccgggcggagagcacgccgatgtggccgtcctgtgagagtccggcgaacgccgcggacgcggcgggcggtgccgcggcggcagcccacatgtggtggtggtggtggtgcgacctggagagggcgcagtttggggaagggagggagggcccctgtatgtcagtgccgacacccgtccccatggcggtgacgattgccggctccacctgctggagcagccactggacggtctcgctgttggacttgtggtcgagctcccgcgttagctggaagatccaggcggcgcacaacgccggcatccgaatccgtcgtccccggccatccaccttggtgtgccggtccttgttcgagctccgcttcggccctagcccctgcatcctcctattccccgtcaccgccgccaccacctgcat

SEQ ID NO: 22328 - DNA, 1675 bp, Oryza sativa
  Clone ID: TF_OsC2035_1
acttctctctcccacacaagctgagcgcccaggtaggctgcctgctaggtctcgtgcatggccggacacatctgatcatagcccactacggcactattccccccttccgcctcgcacgctgagaggtggccggagagggagggaggccagcgagcagcagtagcagcagcaacgcggctaggagtaaggagtcccatcagtaaagcatgcttcctttcttcgattccccaagccccatggacataccgctttaccaacagcttcagctcacccctccctctccaaagcccgaccaccaccaccaccaccattccaccttcttctactaccaccaccacccaccttcctccccttccttcccctccttcccctcccccgccgccgccacgatcgcctcgccgtcgccggccatgcaccccttcatggacttggagttggagccgcatgggcagcagctggcggcggcggaggaggacggggcaggcgggcaaggcgtcgacgccggggtgcccttcggcgtcgacggagcggcggcggccgcggcggcgaggaaggaccggcacagcaagataagcaccgccggcgggatgagggaccggcggatgcggctgtccctcgacgtcgcccgcaagttcttcgcgctccaggacatgctcggcttcgacaaggccagcaagacggtgcaatggctcctcaacatgtccaaggccgccatccgggagatcatgagcgacgacgcctcctccgtctgcgaggaggacggctccagcagcctctccgtcgacggcaagcagcagcagcacagcaacccggcggatcggggcggcggcgccggggaccacaagggcgccgctcacggccacagcgacgggaagaagccggccaagccgagaagggcagcggccaacccgaagccaccgcggcggctggccaatgcgcaccccgtccccgacaaggagtcgcgcgccaaggcgagggagcgggcgcgggagcggaccaaggagaagaaccggatgcggtgggtcaccctcgcctcggcaatcagcgtcgaggcggccaccgcggcggcggccgcgggggaggacaagtcgccgacgagccccagcaacaacctgaaccactcatcgtccaccaatcttgtgagcaccgaattggaggacggctcctcgtcaacgcgccacaacggcgtcggcgtcagcggcggccggatgcaagaaatctcggcggctagcgaggcgagcgacgtgatcatggcgttcgccaacggcggcgcgtacggcgacagcggcagctactacctgcagcagcagcatcagcaggatcagtgggagctcggcggcgtcgtctacgccaattcgcggcactactgctgatgtgatcatccatccacacacgaacgaacgaacgaacggtacggcactaagatcgaactcctgcagctacataattatcctttgcttctcaagagtaataattcttgacgtgttaattaatccgggtgtgtattaattccctctttattattttttctcgcgtttatccggagttgactgtggtgaagactaactttggtttggtcatcgcatggtgtgcattgcatatatagctagcactatcgtctgatcgatgattcatcatcaatggagtcgtctagtattaaaaaaaaaaaaaaaaa

SEQ ID NO: 22329 - DNA, 1635 bp, Oryza sativa
  Clone ID: TF_OsC1117_1
tgcgggctgcaggaactcggcacgacgcacacctctcccccccaccctttcccgcaacacgcgaaaagagaggcgaggcggaaacaagcccgggcttttccgtctcgtctcgtctccctcccaaaccgaaccaatccaatctcttctcatccatccccatggaggcgcaggcgcaggacaaggcggaggagggggaggaggagggcacgcggcagcaacacgcgcaggctgggccggtcggtgcggctggtggtggtggtggggggggcgcggcggctgtggcgatgagcgccatccccatgaacagctggctcgtgcccaagcccgaaccggtggagttcttcggcgggatggccatggtgcgcaagccgccgccgaggaaccgggaccggcacaccaaggtggaggggcgcgggaggcggatccgcatgccggcggcgtgcgcggccaggatcttccagctcacgcgggagctagggcacaagtccgacggcgagaccatccggtggttgctgcagcagtcggagccggcaatcatcgcggccaccggaaccggcaccgtcccggcgatcgcgaccaccgtcgatggcgtgctccgcatccccacccagtcgtcgtcgtcctctggcccggcgtcctccgcggtggtcgacggtgaggagtcctcggccaagcgacgccgcaagctgcagcccacgcgcgcggtggctggcgcgtctccgctggccacggcggcgcccgcggcgtactacccggtcatcgctgaccctctcctgcaaggtagcggcggcgcggcgatttcagtcccgagcggcctcgctcccatcaccgccaccggcgctccccaaggcctcgtgcccgtcttcgccgtcccggccactggcagccccgcggtcgccggcggcaaccgcatgatcccgcaagccaccgccgtatggatggtcccgcagcccgcaggcgccgcgggcgcgggcaaccaacccacgcaattctgggccatccaatccgcgccccagctcgtgaacttcgccggcgcgcagttcccgacggcgattaacgtcgccgacttccagcagcagcaacaacagcagccggtgtcaacaaccatcgtccagaacagcaactcgggcgagcacatgcacttctccggcgccgactcccacgagcagcagcggcgcgggcggaaggaaggcaacagcggcggcgtggtggaccacccggaggaggacgaagacgacgacgacgacgagccggtctccgactccagcccggaagagtagcaaacacacacagcacaacacaaaaaaagcaagcgaggcgagcactccactgcacgccaaaaagtccacaagtcccccccacacacaaagcttaggttcctttttgctccgattcaatttctcgatcgtttctttcccgcaatattcctcatccttgtcatgatgaactagtaattactcccgcgtgttgtgctgtgctgtgctggtactactccttactttcccgtccttagctcagtgtttagtcttagagaagaagaagatgatgatgatttagcatgcaaatgagcagttgacaatttgacataaaaaaaaaaaaaaaccagtactacttgctgtgacaaaaaaaaaaaaa

SEQ ID NO: 22330 - DNA, 1322 bp, Oryza sativa
  Clone ID: TF_OsC900_3
atggatgtcaccggagacggcggaggaggagggcaacggcccaatttccccctgcagctcctcgggaagaaggaggagcagacgtgctcgacgtcgcagactgccggggcgggcggcggcggcgtcgtgggcgcgaatgggtcggcggcggcggcgccgccgaagcggacgtcgacgaaggaccggcacacgaaggtggacgggcgggggcggcgcatccggatgccggcgatctgcgccgcgcgggtgttccagctgacgcgggagctcgggcacaagaccgacggcgagaccatcgagtggctgctgcagcaggcggagccggcggtgatcgcggcgaccgggacgggcaccatcccggccaacttcacctccctcaacatctccctccgctcctccggctcgtcgctctccatcccttctcacctccgccttgccggcttggctggccctcgcttcggcggcggcgcgcgggcggcggacgcgtgggaccgcgtcgtcggcctcgggttcggcggtgcggccgacgccccgtcctccgccacctcctcctcctcgtcgccgcttctgctgagcttccactccggtagcgtcggccttgacgtgtcgccgccgtcggcgtcgacctccccggccgccgccgacctctcccggaagcggcggtgggagcaagaaatgcagcagcagcagcagtaccagcagcagatggccgggtacacgcagagccaaattcctgcgggcacggtgtggatggtgccgagcagcaacgcgcaggccgccggtggcggcgctccgccgggaggcggcggcgagtcgatttggacgttcccgcagtcagggagcggcggcggcggcggcgcggcgacagtgtaccgtggcgtgccaagcggactacatttcatgaacttcccggcgacaccaatggcgctgctccccggcgggcagcagctcggcctcgccggcgccggcgggggtggcgaggggcacccggggatcctcgccgcgctcaatgcctaccgcgcacaggccgcgcagccggacgccggcgcggcggcgcagaatggagcgcaaggctcaagtcagcatcgtcagcatcagcatcacggcggcggcggcggcggcggcgacgagcggcatgagagcatgagcgccagcgactcgtagggcttccgttccgtccggtgtgtgccccgcattttctctggttttgatctgttcttctttaattttctccgtttttgtttgagttgttgtctactaatgtctatggctttcttcctcgacccatcatatattcatgcaaggatcatacagttgcattc

SEQ ID NO: 22331 - DNA, 1997 bp, Oryza sativa
  unsure (1)..(1997): unsure at all n locations
  Clone ID: TF_OsC900_1
aacaccataaaatagtgtgtgatctccccacacgcacacagaagctagcagcaacaagcttcattcgcctcaccctctcccatcatatcatatgaggaagcaggattctttccaacctacaatatatcttttccctgatggctagctagctctttctcggactttctttctttctctctctctatccgtctctaccacatcgcaccacctaaccttctcgagctagacccacccacaacgagagggaggcaggcaggccgcccggagacatcaaattcattctcctcttctcttccaaacaaccacctcacttaccagcctaaaaaatccaatcaaagagaggtatagttggtttatatctgtgtatatataccatggcctaattgatgaccatggacggtcgccggagacgccggaggtggcccgccgcccaaacttccccttgcagcttcttgagaagaaggaggagcagccgtgctccagctcggctgctggaggtggtactgggccatcatcggcgggtggcaacgggaacaatggatcgggaccgggcggtgccggaggggagatgcagcagctgcggaaggcggcgccgaagcggagctccaccaaggaccggcacaccaaggtggaagggagggggcggcgcatccggatgccggcgctgtgcgcggcgagggtgttccagctgacgcgggagctggggcacaagacggacggcgagaacgagtggctgctgcagcaggcggagccggcggtgatcgcggccaccggcaccggcaatcccggcaacttcacctcgctcaatatctccctccgctcctccggatctcgctgtccgccccggcgcacctcgcgcgttacctagccccgccgccgccgcctcggatcccgtgcggacgcgtgggaccgggttgtcagcctcgggttcccgtccgagggccccgcctcgtcgtcctctcgccgtccccgcttctgttgaacttccactcgggcagcgtcggtctcgatgtgcaaccttcgccttccgccgctgccgccgccgccgacctctccaggaagcggcgctgggagcaggaaatgcagcagcagcaacagcaacaacagcagcagcagcagcagcagcagcaacagtaccagcagcagatggccgggtacacgcagagccaaatgccgggcaccgtgtggatggtgccgagcaacagcacgcaaggaggtgggccgtccggtggtggcggtggcggcggaggaggcagcggggagtccatttggacgttcccgcagatgagcagcgccgccgcggccgccgccgtgtaccgggggagcgttccgagcgggctacatttcatgaacttccctgcaccgatggcgctcctaccgggacagcagctggggctcggcccagttggaggcggcggtggcggtggaggaggcggggaggggcacatggggatccttgccgccctcaatgcttaccggacacaggcggcgacggatgccgccggtcagcaaggcggaggaggaggtggaggaggatctagccagcagcaacacggaggcggcggcggcggcggcgagcggcatcagagcataagcaccagcgactcgtaggccccccccggcggagatggatcatcagcgccgcgccaacggcggcggcggcgaggctggcggcgcggcgagctcgcagtgagctgagctaagctaagctaagctagctaagctgtgatgatgggttaatgggaggtagctgtgcaaatgcgaatgcaaatggcatatgatgatttgattagagagagtacagattagggtgtttggaactgcttgctgctgctctcgttaattaatcatctcaattcatcaatcaatggattgtttgcttctttagtttaccccccttattttttacctgggattattttagtttgctcttttggattaattaattaatcaatgtaaggtgtttgtnataaaaaaaaaaaaaaaaaaaaaaaaaa

SEQ ID NO: 22332 - DNA, 1874 bp, Oryza sativa
  Clone ID: TF_OsC219434_1
cctcgccgccttaacccccacccccgatctccttcctcaccgacgacgcgcgccccactccccccacctcaatgcgcgcttcctagggcatatgaccggtactacgacaaccatcacctctcgccgtcaccgtcatcgtcgggatggagctcgccggcagcaacaacaagcgggggagggtgagggggcccaacgacgacgacgacgacgccggggagccggacgccaagcgccatcaccaccagctgctgttgccgtggccgcagcagcagcagcagcagcatccggcgtcgcggatctaccgggtgtcgcgggcctccggcgggaaggaccgccacagcaaggtgtacacggccaagggcatccgcgaccgccgcgtccgcctctccgtctccaccgccatccagttctacgacctccaggatcgtctcgggtatgaccagccgagcaaggccatcgagtggctcattaaggccgccgccgccgccatcgacaagctcccttcgcttgataccgcttccttccccaccaaccccgcctcctccgccgctgttgctgctgctgctgctcctcctcttccccatgccgaacgcgagcagcagcagcagctcaccaagtccggatgcagtagcacgtcggagaccagcaagggctccgtcctctccctctcccgctccgagagccgcgtcaaggccagggagcgcgccagggagcggagcagcgcggccgccgccgcggcatccaaggacgccggggacgacgccgccacccccaccgcgcccaccgccgcgcccgcctcctcgcaggcggcttccttcaccgagctactcaccgggatggccgcagccaacgcctcacccgctgaccacaagcagcagcaggcgtggcagccgatgaccgtcgccgcggccaccgccgactacatcggcttcgccgccgccgccgcgccgcatacgcagccgcggaaatccgccgcgggccatcactccgcgatgccgcacaccttcgcatcacccgctccccacctcgccaacatcacccccatcgccatggcgcccgcgcagcacttcaccctcacacccgccgccgccgagcaccacgcggagatgacgcactactcgttcgaccacttcatgcccgtccacgcggcagcagcggcggcggcggcggcctccaccccggccggcggcgactacaacctcaacttctccatgtcctcgggtcttgtgggtgtccacagtagggggacccttcagtccaattcgcagtctcacctctccagccatcaccaccaccatcaccagcaacagcagcagcagcagcagctgcagaggctgtctgctccgctggatgcgcccaacattccgttcctcttcagcccggccgccgcgcccaccgccgcggacacccagttcgccgccgcattgcagctctgggacgggttccggcacgccgacatcaaggagaagggcaagcactgatcagatcagcagccgcgggcatcgacggcgacgtctcttcttggatggaagtgaaaacatcaaaacgttgcaagccattcctgtgagcaacatccacagcttgaagctgccataagtgaatgctggatgcattctcggaagtagagcatcaactgcacatctaccttggtcacgggaggacctcatcatcgctattcagatgatcttgtgcttttctctgcctgttgttgtattcattttgttgagttgagaatttgggagcattactcgccggagtgccctgaggaggggacgcccttgtaatcctttctgttgtaaactatgtcaatggatgcatgcggctctggactggattggttctttgcctcttttgacactgtgaaaaaaaaaaaa

SEQ ID NO: 22333 - DNA, 1132 bp, Oryza sativa
  Clone ID: TF_OsC6287_1
gcacgaggcaaaacctctcaaaccccacaggcaccggaccaccaccaccattggcaccacctcgcatcacactctctcgctcgccatgagctcccgcgacgccgccgccacgttccatgtctaccagcccgtgcagatcccgacggccacggtggcgcccgctgcggcagtgtcggcggcgccggcagaggccgtcgcccagctggtcccggcgccgagcaagaaggcggccggcgcggcgggtgggaaggaccggcacagcaaggtgaacgggcgcgggcggcgcgtgcggatgccgatcgtgtgcgcggcgcgggtgttccagctcacgcgggagctggggctcaagtccgacggccagaccatcgagtggctgctccgccaggccgagccgtccatcctcgccgccacggggaccggcaccaccccggccgccttcgtctcctcctccgcgccgtccacctcctcctcgcaccagcacaccctcctcggcaagcgccagcgccaggagtccgccgccgccgacgccgtctccgtcgccggcgccgcgtccgcgttctgggcggcgctgcccgcaccaggccggcccgacgcctggggcttctccccgctggacgcgcagccgacgtacgtgccgatggcgcaggcgcaccaccaccacctcaacctcctcgccgcgctctccggcgccgccaggcgcgccgaggaggagtcccggtgaatcacgcacagcagcatgcatcttccgagctctgacacgtctttcgctcaattcaccgacgcgtactgcactggcgtccgtacgccttgttcttgggacagttcttgattggagtgtgcttcttctctctaccccgtggatcgatcgttttgccttcttcctgtgcggttcatcaattgctcaagatgaaattaattgttgctgtggtgtttaagctcaaaactgtaaatacgagtccttagatctcatcttactcctacaaattccagcgccgcatgtgtttgtgtgtttgccacttgtttccagctcttgtgctatgattccatggaacttgtttcagtttagcttcatctacatcgttgtcagaccaaatcatttgacagttacagaaacatgttgcattgagctgct

SEQ ID NO: 22334 - DNA, 1219 bp, Oryza sativa
  Clone ID: TF_OsC1116_2
atgagggtctctaccgttggtggagagggatccggtaggtccgaaggtgggatcgtcgccgatgaacggtgggggggaagggaagggaaggggcgacggcggggcgaggagtttcatcggcggtgggggaaagggaaggggcgacggcggggtgaggagattcgtcggcggcgacacactggagatggggcagtgcgagagaaagagacggggagagggatgtgcgtgtgggatgaggatctggaaggcgagaaagagagggggggaccgccacgtagaccaaaactggggtcaaaaccaccaaaggacctcggccaccccaccccgaccgacgccgaccccacctctcagaatccccccaccccaccaccaccaccaccaatgatggcttcttcctccgacctcatcctctacaacctcgtccccgcccaacccctaaaccctagcgccatccccaaccctaaccccgacctctccatcgccgccgccgagcccccctcctccgacggcgccacccctcgccgcgtcaggcccaggaagtccccctcctcctccgaccgccactccaaggtcgccggccgcggccgccgcgtccgcatcccggccatggtggccgcccgcgtcttccagctcacccgcgagctcggccaccgcaccgacggggagaccatcgagtggctactccgccaggccgagccctccatcatcgccgccaccgggacgggcgtcaccccggaggaggcgccccccgccgccgtcgccatcggctcttcctcggtcgccgccgccgccgccgccggcgggcatgggggcgcgttcgtccatgtgccttactacaccgcgctcctcatgcagccgcctaacgcggacgagccccccatggcatccgctgcctccgcctcgggcaccaccgccgccgacgagaacaataattaatttagaactgccgctgttaggtttaggagcttggagcgtgttagggttagggttccccggcgtatttaggagaggtctccccctcctcaataatttaacctcattgtccttgtggcggttgcggcggcggcatggatttaggttatttagatgccttattcaggcaagcaaatgagggggtgattcagatggtttcttagagaggagggcagaaaaatggagagctctctgtaagtggtgggtgaggactggagtgagtggtactgatgctctgatgaaaaaa

SEQ ID NO: 22335 - DNA, 1427 bp, Oryza sativa
  Clone ID: TF_OsC934_1
agctgcagcttgcagggcgcccagctcacagcatcagagagattcagagtagctcagagtgagcttttgctcgttggtccctcgaattctggagctagttcgcccgggtcctcggtttcgatcgatccccttcagacgaagcggaggcggatttcgcatgaggtagcgcaagcgtcagccatggaggaggtcgtcgtcggcggcaaggagcgcaagcgcccgcgcggcgcgctcgtcggcgtcggcggcgggggcgcgtcggcggcgacggcggcggcctggcggacgagccgggtggcgcgggcggcggcgggggggaaggacaggcacagcaaggtggtgacgtcgcgggggctccgcgaccgccgggtgaggctgtcggtgccgacggccatcgcgttctacgacatccaggaccgcctcggcgtcgaccagccgagcaaggccatcgagtggctcatccgcgccgccgcggccgccatcgacgcgctcccgtcgctcgactgctccttagccctccccgccgccgcctcctcgccgccgccgccggccgccgacgacgccgaggtcagcacatccgagaccagcaagagctccgtgctctccctcgccaacgccccctgcgacaacggcggcggcgcgttcgccgagctcctccactgctcgaacaccaacggcagcaagccattgcagcaacagcagcaggcgacgcttgcgtactacgcggcggcgcagagcgcgcacatggcggcgcccatgtcgttcgaggtgatggcgatgccgccccacctcgcgttctcgcaggagcagcagcagcacgccacggtggccgccttcgatcggggcacacttcagtccaatgcgtcgctgtggccgccgccgccgcagccgccgccgtcgcagcacccgttcctgctgcagaggttcgccgccgctccggctgaggtcgccggcctcccgttcttccttgcaggcggcgtcggcggcgctgctgctgctgctccggcggcgacgaccaatggtggggagcggaggctgcagctctgggacttcaaggaggagaggaagacatgactaaaattgcctggtgttatgtctggtgttgtgccacaagtcaaagccgatcagcatgaagaaaaattcagaacaagaaaaagtattcaggaactgaagatgatgtcagcgccaggaaaaaaacttaaacaccagaaaaatggatgtaattccagatctatgattcttccggctcatgatttccatttctctattctctaacaatgtacgatttaattgtaaccttgactgtgttgtgattcagaaaccatgtcattctgttgcctgtacttcgataattttgtcacatactgcttaatcagagatgcctgacattttcctaaaaaaaaaaaaaaaaaaaaaaaaaaaaaaaa

SEQ ID NO: 22336 - DNA, 1649 bp, Oryza sativa
  Clone ID: TF_OsC900_2
ggcacgagtggtgggttgagggcggcggcggcggcggcggagggtgggatggagcagcaggcggcgccgtcgagcagcacgagcacgagcaccaacagcagccggagcacgtccgaccaccacgccgccgccgccgccgccgccgcggcggcggcggcgcaggtggcgcatcagcaccacccgttctactacgccgccgctcagggtggcgcgaataccatgccggcgccggcgtcgttcatggggtcgctggccatagtgcccgctgctgctgctccgggtggtggtggtgggcaggtgcaggcggcggcggctccggtggcgtcgtcggagaagaaagcggtggtggcggcgggggcgggggcgaagcggccgaccaaggaccggcacaccaaggtggaggggcgcgggcggcggatacggatgccggcgctgtgcgcggcgcgggtgttccagctcacgcgggagctcggccacaagacggacggcgagaccatcgagtggctgctgcagcaggcggagccggccatcgtcgccgccaccggcacgggcaccatcccggccaacttctcctccctcgccgtctccctccgctccgccgcctcccactcctcctccccgcgcgccgcgccgttccaccacctccagcagcagcagcagcacgacgtcgccgccatgctcggcttccaccaccaccaccaccagctgctccctcctccgccaccgcaccagcacccggagccgacgccccaagatcccggcgccggcgagttcatgcgtaagcgctacagggaagccgacgacctgttcaaggacacctcacgccaagaccccgtcgatggcgccaccggcgaggccgagcagaaggcccgtgcggccgcagcagcggcggcgccgccgccaaccgccccgtcagcaatgtgggccgtggggccgaacaccaccggagccaccgccgccttctggatgcagccggcatgggcattcccccacggcgccggcgccggcgccgccggtaacacggtgcaggcgccactccagttcatgtcgcgcagcagctttcccacggcgatgaacgtcaccatggcggacaacaacaacagcagcaacaacaacctcggcatgctcgccgcgctcaacgccggcggcggcggccgctccggcgagcaccagcaccagcatgaggggcagtcgccggcggagatggatcatcagcgccgcgccaacggcggcggcggcgaggctggcggcgcggcgagctcgcagtgagctgagctaagctaagctaagctagctaagctgtgatgatgggttaatgggaggtagctgtgcaaatgcaaatgcaaatggcatatgatgatttgattagagagagtacagattagggtgtttggaactgcttgcagctgctctcgttaattaatcatctcaattcatcaatcaatggattgtttgcttctttagtttaccccccttattttttacctgggattattttagtttgctcttttggattaattaattaatcaatgtaaggtgtttgtgatgatgatgatgattagtagtgggtccaattggatcgatcttgagaagcctagctgagtgattaatttaatatgtttcttgttgtcaaaaaaaaaaaaaaaaaa

SEQ ID NO: 22337 - DNA, 2527 bp, Oryza sativa
  Clone ID: TF_OsC901_1
ctgaggaattcggacgagtctctctctcctcactaaagcacagctcctgcccctttcctcccggcctcctgcccgcccttctgcccgagcggccgcccgggcaggtcacaaacccaacaagagagtgagagaggagcaaaagctttggctggccgtcccccctgttaaaatgtgatgtccaatccatgggattgcgtctagtttagtcccccactcctctcctggttatgggatccggcgaggtggatggacgcgcattggagcagcaacagtagcggcggggaagaaggcggcgggggatctggatccgaggcaccaccaccaccgggtcacccacggcggcgacggcggcggcgtaggaggaggaggaagcgggggacaggaggaggcagatgagcagcagcagcagcagcacgaccaccaccggcttctccagctccaccaccaccagggtgtgcagcaggaccaagaaccgccgcctgttcccgtcttccacctccagccggcgtccgtgaggcagctgtcgggctcctccgccgagtatgcccttctctcgcccatgggcgacgccggcggccactcccaccaccaccaacacggcttccagcctcagctcctctccttcggtggcgtcggccaccaccaccacctgcatcagttcacggcgcagccacagccccccgccgcgtcccacactcggggtcgtggaggtggaggtgagattgtccccgcgacgacaactccacggtcgaggggcggaggcggcggcggcggcggggagatcgtggcggtgcagggcgggcacattgtgcggtcgacagggcggaaggaccggcacagcaaggtctgcacggcgcgcgggccgcgcgaccgccgcgtgcggctgtcggcgcacaccgccatccagttctacgacgtgcaggaccggctgggctacgaccgcccgagcaaggcggtggactggctcatcaagaacgccaaggacgccatcgacaagctcgacgtgctgccggcgtggcagcccactgccggcggcgcaggcgcgggcaatgccgccgcgccgccgtcctcctcgacccaccccgactccgccgagaactccgacgaccaggcgcaggccatcaccgtcgcgcacaccgccttcgacttcgccggcgggggcagcggcgggaccagcttcctcccgccgtcgctcgactcggacgccatagccgacacgatcaagtccttcttccccatgggtggcaccgcaggcggggaggcatcgtcgtccaccacggcggcgcagtcgtcggccatgggtttccagagctacacgcctgacctcctgtcccgcaccggcagccagagccaggagctccggctgtcgctgcagtccttaccagaccccatgttccaccaccagcaacatcgccatggcggcggcggcggcggcggcaatggcaccacgcagcaggcgctcttctccggcgccgccaattactcgttcggcggcggagccatgtgggccaccgagcagcaggcgcagaaccagcgcatgctgccgtggaacgtgcccgaccccggcggcggcggcggcgccgcctacctgttcaacgtgtcgcagcaagcggcgcatatgcaggcggcggctgcggcgctgggtggccaccagagccagttcttcttccagaggggaccccttcagtccagtaaccagccctccgagcgaggatggccggagaccgtcgaagccgacaaccagatgagccaccaccaaggagggctgagcccctccgtgtcggcggccatcggttttgccgctcccggcatcggcttctccggcttccgcctccccgcgaggatacagggcgacgaggagcacaacggcggcggcggcggcaatggcgacaagccgccgccgccgtcgtctgtctcctcggcttctcaccactgaccgcagcagtggcgagcagatgacttcaccaccaccaatccaccatgagcaaacaccacaccatgtaccagactatcagctagctcctccacttccatcacggaattgtcgattgcattcgggaggagcaaagtttggaggtagcacaagtgcactactactgatgctactacatatcggttggttggttggttggttttccatcgatctcttctgctgctgcgcatgtcattggtttttgtttcaagaattcactcggagcttcttagaattaggcttgtgagaatgcagcaacacgatggcaagctttagcttagcttagcaagcctctgtgtctgttggctgttgcgttgcgctaggtgtagttgatcgatgtaggttcgagcttgctttgctttgttttgatttttactcttttgttgctgatgcatggacatgcttttgcttcctcctgtgggttcaggagcagttgctactagaccgatgttgttctcaaaactgataagtgggatggtgatggattgggagaggagcctatctttcatcttttccaaaaaaaaaaaaaaaaaaaaaaaaaaaaaaaaaaaaaaa

SEQ ID NO: 22338 - DNA, 1363 bp, Oryza sativa
  Clone ID: TF_OsC902_1
ggcacgagcagggtgagggcgacgggggggaaggacaggcacagcaaggtgtacacggcgaagggaatccgcgaccgccgcgtccgcctctccgtcgccaccgccatccagttctacgacctccaggaccgcctcggcttcgaccagccgagcaaggccatcgagtggctcatcaacgccgcctcccccgccatcgacaccctcccgtccctcgaccccgccgccttcgccgccattccccacgccgccgccgacgccgcgcccacgcggcggcgttcgcagcagcagcagcagcagctcagcaacaagtccggatgcagtagcacgtcggagaccagcaaggggtcggacaaggaggtcaccgtggcgagcgccccggcgcaggccgcgtcgttcactgagctgctcattgctggggtggcggcgtcgtcggcggggggtggcgccattggcaacggcgccgactgcgtgggcatcgcgcaccccgggaaaggaggcgcggagggggcgtccacgtacggcttctccgccgcctcgagcttcggcgacgcgccaccgatcggcatggtgccggcgccgccgttcaacttctccgcccccggcgccgacatggcggcgcactactcgctcgcccaggaccagctggcggcgcctccgcctcctgccggaggcgactacaacctcaacttctccatgtcctcgggtttcttgggtgccaatagggggacccttcagtccaattcgccgtcgaacatgtccggccaccaccaccaccaccatcagcagcagctccagaggctggacggctccaccatttccttcctgcttggccacgccgccgcggcggcgcacccggcggcgtccgagggccagatcaccagcaccgccgcgttgcagctgtgggatggattccgccactccggcatgaaggagaagagcaagaactgatcgatcccagcaacgcatcctccaaaggaactgaagatatcatcatcagattaattgttgtcacctttccagcaagagctcaccgtggggagctgctacaagtttattgcgatgactgcccgtgttcttttagctgggtcatcgttctgctatgctgttttttggccatcatgaacaccctgccgctgctgctacctgccattgccatcactcagacaatcttgtgaatttccttctttttcctagatgaagctgctgtacaaatttttgtgggagacgtgagtttcgaacaagaataagcgtgtcccgtagccagcgttaaacctttcccttccagaaatatttttcgagtgaattgaaattcatatgtgcctctggttattggagtggcaaaaaaaaaaaaaaaaaaaaaaaa

SEQ ID NO: 22339 - DNA, 699 bp, Oryza sativa
  Clone ID: TF_OsC934_2
atggcagcagcatggcggacgagccgggtggcgtgcgtggcggcgggcgagaaggacaagcacagcaaggtggtgacgtcgcgggggctccccgaccgccgcgtcaggctgtcggtgccgacggccatcgcgttctacgacatccaggaccgcctcggcgtcgaccaaccaagcaaggccatcgagtggctcatccgcgccgccgccgccgccatcgacgcgctcccgtcgctcgactgctccctcgtcctccccaacgccgcccagctcctcacccgccggaggcggaggccgtcgagcgggcggccttcggcggagcaggcgcgcacgaggaaggctacggtggcggcgtcgcctaggaagtcgggggagaagaggcggaagacgaggtcggggtgcgcggcacggagggcggagcgcatcgcgaagttgagggcacggagggaggggtggatgccgaggcgcgaggcgagcacctcggcggcgtcgggcggccaaagctggatcaggaagccgtcgacgccgaggagcggcggcttgtgctccggcacgggagaaggagaggaaggtggcggcaggagcatgggggagataaaagaggacgagctcaagcatggcggcgagaggagtggggcgacggcgggcggagaaggccggcaaggcggtggcgcggagcgaggtggtggcggacgacgatga

SEQ ID NO: 22340 - DNA, 1703 bp, Oryza sativa
  Clone ID: TF_OsC1116_1
tgacatatgtgctttagccgctgattaggttaggtctctgcttctctcatccatccatccatccatccatccatcccctgctgtgcaccgtgactccaccaccaccatcaacaagatgaaaaacaaactcttcttccttttcttgccttgccttgcttgctttgcagtaatcaggggaactgctctctcgtgcgtgtgatttctagtcagtcagtgtggacatctctaaattcatttgtgatttccttcctcatttcgttgcatcggtgtgctatgctgctccaagaaacaagacaaagaaaagaaggcgggcttgcttgcttgcttgtctgctgcacgagtcatagttggcgtcaatcacatgtacagctgcaaatgctgtgccaagaaatgaacaaaagaaatttacagcaggcccatgtgccgtccagcccgtgtgtctggcgtggccgtgcaccggctcgatccgcccctccgtctcgtcgttgcacgtgcaggtgcagcccagccgagtcgtctctctcgcctcctcctcctccccccctcaatgattgcattgggcattggcgtctcctcctcttctctccagtggcagtgcaaccaatcccccacacaccacaccactaccccacttgcccttgcccaaccccccctctccgctcctctcctctcctcatgacgaccaggccagacggcggcggtggcggtggcggcgctccggacaagcagctcgtcccggcctccaacgccaatggcaccgccctcgccgttcgcaagcctccctccaaggaccgccacagcaaggtcgacggccgcggccgccgcatccgcatgcccatcatctgcgccgcccgcgtcttccagctcacccgcgagctcggccacaagtccgacggccagaccatcgagtggctcctccgccaggccgagccctccatcatcgccgccaccggcaccggcaccaccccggcctccttctccacctcctccccttcctccctccgctccaactccacctccaactccaacgacctcctcctcccccgcgccgcccccttcatcctcggcaagcgcctccgtgccgccgacgaccacaccacttcgcccgcgcccgctcccgacgccaccgcccccacccaggccttctgggcgctcccggccagggctgacttcggccagctctggagcttcgccgccgcgccggagatgatggtcgccgccgccgccgcacccgccatgcctggggaggcgtccgccgccagggtcggcaactacctccccatggcgcagggcaacctcaaccttctcgcctccttctccggcggcccaggaggcgccggggccacggcggcgaccggccgacccgaggaggagagcgcccgctgagttactgacccaaaagaaggccatgtaagtcgtctcacttgttcctctgtttctgtctgcttgctgctctagctctttaggccttttgtccagaattcttcttcttcttcttcttcttgttgctcttgtgttcatctctggattggattagtgcttggggagaataatagtaataataagtaattgttggtaggctggtagctcagctcctctgtacgtatgccatgtatgtatgtatgtatgtatggattgtttcatgtgttaaattatccccatgaatgattgagaatgaatgaatggccaaaataagcaaggag

SEQ ID NO: 22341 - DNA, 981 bp, Oryza sativa
  Clone ID: TF_OsC45299_2
tcatccctggcttccagagtgaaggaagcttcttgctgagctcagtgtgagctgcccttgcgagtggtcgaggctatctacaggaaactgctcggctgcagcctctttcacggcgaatccgccgccttccggcgagtagaagacgaactgatgatgagagcccggtgccaaggacagcagcgacgggaacggcgagttgtgagccgaaggcgagacgccatggctgacatcatggtggtggccaccattgccgccgttgccccaagattcggcggcggcgtagtacgccgcggcgtgatgatggtggtggtggtgagcggccaacgtcgccggcatggtggcggcgttgagcaggccgagggagttgctcaggctcatgaacgccttcatgccgccgccgccggcggccttgtcgccgtcctccagcatcgacgacgcggaggcgccgtggtggccgtcgcctccgttcgcgaacggcggcggcgccatggacgaggcggcggcggcgacgaggtcgtggtcgtgcggcgggaactggagcggcggaagcttgtcgatctcggcctgggcggcgttgatcagccagtcgaccaccttgctcggctggctgagccccagccggtcctgcaggtcgtagagctggatcgccgtcggcaccgacagccgcacccgccggtcgcggagccccttcaccgtcctcaccttgctgtgacggtccttgccgccgaacaccctcgacacgcgcacgatccgcgactccgtcgacgccgaccagtgccgcgagctcgccacggcggcggcggcgccgccgccgccgctcggcttgtcggccgccttcctgccgccgccgccgagctcctcattcgtgctgttattgcttgtcatcttgagctgctcatgattagacctggctgccgccagcccgcgcccggccgcctccatcccgccaccgccggccggccactgccagcccgcgcccat

SEQ ID NO: 22342 - DNA, 877 bp, Oryza sativa
  Clone ID: TF_OsC201546_1
tggatccccgggcggccggggtcggctggagaggaggaggaagccatcgatggccatgagcgccctcaagttctgcggcgaatgcagcaacatgctctacccgcgggaggacaaggagacgcacaccctgctctacgcctgcaattcctgcgagcaccaggagcctgccactgacacttgtgtgtacaaaagggttctccgtaaacctgctggggaacccaaagatatcctaaaagatgcagcaactgatcccaccctgcctcgcaccagaagtattaaatgttacaactgtggccatccagaggctgctttttttcaggctccaactaagggggagaaaggcctgacactgtacttcatctgctgcaacccaagctgtggtcacaggtggagggattgacggcaaggttcatggtgctgaatcttggccgttcttgtgttcatgctcatacccggtgttatctgaaggaaggcggccggcgacgcggcggcgaggaaggggcggcgcgcgggcggctgggggaggcgcgacgcgctgacatccgggggcggagcggtgatgcggcggcgggggaggggcggcgcgcggtcggcgggagaggaggagggcggcgcctcgatggcggcagccagcggcggcggcggcgatggggaagcacgacggccacccgcggagaggaggtccatgcggaggaggaccatgaggtgctcccgctgaaaccgaaggtggcgccggcggcacggggggcatgagcctataggggagagcgtcgagctggcacatgaccttctcgatgtcgaggacgaggcgctcagcgagagtgcggctgaactcctcccggtcgccgctccgcccccggccgcccgcgcgccgcat

SEQ ID NO: 22343 - DNA, 769 bp, Oryza sativa
  Clone ID: TF_OsC138347_1
aggaaggaatagaccacagaatgtttttatcctagtagtcttgatccttttccttcagaagttacacaaaataccgatgcctgaatgtgtttttaaaaatttaaacatacaatcagtctatgcttctatggaatgtctcttggatgaaatcaaaatcatatgtctctctgatcatttgcatcaatgactttcttcacttggttgactacaaattgatctcattctctccatctgtgaccgcagctcgggttgcagcagacgaagaacagggtcatcccttcctcccctctggcagtggcctggaagaacacggcctcgccgtggccacagaccgcgcaccggaccgccttggtgcgagggagagtcggatcgccggcgacatcctggagcacttgggtgaactctccggcgctgtggtgcaccacattccggtagacgcagttgttgtctgcaacctcctggtggtcacagttcctgcaggcatagagcagaatcttctggtccctatcctccttgggatacagtatgttgttgcattcgcggcaaaatttcatggtactcatggctgctagcttctcctctgacctgacctgacctgaccttgtctgcttgcctctttcagatctttatattctctgcagtgatggagctgacctgagctgaatcctattcttgttcctttctcctttgcaagaaaggggaatatggaggaggtgagcggacgcgtgggtagtgaagaagaagaagaagggatgttttactaatggcc

SEQ ID NO: 22344 - DNA, 694 bp, Oryza sativa
  unsure (1)..(694): unsure at all n locations
  Clone ID: TF_OsC6358_1
ctccgggccggcggcccgggccacccacccgtcctcatcaaccctagaaaccaaagggagcaggagcaggagcggcagcggctgcggaatcggaggaaggggatcggccgccgccatgagcaccatgaagttttgccgcgagtgcaacaacatcctgtaccctaaggaggagaaggaccggcggctgctgctgttcgcgtgccggaactgcgagcaccaggaggtatcggagagcaagtgcgtgtatcggaacgaggtggcgcacgcggccggggagcggacgcaggtgctgcaggacgtggcgtcggacccgacactgccgcgcacaaagacggtgaggtgcgccgcctgcgggcacggcgaggccgtcttcttccaggccaccgcccgcggcgaggagggcatgaccctcttcttcgtctgctgcaacctcacctgcgcccaccgatggagggaatgattttacttctttctcttcttctccacaactacaacttgatcgatcatgatgatcaactttcccggtttgcttaaacaagacaattgagtactagtttgtaaatggatggaggtttagcaataggtagggttctctgccttcatcgggctcatgttttatctacttgtcttgtttaactcgtactccttcgatgctagatcaatgttaacttgggatgctaaaaaaaaaanaaaa

SEQ ID NO: 22345 - DNA, 936 bp, Oryza sativa
  unsure (1)..(936): unsure at all n locations
  Clone ID: TF_OsC11113_2
ttaaagtacttaattaataaagcactaataagccacncgtttttccatgcacggggaagaggttcttaaaacccttctcccgaacnacaccatttactngtcataattcaagcaaaggcataaaaaaaatatttcaaaatcacttgtcatgtcaaagcatggccattttttagaccacaatcgtagaagtgatcaaaaagctcattctaaggtgactactggttctcattgaactcatgcctgcagtttgcgcacttatagaaaacagtttgcccctcatctgctgaccgtaactgcttggtgtaatactgaagttcaggatttttgcatttttcacactctttatttactgtagctctttcgacaattacgtcttcctccttcagtgttgtttcaagaatcacatatggatcaagttttagctctcttctaatatcctcagccgtgaccgtgtaccgcgtctccttcccttcgatatctttggccttgcgcttgaagccgcagagggggcaggaggcggagcggacggagtcgaatttgaggagggtgccgcacacgccgcagaagaggaagtcccgcgcctgccagaaggccatgccgccgccgccgccgtcgccggcgaagtgttccttctcctctagtctgtggttggctggcgatggtggtcttctctccgacggccgacgatgcagcacgggagaaggggagggtggcggaagggcgaggcggcggcggcgggtgaacgcggtggcgggctcgtcctccccgatcacactctccggcatggggaaaggatggcgcaggcggcggaccgcgcgggagaccagcggcaggcggtcgtggatgcggcgctcacgcggggctgggctggccgcgcggtcgtggttggcggcgggtgaggtgttggcggcgagtgcacccgggaatcgatggagc

SEQ ID NO: 22346 - DNA, 471 bp, Oryza sativa
  Clone ID: TF_OsC11113_3
ctactggttctcattgaactcatgcctgcagtttgcgcacttatagaaaacagtttgcccctcatctgctgaccgtaactgcttggtgtaatactgaagttcaggatttttgcatttttcacactctttatttactgtagctctttcgacaattacgtcttcctccttcagtgttgtttcaagaatcacatatggatcaagttttagctctcttctaatatcctcagccgtgaccgtgtaccgcgtctccttcccttcgatatctgcgccgtaaaaaaagagaacgaaggcatcagccgcaagaagaacacagcccagggctttgcagggagagagatggggaagacgacgacctttggccttgcgcttgaagccgcagagggggcaggaggcggagcggacggagtcgaatttgaggagggtgccgcacacgccgcagaagaggaagtcccgcgcctgccagaaggccat

SEQ ID NO: 22347 - DNA, 1424 bp, Oryza sativa
  Clone ID: TF_OsC110921_1
atggagagggagctcctggaggcgttcgaggcggcgaggaaggcggcggacgcggtcggggaggcggcggcggcggccggggccggggaaggggagtcgccggaggccgcgcgctgcgtcgacgcgctgcggaggctgcgcggggctcgcgtcaccaccgccgccctcgtctccactcagatcggcagacgtattcgctatctcaccaagcatcctcactcaagcataaaagcaacagcttcagacctgttaggacactggaaaaaggttgtcattgaagaagacaagaaaaatggggcactgcagaatggaaaatcgagttctactgtggtaaaggttgagaaggtggagcctatgaaagttgaaaaggcatcaccaagggctactgtcaataataataatatggataccagagttgtgaaccacaaaggtggaaaggttgagaagttttctaatgctgagctgagaacccaatctatcaaggttgagaaagtacaaaaggtagttcacaaagtatcttctgttgagaagccgtctcctgtccaaggtggtcctccaagactgacatccgttgttaaatgtggtgatgctagtcgagacagaattcgggcgatacttggtgatgccttctccagagtttctgaagagactagaaaggatgacagggaggaagtgaggaacatcatagaagaagtaaaagcatgtgacccattcaggattgctgtgatggtagagtgtgccttgtttcagaagctggggaattttaatggacctaataagcaaaggtacagatcattgatgttcaatctgaaggatgatcacaacacagacttccggagaagggttcttctaggacaagtgcagcctgagagaattgctgacctaaccccgacagaaatggctagcgacaccaggaagcttgagaacaagaagatcgaggagaaggctctgttcgagtgcgagcgtggaggagcaccgaaggccaccactgatcagttcaagtgtggcaggtgcggccagcgcaagactacctactaccagctccagactcggagcgccgacgagccgatgacgacgttcgtgacctgcgtgaactgcaacaatcactggaagttctgctaagctaggcacatcctactgagaagtgttagtgtagttgaccctggagtttgacaggcaggttagtttcgggccctgcttatctgggcccgtttcatcttttttccccttaagttagcttgttccgaattcgatttgttctagtgccatttgactgcataatggccggccgttgggcttgcattgtcaggctactgctgttgtacttatcagtcttgtttattgtaccattggatgcaataatgccataatggtcatgctcaaaagaaaaattgcactggcccgacctgcccaacttgaactga

SEQ ID NO: 22348 - DNA, 1626 bp, Oryza sativa
  Clone ID: TF_OsC44273_1
gatgcaaagagaactccttggttatattgctcaccatgattgcactccatctgtccatgttcatcactccatctacatatgagcaacatcgcttttccagcattatttccactcttcatggctaccatgaaagaatcacacaacctccttatacacagaactacattgccatccacgactttaaagaggtacaacaggtaatggtaatatagtcaacaacagttgcggtcaactagtacaatctgaataaatcaggttccgaaagagaaaagaaaggtaaaataaaaaggaaacaggctcctagtttatggaaaattgaagccaacctgcctgtcaaattcaaatgacaccgctagccgggagaacattttcagcagattggcgctcagcagaacttccagtggttgttgcagttcacgcatgtcacaaatgttgtcattggctcatcagcactccgagtctgcagctggtagtaagtcgtcttccgctggccacacctgccacacttgaactgatcagtagtcgcctttggggctcctccacgctcacaatcgaacaaagccttctccttgatctgcttattctcaagcttcctcgcgtcactagccatctcttctggagatatgtcaacaagcctctcaggcctcacttggccaaggagaacccttcttcggaaatcagtgttgttgtcagctctaagattgaacattattgacctgtattttgccttgtgagccccagttgaacgtcccagcctctcaaataacgcagattcaacggtcacagcaactctgaatggatctcgtgcatccacttcatctaagatgtttctcacttcctccctgtcatctttgctagtctctccatgaaccctggagaaggcatctgcaagtagttcccggattttatctctagtgggatcattgcatttgacaagagatgtcagctttggggggccatttggaacagaagatggcttctttgtatcaggagttctagtggcttcctttggagccctctctaccttgacttgttggtttttggaatcattattggtgatcttctcaaccttgatgctctcaggcttctggcccctaacattgacttctcttttctcaggcttcacacttcctgatgcagaactcttatcaaccttcatgggctgagccttttcagctctggcggctgagttggttgatccaacattttctgtggtaccatttttctttccttcttcgataacaacctttttccagtaccccagaagatctgtagccatggattgtatgtctgagtgagggtgcttagtaaggtaacgaagacgttttccaacctgcgtggagacgaggacgtcggtggtgacgcggagaccgcgcagccgccgcatcgcgtcgaggcagcggtcggcctccggggagtcgtccgccccggccgccgcgtcggccgccttcttggcggcctcgaacgtctccagcagctccctctccatggcgggcggcgcgtcgccggcgacaaatcaatcaaaaccctagccgccgcgggctccccgccgccgtcttctcccgtgtggcgtacgggcgggcgcgtgggcggacgcgtgggcggacgcgtgggcggacgcgtggg

SEQ ID NO: 22349 - DNA, 522 bp, Oryza sativa
  Clone ID: TF_uC-osflcyp081e09b1
gttatgtctactagagctggaccttgcttcacggtgctgttacatgctccaaggagcgtcatcctgcaagacccaaaaatgcgaatgtagagcttcaggttcacattgcgggggtgattgtggatgtattccctctaagcgtataatggggtggatgtgaacagaggaaaagatgggttgtggccggggtgcgggatgctgctgcagatccagccggccaccggcgggaaccgcctgcgcttctactgccccacctgcccctacgtctgccccgtcaaaaacaagatcgtgaagaaggcgagactagtgaagaaggaggtggagcccatcttcagcgacagcgacgccatgaagaatgcccctaagaccaccactacatgcccaaggtgccaaaatggagatgcatactacaggcagatgcagattcgatcagctgatgagccaatgtctacattttacaagtgttgcagagaagaatgccaatttgatttgagggaggactgactttagtaatattttttg

SEQ ID NO: 22350 - DNA, 2918 bp, Oryza sativa
  Clone ID: TF_OsC42013_1
ctagccccccccgctccctccccgactcgtgccgcctacccgccagacgtgccagtcttcccaccccccgtcccccctgccccctagccgcaccccgtatggaggcgcaggcggacgccggcggcgacgacctcgccgccatgcgggagcagtgccggagcctggaggaggccatcggcttccgccgggagacgcagatgggcctcgtcgcatcgctccagcgcctcgtccccgacctcgtcccctccctcgaccgctcgctccgcatcatcgccgccttcaacgaccgccccttcgtccccaccccgaaccccgacggcggccacggtaagagccccgccgccctcaagccccaccaccgccgcgccctccctgacccggcgcggtccacccgccgcaagacctcgcccggatcctcccctgcctccgtcgccgctgcccccggcggcctcgacgccgtgcgcaccatggtcgccgtgtgcctcctggagctcgtccccttcgccgagatcgacgccgccgcgctcgcccgccgcatgcaggcggagagctcatccgccagcgaggccgagcggactgctctcgctgacctagccgccgaactcggcggctcggcggcctccgctgtagtcctcgccctccgccgcatagccgaggacaccggcggagtgcagatcgaggaggccatgattgggggcaagtcgatgacgatggtctgggccatcgaccggaacaagctcctcaaggagctgccagaatccgctactttgccgctactccaacctcctccagccccccagatgcccccctctgagaccgatgccggcagcgcaatgataccaagaacaccgcagcagcagcagccgcagccggatatgtggccgcattcgatgcctccgatattcccacggccaaggggcatgacgatgcaggggatgcagagggtgcccggcgtgccaccagggttgatgccgctgcagcggccattcatgggaccagctggagttatcacaatgggtgggggtgtggggcctagccctaaccagcagaagcagaagagcgaggaggacgaacttaaggatcttgagttgctgctgaacaaaaagacatatagagagaagcagaacaccaagaccggggaggaacttttagatctcattcaccggcccacggcgaaggagacggctgtggcagcgaagtctcacactgttagtcctgtagtagtaaatgagctggcagtggcggacctaggatttgaacccaggggactaaatgtaaagaccattgcatacaaggagatgggggacaccaggtccaaatcatccaaaatttacagcatgtttaaaacaaaaggtggttcccagctgaaggaatattgtaccaacttaactaaagaagattgccgacgccaaagtggatcttttgttgcctgtgataaggtccatttccgccgtattattgctcctcatactgatacaaacctaggagattgttcttttctcgacacttgccgtcacacaaagacctgcaagtatgtccactacgagcttgaccaaacaccagatatacctccaatgatggctggtgctcttgcacccccaaggcaaataaggctccagagagctgaatattgttcagaagtagagcttggagaagctcaatggataaactgtgacatccgaaacttcagaatggatatcttaggacagtttggagtaattatggccgatcccccttgggatattcatatggaattgccatatggcacaatggctgatgatgaaatgaggacccttaatgtccctgctttacaaactgatggattaattttcttatgggtcactggtcgtgcaatggaacttggtcgggagtgtttggagctctggggttacaaacgtgtggaggaaattatttgggtgaagaccaatcaacttcaacgtattattcgaactggacgcactggtcattggttgaatcatagtaaagagcattgccttgttggaataaaaggaaaccctttagtcaacaggaacattgacactgatgttattgttgctgaagtccgtgaaacaagcagaaaacctgatgagatgtaccccatgctagaaagaataagcccaaggacaaggaagctggaactgtttgcaagaatgcataatgcacatgctggatggctttctctgggtaaccagttaaatggagtaaggcttgttgatgaagggttgagagcacggtacaaggctgcctatcctgattcagaggaactcctagaaggcgcgcacacgggaagcccaatgcgaccacgaggaggcgaaggtgtggcagtgtcgcttcccggtgagacccacacaacggtggggtttcccggtagaattagggctccaaatccgatgggattgtcaggtgctattgggctgcaccttgggccgtgccagctattctccaagttgagcccaaggatgacaatttcccccgcggggccgggtcccctgcggggacccgaccctacgggggcaggggccatttctgacccgtggatcgtgaagaaggcgagactagtgaagaaggaggtggagcccatcttcagcgacagcgacgccatgaagaatgcccctaagaccaccactacatgcccaaggtgccaaaatggagaagcatactacaggcagatgcagattcgatcagctgatgagccaatgtctacattttacaagtgttgcagagaagaatgccaatttgattggagggaggactgaactttagtaatatttcttgtttaatgtgtgtggatatttttcctgctaaaactatgtaatcatatgaaaccttttgtaatcagctcatgccgcagcaaagagccaaagaaaacttacacatgggaaaccaacgtaccacaaaatatcgtgatattttggtct

SEQ ID NO: 22351 - DNA, 1689 bp, Oryza sativa
  Clone ID: TF_OsC298014_1
ctaattaatcacagaatattttgtaccggtgtaacactcaacatgacatgatactgatacaccaggatggcaagaggagccaaatttaactaggaaacatctcccctccttatcaccaccatctccagtatttctttttccacgtgacagaaggtccaggccgtacggcatactatgatacgaggacccagctgatggtgctccttgcttaagctgccatggtgcaggctgcctactgggagaagggatcacctttgattcatttagccacctctcagcaaagggtgacttcacaggcatgtctggtctgtcagtatccattgtgcaggatgcctcgttaaggtttatcccacggacgcttgtttccgtcttgtcatgatccaatttcggtgatgaagagaatggtgttgaagagacatttggcgtccaaattgcttgattcaagtcatgggtctcggtttttgcactcggtcgactaaatggaccaattttcttgtcttcctcctcttttacaatgaccatgtgatcaggctctgcagcttctgagctctttagcttagcactgtctaactgcttatcttgataaagatctttaccagacgatgagcgcgatgaataaatggtggtcattgggaaagctttctctggtggtgtagctggtgtatagttagggggtagcaaatcatcccaattctccaacagttctttatacactttacgcagagtaacctctgtaaggcctgttaccttacagatctctgcctgagttttccgcttgtcttcaagctgacacgcaagatagatagctgcagctgatatgcttatgggattcctccgtgtgcagaagcatttattaacaacaacctcaccaatatgggctgcaagttcctgagcagatttattgagctggagtaggctgcaaaaccgaggcatatgaactgctattgagttgctgttaagaggttggctcagtttcagtgattcaccaagtattttgatgtattttccaatttctttctggggaagattgctagcagtagagatttcctgcaaggtcctgggctcctgcgcctcgcggatggcctgcacgagtgcggccgtggcaagcgcctcgacgctgcggttcctgaggcacgtagcggaggagcagtccttgaagagctcgaaggcgtggtcggctatgtcccggtccagcctcaggatggaggcgacgtccacgatctggacgtaggcgcggaggctgtcgacggagaccataggccccgcggggtccggagtggaggaggccgcggattcgacggcgagcgcgcgctcgagctcggcgagttggccggagaaggcggacgcggagcgggcgaggacggggtggcgctcgagggagaaggccgagaaggcggagacgaagccggccgggaggaaggggtcgtcgtcgtcgtcgtcgtcgccggaggcggaggcggccgagggggacggcgacggcgcggcgtcggcgaggtcgggggtgacgagggggagcgggtggagcgaggggaggagggggaagaaggggtgggtgtggaggtggcgctcgaggacgaggcgggcgcaggaggagcactcggagacggcgcgggagagcggcggctgcgtcgtgacgcagcgcgccgggccggaggcgcggcagtaggggcactgcgtcggctgcgacat

SEQ ID NO: 22352 - DNA, 1899 bp, Oryza sativa
  unsure (1)..(1899): unsure at all n locations
  Clone ID: TF_OsC167645_1
atgtattgttctcactgtcaagataactgccccgtcgtaaaggaccctgacaaaaactacacatgttgtggtttgtgtgggaaggttcttgatgatcaggtttacgatggtgagccaactttccaaaagggcgccgacgggcaggcccggttggctggtagtattctatcaagcattgagagtggtaattcagtatcccatgaaagaactataaataaaggaagagaggagattaggcagattgtcagcagcttacatgtggctggtggagatactattattagcatggctcatcgctattatacactagctgttgacaagaattttacaaggggccgtcgaacaactcatgttgctgctgcttgcctttatattgcctgccggcaaagtaaaaaggcatatcttcttattgatttctcggaccatttgcagataagtgtctttgccaagttttgctacttgcggaacatccagttatccaaaagctcatcgaccccagccttttcatacatcgttttacagaacactgggaggaaaccaagtggattgtgtggtgcagcactatatatcgctgctctctctcatggatatgattataccaaggcagatattgttgctgttgtgcatgtttgcgaggcaacactaactaagcgcttgatagagtttgaaaatacagattcgggtagcttaacgattgaagaatttttggcaaaggctgatgaacaagtgcttgttactaaaatttcaccaaagtctggagaagtactttgcaagcacaaggataaagctgagcattttgctcatggactctgtgaaaaatgctacaacaaatttatgaaactgtctggtggactggagggtggctctgatcctccagctttccaacgagctgaaaaacaaaggttggaggctgctaaaaatgctaaaggaactgctgcatctaaagaggcagcactggaatcagtttgtgaggcacgcgaatctgatgttgagaataacattacgacaccgccaaagaatataattggagataagcattcgacaattccttctgtgaaagttgctggtgattctgtagctacagaagatcctgaaggggaaggtaaaaatgataaagcagatgaaggtcctgaaagtctctctgatattgatgatgcggaggttgatgggtaccttcacaacgaggaagaaacacagtacaaaaaaattatctgggaggaaatgaataaagagtaccttgaggaacaagcagcaaaagcagcattagcagctgagctggcagctagaggagtggttgtggaagaggggaagaggaaaagaagaagacataatgaagatggcaagaacgcaacacccgctcaaacaccagcagaagcaacacagaacatgttgaagcggaagagacttggatcgaagatcaatgatgaagctgttaacaaactgtacaataccaaagatgaagatggcaaagcagataaagagatggacttcaacgatgagtatggacaggacacaggtgatggtgaaacattcgaaggtggttatgattatcctgattacaactatgatggctatggtgatggagcctacggcgattatgatggtgttgatttttaatacccgatatatcaatgctgggtagaattgttacaattttatttgtgtgtgtatggcaacaattatcaattttacatgaatagttctgattagttgacgaaaacggagttaatcagtactcagtagacagtatagcagtgtagctcgttgatttctctggtgatatgttgagaagctgttgtagtaactgtattatttcattcagcgacctatacttgcaagttgtatattaaaaaaaatataaaaggttacaagtgggcgncgccccntggtggtgtccag

SEQ ID NO: 22353 - DNA, 1329 bp, Oryza sativa
  unsure (1)..(1329): unsure at all n locations
  Clone ID: TF_OsC715_1
gcacgaggttcctcttcctcctcctcctccacccccaaatcgcctcgacgagcggcgcggcggcgagggcaggagagaggcggcggcggcggcggcggcgggggcgagatgagcgactcgttctgcccggactgcaagaagcacacggaggtggcgttcgaccactcggcgggggacacagtgtgcacggagtgcggcctcgtcctggaggcgcactccgtcgacgagacctccgagtggcggacgttcgccaacgagtccagcgacaacgaccccgtccgtgtcggcggcccgaccaacccgctcctcaccgacggcggcctctccaccgtcatcgccaagcccaacggcgcccagggggagttcctctcctcctccctcggcaggtggcagaaccgcggctccaaccccgaccgctccctcatcctcgccttccgcaccatcgccaacatggccgacaggttaggtcttgtggctacaatcaaggaccgagccaatgaaatatataagaaggtggaagatctcaagtctatcaggggaagaaatcaagatgccatattagctgcctgtttgtatattgcttgtagacaagaggatcggcctagaactgtaaaagaaatatgttcggtcgctaatggagcaacaaagaaagagataggccgagcaaaggaatttatcgtgaagcaactggaagttgaaatgggtcaatctatggagatgggaaccatccatgctggagatttcctgaggcgtttctgttcaactcttgggatgaacaatcaagctgttaaagcagcccaggaagcagttcagcgttcagaggaacttgatataaggaggagtcctatttccattgcggctgctgtcatttacatgataacccaactctcagatgataagaagcctctgaaagacatatccttggctactggtgtggcagaaggtaccatcagaaattcatacaaggatctgtatccctatgcttcaaggctcatcccaaacacctatgccaaggaggaagacctgaagaatctgtgcacaccataggaaatttttttcttttcttttttgtcacataacatggaaattagatttgccagagaggagtaatgttgtccttggatgtgagttttactggcccatgtatcactgcacctaattttatgtgcatggacctgttagaacaaagttatctcgaatcgaagctaagttatatgcaaagcttatttaggaatggcaaaaaaaaaaaaaaaaaaaaaaaaaaaaaaaaagggcggccccntgggtngacctcaagggggggcccggtncccaattgggccctatagc

SEQ ID NO: 22354 - DNA, 277 bp, Oryza sativa
  Clone ID: TF_LIB3599-014-Q6-K1-A11
acgcccacgcgttcgcgctgatgctgatgcggacattgctgaaggataagtagcaggatccaccgctgaggggcccgctgtaggaggaggaaatcgcgcgcatggaagtcgccgtctaccagctgcacgcgtaaaggtgcaaggagaagagggagaacatccacacgtacttccgcaagggcaaggaaagcggcaagaatcggacggagcacgccaagacgtgccgctactgtgacgagctcaaccgcctctacttccgatacgtctactgcagctg

SEQ ID NO: 22355 - DNA, 247 bp, Oryza sativa
  unsure (1)..(247): unsure at all n locations
  Clone ID: TF_8857106
cgcttggcgctccggttgtagccgatcctctgcatgccggcggcgatctcctcccacagcgggcccttgggtcccatgtcgttgtactgctcctccttctccatgcgcaggtcgatgagcgcctgcacctcctccttgggccaccgcgacggcgccgtcgtcccgctgccgtctcctcctgctgccgcccaggcgtcctncgccttcgctctcggcgccggcacgggcaccagctgcanccccgccg

SEQ ID NO: 22356 - DNA, 1541 bp, Oryza sativa
  Clone ID: TF_OsC14298_1
tttttttttttttttgaagaaaaaagactcagaggtcaatagcaacacacaaacaactgcagaaagttttctgctggcttgtacaaggacggcttaaacatttatcatttgaaaggccaactagtaccaagtttaaacacttaacaactggaatagccattcacttgaccgattgcagttagctaaggtaaaattcaaacaggggcacagatcaatgtatatataagaccctaaatctgcaagctcctgcaaaagacaaaaggatcaccagcaactctaaccatttctagttctatcattccaaggcttcaatcactaaaaatcttctttggtttgatacccatctctatttctttaagcttcagctccaattccaaccgctcattctccagtttcatcttttcattctccagtctcatcttctccaattccctgtccttctccttgctgaacctcagccacttgaaatgcttctgctcaattttcagcatctgagctttgatcttcaggcggcgtttttcaagtcgaatatcacgcataccaggggtagagggactcttttcagcagttggaccaccagatccctcagagagcattttgttcatgtcaataacagcaacttctgacagattagacccaaaatgcgtctcctcctgatcatgcttcagcctcttggcaccatgaattccatggtgatgatcttcagcgctgacctccagatcatcgaattcttcatcttcgtcgtcatcgtcagaaaaatcctcatcatcatacccaaacgggttcttctttgcatgctcctctccactcctaagcgccaaacgcaatgacttctgaagggcgggatcatcaaacagacacattttgttcctgttatggtacgagcacatctcctcatagtgcagatgctttgagttcaggtgcttcctagcctcctctttgagctttcccgagagccgcatcccttcaagaagctcggggtgctcgacgacctggcacgccgttccccggccaaggatctcggtcatcctcttgtacctcttgttgagatcgttgaacttgtcctcgcactgctgcggcgacaccgggaagcccctctcggtcatcgccgcggagacgagcctccacttccccttcctcttcagcatggcgtgcttcctcctcgcggcgctgcccgtgccgtagtccatgtcgacgtcctcgtcgatgtaggccacggcggacaccagcagcttgaccatgccactgatccacttcacccggtgccactgggaggcctccttaccgctgccgccgccgccaccatggtggtggccgtcatccacgtcctcctcgtcgctcggcgaggtcttgaccacattgcccaaatccagcatcgggttcccgcggacggggaccatgccctggtggtggtggaggtgcggatcctgggcgaagtggaacggcggcggcggctgcatcgtcgcctccagatcgaaggcgccgacgccgccgccatggccatggacaagggctcctctcggcggcaaattcccctccat

SEQ ID NO: 22357 - DNA, 490 bp, Oryza sativa
  Clone ID: TF_OsC46205_1
tttttgtgttgacatgagtattttattaatactattaagccctgggccgggatgtcacactaggtcccctagcggttttgactctggttttctccgacccggttttctccgacatgacagctaactcagcgtgggacccacacgtcagcctcttcttctcctctcctatccacctttcttcctctttcccctcctctctcaccccctctcttctctgtattatccgcgtcacgaagccggcgggatggagcggggcggcgatgggcggagtggggcgaccggcgacggcgaggcggagtggcggatgcgcaacgccgagagacccgcaggggtggccaacgggcgccatggccacaggcgccggcgcgagggacaccggcggcggggggcgcgcggaggcggcggcgccgtggagggcctcgagctcggtgaagaagcgctaggtcttgccgtcgccgtggccggcgcggccgtccttggtgctcctctt

SEQ ID NO: 22358 - DNA, 1644 bp, Oryza sativa; identical to SEQ ID NO: 13027
  Clone ID: TF_OsC198059_1

SEQ ID NO: 22359 - DNA, 1856 bp, Oryza sativa
  Clone ID: TF_OsC88912_1
aaatctcccgtctcgttgtctcctccgctccttgcgccgccgccaagaggagtcgcggctgaacaggggaggggcggcgatcgagcagagcaggggagggaatcctggtgatgtaacaaaagtggtcaccagtgcctgcgcaaaatctcgtctgtttgtatatggtattaataagcagcttcagtgcctggctgatccttggggtgaatggaaggcaacaacctaccctctggaagcttgatgcgttctaactctgggcaaatgcatgctccaaatcctggaaagcagggctttgaccatactcagatgcctggcaatttatcgatgcatgtaaaccagtctacagattctgatcacttgtcagaatttcaattcggagagcttggaaaggttgaccaccaccaccaccatcaccatcgtcaacacgccaagaacggcatgagtgatgatgaggaacatggtgtcaacgaggatgccactgatagccagagcggcaagggaaagaagggcgctgcatggcagcggatgaagtggactgattcaatggtcaagcttttaattactgcagtatcttacactggggaggatccaggagctgattcaggagctgggaagagaaactctgcaataatgcagaaaaagggcaagtggaaggcaatatcaaaggtcatgggtgagcgaggctgcagtgtatcaccgcagcaatgtgaagataaattcaatgatctcaataagagatacaaaagacttacagatatccttggccggggtacagcttgcaagattgtggagaatcatgctctgctggattgcatgagtaatctgtctgacaagatgaaagatgatgcgaggaagatactgagttcaaagcacttgttctacgaggagatgtgctcctaccataataacaatcgagtgagtttgcctgaagatcctgcccttcagcgttcactgcagcttgcccttagatgtaaagatgagcatgatctgaggaggggaacaagcggagatgccgatgaagatgatcaaagtgtagactctgattccgaggaggagaatgatgaggaaaattacacattacaaggtgataagagtgccctgcccatgcataaaagattgaggcttatgacagatcaggaggatgtgggttttggcaactcttccagctcacatggatgtagcaggaggtctgattcccatggcatatcactggatatcaacaaagcatttcctgatggaaccaacttggctttggcgcaaaaggatttggctacacaatctgcagatcttgaggaacaaaggttgcagattgaagtccaggcagtctatcttgcaaaacaacggctcaaatgggagcgcttcagtaaaaataaggatagagaactggaacagatgaggttagagaatgaaaaaatgaggcttgagaataagcgcttggagctggaggtaaggcacaaagagttagagcttgaactcaagcaaaaaggcagtggcaatcatgcatgacatatttttaaccaatcaaggctgacttgtaagatggtcgctgatggcttctgttgttcgagtagactgacgcaagaaggttaaggttcagcatactttttttgttctgctttttttccctacattatttgtgctagtgagcttgatttgtaccataactcttattcttcagtgagcttgctaaccacacatactcagaagatcatgttatatgctgttaatgttgtcaattgtcatcattgtcgacctactgtttatgtataatgacaatgtctgattgcatccataatctgaggtgacattttcttcaaaaatcacaaaaaaaaaaaaaaagcggacgtccgctcgtc

SEQ ID NO: 22360 - DNA, 1708 bp, Oryza sativa
  Clone ID: TF_OsC26571_3
atcgccgccgtgccaccgccgccgctgcagcccacgccggtggcttccgctgcaccaccaccaccgattcaggttcagccgcaccacataatgccgatgacgccgcagccccagctgcaaccaccgcagccgcagagcaaggaggccaacaccgtcgtccgggcggcgccgccgccgcaagagcagcacgacacggcggcgtccggcggcggcggcggcgcgtcgtcgtcgaggtggccgaaggcggaggtgcacgcgctgatccagctgcgcacagagctggagacgaggtaccaggactcggggcccaaggggcctctctgggaggacatctcggcggggatgcggcggctggggtacagccggagctccaagagatgcaaggagaagtgggagaacatcaacaagtacttcaagaaggtgaaggagagcaacaagaagcgccccgaggactccaagacatgcccctactaccaccagctcgacgcgctctaccgcaccaaggcggccaacgccgccgccgccgcctcagcctcgccggctccggcgaccaccaccgtgcttgccccggtgccgctctcccagacgccgccgcacgtcgaccacggcggcagcaacggcaatgggaatgggtgggcgagtgccaacaacggcggcggcggcagcagctccgggggcatgcaaacgaaggctagcaacaatggcacggcgacggccggcgggctgcccgtcgtttcggtcgccggcggcaacggcaacggcaacggcgtggcggcgacgacggataacaagggatcgaagcaggtgcccgtcgcgaaggagacggcggggcagaggcagccacagccgttggccatgaaccacaactacggcaacgacagaatggccgacgacatggacagcgacagcatggacgacgacgacgacgacgacgaatttgacgacgacgaaaacgacgacgacatcggcggtggcaagatgcaggtgcagtacgagacgtcgtcccatttccaacggccgcagctgcagaaccagaacgtcgtcgtcggccggccaaacgcgagcggcggcggcggcggtggcgctccgacgacaccggcgggccctccgccgcctgcggcaacaagtgggacgtcattcttggcctgcgtccagtgacgacgacgacgacgacacgacgacatatatacaccaagagaaatatgctcaggtggtggcgatctcgatctcgatctactatctcctgtaccatatggacctagctagctagccatccacttgcattctttaactcctacaactacactatatcgatccctagttagcataagctcgttaaaacctgaaggccaaaatttactgttccttgcctagattccaagttccaacaacctgatcttttccgtatatttcttctcctttcctgcacataacattatttatcgtcgtatacaccttgtacatgtcacacactcaccatgtccatacaaacataaatggtattgggggacctcctggagggagagatctagctagagagaagataaaaaggaggtgagatatctttgtacatgtgaagggttttgcgtacgtaggtacatgtctgtttttctctttagtgctgtattaacagtccagtgctcaagtactacaagctacggcaaccgagagaaaggcatgcatgatcatgcttcttttttttgggtat

SEQ ID NO: 22361 - DNA, 3629 bp, Oryza sativa
  Clone ID: TF_OsC26571_1
atggccatttattacctggaaagggagggattaacccacaacatgccaatgcatggccatttttatactcctctgcccctgaaccattggcacgcggataccaccaacgcggctgacatgacacgtgggcccatgcgcatgtgggccccacatgtcagtggcatgaattttatatttttcatctcaaaagaaaaggtattgatgagagtagaaatggtgagctctcctgatgtactgatcattccatcacctccattccccagtggtaacactcgtgggggaggaggaggaggaggaggtagtagcccggcacgcgggccgcagcccgcaccgccgcacccggcaccgggccagcaccccccactactacaaccagctcgacgcgcgcgaccgcaagcggccggcggcccccccggcgtgctcgcaccccagccagctagaagtgcccccccgccggcagccccgctcccccgcttgccgcgccggcgcctccgcggccactgcaaccgcgccgcccagcgggcggcagacaccgaaccggcccgggcgcccggggccgagcataccgcgcgccggcggcagccacacccgcggccgctgcgccgccacggcggccacgaccaagcggccgacgccacggaccgcgcccatgcagcagcagcagggggaggggtgccagttcggcgcggtggcgccggagatgtcgccattctcgccggcgctccatgcgtcggcggaggccgcgtcgcccatcagcagccggccgccgccggcggccagctcgccgtcaccggccgcccagcagcagcagcacaggacaaggaccaacttcgacgagctggcgggcggcgaccccgcggcggcggaggcgggtttcccgacgccgaggcgctggcggcggcggcggtcggcgaggagggagccagcggcggcgcgggggggaaccggtggccgcggcaggagacgctggcgctgctcaagatccggtcggacatggacgccgcgttccgggacgccaccctcaagggcccgctctgggaggaggtctccaggaagctggcggaggagggttaccggaggagcgcgaagaagtgcaaggagaagttcgagaacgtgcacaagtattacaagcgcaccaaggagagccgcgcggggcgcaacgacggcaagacgtaccgcttcttcacgcagctcgaggcgctgcacggcaccgccgccggcgtcgtggcagcgccatcgccggtgacgtcgctggccccgccgccggcgacggctgtgggggtgtccggcggggtgcgcgcccccgccgagccgccgcccgcggtggtgatggggaacgtgatgagcttctcgacgtcgaacacggaggagtattccgacgaggaggactccgacgacgaggggaccgaggacatgggcggcggcggcggtgatgagagggggaagaggaagaggttgtcggagggtggcgccgccgcgggcgtcggtggcggcggcggaggaggaggagggagcgggaagatgatgaggttcttcgaggggttgatgaagcaggtgatggagcggcaggaggcgatgcagcagcggtttctggaggccatcgagaagcgggagcaggaccggatgatccgcgaggaggcgtggcgccggcaggagatggcccgcctcgcccgcgagcaggagatcctcgcccaggagcgcgccatggcggcctcccgcgacgccgccgtcgtgtccttcatacagaagatcaccgggcagaccatcccaatgccgcccatcatcgccgcccccgccatcaccgtcatgcccccaccggcgccatcccagaccctccgccggtcccccagcccaagaggcgtggccagccacagccgccgccgccgccgcctcagccgccgcccatcacgtccgcgccccaccaacagcagcagcagcagccgcagctcaagggacacaaagtcgccattgccggtgacgccgcgcaaagcagcatgcgacatgtgggctcatgacgcgacggcaggccgccgaggggcacgacgacaactgcggggtacgaggcggcggcggggggcagccgtcgtcgtcgcggtggcccaaggcggaggtgcacgcgctgatccagctgcggagcaacctggacaaccggtaccaggaggccgggcctaagggcccgctgtgggaggagatctccgccggcatgcggcggctgggctacagccggagctccaagaggtgcaaggagaagtgggagaacatcaacaagtacttcaagaaggtcaaggagagcaacaagaagcgccccgaggactccaagacctgcccctacttccaccagctcgacgccctctaccgcaacaaggcggctctcaactcctcctcctcctccgccgccgccgccgcaccggccctcccgccgccggagcacgcggagccggcggtgacagtcgccgcgccgatctcgcagacaccgccgccgccgccgccacagcccgtgacgacgaccaagaacggcaacggcaccagcagtacaaacggcgcgaacggcgaaggaggaggaggcggctccgggggcatgcaaatgcaggcgagcaacggcagcgtcgtcgccggcaacaagttcttcaccggcgcggcggcgaatggcgaaggcggaggacattgtgaaggagatgatggagcagacgccgcagcagttcacaacggacgggaccgacagcgacaacatggacgatgactacaacgacgatgacgacgaagacgacgacgacgtcaagatgcagtacgggatccagttccagaatcagaacccggccgccgccagcaccgcaccaccgccggcggcaaccccggcacccgcggcccccaccacggcgccgacgagcaccccccaacgacgggctccggatctttcttggcaatggtccagtgatccatccatccatccggtgactctctctccttcctacacatgcatatctccatgcgcgtcaatggcttcttcttcttcttcctccccctgcatgcatcagctatcagcaaccactctccttcgagttgggatctctcctgcaatgcatgtgcggtaagtgccacatgacatgtgggcccggaataggtgggacccacatgccagtgacaccagtacagcagtggattttgatccctctccttcaccttgtaattctcccgtgccattccattatttattgatttctctgtgtaataagagcatcgatcgatcttccctgaatcttcctagcaagaaaaagctagtagcatcgatccatttcttgattcgttcttgtgttaattacagtggtctctcccatctcgcgtctcctcttagctagtgttaaaagcaaaaaaaaaggaattggtggcgtggtaatttattgatttgttgtggtaaatttaataaggaccctccattcgtgagggttcacggagagggtttaaaacttggtgcggtgaaaaacggcacagaggagcggtaataacacctcgctctcgcggttaaaaaaaaaacggacgcgtgggttttaacccgttttttttgcagtggtataaaacgttgttactgtgcacattgtgtggttactcttcgtatactttgcatttttgct

SEQ ID NO: 22362 - DNA, 606 bp, Oryza sativa
  Clone ID: TF_OsC331190_2
atggatcccttccaccacctcaactcctccttctccaacccctaccacccactcctcgcctccccgccccaccacttcgcccccgacccactccccccacctcctcctccgccgccgccgccgctgctccccgccgacccgccgtcgctcgagcgggagcgcctcccgcagtggtcccacgccgagaccgccgccttcctcgccatccgcgccgacctcgaccactccttcctctccaccaagcgcaacaaggcgctctgggaggccgcctcggcgcgcctccacgccctcggcttcgccaggacccccgatcagtgcaagtccaagtggaagaatctcgtcacccggttcaagggcaccgagggcgccgccgccgtcgccgccgcggggacggatcagatgcagggggggcagggcggtggtgccgcggcgaggggggcctcgtcgtcgttcccgttccatgatgagttgaggaggattttcgacgccagggttgagagggcgcgcgcattggagaggaagaaggttaaggggaaggatcctgatgatgaccacgacggtggtggtgatggggatgaggatgatgaggaggaggcggatcaccac

SEQ ID NO: 22363 - DNA, 2896 bp, Oryza sativa
  unsure (1)..(2896): unsure at all n locations
  Clone ID: TF_OsC19996_1
aggctgatggcttcttggttatcgttttctgtctaagccagaaagcactactcactaattaacctgtaagggttgaggcctgatggcttttgctaagcgcgaccaccagaagcaacaaaagaagaaaaatgctgtgacttgtgagcccagccaagctatcactatctctctctctctctctctgtgcagatgagaatgagaggagacgatgagacgagagagagagacctattaagcagcagaagaagctcgattgcgtgcctaatcgctgcaccgtcgcggcgatagctcccgcccctaaagtcgatgcttaatggccgtcatggctctcatccacttggtcgtcatgatcatcggtcgctctcccaacgccaacgccaacgtcttcctcgtcgccgtcgccgtcgccatcatggtgcgcctcgtcgccgtcgtccttcgtcctcccttcctcgttctgctccccgtcgaacgggaaacccggcggcgcgcaccgcacgtctgggtacttcaccaccgcgtccagcagctccgagctgcccttcgcctcctccccgccattgccgcccgccgaggacgacccaccaccgccgccggagccggagcgggagtagaggcggtcgagctcgtcgaagtaggggcacgtcttggcgtgcgccggccgcttcttgccgctctccttggccttgcggaagtacttgttgatgttctcccacttctccttgcaccgcttcgcgttccgccggtagcccgccgccgccatgcgcgcgctcacctcctcccacagggggcccttcagccctggctcctggaacctatcctccagccccgtccgcacccggatcagcgcctccacctcgtgcttcggccaccgcgacgagctcagctgcagcgacccctcgccgtcgtacgccaccacctccttccccacgccgtcctgctcgtcggcgcccggagcggggttggcggcggggggtgggagcgtgatggtctcgccggagatcttttccaggtaggcgatgatggcggactcgcgtgcagcggcgctggcgcggtcctgcgcgcgcgcggcggcctcgcgcgcgaacttgtcggcctcctggcggcgccacgcctcgtcgcgggcggcgcgctcccgctcccggcgctccatggtgtcgaggaactgacggtggaggctctcctggtgctccatgaggcgctgcaccaggcgctcgaagaaggaggccgacgcgctgagctgctcctggcgccgccgcttgcgcttgcggcgcgccgcgtccgcccccgacggctgctgcgtctgcggctgcggctgcaccacggcgtgcgcgtcctccccggcagacgtctcggacgtgttgaggtgcggcgggttggcggcggcggcgtcggggaggtcagccatgggcggcgcgagcatggcattgtcgtccccggtgaggccggagccggagcccgtctgggggcctccgctgccgggcttgtagatggcctccagctcgctgaagagcttgtagttgacggcgccagcggaggcggcggatgcggcggcggcattgtcgtcgggcttattcttgaagtaatacgctgggggcggcggcgcaggggagtcgggagtggcgggtttgtccttgggcggcgccctcttgctgctgctgctgctgtgtatgtagtcgatgtcgagtggccgccaggtcggttctttgatggaagtttcctcgtcccccggccaccgccggagcctgctctccgtggccgcctcgtcatccccgccaccacctcctcctcctcctccatgaagcatcatgccgctgcccgcgccgcccccgtcgttcagcgcgtcgtccgttccgccggtggcgccgctgccgccgccgccgtcgacccccagcttgaagctcatggcggcggccaggaacggagggacgcccggaggggcggcggcgccggaggcagcgctcccggcgccggcaccggagctctccggaacggccgcctcgacgtcgaggccgagatggtggtgcgggtggtggtggtggtggtgctgcggggcccacctagccgggggcggtggctgctgctggtgcttctggtggtggtgctgctcgtggaagagctggaggtgggggtggtggccggcggcggccgcctggtggagcagctgctgcgtgaagggaatcccaccggcgccgccgaagtgcgccaagtggggaggcatctgaggcggcgggtggtggtggtggtggtgctgaggcagggcgtggtggtgcagcggctggtacctgaacggcgcgcccagctcctggccaccggccgccgccgccgcggcagcagcagcggcagcggccgcctgggcgggctgcggcggcgcggacatggcgaaggcgccggggtccatgatgtactgctggaactcagagacgccgccgtagccggactgcatggcgcctgcctgcagcttgctactccactatcttcacctagcttgctaccgagtagagagtgtcactcaccttcacttcacctagttcgctgcatcaagtggtttacatgccggtcgggtaattaagaaggtttgacctgagctaaggaagaaaatgcagccagccaaaaatctcactcacccctcacaacggtctgagctggagctggagctggaggtggaagaagaggatgaggcagggcagtgcagagtgcaggggtgaagagaggaggaaggaagaagggagagggtagcacaggcacagggaagctagtcacgtttggtttccattttgcatctctggtggggtgctcggctntatctcctgccctctttcgaaaggggaccctgctaatatccatatttgtatctccacccatccaggccagcccagggtgctcattattattc

SEQ ID NO: 22364 - DNA, 1907 bp, Oryza sativa
  Clone ID: TF_OsC10945_1
ctcgtgctcggcgaggcccaatatttcggcggaggctgaggcggaggcggaggcggctcgtcgccgcggaaacctcgtgctcggcgaggcccaatatttcggcggaggctgaggcggaggcggaggcggaggcggattgtctcctcgccggcgttcagttcagtcgccggataccgtcgttatattcatgtgcatcctcgtgcactcctgtgtccatcttatatggtaccaacaagaagttgaagtgtttgggtgatcgctttggggaaatggaaggcagcaacccacctggtaatatgacacagggaccttcctatgggagtttagatttgcatggtatctccaagcaaatgcatcctccaaactcaggaaatcagggcttcaaccagcctcagataccagggaattttaccattcctatggatagggttacagagcctgataacatctctgatggagttcagttaggacaacatgggaagattgcccatcatcaccatcaccacagacaccactcaaagaaccatgggagtgatgaggaggagcacgatatgaatgaggatgctgctgatggcaaagacaagaagggctctccatggcatcggatgaagtggacagattcaatggtgaagcttttgattactgcagtatcctacacaggggaggatcctggagctgatttaggcggtgggaggaggaactattcaatgatgcaaaagaagggaaaatggaaagcaatatcaaaggtcatgggcgagagaggttgccatgtgtcgccacagcagtgtgaggataagttcaatgaccttaataagagatacaaaagactaacagatatccttggaaggggtactgcttgtaatgttgtggagaatcactcacttcttgatcacatggatatttctgagaagatgaaagaggatgcaaggaagatactgaactccaaacacttgttctatgaagagatgtgttcctaccataataataaccgtataagtctgcctgaagatcccgcacttcagcagtcactacagcttgctcttagatgtaaagaggataatgatttcatgaggcatgcaagtggagatgctgaactagatgatgatcagagtgaagattcagattatgaggagaatgaggaagaacatcgagcagttgataccaatataaggggcccctcaatgcataaaaggatgtggcatgttgtagatcatggtgatgtaggttttgtcacctcatgctcgaatgatggtagtgggaggtctgatccctatgacgtgttggatatcaacaaaccctttccagatggatgtgatttggctttggtgcaaaaagacttggctctgaaagcagcagagattcaaaaacatcgtttgcagattgaaaccaaggctgtgcaactcgcaaagcaacgtctcaagtgggagatgttcaggaagaacaaggacttggaattggaaaagttggcgttggagaatgaacaaatgatgcttcagaataagcggtttgagcttgacctaagacacaaggagctagaacttgagattaagataaagggcaatgctaatcatccatgatctttgttctgttagcacttcatttcgcaatatggttgcagatcaattcaattcaggaccgtgtttatgcaagatggtagaggtggcagattgtttatgcaagatggtagaggtggcagattatctgtgactactgacaagtgacaacaatttcaatgctttatagctagctcagtgatcctctcctcttgttgtttatatatcattatatctcctgattctctctacttgtaaaatttccatgtgatactgggctccatctgtattctaaagttttcatcatttttttctatccaactttgttttactcaaaaaaaaaaaaaaaaaaaa

SEQ ID NO: 22365 - DNA, 1827 bp, Oryza sativa; identical to SEQ ID NO: 13041
  Clone ID: TF_OsC26571_4

SEQ ID NO: 22366 - DNA, 1803 bp, Oryza sativa
  Clone ID: TF_OsC78604_1
gggccccccctcgagttttttttttttttttttttttttttttctgctgaatgaatttattccagcttcggaacttccaaggctgtttgcaacaatccatcagaaatcttacattttgccagacaaccttcgttgtccggacaaattacacttctgatgaatgtatttgtttccagcttccaagactatttgtgacaaatgtaaaacccagtatcagcatgggtaacaaacacattggaaactaactaacaccaagatgctacagagctacatttacatttacatataaaccagaggaaccccaggacctgttggcagcaactaacaggtcctcatttaggctgtaatctttgtactcagccaaagcaccttggatcttcagagagcttgaatgatcatatttccaactttcaagttccaacttccaaggctatttacttcgggtaaccaatgtatatccagtataacttttccccttcggctgcatggacatttaaaattagcttaggtcaagatgccaaaagctaaatttacaataaccaggaacccatgatttgcttggcttcaaattgcattcaaaggtaggagtatgctccatatctactttggatatattatatgccttggtcaggcaatgtcaccaaatcaatcaccaagtgatcgcatcccttcataaatcacaccaggacgaaggtcatccagagtatcggcgattctgtagcctgaatactccctgaggagtgtccaaccacgccgcgagagaaagtctcggaagtcctcttcagtgtagaatgtcttgtcttctgtccggacctcatcattttcgaacatatatagtttgatggtcattccggtatcgagatgaagggtgtatgttccaaccggcatatccctgtctaaggaacggacaacctcatcctcatcttcaagccaaaaggcccgtcttgttcttagaccaaatgccgatttgatggcttctttaattgcgtctgcagtaccatcaatgcctattcttttagtgtaatcaccccacttgactaaaatgactctcccaccaaaagtaacctgattatctccaccattggtagaggtgtctctccagttccatggatttacaccattggttgcaactgcatcagctgttaatgcaagtggatgactatcaggttctagtcgatcttcgacacttagcaatgatctaccacttgcttcaacagggccgaacggaatgctagcatcttcaaaacccttgtcgaactgcaggtaggagtcgatcttggaggtgaccgtggggctcttgacggcgccactccccacggcggcgccgccaccgcccgtcggcttcccgcggcgcttgagcaggtcgtcgatctccttgtagcacgccatcttggcggggcaattcccgccgccggtgcccgcgccgccgccgcccacgccaccaccgcccccgccccgcgcgtggctgcgcgccttcttgaactccttgaggaggttcctccacttgtcggtgcacatggtcggggagcggtcgaacccttgctcccgcatcctggccgagatggcctcccagaggtgcttattggacttggaggtgttgaagtgggagtccatctcccggcgcagcgcgatgaggcagagggtctcgtcctggacccacgtctccgcgcgcttcttggggccgccgccgccgcccgacgccgccgcgcgggaggaggagtcgtggccgccgtcctcgccgctgctctccgggaggagcagcggcggggtgggctgctgcggcgacggcccggagaggagcat

SEQ ID NO: 22367 - DNA, 386 bp, Oryza sativa
  Clone ID: TF_OsC1713_3539
atggctatacaactttatcgctgggcaccttcatcttcattgatggctgacctgactgttgccgactggttgcttcgcctccacggctgtgcaacttcatcacttttgattgtcatggcgctgtttgggtttatcaagcaattgattgaatacaacatcattgctttttgccacccctccacagtcttcatatttggtaaaagtactcgggagatcatggcgaggatgattgaagcacacggctttggaggtgacgagaatggctcgtcggctgacaacaggtggcttcggcaggatacactggagctgctcacgatccgacccgagatggacacggtgttgcaggaagcgaccctcaacggggccatttgggaggaaatctccag

SEQ ID NO: 22368 - DNA, 3082 bp, Oryza sativa
  Clone ID: TF_OsC57118_1
ggagtagagagagagagagagaggggatgcaggtgcgggccactccctctccctactgtctccgccgccgacgccgccgtgcgccatggtggcgctcgcctccctctcgtccctctccccctgcgggctcgcgcgccgccgctcggcctcctcagccgcctctatctcatgctgcgcggccccgcccccgccctccgcgaaaggatctcaagaatccagaactccacgtagaagggtgaggaaaactgagggtgccaccaagagcctggaagattcagtcaagcgaaagatggagcagttttatgaaggattggatggtccacctctccgagtccttccaataggtggccttggagaaatcggcatgaattgcatgctcgtagggaactatgaccgttacatattgatagatgcaggggtcatgtttccagactttgatgagttcggtgtgcaaaagattatcccagacacaacattcatcaagaaatggagtcacaaaatcgaagctgttattataacgcatggccatgaagatcacatcggtgcgttgccctgggtaatcccagcgctggattcaagcacaccgattttcgcatcatcttttaccatggagctaataaagaggcgtttgaaggagtttggaatttttctctcgtccaggcttaaggtttttagagtaaggaagagatttcaggctgggccatttgaggtggagcccctccgtgtaactcattcaattccggactgctgtggcttagtgcttcgttgtgctgatggcataattttccatactggtgactggaaaattgacgaatcaccagtggatggaaaaatatttgatcggcaagcattggaagagctctccaaagaaggcgttacacttatgatgagtgattctacaaatgttctatcccctggaaggtccatcagcgaatctgttgttgctggttcattgttgcgacatatttcagaagcaaaaggaagagtaattaccacacagtttgcttccaatatacatcgtattgggagcatcaaagctgctgcagacttaactggtcgaaagctggtatttgttggaatgtcactcaggacttaccttgatgctgctttcagggatggaaagtcaccgattgatccatcaaccttggtgcacttaatagaatctaggttcttgctgaaggttaaggtagaggacatggatgcctatgccccaaatgatcttctagttgttactacaggttcacaagcagagccacgtgcagctctaaatcttgcatcttttggaggaagtcatgcccttaactatccaaagaggatgtccttctgtattctgctaaggttatccctggaaatgagtcacgtgtaatgaagatgttaaatcgccttactgagcttggtccaaaaattgtgatgggaaaggatgctggtctccatacctctgggcatgcctatcacgatgaacttgaggaagtcctacagattgtcaaaccacagcatttcttgcctgttcatggagaactcctgtttcttaaagaacatgaattacttggaagatctactggcataaggcacaccactgtaattaaaaatggagagatgcttggcgtgtcacatttaagaaacagaagagttttgtctaatgggtttgttgcattagggaaggaagatttgcggctaatgtatagtgatggcgataaagcttttggaacatccactgatctctgcattgatgagagattaaggattgcatctgatggcgttatttttgtcagcatggaaatcttccgacctcagaaggaacttgcttcatcacagtcaggattgaaagggaagttcaaaataacaacaagatgcctatggcttgataatggaagactattagatgcactttacaaagctgcatatgctgcattatcaagttgtccagtgaattgtccacttagtcacatggagaggatggtatctgaaatcttgaggaaaatggtaaggaagtatagtgggaagaggcctgatgtcattgcggttgctacagagaacacaacagtgagttttgtagaagactcagaaactaaatcatctggaaagtttggatctttctcagctcctaggcattcgagcaggagttcaggtaggagtcttgaagaaagtgataaatcatgcccagagaatacagagggagaggctaaagaaaatcttcctgatgtcctgagaacaacacgtgatgatgcaaccacaagctccaatggcgaagcatttttctcctcagatttgcataagcctaaaacactagagcatttttgggactcattcaaatcccctacagctgtaaaaattgcaagaattgtcaatggttcagctcaagggagtaaatcaaagattggcaagatcagcatagtgggtaaggactctagcgatccttcttctgctccagttaaatcttcaaaaaagaacaagtggaagcctgaggaaattaagagcttaattcagatgcgtggcgaaatgaatgagcaatttcagactgtgaaagggagaatggttctgtgggaagagatatcttctagcatgttgagccaggggataagtcgtacaccagcacagtgcaagtctctatggacatcattggttcagaaatatgaggagagcaagaaagatgaggaaagcgtaaagacgtggccgtatttcttggacatggacagggttttatcaagccaaggggaaatggcaacccaatgatcccaaggccgtagtttagtggttgtaattttggagagtgatggcataatcaatcaagtggcaggatgagatggctgcagcgtgttcttctccagagaatatacatgccataattcattccacgaaaagggaggcaggcacttggaatgactaagctgctacgtattcaccatgagtgtgctacagggctagggatagctgatattatttgatcaactatactagattaagtaattgaatagctaagttttgttgtgctattatttttggtgtaagaagacaccaaatgctaatccgaaggctttcaattgagctacccacataactataaaagaaaacctgcagcccg

SEQ ID NO: 22369 - DNA, 570 bp, Oryza sativa
  Clone ID: TF_OsC1326_7
ctctgcaggccgccggcgggtggggaggaggccggcggggagctcctcctgcgtgatcgcgagctccgcggtcggacacgtcgccgaggtcgccgcgtaccgcctcatcttctcaactcaccactcgttctacgacgggctctacgtcggcggcgtcgccgacgcccgcatccgcccggcgctccgcacgttgaagcagaacatgtcgctgctcctctccgtgctcatcgaccgcgtgcagccggtggcggtgcaggaggcgagcgaagcagccaggcggagtggggggcgccgtcgccgatcagcagccgctcgtcgccggagtaggcgacggcaaaggagcagctcaacgggagctactggagcacaacgggctgctgggtggcgaggagggcgaccggagcgggtcgcgggcaggcaaccggtggccacggcaggagacgctggcgctgctcaagatccggtcggagatggacgtcgcctttcgggaagccattctttaagggccccctttaggaggaagtctccaggaagcttgcggagatgggggttcaagatgagcaccaatgt

SEQ ID NO: 22370 - DNA, 369 bp, Oryza sativa
  Clone ID: TF_OsC1713_4560
atggcgctgtttgggtttatcaagcaattgattggatacaacatcattgctttttgccacccctccacagtcttcatatttggtaaaagtctcaggggctactgtggagattatgggtaccccatacccacacggcatgctcggtggagccacgggagctccctcaaccacgataggctggccagcgtgaagggtgacgagaatggctcgtcggctgacaacaggtggcttcggcaggatacactggagctgctcacgatccgacccgagatggacacggtgttgcaggaagcgaccctcaacggggccatttgggaggaaatctccaggatctgtgatgtattttttgttggagattttgtgatgtga

SEQ ID NO: 22371 - DNA, 1141 bp, Oryza sativa
  Clone ID: TF_OsC248026_1
atggagcccgggtgcggggaaggaggaggaggaggaggagggagggatgagcgggtgccgcagtggggcgcgcaggagacgcgggagctgatcgcggcgcgcggggagatggagcgggagtccgccgccgcggccgccgcgcgccgcagcgccaagacgctgtgggaggcggtgtccgcgcgcctccgtgagcgcggctaccgccgcactgccgagcaatgcaagtgcaagtggaagaacctcgtcaaccgatacaagggaaaagaaacatctgatccagaaaatggtagacagtgtcctttctttgatgagttgcatgcagtcttcactgaacgagctagaactatgcaacaacaactccttgagtctgaatctggaccatctgttaaaaagaaactaaagcgaccaagtggtgacctgtcatcggaggactctgatgatgaggaagatggcagtggagatagtggcgatgagaaacccataagaagcagaaagaggaaaattgctgacaagaggcaacaatcgcaacgaatggcagaaaagtcgaggactagcatttcaagcatccatgaattgttgcaggatttcctggtgcagcagcagcgcatggatattcagtggcatgagatgatggagaggcgttcccaggagcggattgtttttgaacaagaatggcgtcagtcaatgcaaaagctagagcaggagagactgatgctggagcacacatggatggagcgagaggagcaacgaaggatgagagaagaagcacgagctgagaaaagggatgccctcctgaccacactcttgaacaaagtcttacaggaagatttatagacactgatgcttcgcctacaactgatagatactttagttgatatttctggcatgttccattcaattctttgtagctcctgcagatgttgttcttggagagaatatttcttgtagcatttctattagattcctaggattctttaccagttttttagtgtactaattttgatgcaatattttattgtggatgtaagtatcagaccaccatcttgatacagtgacccatttatgtttgatgataacaacatttcagcaagctttcaaccttgtacaaaatttatgtaagcaataaggtatgtttggttgg

SEQ ID NO: 22372 - DNA, 508 bp, Oryza sativa
  Clone ID: TF_LIB4309-015-Q1-N1-E2
aataacccaccggctacaggaaaacagaactccataatattactcggatacgtacaacaagcgctatacataagtcacatagtgaccagcgctaactaactaacataactatgatgacggagacaaattaaacaacacgacaacagcgaacaagcttcttaagtattacacacacaagcgtgggacatacgaaatgcagccgtcggggggaatatgaccaggtcgctgagcatcacctggcggatcggaggcggggaaggcgaatgacgaccaccacgacgaccacgggagagctagggagaggaagcaagctaccagatgaaggtcatgtcagccgaggcacgggcggggccatcttcttcgcgggagggggagtggacgtggcggccctcggaggagcgagcaccatgcgggggtcctgcgccagtcgctgcacacgtttattaacccggcagttgtgctgcgtgcaccggtaatagctcctagggtgctgggtgttcctgacgac

SEQ ID NO: 22373 - DNA, 456 bp, Oryza sativa
  Clone ID: TF_LIB3433-042-P1-K1-H2
cccacgcgtccggcatgaggaaggtggatacctttgcgccgcacaacgacggccaccagtggaggaagtacggcgagaagaagataaacaactgtaatttccccaggttcggatgaaagatgatatatttgcagtatatttcctcatttctggtatctgcatctgtatatcttctggaaagagtgggcatctgttcattcttgtcaaccttgtcctctcctgcaaacaataagaaatttatcagttagacacctttctgtgatgatacttagatgctcttctcattctacccacccaaatcgaccacaaagagatgtgttgcaacaaatagtcgtagaaaactgaacccttttcttgttcatttcactcaaactgttgtctcgcctgtctcaatgcagatactactacagatgcacctataaagataacatgaattgccagcaacgaagcagattc

SEQ ID NO: 22374 - DNA, 441 bp, Oryza sativa
  Clone ID: TF_uC-osflcyp011c08b1
ttgtctcaaccaggggtggcagagagggaggtggcgcatgtgtacgtgctgatcaagacacaccagcctgtgctaggtggacaccagcagccgcagcagctggcgcatggtccactcatccactccatgcgagccctcaacgtggccctctccgtcatgaaccaaccacatgcttcttcttcttctgctgctgctgctgctgctgctgggcatcattacccggcgatgacaatgatcagagcagagtctactccggcgaacagacctgctgcagatgcttcatacaaccacggcgatggacggcaagaagatcatcacccgccaaacgaagaaggattaactgtgaggacaagtgattgtgggtttaccacacagatggcccttcatgaagatggctaccaatggaggacatatggacagaagaagatccagggcactcac

SEQ ID NO: 22375 - DNA, 488 bp, Oryza sativa
  unsure (1)..(488): unsure at all n locations
  Clone ID: TF_OsC143436_1
ggaattatgcacaaatcatcacgattttatagctaaaacaatacgggcgtacctccgtttagaaaaaaattaattctaacgacgaatctgaagttctaaacatatgattgtctagatttatagttaagatttaactcttttttttttaagtagtaagtctagtgcatacaagaaccgatcgatcgatcacgaacggcggtacaactaacaagcaaccaagaaaaacaaaaacagaagtaaattcagcgttcagaacgacgattccgacgagtgcgccgccgcggcggcgtgcagcggcgccccccacgcctgctcctgcgcgggaggcggcgaggccgccgccgccggaacgctccacggcggcgcagcggaagtagggtacgggaggtggccgccgccgccgacgcagccgggggtcccgtggttgtggaccccgtcgtaggtggtgacgacgtancgcgggtcgtngccgtctcgctccacccggt

SEQ ID NO: 22376 - DNA, 953 bp, Oryza sativa
  Clone ID: TF_OsC547_384
gaccatatctgatgggagatgtgctgcgagctcaggccaccgcgtcggcggaggaggtggccggcggcgtctggccctgcgagctcgacgaccacctcataggcgagctcctcggtgacgacggcctgttcgtcccggccgccgaacaccccaccctctactactcgttcggcgcggggtcatcagcagccgccgccgccgcgccgtgcaacgggggcggcagcgctgatcacgagcggcggccgcggccggcaccggcggtgagcagggatctgtgctcggtgtactcaggcccgacgatccgcgacatcgagaaggcgctgtcgtcgtcggcgtcgccccggccgccgtacccctccggccgccgctacagctctctgtatttggtggaagcggagagcaagtacacgagcaaggtgaggagctgcggcggcaagatgccggccgacgggtacaagtggaggaagtacgggcagaagtcgatcaagaacaacccacatcccagaagtaacttactgttaacagtgaaatttggtaagcccggagtagtcatcggcttagagtcagcatcggcttcgaagtcctgagattagccgatgagagttgtcaagtcgtcagttgtcggattcttgctatattcgcctgcttcttgattgccaattagggtttcatcggggtttcagccgatttcatgaaatcggacctccagccgatgtgtgctttaaccttcggatcgatgcttatttatcatatcattatttgccgattggtttatactggattatattgttattttattacatcatcatcagccggttgcctttatatcattatctacattggacatatagctgatagcacaaaaccctatcgctatcggctggtatcggcattggctattatcggctatcggctggaactactccatcggcttgtcagccgatcggctgttt

SEQ ID NO: 22377 - DNA, 666 bp, Oryza sativa
  unsure (1)..(666): unsure at all n locations
  Clone ID: TF_LIB4371-040-R1-N1-F8
ggccgttctgcggcggctttggggtggctgtgcgcgcccttgtagacgatctcggtgacctggccgtccggcgaactgctccaccttcttcttggtcgggcagccagggaaggtgcacttgtagtagctgcgcgggttctcgcttccccttcatctgcttctgcccgtacttgcgccagttgtagccgtcgtccgacgaaccgccggctctgctgacggaagccgccggccgccgccggcgccgccacctggctgtagctgccgttcccggccacgtcacccgccgccgccgacgaggtgaattccgctggcctagtgtcagcgtccatggtcggttcttggtagctccatggctgctgctgctcgccattgtacgggtcccctccctacaatattgcaaacacaacaatatcaatgatacatgcatcttttttttggagtgcatcacatgcagggtaattattttttcaagggagttttgataattgatctagtttagaactgtagcaagcttgactaatggtatgtgcttaggttttcatggagaacgtgaaaatgaagtttgcttttgcaaatctaagcctgagtgtcccttatcattaaaaaaacatgttgattaagatatctntgccgcgagatattaatgcatttcatcatatatgtatg

SEQ ID NO: 22378 - DNA, 654 bp, Oryza sativa; identical to SEQ ID NO: 13053
  Clone ID: TF_OsC352149_1

SEQ ID NO: 22379 - DNA, 463 bp, Oryza sativa
  Clone ID: TF_OsC46056_2
catgcaacaaacaggtggtcctatgatcctatctgaatttctgacaggtggagtccaagcatttgagaccagaggaaaggctgcagctgctttcaccatgataaagaaaagacagccacaaacaaccaaaccaagcaggaaagcaaagcagatatatctttgatgatgccacagcacaaagcttatgaaaaacgcatgtgcagattaggctatgaaaaaggtggaaacaaacaccttttttgtactgaaatattggggggaaaaagtagagggaaatcagaaaaataccaaccttgggtgcttggctccaagaatctctttctgcccatactttctccagctatggccatcatctaccggtggattctccacccctcccgtcgagctcaccctaatctgatgcctcttcttctccgtcgacgtcttcctgcaaaaatcaatcaaaaaaattcggacgcgtggg

SEQ ID NO: 22380 - DNA, 180 bp, Oryza sativa; identical to SEQ ID NO: 13076
  Clone ID: TF_OsC352156_1

SEQ ID NO: 22381 - DNA, 2253 bp, Oryza sativa
  Clone ID: TF_OsC1528_2199
atgtcggatgagtttgacaattccatagacccagccgagatttacactacagatatgttcatggcagagcatagtgtccttaactcttttgccgggcggatcgacaaaaggattaaggccagattggaaggaggtacatctaggcgtacaagtggtccaaggaagtacatcaataggaaccatgaaggagcccatgatcaactatttgctgattattttgctgaagatcctctctactctgctgcaacatttcgtagaaggttccggatgagaaggcatgtgttcctacacattgtggatgaactaggcaagtggtcttcctattttacacatagagtagattgtactggacgccttgggcactcaccattgcagaagtgcactgcagcgatccgtatgcttgcatatgggactgctgctgacgctcttgatgagtacttgaaggttccccagagtactgctctagagtgcttagaaaattttgtggaaggtgtcgtcgaggtatttagtagtaggtacctgcgtcgccccacggctgaggatctcgagcgtttgctccaagttggagagtctcgtggattccctgggatgttgggaagcattgactgcatgcactggcgatggaaaaattgcccaaacgcatggaagggacaatatacccgaggtgaccaaaagtatccaactattatccttgaggctatagcttcatatgaccttcatatttggcatgcattctttggtattcctgggtccaacaatgacattaatgtgctcaatcagtcccctctgtttattgaagcaataaaaggtgaagctccccaaatccaatttgctgtcaatgggacataatacaacacgggatattatcttgctgatggaatttatccggaatgggcaacctttgtaaagtctataagatctcctcaactagagaagcacaagctgtttgcaagggaacaagaagggaaacagaaagatattgagtgtgcttttggggtgttgcaagctcgcttcaacatcgtgcatcgtccagcacgatcatggagccaaaaagttcttcgaaaaatcatgcaagcttgtgtaattctccacaacatgatagtggaagacgagggagaaatggcagaagatcctattgacttgaatgctgccccaggaacatcaattgttcttccaccagaagttcatgcagggagtaatgatcacccaagcttcagcgatatgtgtacgatttatgagctagcagttgtcttcaaaggacctttgaaggaggcctaacatggggaagccgaacgttgactgatcgtactggccgaaacagtagtccatgtcggcaatctgcgccgccgccgcctcgtccgccacgctctcgtccgcggcgctcgccgagtgtcccgccgcgaacgccacgaacgccgcctctggggccgatgtcggccagatcaacggcggcggagcggctgcggcgcctcctccgctgatgaccgccgcgaggcacgtgacgatggcggcctcctcttcggcggcgctgccgccgccgccgacggcgtggggtaaaagaagacggctaaagaggccggcgccgttcatcgtcaggtccaacatttccgccggcggggaggaggacgactgtcgttgccggctcgtcgtcgtcggcgagctacctgcagtgttgggcgtgccgggaacagcttgcggctgctggcacgtgtgctcgttgaggtaggtgacaaggaacatgggcggctcgccggcgtcccgctgctgcacttgcttcttcgccgcgcaactccgctcgcggctgaacgtgcacttgaagtacaaccttagataattgctgtcctgaatgttcttttgcccgtattttctccactggtagccatccttgtacggggaaggtgtaataatctccgtcctcgtaaccacctcttctctgccatttctgacaagaacctcttcactcctaacgcgtttaaccctcgccggagtgtgcaagcaaatgctatcgtcagtcctcgtctccggcgccgtcctggtcactccttccggtcgtctgctgctgttgctgcaaggcttcagcatgtagagagacaccatgaacactcgcccgagctctctgctaacatcgacggcctccttctggccgcggctatcgagggggccttcgagcagcgcctggagcttggcgctgaggcggcggccgccggcgagctcccggtacagctgctctatggtatcttgaccaaatgccat

SEQ ID NO: 22382 - DNA, 1643 bp, Oryza sativa
  Clone ID: TF_OsC46056_1
ttttacaatcaaactaatgacaaggatttattctttggatgctcagaacatgatcaagatcttattttccttgacacaaatcaataataataatactaataataatacaaagaaacactctcatttggggaaaaaaaagagagaaaaattaagtactagtactactatttctcatctctattgacctaggaagaaagcttctgctcttcttccctcctctgttctttcatggcaacagctaaagaacagagggtggtcaccatgaactgcttctctagtgttcatcagctatgtgaggatcggatcgggttggattggattggattggattgggttgagtttggtcaccattgatctggttctgttcataatctcatgcgaagaagctggtgatatcaatggtgaatccggggtcgaactcgaaggcgtcgagggcggagaggtcggcgtcgaccatggcggtggcgggcgccggctgcgcggtcgccgtcgtcgtcgtcgcggcgacgagcgcggacaccacctcctggagctcggcgtcccgccacgcctcatcgccgccgccggccgccgcctggtggaacggcgcggcggccatcgagtcggaggtcgccggcgaggccgccgacgacgcggcggcggcgaggcggttctccggcgtcgacggcgcggagaacgggttgtgctgatccggcggcgccaggccgctcaccggcgacgacaggcagaacggcggcatggcgttccagccgccgccgccctgctgttgctgcggcggcgccgtcagcccctcgatcttcaccgtcaggccggagctcaggtcgtggaggcggctctcggcggcggcgttcgtgtccgtctccgtctccggcttgccggcgccggcggccaccgccttgtggacgcacgtgtgctcgccgtggtagatcacgtcgaacaccgtcgcgtcctcgtcggtgcgctgcacctgcttcgtcgccatgcatccctgcgagtggcggtgggtgcaacggtagtaaccccttgggtgcttggctccaagaatctctttctgcccatactttctccagctatggccatcatctaccggtggattctccacccctcccgtcgagctcaccctaatctgatgcctcttcttctccgtcgacgtcttcctcttcttggtggccttgaaaggcaagtcggagacgtcgctgagggggctgggagtcgccgagtcgaggtcaccggcggcgacagcggcggcggagcgcttgcggtggccgtcgaagtggccggacctgatcatgccgatggagcgctcggtgacggagaagatctgcgaggccaggtgcttgcagaggtcgggggagccggagccacccaggtgtccctccagctgcctcacgagctccttgatgtggctcagctccgtcaccaccagccgccctcctccattgccctccatgctctccatcacccctcaacccttgatcgatctcttcctgctctcaccaacctagataaattgctagctagctagctcgatcttgcaggttgcagctaagctcgcttcgcggtacaagaatggcaagaacgaccaagaagagtgatcaagaattgggtaaaaagatcgagatggcgagagtgcatcctcgtgc

SEQ ID NO: 22383 - DNA, 712 bp, Oryza sativa
  Clone ID: TF_OsC143437_1
cccacgcgtccggcagcagcagctagcttagctaacgcacagtgacgcgagcatggcggcttcgctgggactctgccacgagacgtcgtacgcctactcgtacccggcgtcgaacacctcctcctccttgtgcttccctcctctcatggcggaccacatcgtcgacggcggcggcggcggcggctgttcctttggtgaattcctggagctcggccattccgtgtactcgctgccgcttccgccgccgccgtcgcagccggtggtggtcgccggcgggaacaatgatcagtatggcgtgtcgtcgtcgtcgtcggcggcggcgacgacgagcaggatcgggttcaggacgaggtcggaggtggaggtgctggacgacgggttcaagtggcgaaagtacgggaagaaggcggtgaagagcagcccgaacccgcggaactactaccggtgctcggcggcggggtgcggcgtcaagaagcgggtggagcgcgacggcgacgacccgcgctacgtcgtcaccacctacgacggcgtccacaaccacgcgacccccggctgcgtcggcggcggcggccacctcccgtaccctacttccgctgcgccgccgtggagcgttccggcggcggcggcctcgccgcctcccgcgcacgcgcaggcgtggggggcgccgctgcacgccgccgcggcggcgcactcgtcggaatcgtcgttctga

SEQ ID NO: 22384 - DNA, 2113 bp, Oryza sativa
  Clone ID: TF_OsC116595_1
atgtccgcgcgccccccgccgccgccgcgcccgaggctcgcgctgccgccgcgctcggccgccgagtcgctcttcacgggcgccggcgacgccagtccgggccccctcaccctcgcctccgcgctcttcccctccgaccccgacggcggcggcggcggcggcggcgtcatgacgtcgtcctcctcctccgccgcgggggccacgagcttcacgcagctgctcatcggcaacctctccgcgcctcctcctcctcctcctcctccgcagcagcagcagcagcgtgaggcggcgcgaggaggcggggtcgcgagggccgggccggcgctgtcggtggcgccgccgccgacggcggggtcggtgttcaccgtgccgcccgggctcagcccctccggccttctcgactcccccgggttgctcttctcgccggccatgtttgatgcttttgatgtccttgatatgttcatacctgataagatccttccaaaacgcgctactcggattaagttggacatctactttgtaaagacaagtcctgaagggggttttgggatgtcgcatcgggaggctcttgcccaagtcacagcccaagcaagccattctccactcagaatgttcgatcacactgaacaaccatcattctcagcagctccaacatcatctgaagctatgcagcatatgaatgcagcagttaatatgacaggaatttcagacatggtcatgggtccaacaaacaatgagaatgtagcctttcaacctgctgaggcgtctcagaggtatcaagtcaatgcccctgttgataagcctgccgatgatggctataattggcggaagtatggtcagaaggtggtgaaaggcagtgattgcccaagaagctattacaaatgtactcaccccaattgtccggtcaagaaaaaggtagagcatgcagaagatggtcagatatctgagatcatatacaaaggcaaacacaatcaccaacgtccaccaaacaagcgggcaaaagatggcagctcttcagcagctgatcaaaacgagcaatctaatgataccgtgtctggtctgtcaggtattaagagagatcaggaagctatatatggaatgtctgagcaactatctggtttaagtgaaggagatgatatggatgatggtgaatcaaggccacatgaagcagatgacaaagagagcgacagcaagaaaaggaatatacaaatttcttcacagaggacttcagcggaagctaagattattgtgcaaacaaccagtgaggttgatcttttggatgatggttatagatggcgcaagtatgggcagaaggtggttaaaggaaaccctcatccaaggagttactacaagtgcacctatgctggatgtaatgttaggaaacacattgagagggcttcgtcagaccctaaggctgtcataacaacttatgaaggaaaacataaccatgaaccaccggttggtaggggaaacaaccagaatgcgggaaatgcggccccttcaagcagtgcacaacagaatatgcagaatttgtctagtaatcaagcttcacttacaatggcagacttcaacaacattaaccagaggccaattggggtcttacagttcaaaagcgaagaataacaccgtcaactgactttcttgggaccccggttgctgaagtggcacactggtatttggttgatttcttcaggcaaatattggatgcctgcaattctaatagtcacactgttccaaacgttcaagaagtaatacaacaatatcattgtctgcaattttcctaccgatacacagaattactgaaacgacacctagcctttctagcttgtacatgctgttactttgaagcataaactcaatataacaccagctaggtggatgtgcagatggacgggtcgtaatcatatacatgtttactttgtaatttgtttatcaatcaagctcctgcattgtaataagattgaatagagaagtgaaatgtacagatgctttcccgtatttctgtatatgttgtaatttgtagaagagtaaatcaacaaaagaaggtatactgtggacaatatattaagattctttctcaaactttaatccaaattgcttgtgctaggtatcc

SEQ ID NO: 22385 - DNA, 814 bp, Oryza sativa
  Clone ID: TF_OsC175690_1
catgccactagaggaatgtccactagcttatcattcattgctaacgaaatttgattgatcctcttgattatgatagaaagaatgcagaacacacaggttcaactgtggctcaagcacctcacaatgatggacatcaatggaggaagtatggtcagaaatggatctctagagcaaaacattccaggagctactataggtgtgccaatagtaaagtgcaaggctgtcctgctacaaagacagtgcaacaaatggattccagtggaaatggaacacctgagttgttcaaccttgtctactatcgcctactctcatgcaggggggagggctttccccggccacatcttgtcgtcacagcccatcacagtatgggaacctatcaatcaaaacgaatgcaatagccctacacttgaacacgaagcccatggaagttcaagatgaaagatttgaaaacttgtgtatggtacaaaatatgccagagtatttgatagattttgaattggagagagccttcgagtttattgtgaactcaccattgggttctgagcattggacgttcgatgattcaataagatgtgagcacagtccaatatgcatatggggatgatgacttgatgttagctataagctagcttggagtttcttccaggatgtgctgtaatgataagttgtgacctggtaaaaatacatagcattttgctcatgactaagaagtaaacctgaaattaagaagcatgtgtataagctattactaccattataaaaattgaagatgtttccgcggtccaaaaaaagaaaaaaaaaaaagaaaagaaaa

SEQ ID NO: 22386 - DNA, 998 bp, Oryza sativa
  Clone ID: TF_OsC4053_2
aagcttcctactacattttcattcataattagactgaatatcatgcaacgtgttgatcgatcggctagctgattgaccaggaaattaaatagcatccataagagttctaaaagctttcctagaacatttttattttacatcgatccctgctttttcgatttcccaattgcccccatcagatcagaaaacaataatccatcaccgatccatgtacataagcatgcgttcgtcaaaaggaggggaaggcccacctggcggggtggtccccggcggcgcccgggggggcgtcctcccttcaggggggggggggggggcggccctcgtagggggggatcaccatgcgggaattctccgacaggcggtccacccgcttttttacgcggcagttgttgggggtgcacctgtagtaactccttggggggaggctgttgctgcagccctctcgcccatacttcctccactcgcagccggggtgtccgcatccacggagcccaagtgcgcgaagccggcgggcggctcgccgtcgcagctcctcacgccgcagccgccctcgaccggcccctggatccatgggagcagcgggtacaaacagccatggtccgacgagaacatcacgccatggttcgtcccggtggcggcggcgtggtcgtggaccagctgcggcagctggggaagcttgtgctgcaggctcggcaatggcgcaagaaaggaaggaggggaaggcggcgtgtacgggcagagcggcgcgtagagcgcggcagggaggcaagccgtctccaactggctcccttccatgcacgcatacatgcagcaactaattaactagctactagtagtatgctctacaagagatcatgcagcttggattgccggtgaggtatagctagctagagagagatcgaagacgatcgagatgccaagaaagatctctttctttaggttaaaagggaagcgatgaccatagagagagagagagagagagagagcataaaagaaag

SEQ ID NO: 22387 - DNA, 2550 bp, Oryza sativa
  Clone ID: TF_OsC17758_1
atggcgctggagctgagcctggtgtccgcttcgccccctggtgggctggcggcgagcccgcccccgcccgccgccatcccggggaaggagcagcaggtggccggggtggggatcctgctgcagatctccatgctcgtgctctccttcgtgctcggccacgtcctccgccgccaccggttctactacctccccgaggccagcgcgtctctcctcatcggtctagttgtcggtgggcttgctaatatttcaaatacagagaccaacactagaacccaatcaggattcagtctatccccaaaaccattctttgcaaattttggggctattgtaacttttgccatccttgggacattcattgcttctgttgtaacaggagttctcgtctatcttggtgggttgacatttctaatgtacaaacttccatttgttgagtgcctcatgttcggtgctcttatatctgcaactgatcctgtcactgtgttatcaatattccaggagctgggcactgatgttaacttgtatgctcttgtgtttggagaatctgttctaaatgatgcgatggcgatttcgctttacaggacaatgtcattggtcagaagtcaagcagcagctggggagaacttctttatgatggttttccagttccttgagacctttgttggttcattgtcatcaggttgcatcacagctcagaatattctcaactatttcaaagggacctttggcattgtggtgttggagttggatttatctctgctcttatatccttttcctaagttctacatggaaactctgtttgcaaaacatgaaagactatgcatgcttagtattgaccatgttaaattgcaatatttatgtattactatttaccatttactcattgcttgttttacggtaaattattttatttactacttgatcttgtgcaaccttgaccactctgtgtacctgtttaagtatgctggactggatattgacaagtatatgttagcagaaggacttgggttgtcaggaattgtttccatactattcacaggaatggttatgaagcactatacattttccaatctctcaaacaactctcagcgcttcgtttctgccttctttcacttgctgtcatctttagcagaaacatttgtggcagtaaatgtcttttcttgtgcatatttggttaacatgtcacggccagaacatcgacgcatacctctaaagcatcagaaagcactttggtttagtgggcttagaggggccatggcttttgcacttgctctccaatctgccaatgaacttcctggaggacatggaaaaacaatattcacaaccaccacagctattgttgttttaacggtacttcttatcggaggatcgacgggcaccatgctggaagctttggatgtaattggtgatgaaaacagatcaatagaaaattatgacgacaacaatggttacatccccccaacgtatgaggaaggttcatcatctggaggaggattaagaatgaaactgaaggaattccacaaaagcacgacatcgttcactgcccttgacaggaactatctgactccatttttcaccagtcaaactgatgaggatgatgatgtcttcgaaattggccattatgccactcccaagagtgggtttcgccaaaatgccattctgccgaatggattcgttaaaatgccatgtacaagagataccaaacatttgttttgccatttgcgccaattctctccatttttacctaattttgcatctgggctgaccaaaataccccttcgggctggttcaagaccagtactccgcaacacctcctccggctgtgccgccgccgccgcctgcgcggaccagtactccgccgcgacgagcccgaagccaagtgctggaaggaggatgctgacaatgagggtagctccggcggcatgggcggcggcgctggcgggaagccggtgcgcaagccgaggcttgtggtgcacacgctgagcgacatcgacatcctcgacgccggcttccggtggaggaagtacggccagaaggtcgtcaagggcaaccccaacccaaggagctactacaagtgcacgacggtgggttgcccggtgcggtagaggtgaacaaccccaaaaccagagacgcggattctatgaccaatagcttggatgagttgccacctgacagccacatacacgatacttagcatggtagcatgtgatgagattggaagcgatcgtaagtatacaacttctcatagttgaatagcatatgaaagagcataccgtaggatagatatcataacacaacttgattcgtcggcgatgacgaaagcatgctgcttcatgtatatattttaggcctcgattagtacgtggtggagctgtaatgagacaaaaatgattgtaagggaaaaaaaactgagcccaagcccatgtcatgagttagaatgattgcaataacccagagctgatcattggcagcttactgtcaagttggaaaagcatgttaaccaaatcaccagctgtgtcattggctggtcttgaagttactaaaaaacacaaa

SEQ ID NO: 22388 - DNA, 960 bp, Oryza sativa; identical to SEQ ID NO: 13089
  Clone ID: TF_OsC346291_1

SEQ ID NO: 22389 - DNA, 1900 bp, Oryza sativa
  Clone ID: TF_OsC277_1
gcacgacccgccgctgaggcccccctccaccgctgcggtcgacgccgaccgccccgccggcaccttcgccggtccctgcctgccgctccctagggcctcacagcccaagcgctccgcccgccgctctatacgtggcacccccccgcccctccgcttggccccgcccgccgggcgctcgcttctctccttggctcagcttgacatcgtcggagcagcagaaaagtttgctcgatcgagctagctaactaggtcgtcggatcagtgataaatcgttcgccgatggatccgtggattagcacccagccttcgctgagcctggacctccgcgtcgggctgccggcgacggcggccgtcgccatggttaagcccaaggtgctcgtcgaggaggacttctttcaccagcagcctctcaagaaagacccagaggttgcggcgctggaggcggagctgaagcggatgggcgcggagaaccggcagctgagcgagatgctggcggcggtggcggccaagtacgaggcgctgcagagccagttcagcgacatggtcaccgccagcgccaacaacggcggcggcggcggcaacaacccgtcgtccacctccgagggcggctccgtctcgccgtcgaggaagcgcaagagcgagagcctcgacgactccccgccgccgccgccgccgccgcacccacacgcggcgccgcaccacatgcacgtcatgcccggcgccgccgccgccggctacgccgaccagaccgagtgcacctccggcgagccctgcaagcgcatccgcgaggagtgcaagcccaagatctccaagctctacgtccacgccgacccatccgacctcagcctggtggtgaaagatgggtaccaatggaggaagtatggtcagaaggtcaccaaggacaacccctgcccaagagcctacttcagatgctcatttgctcccgcctgccctgtcaagaagaaggttcagagaagcgcggaggacaacacgatcctcgtggcgacgtacgagggggagcacaaccacggccagccgccgccgccgctgcagtcggcggcgcagaacagcgacggctccggcaagagcgccgggaagccaccccatgcgccggcggcggcgccgccggcgccggtggtgccgcaccgtcagcacgaaccggtcgtcgtcaacggcgagcagcaggccgcggcggcgtcggagatgatcaggcggaacctggccgagcagatggcgatgacgctgacgcgtgacccaagcttcaaggcggcgctcgtcaccgccctctccggccgcatcctcgagctctcgccgaccaaggattgacgattgctactgatcgacgcggcggattcgatcgcttcttcttgcaactgcgggcatggccattgccatcctctcctgtctctgcctctctgttcttggtggcgccagcaagaacacgatcgacgcggtgtccatccatggcggagttcgatcgatcgattgatcggctagggaggaattgatgattcgctgtatataacctagaatttttacacgattactcgagggatagatcgacgagcaacattttcggccggcgcccatggctgatcaaccaacgatcatcggcggcggccggacgtgagcaagacgattcagaaaaaaattcagatatttgcgtcggcaaaagacgcttgtaacatgtagagtagggaggaaaattatttgaagtgtacgtagtgcagtccttttgagcaaaattaatcccaaatttgcttcggtcccgaacaattcaacgaaaaaaaaaaaaaaaaaaaaacagactgtacatctcactctctcacttggggtgaagccccaagagtgaactgaaattcaacgaggagagacgctgacataaaaaaaaaaaaaaaaa

SEQ ID NO: 22390 - DNA, 1089 bp, Oryza sativa
  unsure (1)..(1089): unsure at all n locations
  Clone ID: TF_OsC104544_1
atgaagaacaagggcagcagctgcaggtatcttcctcactcttctgcaccatgcgccaccgacggcgccagatgtttccgctgcgaccaccggccggcgatcgacgagatcgtcagggagcagtcgctggtgacccagctgcgcgccgtcgtgctgccggcgctggagacgaaggccgacgacgggcgggcggagatcgtggcgcagctgttcgggagcatactggattgctccaggaaggtgatctctgctctgaattctcgctacgtcggagaatcacctcctgacgatgatgagatcgtcgacaaaaggagggcgaagaggaagaacagtgagggcaagaagggtgatgatcaggtgaaagtgaagccacatgagcacaagagaagcaggagatacactaactcaacatcacaaatcacagctgttccacattatgacggtcatcaatggagaaaatacggacagaagaatattaacaactcaaaccaccaaaggagctactacagatgcagctacaagcatgaacaaaactgcaaagcaaccaagacagtgcaacaactggacagtgccggcgaaaccatcatgtacaccgtggtctactacggacaacacacctgcaagactaacatgagcaatgctcctctccatgttgttgaaacaagtaccactcaaagcatctcaacaacatgctgctctgatgatcttggcgattatagccaaaagatggagaacatgcacacaccagagttggcagaagtgtgctctgatgagcttggttcttaccatgcaataataggggcagagcacagtgcactagggttggaggatgaacacatgcacaagctgctcgacacatttgcatgtggagcattagatctggacagctgggagattgatgcaattgtgagatctggtttctgctaggtgaattttgatgcatgttgctgtgatcagttttggtgcttaagatggagtttttttgtattataatgggttatatggtgcttactgaactttggtgaatgcaaaataaataggttagtgcttgctagatagcanggtaagttaaaaaatataagtacttat

SEQ ID NO: 22391 - DNA, 1009 bp, Oryza sativa
  Clone ID: TF_OsC89344_1
gcgcgacgacccaaaccgagcgcagcgcacggaccgagatctgcgcccggcagcggcggcgaactccggtgaaccaaccatggccgtggacctgatgggctgctacgccccgcgccgcgcagacgaccagctcgccatccaggaggcggccaccgccggcctccgcagcctggagatgctcgtgtcgtccctctcctcctcctctcaggccgccggggctcacaaggcctcgccgcagcagcagccgttcggcgagatcgccgaccaggccgtctccaagttccgcaaggtcatctccatcctcgaccgcaccggccacgcccgcttccgccgcggcccggtcgagtcgtctgctcccgccgcccccgtcgctgctgctccccctcctcctcctccaccaccggcgccggtcgctgccgccctcgcgccgacttcctcgcagccgcagaccctgacgctggacttcacgaagccgaacctgaccatgtcggccgcgacgtccgtgacatccacgtcgttcttctcgtcggtgacggccggcgagggaagcgtttccaagggccggagcctgctctcctccggcaagccgccgctgtctgggcacaagcggaagccctgcgccggcggccactccgaggccaccgccaacggcggccgctgccactgctccaagagaaggaagaaccgggtgaagaggacgatccgagtgccggcaatcagctcgaagatcgccgacatcccgccggacgaatactcgtggaggaagtacggccagaaacccatcaagggctccccttacccacggggctactacaagtgcagcacagtgagaggatgccccgcgcggaagcacgtggagcgcgccaccgacgacccggcgatgctggtcgtgacctacgagggcgagcaccgccacacgccggggcccctcccggcgccacccgccgccgccgccgtcgccgcgatgccggtgtccgtcgccgtgtccaccggcaacggacatgtctaa

SEQ ID NO: 22392 - DNA, 1391 bp, Oryza sativa
  Clone ID: TF_OsC7069_1
ccgcacgagggagagagagcggggcagccactccctctcctcctcgtcgtcgtcgtctccaccggtggaggtctcagccctggctccagcgaggtagggtgggaggggagtgattcatggaggggatggaggaagcaaacagggaggcagtgcagagctgtcacagggtgctcaccctcctctccagcccccatagccagcttgtccctaacaaggatctcgcggcggctacgggagaggctgttgcaaagttctgctccgtggcatccaggctgaacaatggcaatggcctccagggccatgcccgggttagaaagatcaagaagcccttgcctatctttgatagcaacctctttttggagagccctgcactggctgtggcgatggcagccaagacacctaactcgagtccgatcactagcctccagctgtttccgaggtaccatcagatggagggctcttcttcaaaggatcctgttaggatccctgcccaattccccaaaaggttgcttctagataaccctgcggttgattcggatgggccatcacgggggccaccgctccagctcatccagccggtgtctgttgcgcccccagctggaacgcctcacccggcattgccttcggcgcatcttcatttcatccagcagcatcagagctaccagaggtttcagctcatgcagcagatgaagatgcagagtgagatgataaagaggagtggccttggtgaacagggtggtagcaatggtggtggtaagggtgttaatctcaagtttgacagttctaattgcacggcatcatcctcccgttcattcttgtcgtctctgagtatggaggggagcattgcgagtttggacggtagccgctccagtcgtccattccagctagttagtgggtcacagacgtcaagcactccagagttaggcctcatgcagaggaggaggtgcactggtagggaggatggtagtggacgatgcacaactgggagccgatgtcactgtgcgaagaaaaggaagctgaggataaggaggtctatcaaagtccctgcaatcagtaataaggttgctgacattccagctgatgagttctcatggaggaagtatggacagaagccaataaaaggatccccacatcctaggggttactataagtgtagcagtgtaagaggatgcccagccaggaagcatgttgagagaagtggcctccagggtgaatgtggcaaggctactgacaagcgcagtgacaggcaaccattcgtatccgttctactctgtccaaagtccaaaccgtgcaagtctgaaatggcctgtttccttgtagccactagcccactaggcaagcttgaactaatgccagatactcaaggcccaactgccccaagtactccataa

SEQ ID NO: 22393 - DNA, 1802 bp, Oryza sativa
  Clone ID: TF_OsC47923_1
atggggggcgagccgcgcgcgcgcgcggaggcggcctgggcggctgcgttgcctgccgcgttggttgcgctggtgcgcgacacggctacatacacacgaatgatgcaccgtctccgaatggaaacgccacggggccccacctgccagcttgacccctgctgctgctgctgcactgcacatgttattccccctccgcctccggtgtcacgcacgcacgcgacgcgacgcgatgccgaggcgtccgtaccaccaccgccagcatcagcggccgtcagctcgagatcggacggcacgggacagatggcagcaggcgtcacgctggcgtgtgccgcccccccgccgctaagggccccacgtgccagcgatggaggcaggcgccgtggggtggtcaaagggggcgcggggacggacacgtgtcggtcgccgcaacgtctgaatgttcgaccgcgcgagagagagagggtgcgtgcgtgcgtgcgtgctagagccaagaaccacgagcacggccagcgtcggcgagaggcggcggtggatccggctatgtcgggcgagtaccagttccaggacgagctggcgccgctgttcgcgcggccggggggcggcgcgggggagatgcagatgctgccgtcgtcgtggttcgccgactacctgcaggcggggacgccgatgcagatggactacgacctgatgtgccgcgcgctggagctgccggtcggggaggacgtcaagagggaggtcggggtggtggacgtcgtcgcggccggcggcggcggggcgccgccgctgacgccgaacacgacgtcgtcgatgtcgacgtcgtcgagcgagggggttggtggaggaggtggaggcggcgccggcgccggcgccggggaggaggagtcgccggcaaggtgcaagaaggaggaggatgagaacaaagaggaaggcaagggagaagaagatgaaggacacaagaacaagaaagggtcggcggcgaagggagggaaggcggggaagggggagaagcgggcgaggcagccgcggttcgcgttcatgaccaagagcgaggtcgaccacctcgaggacggctaccggtggcgcaagtacggccagaaggccgtcaagaacagcccataccccaggagctactacaggtgcacgacgcagaagtgcccggtgaagaagcgggtggagcggtcgtaccaggacccggcggtggtgatcaccacgtacgagggcaagcacacgcaccccatcccggccacgctccgcggcagcacgcacctgctcgccgcgcacgcgcaggcggccgcggcggcggcggccgcgcaccagctgcaccaccaccacggccaccacggacaccacggcatggcgccgccgttgccgctgggctccggcgccgccgcgcagttcggccggtcgtccggcatcgacgtgctgagcagcttcctgccgcgcgccgccgccgcccaccacggcatgactacgatgggcggcgccgcggcgacgacgacgacgagccatggccttaacagtgcaatcagcggcggaggcggcgtctcgagcgagacgacgagcgcggtcaccgtcgccgcctcggctcagccgtcgtcaccggcggcgctccagatgcagcacttcatggcgcaagacttgggcctcctgcaggacatgctgctgccgtccttcatccacggcaccaaccagccttgacgcgacgaccaccatcaatctgaagctgaattaatcatcagactagctagacaagaggtcatttggctctcgatcgatcatgctgtttaattaattaacatctc

SEQ ID NO: 22394 - DNA, 2142 bp, Oryza sativa
  Clone ID: TF_OsC2081_1
atggaggactggatgccaccacccacacccagcccgagaacactcatgtcaagcttcttgaatgaagattttgtctctggttcattttccaatattttcagtgatcatgagagcaacaaaccccaggatcagtttgagagaaacagagagcttgtggatttgagtaaggaagtgccttcccaattcgcaagacccgcattccagagggatgcttccctggatcatagcttggtcagtcctacacagagatcaaactcgcatggtggtttggcagagcgcagggctgcgagggctggtttcagtgtcccgaaaatcgatacatcccgtggtggttcgtccacagtaattcgatcgcccgtggcaattccaccaggtcttagtccaacaacacttctcgagtcaccggttttcctttacaacgcaatggcacagccttctccaaccactggcacactgccatttttgatggcttcaaatgctaagtcaacaataccgtcagctaccaagatggacgaagattgcacatttggcaatgacactttctccttccaaccgcatgtagggtcgagacggccaaatttctccgctgcagaaaagggtcccaatgcttgtcaccaaaaccaatcgctgtcgaatatccatcagcgggaatccagtcttcagtcaagctttactgcagtcaaagatatcactgatgaaaaaaacattaaaacaaagacatctgactccatgtttggtgataaccactcttctgatgaacaagatgatgagactaaccaaaatggagaaaactctatgccacctccgaaccaccgttcaggtgtccctctgtcacataccaatgatccagaagtgaatgtcctagagaaccgcggttcacagacatgccataactctgcatccttgtgggacaatgccaaaaatgattgccttcaagatgttcaaagtgaagttattgaaacaagaacagctgcttgtcttccagtatcaaccaattgtgatacatctatcatggagtcccaagatgcagttgatgtgtcgtcaacactatctaatgaggaggatgatagggcaacgcatggcacggcttctatagagtgcaacggggatggagatgagactgattccaagagaaggaagctggatgctttgacagctgcaactgctgctattaccaccaccagtaacattgacatgggagctgcggcatcgagaggtgtccgggagcctcgtgttgttgttcagacaacaagtgaggttgacatccttgatgacggttaccgctggcgcaagtatggacagaaggttgttaaaggaaatccaaacccaaggagctattacaaatgtacgcaccaagggtgttcggtgcgcaagcacgtggagagagcatcgcatgatctaaaatccgtcatcacgacgtacgaggggaagcacaaccatgaagttccagctgccagaaatagtggacatgggagctctggatctggaaacgctccatctgcaccgcaatctaacggctctcagcgcaggcaagaacaagggcaagccagcttcagccagtttggtggcgcggctcccttcagctccttcgttctcccaccaagaaaccaatttggaccatcggcgagcaatttcccctttgggatggtcccgccaggcatggcgattcccatgccatctctagggtctcttgctccagcaaagatggctggtcatccatccaccatgcagggctaccaggggctcatgattccggaaggagagatgaagacagagcccatgtcgcagctcggcttccccgcggtaaaccaatcttcatcatccttccaacagatgatgaacaggcctccatcatttggacctcagatgtaaataataatattaaagaaagaaaagaaaatgatagatgtgcttcagcttctatacatggtagcaatgctacaacatagctttgttgttctagcttttacctgttattttttctttgggcttttattttttggaagcaaagaatgcagaagatgttacccgttttgtttatgttgtaattggaaaaaaaaggtggtggtagtgttcaggacaaaaggcaaaatcattcaattggaaaaaaaaaagaaaaaaaaaaaaaaaaaaaaaaaaaaa

SEQ ID NO: 22395 - DNA, 699 bp, Oryza sativa
  Clone ID: TF_OsC123567_2
atgtctcctgtgccgagtccgcatcaatcacaccatctaggccatggctcaaggaaagagaagcgcatgaggaaggtggatacctttgcgccgcacaacgacggccaccagtggaggaagtacggcgagaagaagataaacaactgtaatttccccagatactactacagatgcacctataaagataacatgaattgcccagcaacgaagcagattcagcagaaagattatagtgatccaccattgtactcagtcacctactacaatgagcatacatgtaatagtgcttttcttcctcttagcccctcagagttccagctgcagactgcatctgggaaggcagtctccatctgctttgaatcatctggggctcaagaaccaatgaccaatgccagctcaccttcttcaagcgcagcacggcgtagcacaccttcagagaacaagaatcagcctcttccacggcattcggaagcctattcttggggggttggtgttgtagaacaaaagccgtcctgcactgagctccaatcttgcagcaccgaatgtcaggatgcattttcagctggtacgattcctgaagagacagtagatgcaggaagatttggttctatcagattcttccattttttgtaaatgaattaatggaagacagtttattttatttcaaagagctaatatgatacacatgttttttcctct

SEQ ID NO: 22396 - DNA, 1882 bp, Oryza sativa
  unsure (1)..(1882): unsure at all n locations
  Clone ID: TF_OsC44619_1
ttttttnnnttttttttctagctccttgaagcctggaaatcaaaagcctcattttgaattaatttgtttccccccacatagtgcatatacaattgagtgatctcacgcttgtgcatgcttatatatactgtactctatgtacatcaatttgccaattaggagactaatacgtacgtatagcagaacaaatcaagcaattattaccatctaattgattatctaaacaaaatttagatcaattttatgaacttgcttcacttgttcggcgccgccgcgccgccgccgcgccccatgtaggacgtgatcgccgccgccaaaaccgactggaagctcgggtccgacgtgatcgccttcgcgatcgtgtccgtcacggccgccggcgcgacgccgccgccgccgatggctctctgcaggtacggcgacgtcgtctggccgccgaacagctgctccggcgccggcctcgccgccgccgccgccatgcccatcatgccgaaatgatggccgaacggcgacggcgcaacgcccttggcgtagtatggctgcgccgccgccgcgccgccgtacgccaggtacccgctgctccacgccgccggcagcgccctgctggactcgtaccccgcggcggcggcggcgtagggcgacgccgacgacgggtgcaggagcgagtgcggcgcggtgaggtcgagcgtgacggtggggcaggacgtggcggtggagatggtggtcgggccgagcagcccgacgccgccgccgccgccgacggccgaggcgaacggcaggtggtggtgaacgccgccgctgccgtgcatcgtggagttggtcgagccagacgtcagcatcgccgccgcggccgacgttgtggacgccatcgccgccgccgccggcggcagcgggtggctgtgcgtgccctcgtacgtcgtgatcaggatcgacatgtcgtccgcgcatctctgcacctgcttgcgtacagggcagttgggtgcaacggtgcaacggtaataggcgcgcgggcaagggttcccctttgagattttctgcccgtatttccgccactgacacccatcgttcatcgtgggggtgtcgcacttgactctgacggaaaccctagccttcttggcctgctgctgctgcagcacctcgtcgtcggcgccatcgccgccgccgctcgagctcctggacgctttgttcggctgggtaggctcgccggcgccggcgccggcggcgtccccgctgctgtcggagctgaggttcagcacgggcatcggcggcaacgcgcggcggctcgcctgcttgtcgtcgtcgtcgtcggaggcaacgccgccgcgagcgcagctcagcccgagggacagccgcccgtcgtcgccgccgccgccggacgacggcgtcctctcgtggcccttccggcgcgtcgcggcggcgttgggcctcgtgcagaggctcagggagacgaggtcgtcgggctcgtcgtcgtcgtcgtctccggagagctccgccgccgtttgctccttgaccttgacgacgtcgaggaagtgcgtgtgcagcgacttgtagtcgctgacgatgcgtgtgagcatcgtcttgagccgctcgttctcctccctcacctcgcccatctccgccttcgctgcctccatcttctcctccttcttgatgatggttgaatctctctgcgtcgatggtgcaaaactctcaaagactattggaggcgcgcctccaatcgcggcgacgtcgactttcttctcgtccctcaccggcgggctctcgacgacgacgtccattgcggcgttcgatcgatcgtcgttaccgatctcgaaatattaaaccaggcttagcttaatcacgtaggctctgaacaagaagggtatcaagcaaaacgatgcgt

SEQ ID NO: 22397 - DNA, 1120 bp, Oryza sativa
  Clone ID: TF_OsC209019_1
atgggcttcgccaaaacaacaaccgaaacggatatcaaattgtttcttatggggccgtgcggggcatcaaagcaaaacaattcgaaacggggcggctcgcgcacggtcgcgcgcgccgaagcttcatccaacgactcgagccaggaagctcgacggctcttcggcgcgtgtcacgtaagagagtcggccaacccacatgcacgtgtaccgatgtacatggcggcggcggctgcgggagcaagcacacccttcaatttttgccgccacggctcgcacgccgagtacgacgccgtcttcagcggcagctggatggcgcgccgcccctccgcggcgccgcacggtggcggcgcctccggctccggctccggcagcggctacggcgccgcctcgtacgttgctcccaccttcggcgcggcgtttaggcagcagcatctcgacctcctcgactacctgtccgacgatcagggcgttccggcgccaccaccagcggctgtgcccagcgcgtcgtacgtgacgccggcgccggcgatggcccccgctgaaccggtcgtgccggatgctgttgccgccgccggcggctatccgaggagcgtggctgcggcggcggcggccgtggccggcgagggaagagatcggacgacgacggacaagatcgcattccggacgaggtcggacgatgagatactcgacgacgggtataagtggaggaagtacgggaaaaagtccgttaagaacagccctaatccgaggaactactaccggtgctcgacggaggggtgcaacgtgaagaagagggtggagagagacaagaacgacccgcggtacgtggtgacgatgtacgaggggatccacaaccacgtgtgccccggcactgtctactacgccgcgcaggacgccgcctccggccgctttttcgtcgccgggatcagtcacccagaccttaattaagctaggatatgctttgccggcccagctgtggcttagcttgatgtgcagctctagttattgtatgggctgtacggttcagttatttgaagcgggttatacttatatgttgttaatgtttgcctactgattttaattaatttcttagagttagactcaatttggcggagggatt

SEQ ID NO: 22398 - DNA, 821 bp, Oryza sativa
  Clone ID: TF_OsC140224_1
agtggcgcccccgggcccgaggaaaattcaccggtgaaaaggttcagcactgtgcaatggcggcttccgtaggactgaaccctgaagctttcttcttcagcaactcctactcctactcctcatcccctttcatggccagctacacgccggagttctcggccgccgctatcgacgccaacttattctccggcgagctcgatttcgactgctctctcccagctccggcccaggagtacccggaaaatgaaaacactatgatgaggtacgagagcgaggagaagatgagggcgagggtgaacgggaggatcgggttcaggacgaggtcggaggtggagattcttgatgatggcttcaagtggaggaagtacggcaagaaagctgtcaagaacagcccaaatccaagaaactactaccggtgctcgacggaggggtgcaacgtgaagaagcgagtggagagagaccgggaggaccaccgctacgtcatcaccacctacgacggcgtccacaaccacgcgagccccgccgccgccgccgcggcgctgcagtacgccgccgccgccggcgactactacagcccgccgctcagcagcgccggctcgccgccggccgcctattcggcaggcggctcgctgctcttctgaggctgatgagtttgtctagtactagacacgcccgggagctctagctaggatagaaaactagagaaagtttaattatacctgaattttaattaatcacctcacaaaactctgatgtatcatattatatcgtgatagtgactgcttgttaatttaattttggcgatcgatgtgatcttcggt

SEQ ID NO: 22399 - DNA, 1674 bp, Oryza sativa
  Clone ID: TF_OsC457_1
ccccgggccgcagcccggcggctcggcgcccccccccctggtgtccccttttttttttctttttttttttaggcacgtgaagctatatgtttttttttttcgaaagcggaagaacaggattacattgtacccaaatcctcttctcttgcttgtcacacaaaaaaggttaagacccccagctcataatcaggaaccacattactacgtactaatcgtgttgctacttgctagcatgtctgcagcttaaagctgagacgacacatcaacaaggaatttacaaactaatctagccaggctaattaggagtatctttgcaagttccaaattaagatccgcgctgccgctaattatttctgtacacacgcgtggaatccatcttctttcgatcgttttacccggcccgtgtccatccatgattcttcggtgatcaaaagctcaaacccataatgtcgtccagatcgaagacaacctcgtcgttcttgaagaactccatgccggcgacggcgtcgtagctccagtgcagggaggacgtgacatcgccctggtccggcccgaagggacccgcgactccgccgccgccgccccgccgcgcgccgcggagctgccgggcgtgaggctgctcagcacctcctcctggtcggacgagccgacgccgccctccaccttgagcggctgcagcagcgggcccggcgcggtgaccgtggtgatcgtgctggtcgtcggcgccgcggcagcgtctactggcgccgccggcgcggcgacgaagctgatgaggcgggaccccgcttggaggccgccgcagccgtcgtcgttgtcgccggcggcgacctggtggatgacgtgcgccgcgatgatgggggcggtggccgggtcccggcaggtgtgctcgccgatgtaggtgaccctgtagctcgccgggtcgtcgtcgcagcgctgcacctgccgctgcgccgtgcacagctggtcgtacttgtgcgtgcaccggaagtaggcctttgggtgcttggagttttggatctccttctgcccgtacttgcgccatgcctggccgtcgtcgaggttcttgacgaccaccgaattcccggacgattgctgcgtcctcgttttacgtatcttcccaatctcctcaatccccttctcaaacactccccgcctcctgcggcagttggccttccggtcggcggcgggggctttcctcttcccgccggcgctggccccgcccccgcaggtgacctcgctctgcacctccgacccttctcctccggcggcggagaccgccgccttgtcgagcgcccgcatcgcccgggagaaggtgtggagaatctggtcgacgaagcggccggcctccggcgagtcgcggaggagcccctgcagctgcgccgccagctccttccccttctccatgtcctccatcacctgcgcgtacgccggcgccggcgccggcgacatcgatgacgtcatcctggagcggattgatccgtccccattgctgcagccggcggggggggggcgcaggcgcggtctaccgtcgatgacgcgtaccgtgtcaatgccaggtgggaccgtgcggctacgcccagtgagcggctcacgaggggtttccatggactggggcgctcgctgcgtgggcgatgggaaaaagggacgcggctcggcaccacgcgagaaccatag

SEQ ID NO: 22400 - DNA, 1221 bp, Oryza sativa; identical to SEQ ID NO: 13112
  Clone ID: TF_OsC340734_1

SEQ ID NO: 22401 - DNA, 1260 bp, Oryza sativa; identical to SEQ ID NO: 13117
  Clone ID: TF_OsC47923_2

SEQ ID NO: 22402 - DNA, 986 bp, Oryza sativa
  Clone ID: TF_OsC177829_1
gcacgagggcagctagcttagctgccggcatggacgacgacggcgacggctcatcgtcaccgaccgacgacagcgccgccgccgggcttttgccgctcttcagccgatcgccggccgaggatcttgaggagaagctgaggcgggcgatggaggagaacgcgcggctgacgcgagcgctcgacgccattctggccggtcaccacgcccaccagcgcgcgctcttggcgccgtcgctgtcgccgccgccgccttccgccacagcaagggcgccgagcgtgtccaccagctgcgcggcgagggaggacgccgcaccggcggtcgccgccgccgccgcgtcgacggcatgtccgtcgagacagcagccgccgaccgcggagccacggcccaaggtcaggacggtccgcgtgcgcgccgacgccgccgacgccaccgacgccaacagcatggcggagaccgtgaaggatgggtaccaatggaggaagtacgggcagaaggtgacgcgtgacaacccctaccctagagcttacttccgctgcgcattcgcgccgtcttgccccgtcaagaagaagctccaaagatgtgcggaggataggtcaatgctagtggcgacctacgagggagaacacaaccatgccctgtccacgcagacaaccgaattcgtcgccagcggctgcactacgagccagcacgccggggggtcgtcgtcgtcgccgctgccgtgctccatctccatcaactcgtcgggccgcacgatcacactcgacctgacgaaccaagcagggtccggatcgatcgcgagctgcggcgtcgaggcggccgccgtctccggcgagctcgtcacggtgctctcgccggagttgaggaggcacctcgtggaggaggtggtgcaagtgctcaagaacgacgccgagttcgtggaggccgtgaccaacgccgtggccgctagagttgtggatcaaatcccacacattcctgttcatttgtag

SEQ ID NO: 22403 - DNA, 853 bp, Oryza sativa
  Clone ID: TF_OsC17758_3
atcgcaggagctactacaagtgcacgacggtgggctgcccggtgcggaagcacgtggagcgggcgtcgcacgacacgcgcgccgtgatcaccacctacgagggcaagcacaaccacgacgtcccggtcggccgcggcggcggcggcggacgcgccccggcgccggcgccgccgacgtcgggggcgatccggccgtcggccgtcgccgccgcccagcaggggccctacaccctcgagatgctccccaaccccgccggcctctacggcggctacggcgccggcgccggcggcgccgcgttcccgcgcaccaaggacgagcggcgggacgacctgttcgtcgagtcgctcctctgctagtcgagccgagccgagccgagctgagctgggccccacatccccctgctcgccacgtggcgtattttcgcctcgccgtatacgtacggccgtatagcgtacgtatacacgctcgcacgccctgcccaacacggcaatacacacatacatactctcgtacacacgtagtagcatacatatacagtatagtaggtggtagtggtagctagctagggagtgagatccaatttgttgattcgttgcaggccactgccacgtgggccacaccggaaacagtacacgcgtatacaccacacttgggatacgcgtacgtacgcacatgtacacgtagttttgtgcctttgtaactgctgagagacaggtcaaataagactgatgaatttttcatttcttaaaattccactcgtgtgaattactagtagtataaatatctatacatgatgtttttacaatctgtaccgaactgagaaagaggaaaaaaaagagagagattttttttt

SEQ ID NO: 22404 - DNA, 2404 bp, Oryza sativa
  Clone ID: TF_OsC11608_1
agagctgaaaatgtagcatcatgtttcaaccgggacgaatccaacggtccgagcattcgtacgtgttacaggtatcacatttgcatatctttactgccaacggcattgtacatatgcagtgagatacaaagctttgtcacaaaagagaattagacaagctcacaaaaccaaatcaaccataatccatgttctatccacattccactgaaggcgaagatagttaaagaaaaccaaattctgatgatctaattaatcttaacgggttcactgtacaacgaatatagggccagtgccacatacaagtatacaacaaggcctttgccgctccagaagacccatgtggtgtattttgctgcagcccacaggtacagctctcgcctccggttcaactgatgtgtcaatgataggagcatctttctgaagagaatgtcaatacgaagcattggtaatatatgattctcgagctataagcattagtatagactctcacggacccatgactaaattgccggcggtactgtagcataagttagccgaatggtccatcggtgtggctttgaaagtaaaaccttcactaggtttttcttctctcgaaccatatatattgctagctgcattgccagccatagtcggcattgccattgctggaagtcccatattactgtatactgaacccatgggctgcatttgatactgcatctgatcagaaactgaggactgcaattggtttgtggcatcgctgtggttcgggctgattccaacaccaagatcaaggctgatggtgtcactttcagctgcttgagaatattggtttggaaatgtcctaggttcacatgctctcatcatgccaccaaggccctgcatattgctgttaattggatggacaacaggcttcatggggggagtggacatctcatggctcgcattcctcgacgcagggacttcatggttatgttttccttcatatgttgttatgactgattttggatcatgtgatgctctctcaacatgcttcctgactgggcatcctgtatttgtgcacttgtagtaactccgtggattggggtttcctttaactactttctggccatacttgcgccagcggtacccatcatccaagatgtcaacctcactaaccgtttgtactacaacacgaggctcacggttaggcttgcccatcaaagcagcatcaatagcagcagattccattttccttcgttttgactctaaatcatcatcctcaacagcatcatctccagggtaaggtctccctcctccggcatcattgtcatcatcactagctgagcctggaacaggctcaatcataccagctgtatgtactgcattaccaagaatgctaagaacatttgaagatttgtcatcagtagttgccacaccatcatatctttcttcaccctggattggaggaactgcaccggcagacagcctcctattgggttggggcttagggtgattgtgacgccctttataaaccacttcagtaatctgaccatcaagcgaacgctccaatagcttttttacatcacagttaggatgtgtgcacttgtaatagcttctcgggttctcacttcccttaacatgcttttgcccatatttgcgccagttataaccatcctctgcagacttttcagccacactttcaggctgtgactcctgcatagcatttccagagctattcatctgatgcaactcagatgtaccaacttcagcaggtgagctgtcagttaaaccaaccattccaaccagttggctcggggcacttgaaatattgactgcgagagttgactcacgagaacatagaggtatattgtcgatcatcatatcgtcagatgacagggcagtattcaggctttcatttttcatagaagtttcatgctttttgggatcattgatagcagaagccgtcgattgagaggatgaattcagatgaggcttgaattcaaaatctcgagagccaccatcttcatgggtgctaccagatgttttatccctaggcgaaggaagtatgtctggatttgcactcttgttcataattgcagccatgctcagagtaccagttgtcggagagggttcaaccttgaagttggtgaggaggacgggggactcgaggagagccgaggggctgaagcccgcggggatggtgaggcagggctcccgcgagatcggcagccgcgcgggggacatcgccttgtacctcgcccccgcgcccgccgcgcccgcggcgagcgccgcgacgcgccgatccaccgggggctgcttctccggcgacccgccgacgcccgcggggtggtcaccggagctagggtttggcgaatcggccatttgctgcggttgcgcggcgctgcgtgggaagccctcgtgccgaattcctgcagcccggggg

SEQ ID NO: 22405 - DNA, 1260 bp, Oryza sativa
  Clone ID: TF_OsC732_1
atggacgcggcgtggcgcggcggcgttggctgctcgccggtctgcctcgacctctgcgtcgggctgtcgccggtgcgggagccgtcggcggcgaggcacgagctgcttgaccggccggccggctgccgcggcggtggggattccaagtcgggggccttcctccaggcgaagatcgtcgaggcgaaggtcactcagatgagcgaggagaatcggcggctgaccgaggtgatcgcccgcctgtacggcggccaaatcccgcggctcggcctcgacggctcggcctcgccgccgcggccggtgtcgccgttatcgggcaagaagaggagcagggagagcatggagacggcgaattcctgcgacgccaacagcaacaggcatcagggcggcgacgccgaccacgccgagagcttcgccgccgacgatggcacctgccggaggatcaaggtcagccgggtgtgcaggcggatcgacccgtcggacacctccctggtggtcaaggacgggtaccaatggcggaagtacgggcagaaggtgacgcgcgacaacccgtcgccgagggcctacttccggtgcgccttcgcgccatcgtgcccggtgaaagaagaaggtgcagcggagcgcggaggacagctcgctgctggtggcgacgtacgagggcgaagcacaaccacccgcacccgtctccgcgcgccggcgagctcccggcggcggcggggggggccggtggctcgctgccgtgctccatctccatcaactcctccggcccgaccatcacgctcgacctcaccaagaacgggggagccgtgcaggtggtcgaggcggcgcatccgccgccgccgccggacctcaaggaggtgtgccgggaggtcgcgtcgccggagttccggaccgcgctggtggagcagatggccagcgcgctcaccagcgaccccaagttcaccggcgcgctcgccgcggcgatcctccagaagctgcccgaattctagcttcctttacaattctccaattcttcttacaggaaaaaacatagaggcgcatttcaatagagattagagcttaatctccccccaaatttgaaaattttatacagggtaagaattccgaatgcttttctgctgcttttaggatgtgaattgtactctctcataataacctgttggtccttgggccgtcggaagaagattgcgggcttctatcgggcctcacgatcctgagccccattgcgaggctccttgagcttaaaaaaaaaaaaaaaaaaaa

SEQ ID NO: 22406 - DNA, 897 bp, Oryza sativa
  Clone ID: TF_OsC47394_1
gcacgacggtcgcggttttcccaagctgagagttgtcgtgcgagagtgaggagcatggcgatgctggggagctcgtcggcggtggtgctggagctgatgacgatggggtaccagtcggcggcgtacctcggcgagctgctccgggcggcgtccccggcgcaggcaggggatgagcagcaggagctcgccgcggagatcctccgctgctgcgaccgcgtcatcgccaagctgaaccggggaggagccactggtgctactaccggcaagaagcggaaggcggcggagtccgccgccgccgccgccgtgacctccccttctctccccgtcacgccgaccaaaagaagggcgcgtggcgcggaggcggtgagggaggtgaggagcggcacgacgacggacgggttcatctggaggaagtacgggcagaaggagatcaatggctgcaagcacccgaggctctactaccgctgcgcgttcaggggccagggctgcctcgccacgcggcgggtgcagcagtcgcagtcgcaggacgacccggccgcggcgttcgtgatcgcctactacggcgagcacacctgcggaggcgacgccgccgccgccgccgcgtgccgggacggggaactaatgccacctgccgtcatcaactccggcgcgtcgagcttcgccgccgcttggaacatggcctcgcgtgagccggcgtcgtcgctcgccgtcgagcggaggagctgcgacggcgacgctcccagcgagacgtcgcaggggtggtctccctccttctcgtcggaggtggagctggacgtggtgggattcgacctcgccggagccgactcgtcggcgtcgccggtgtgggagttcttgaatggcagcttcgactgggaattcgtcatcaactccctctga

SEQ ID NO: 22407 - DNA, 471 bp, Oryza sativa
  Clone ID: TF_uC-osflM202091c10b1
gccggaggtcagtggagaagcgggtggtgtccgtgccgatcgcggagtgcggcgaccggccgaagggcgccggggaggggccgccgccgtcggactcgtgggcctggcgcaagtacggccagaagcccatcaagggctctccctacccaaggtaattaggctttatattcagtttggttgatattcttgagcctgttgattagttaccgtgctgattaatcactgcaattagatcagttaaacggttgttgaagtggcaagatttaatttgggtttgttgcttgtgtttattatgctcagggggtactacaggtgcagtagctccaaggggtgtccggcgaggaagcaggtggagcgcagtcgcgccgaccccaccgtgctgctcgtcacctactccttcgagcacaaccacccgtggccgcagcccatgagcagcagctgccacgcgagcatgtcgtctctcggtcgacg

SEQ ID NO: 22408 - DNA, 1678 bp, Oryza sativa
  Clone ID: TF_OsC1773_1
cccgcgtccggttccctcttctccgccgagtccagccccggcgcgctcactctcgccgcctcgctcttccccgacgcgccctccccggccttccagggctctttcacccagctcctcgtcggcgccatgggctaccccgccgcctccgcccccgctccgccctcaccgttcccggtgccgcacggactcagccccaccgcgttcctcgggggctcccccggcctcttctccccgacggggaactttgaaatgtcccatcaacaagccttggcacaagtaacagcagaagcagtccattctccgtacagtatgattaatcaatcagatttctcactcccgttctcgtcgacaacgacttcagtgttggcatcacaacatgtcaactcttctgccaatgtgtcatcaccacgagaaataccaactctgccatcccacacagataatagcaacattgaatcaactgaggtttcacatggattccaaactactgccctcactgaggataaacctgctgatgatggctacaactggcggaagtatggccacaaggcagttaagggtggggagtatcccaggagctattataaatgtacccatttaagctgtccagttaagaagaaagtggagcgctcatctgacggacagattactccaatactttatagaggccagcataaccaccaacgaccaaccaaaaagagtccaaagatggtggcgctatacttaaatgaagcagatgtttcccgtgagaaggaagatgcatcaattagatcagaacagggctcccaagattattctggaaaattcaaggcatcaaatgatggtggtccttcatcatccaggaggggagataggggtgagcaaatatcgggctcaagtgatagcaagcatcaaggcgaggaagaagtgaaggttgagggtagagctactagtgatggaaatgcgaacaaaagacatgtgccagctccagctcaaagaatcattgtgcaaacaactagtgaggttgatctttcggatgatggctaccgatggcgcaagtatggtcaaaaagtactaaaagggaatcctcacccaaggagttactacaaatgcacgtaccaaggatgtgatgtgaagaagcatattgagagatcctcacaagacccaaaggctgtgataactacatatgaaggcaagcacagccatgacgtgccagcagccaggaacagtagccattcttccgctaatgccaacgtatcgtcttccagcaatttacctcccaagggacagggggcaacggtcgtcgtgcagagatggttcgcggaatgcatcttcagtttcttccttccagttaaaggagggggggggatggcaggaaatttgggtggggtttagcggggtaaattgttttttttttcagtccatttggggtgtgttgtttcccaagccccgttgggcggggggtctgggctttgtgggtgggttttggcatgggtttagttggggcttgggggttcgttgggtaggggggaatatgttcattttccttttggaattcgacccgtttcatgggaaaataaaatttatgccttccaaacaggcccttggcaaggggaaaccccgcatagcttccttcccaaaaaaaaaaaaaaaaaaaaaaaaaaaaaaaaaaaaaaaaaaaaaaaaaaaaaaaaaaaaa

SEQ ID NO: 22409 - DNA, 1124 bp, Oryza sativa
  Clone ID: TF_OsC62508_1
gcacgaggctcgttctcgtctccgatcactctcctcctcgtcttcgtcacggtctcctcgcttcgctagctcgcttgcttgctggctgagctgtggtacgctcgccatggcgtcctcgacgggggggttggaccacgggttcacgttcacgccgccgccgttcatcacgtcgttcaccgagctgctgtcggggggcggtggggacctgctcggcgccggcggtgaggagcgctcgccgagggggttctccagaggcggagcgagggtgggcggcggggtgcccaagttcaagtccgcgcagccgccgagcctgccgctctcgccgccgccggtgtcgccgtcgtcctacttcgccatcccgccggggctcagccccaccgagctgctcgactcccccgtcctcctcagctcctcccatatcttggcgtccccgaccaccggtgcaatcccggctcagaggtacgactggaaggccagcgccgatctcatcgcttctcagcaagatgacagccgcggcgacttctccttccacaccaactccgacgccatggccgcgcaaccggcctctttcccttccttcaaggagcaagagcagcaagtggtcgagtcgagcaagaacggcggcgccgccgcgtcgagcaacaagagcggcggcggcgggaacaacaagctggaggacgggtacaactggaggaagtacgggcagaagcaggtgaaggggagcgagaacccgaggagctactacaagtgcacctacaacggctgctccatgaagaagaaggtggagcgctcgctcgccgacggccgcatcacccagatcgtctacaagggcgcacacaaccaccccaagccgctctccacccgccgcaacgcctcctcctgcgccaccgccgccgcctgcgccgacgacctcgcggcgcccggcgcgggcgcggaccagtactccgccgcgacgcccgagaactcctccgtcacgttcggcgacgacgaggccgacaacgcatcgcaccgcagcgagggcgacgagcccgaagccaagcgctggaaggaggacgctgacaacgagggcagctccggcggcatgggcggcggcgccggcggcaagccggtgcgcgagccgaggc

SEQ ID NO: 22410 - DNA, 933 bp, Oryza sativa; identical to SEQ ID NO: 13126
  Clone ID: TF_OsC329265_1

SEQ ID NO: 22411 - DNA, 1386 bp, Oryza sativa
  Clone ID: TF_OsC146479_1
ttttttttttttttttcagagcaaaaaatggagttccaatccttctgtgtttcttttttccaatctttatttatgtatccattgatggttccaaaggagaaaacaaaaatcttcaaccaaaccattgacaaagtgacttgtctctctcaatcctttctccaatcaacagtgtgcaataataatattgtaccgattcttttctgtatgctactgtagagaataaccaaaatgaggagggaaaaaaactaaccgacaattggcaagtgaacaagaagccaaaaactacaggagcttgtctggtcttattggaggccggaccgggcccacctgtctgtgtcagcatcatgtcatggccgtgctctccgccggctgctcgatcttaacccctcctcccatctccagcccgtcgccggcgcgccgccggaacaccatggcgcactccggcagctcgccgagcccctcgaacaacgcctcctcctcgcccagcccctccccgcctaacccgccgacgtcgccgaactcgtcggggaggagcgcggccgtgccgacgacggcgccgccaaagaacatcggctgatcgtacagctgcatctcgtcggccgcgtcgatgtcggagggcgaggtcgacgtggctgggacggacacgacgtcgtagagccaccggaactcgtcgcgcacctcgatggccgccgcgccgccgccgccaccggtggcaggcccggcggtgacgccgtactggtgcgtttcctcgggttccacttccaccaccggctccggcggactgcaggcctgcgccttgggcttctgcggcgccgcctgccggttctgcgccctgggcaccgtggcggagtggttgtgctcgaaggagtaggtgacgatcaccgtgtccgggtcgttccggctcctctccacctgcttcctcgccgggcaccccttcgagctgctgcaccggtagtaagcccttggaaagggtgagcctttgatgggcttctggccgtacttccgccacgcccacgagtcggtcggcgtgttgccctccccgacgcccttcggccgcggcccggtcacgtcggccagcggcacggtcaccacccgcttctgcgccgaccgcctcgacctcccgctaggcgacgccgccgccccagccgccgaccgctgagcagctgccggtgacggtgacaccggcgaccccgggcaatccgccgcagcgacgtcctccccgcccttcatctgctcccgcccgccgccgccggacatcgtcggcgacgacaccgccgccccgtcgctccactcgccgtccatatatatacacaagagccggccggcggcgtgatctgtccgccgggaatggatggatcaaggaggcagttcttggatggatgccgt

SEQ ID NO: 22412 - DNA, 1278 bp, Oryza sativa
  Clone ID: TF_OsC10544_1
cccatttctcacttactccggcgatcaccgtggttgagcgtcggcggcggaggaggaggcgatgattaccatggatctgatgggtgggtacgggcgggtggacgagcaggtggccatccaggaggcggcggcggcggggctaagggggatggagcatcttattctgcagctgtcccagactgggacgagcgagaggtcgccggcgccggcgcaggagcagcagcaacaggtggactgcagggagatcacggacatgacggtgtccaagttcaagaaggtgatctccatgctgaaccgcaccggccacgcgcggttccggcggggcccggtggtggcgcagtcgtcgggcccggcggcgtccgagccggcgccggtgaggtcgtccccgtcggcggtgtcgaggcccatgacgctcgacttcaccaaggcggcgtccgggtacggcaaggacgccgggttcagcgtctccggcatctccgccgcgagctcgtccttcctctcgtcggtcaccggcgacggcagcgtgtccaacgggcgcggcggcgggtcatcctccctgatgcttcccccgccgccggcgaccagctgcggcaagccaccgctgtcctccgccgccgccgccatgtcagccggcgcaggccacaagcgcaagtgccacgaccacgcgcactccgagaacgtcgccggcggcaagtacggatccaccggcggccgctgccactgctccaagcgccggaagcatcgggtgaagaggacgatccgcgtgccggcgataagctcgaaggtggcggacatccccgccgacgacttctcgtggcggaagtacgggcagaagcccatcaagggctcccccttcccacgaggatactacaagtgtagcacgctgcgcggttgcccggcgaggaagcacgtggagcgcgacccgaccgacccgtccatgctcatcgtcacctacgagggcgagcaccgccactccccctccgccgccggccaggaccacccgccggcgccgcctccgccgctggcgctgccgctcgcctgagatacccccggtgaagaagagtgagaattagcttgtcggtcatcataattaccgttagaaattatttttttcgtttttctctctttttttttcttttttttactgcatcattgtagaactagcgtgtaaaacaattttaggagactttgagactgagcttttactgaagaaaaaataaagcagaacaaaaaaaaaaaaaaaaaaacctgcagcccgggggatccaaaaaaaaaaaa

SEQ ID NO: 22413 - DNA, 1436 bp, Oryza sativa
  Clone ID: TF_OsC171299_1
atggccggagcggagtggtcgccgttcgacggggacgccgccttcgcggagtactcgtcggcggtgctggccgagctcggcgggtgggcggcgccgggcgaggaaggcggcgcggggatgatggtaccggcggcgctggatctgccggtggatgtggtgggggcggcggcgcgggaggaggaggaggaggaggaggaggcgccggcgagatcgggcgacggcgccgccgccgccgcgtcgtcgagctctagcggggagcccgccgcccccgacaagcgaccggccgccgccgaggcagcgccggcggcggcggcgacggcgacggcgacggcgaagaaggggcagaagagggcgaggcagccgcggttcgcgttcatgaccaagagcgagattgaccacctcgaggatggctacaggtggaggaagtatgggcaaaaggcggtcaagaacagcccattcccaaggagctactacaggtgcaccaacagcaagtgcactgtgaagaagcgcgtggagcggtcttccgacgacccttccgtcgtgatcaccacctacgagggccagcactgccaccacaccgcctccttccagcgcggcgtcggcggcgccgccgtcgcggcgcacatccacggcgcggcggccgtcgccctcgccgagcaaatgtcggcgttcgtctcgccgccgccacagccgcatatgctgtacggtttaccccggttgcacccgccgtcctccgagaccgccgtcagctgctcgatgccgacgacgacgtctttgcaggagctgaacaatagcgaggggctacaacgccctggctataataatagcccccaggcggcggtgaccatcgcgcagcggccgccgtcgccgtcggtgcctccggctgtttcgtttgacaaggggctacttgatgatattgtgcctcctggagttagacttggatgacaatactcaaatatacatgcatgacttatctccctacactagatatttgaagtgtcatctcatctcttggcatggaggcagctggcaggaaggcaaatcacgcagctagggttctttgattagctcctgctgaaatccaccgtctcagtcattacctaccaattaatggcttggaaattaggagtatatattaattaagcttgctccagcgatggagagctgacttacaagtgattgcaaacctcattggtcagccggtggagtatttttcatggcaaacttttatgtgcccgattaaccgtagtctgtgtatgcagttggcagcactaggcattccctgactgtatcttcttggcagaagaatctctacctatgttaactacttctgcattataatgtgtatgtaggttggtgtagatatatactactagctatatctatgtacacttatgctaaattaatgttgtgctgtagtaaaaacctgcagcccg

SEQ ID NO: 22414 - DNA, 3792 bp, Oryza sativa
  Clone ID: TF_OsC57056_1
ggctatccggcggcgccgcccgggatggagcgccctgccccggaggcggcggctgcggcggcggagccccctggggcgaaggcggaggaggaggaggaggggccgaaggatgtgggggtgaagggtacggggaaggagaaggagacagagaaggttgaggccgagaaggagatggaggggaaggggaaggggaaggagtcgatggaggtggaggaggggaaggagaaggagggtaaggggaaggcgaaggagaaggagaaggagacgaaggtgaaggtgaaggaggagggtggggaagagaaggagaaggggaaggttgaggtggtggaggcaaagcggcggccggctggtgttggcgcggagacacccatcctagcggtgccgatggtggccgtgccatgcttcttggcgtctcctgcatttgcgggtcacttttcaatgagccatcaagcagctttggcgagtgtgacggctcaggcacaaatacaattgcagtcaccaaccacaccatattcagaagggctgcccagtccatttcctataacacctaaagctgtaatgcccctgcagcgatcaccttcaggaactgaagggagtgttcgcagatcagtgttagagaagtcagcctcatttcagtcaagaccacacaatcatgtgtctgtaaacatggttggtgatggcttcaactggaggaagtatggtcagaagcaagtgaaaagtagtgaaaattccaggagttactatagatgtaccaactctaattgcttggctaaaaagaaggtcgagcattgtcctgatggccgcgtggtggaaatcatttacagaggaacacataatcatgaaccgccacaaaagaccagatttgtgaaagagagagtggctcatattactgcttcctctggagatgatgaaaccttgggacttgtgaacaatgaaattatagaatccccgtcaccgggatgtaaattagagccgggtgctgtctctgaagcttctgaacagcagcttttttgctcaagtgattgtgaaggtgatgctggtaacaaatcagaagatgatcatcctagcacagagcctcagccaaaacgaagaataattgaaactagcacacctttgactccagttctcagaactgttagagagcaaaagattattgtacaggctggaaagacgagtgatgggtatagatggcgcaaatatggacagaaaattgttaagggaaatccaaaccctaggagctactaccgttgtactcatgatgggtgccctgtccgtaagcatgttgagaaggcaccagacgatgataacaatattgttgtgacctatgaaggtaagcacaaccatgatcaaccgtttagaaacaacagtgagtcgaaggatgggcctgttcctatgatcattccagcagagacaacatctgagcagcccagcacaatgacctcaacatcagaacagaaacagccgatcagtctgctgaaggatggcggcgatgagcccatgaagggcaagacttcagaaatcggtggtgagaaggcagtggagtctgcgcaaacccttatcagcattaaaactaatcccgatgacatgaagaataccctcttgaaagatacttccgcggtagttcctgtccaaaataattgatcctgtgaggttagggttgattcgattaatgtattagtttgtggtatttattggttcggggagctattgttgtgttagattctgtacatgagttgagggccggcattctgtggagcaccattggatagaagcatctaggctcgggaagccatgatacttacagttgtcccccttgtatagatctccaaacccctagtgtgtataggtactgtatcgcttactgaggctaagcaacaaggagacctgagaaacttcatgtgcggggtgctctgcttggattcattgcacatctaagccgatccatgccatgatatgtttattgtatctggtgttatatcataaaaacgtgcaaggtgtatgccatttccattctatgaacagagtaacacaggctgcatcgcttgtctgctcggtgagcagtagacaaggtgagtttgggcatttcatgtggttgtatgtggaacatttgtagctgaactgaacgactacaagacacattgaatcagaaccaggcaaggagcttttgctgctcacttgctcaggcgagctcactgtaaccgtgcagatctatgtacagtgcaacaagaagatgatggtcttcatcatgtttgagccaatgcaacgcttggggcggccttgaactccttcaccgccttcttgacggcctcgacgtcgatgtcgatcagcttcccggtctccgacgcgacgacggtgcagcccttcttctcctccaagtacggcaggaacagcctcgccttctccttggatgagaagagagccacgcatggcttgtccctggcgttggcgagctggacggcggcggtgttggtcgcgacgacgccgacggagtcgttgatgaggcaggtgagttggccaggagtggtgatgaacaggatattggtgtccttccccacagtctcctcaacctcttccctgtgcttctgatgagggatcacaaacagaggcttcagaccattgtcttcagagctgccaagacaccaccatttttttggctttagttctaccttctcacaatcggtaccaagctggaaatgtaagtgtaagagcagccgtgcttgagtgagtgagtgaggtgaggtgaaaaacctgatctccttggcgatctcagcccaatgctcgagagggaggaggcagtcatcgtcccccctcgacctcatgttggcgaaggagtcggaggcgatgccgtggacgacgacgaacttgcccttctcgacgccggcacggctatatttgtcctccacgaacgctcggagcttcttggagatggacacccgcaacggcggtaccgggtgctccggcacacccttcgctggccgcccaatccactccaacatgtcctgatacatgttgtagccgctgtcggcgaggttggtggtcggcggccggaacatctcggtgaggaacagcccggcgccggcgctgttgacgttggggtaaacatagccgaccttgtcgcgggccgacgacatgaagaggaagagcgcgtgccctatcccggccaacttggtcgatatgatcagatcatagtacctgttcttgagcacgccgagctggtgggtgtactcggcgggctcgggccagtcgtcgtcggggtcgtagacgtcggcgtacctgacgttcttgcacatctcgtacacctgcttccccctcgccgatgccaccacgtccaccaccaccccggggtacctgtcccgcagcagctgcaccaccgggaagaagagcacgttctcgtacaccccgccggacaccacgcagcacgcccgccgcacgtcgcgccgcaccttggatgccaggctgtccagctccgggttgtaccccgccgggaaccgcaggaacccgtacgggttcgccgggtcctccggcggccgcgggtcctcctcctgcttcccccccgagaacgcgccgcggtagtcgaactcgtcgtcgggcccgtcgtcgaacgggtccagccacgggttcttcttcttcgccgacgcccgcgccacgccagcgccgccgcgccgccctagctgcagcaggtggcagcagcattgcctcgctatcggcagcgacggcggtgaggggagcttcgccggcgtgcccatgacgtcgacatggttggcgcctgcagcccggggatccactagttct

SEQ ID NO: 22415 - DNA, 612 bp, Oryza sativa; identical to SEQ ID NO: 13137
  Clone ID: TF_OsC338525_1

SEQ ID NO: 22416 - DNA, 542 bp, Oryza sativa
  Clone ID: TF_OsC153308_1
caactatacaagatcttcagcagctggctccctccatttaggttgcaactgacatgcaactacctgagttctacgtacggtgaccaccttctcccatggcatcaaattcacagatgaataacagaggggccggaggagggagaggccaaggcgacgacgaggagccgacgccgacgccgccacctgcgccgccgccggagacagcgccatccactgtcggcggcggcggcgacggcgttcagctagtgatgcccgaggacgggtacgagtggaagaagtacgggcagaagttcatcaaaaacatccagaaaaacaggagctacttccggtgccgggaccagcggtgcggcgccaagaagaaggtggagtggcacccgcacgaccccggcctcaacctccgcgtcgtctacgacggcgcccaccaccacggctccccctcgtcggccgccggcgaaggaggcacctccgctgccgccgccgccaaccagtacgacctcagcacgcagtacttcggcggcgccggcgggccccgctcgcagtga

SEQ ID NO: 22417 - DNA, 1953 bp, Oryza sativa; identical to SEQ ID NO: 13140
  Clone ID: TF_OsC2081_2

SEQ ID NO: 22418 - DNA, 1205 bp, Oryza sativa
  unsure (1)..(1205): unsure at all n locations
  Clone ID: TF_OsC132992_1
atggcgctgattgccactggtgctaccgctactgctactgcggcgccggtggctagcccggctgcttcttccatggcgtccgagctgatggcgcaggggcgggagtccgccgccgtcctggaagccctgctccatggcgcgtcgctcccgccggcgcacggcggtgcccacgccctcgccgccgagatccttcgctgctgcgaccgcgcgctcgccgcgttgcgcgccggcggcgatgccgaatcgtcgtcagccgacacgaagcgcaagccggcaaccgcccagccgtcgacgcgccggaggagaaggtatatatatatgtatgtctcctcccgttcttgcgatggcgcgcgcgatcgagcagcgactcagcaagagatcttttgcagagcgacggcgagcggcggcggagcggcggcggcggcggagccggcgagggtggagaaggcgcggacgtcggaggacggattcctgtggaggaagtacgggcagaaggagatcaagaacagcaagcacccgaggctctactaccggtgcagctacaaggacgaccatggctgcacggcgacgaagcaggtccagcagtcggaggaagacccttccctctacgtcatcacctacttcggcgaccacacctgcagctgccagacggccgccgccgccgccatggacgacgacgacgacgatgaaaactcgcagcatttcgtcatcaacttcgggccggccaccgcgagccgcagcggttcgccgcctctgctctacgacgacggcgacgacggcgatgtctgcgcgtagacggcggccaccccaccgtcgtcgaggcagtccaggtgctcgccggagggagacggggaggaatccggggtgaagatgagcaaggaagagccagtggactcgtgtccggggccgtcagcggtgagttcgccggccgacgtcgtttcttgttcgtctccggcaatggagcccgatctgctgggctgcttgaactgggatgatgactttggagacagctcgttcgtcgacgccgatgagttcatgaatttcgatgagattgatctgtttcaaatctactcctagctagcattgttatgcgactaaattgcgtgataaatggtactaataggtgtgtagtattgtaggatgtgtttctggctttctgcaagtattattgttgcaactatgaggtgatcatgaatgccananna

SEQ ID NO: 22419 - DNA, 1545 bp, Oryza sativa; identical to SEQ ID NO: 13145
  Clone ID: TF_OsC339450_1

SEQ ID NO: 22420 - DNA, 1115 bp, Oryza sativa
  Clone ID: TF_OsC35308_1
tggccgcccgcccggccgcgtacccggccggccgggttcctgtcttcttcttcctctccctcttccctaccaagcgagaccactcggcccccacaaaatctccgcttcttctccgagaccgagatggcactcgactctgttccatcctaccccagcgatcttggatccagcagggccaggacgccgcagcagcaaagggtcagccccaggaaggaggagcggacatggacgaccgacacctacgcgccgtacgacgacggccaccagtggaggaagtacggcgagaagaaactctccaattccaacttcccaaggttctattacagatgcacctacaagaatgacatgaagtgccctgctacgaagcaagtccagcagaaggacactaatgatccaccattgttctcagtcacttacttcaaccaccacacctgcaacagcagctcaaagatcgtaggcagcactcctgattctactgtgcagtcgaggaaagccatttcgatctgcttcaattcacatggccaaaccggtgaacagcccacattcttgtcatcatcagcttccttgttgtcaccgagcatgcagtcgtacagttccaaccagcaacctgacatgaacacctacagtcgccagtttcagtgggcagacacatcgtcatctacaagcaatgctccggttaagatggaggcggacgattatgcagaagcaagtgcttcacccagtaccactggtgctctgtcgaggacattgctgccgatcggtcagtcaagatgcatcgagtatttccatttcttgtgatgatttttatggaaagtgaaggagatgcatatacattctgaggagcctcttggatggttccagatagggttttatattgggaggtgaggatgttgtgctgatgagattccatatactatagtggcattatgttgttttctttgcatgtagattcaagccagatttttgtgcttgaatgatgtaaagaactgaattggcgtttctctatctagtaggaaggagtacgtgatacagaaaaaggaaaaaaaagcagaacctgttaaattatactagtataaaattaaggaaaaatctgacagtaaatctgcctggctgtt

SEQ ID NO: 22421 - DNA, 678 bp, Oryza sativa; identical to SEQ ID NO: 13153
  Clone ID: TF_OsC348254_1

SEQ ID NO: 22422 - DNA, 900 bp, Oryza sativa; identical to SEQ ID NO: 13148
  Clone ID: TF_OsC313723_1

SEQ ID NO: 22423 - DNA, 1331 bp, Oryza sativa
  Clone ID: TF_OsC227792_1
atggcgtctcctgatggtggcgttggagacggcggcgcggagccacatgaagttatggacgacctgctcgagatgcgcgagcaagcggcgatgctccacagcatgctacatgggacatcgccgtcgagctgtgcggcggcggcgagcaccaggcagctgaatcagctgatagacggggtgatgagcaggctgcagtccagctcgctgtcggtgatgtcgcctggaggaggaggaggaagaagaggatcgggcgggaggaagaagaaaggcgccaaggccgtggccgggccgcacaggcggagcagctccggtagaagaagatcgaaaagtccttttgtcaggatggtcacgaccaaggagctggaggacggcaggcaatggcgaaagtacgggcagaaacatatacaggactccccaaataatccaaggagctactacaggtgcacgcataggccagaccaaggttgtatggccacaaagcaagtacagacctccgagtctaactcgtcggagttcgtcatcagctactacggtgagcacacctgcagcgacccttccaccatcccgttcgtcgtcgaggccgaagctcccgctgcagactacgcgaacctcatcagcttcggatccagcggcggcgcgagcacaagcagagtcgaccctcttcgtcagagccgccatcgtttgatggcagaagccgttgatccgacgccgtcctgcagcttcgccaactgccactctccggtactgtcctcggagtgcgccagcgaggcggcggcgctcagcagcagcctgccgctctccgccgtggtgggatcggcggtgacaacgccgtcgacgtcgatcgtgggttcagcgcctgcggattacgactggccgtcagggctcgccggaggtgacatggccggcagcttcccgtcctctcccagcagcctcgggttcatgactggctcctttgggaatcttcctggggatgacgacgacatgtttggcttcgatccttaacaagggctgtgcatgcatacattcttgccatgctaattattgctactactaatattcaagaaaaacaagtccgctatttgcatgcagaagtgtatgcatgcatgcataatactattgctgtgaggctatagcaaattagcaatacttgtagtacatgtgtgtactgctattggaggaaatccaatatatatacggtacgtagtaaatatgtgtattagttgatcgctgtactagtgagttgtgtgtatgtgattttgtaagtattgaaacataatttgaaattaatatatagtagtgaaagtaatatataagaggaaaaaaaaaaaaaa

SEQ ID NO: 22424 - DNA, 2066 bp, Oryza sativa
  Clone ID: TF_OsC62577_1
ctctcttcttcttcctctagtcctctcctgcctgcttcgtctactcctctcccaactccgatcccctcctctgcgagctcccggtggccggacccgtccggcgacgacgatgagccgctcgccggcacggcgccctgctcagatctgaagagctgcgagaatccgaggctgctcttgctggtttagctccggcggcggcggcggcggcggcgatggaggaggaggtggaggcggcgaacagggcggcggtggagagttgccacagggtgctggccttgctgtcgcagcagcaggaccctgcgttgctcaggagcatagcttcagagacaggagaggcctgtgccaagttcaggaaggtggtctccctcctcggcaatggcggcggcggcggcggcggcggcggcggtggtggacatgctagaggcaggatggccgggagaagcaggccttcggcggtgctgagagagaagggattcttggagagcagcagcggcggcggccagctggggatgatgatgtccggtgctgccactccgtctactagctccgccgcgcatttgcgcaaccggattggcggaggcagcggcgtgccaccggattcgttgcgggggctcgatttggtcagctcgagcagcaagggtggtgctcatcagttcgatcctccgaagctggtgcagccgttgtcggttcagttccagttcggcgctaccgcgcataggtacccgttccagcagcatcagcatcagcagaagttgcaggctgagatgttcaagaggagcaacagcgggatcagccttaagtttgatagccctagtgccaccgggacgatgtcgtcggcgttcatgtcgtcgcttagcatggacggcagcgtggctagcttggaagggaagccgccgttccatttgatcagcggcccggtcgcgagcgacccggtgaacgctcaccatgtgcccaaacggcggtgcacggggagaggggaggatggaagtggcaagtgtgccacaaccggaaggtgccattgctcaaagaggaggaagttgcgaattaagaggtcaattaaagtgcccgccattagcaacaaaatagcagacatacctccagatgaatactcatggcgaaagtatggtcagaagccgattaagggttcgcctcatccaaggggttactacaaatgtagcagcgtccggggctgcccagcgaggaagcacgtcgagcggtgcgtagacgacccggcgatgctcatcgtgacgtatgaaggtgagcataaccatactcggctgccaacacagtcagcccagacctaggaaacctgtagtatttcacgcgagccattcagaaaatgcagaggctccaagcttttgctcggggacggtcggaccggtcatgtgaaagtaggtcagcaaactgtgaaagtaggagtaacaaacagggaagccatctgatgagagctatagtgattcgcttgggtccttaactgagctacaagccatgtcgcatttctgctatggtctcaatgttctactgtccaaagtggggacatacacaacttgttctctcttttatgagctatggcactatcagattaagagagaatggaggaagaacatgtgattggatagtgaccggcaagatttgctcaaagaagggagggattaggtttgaagatttcaaaggaagattgacaaaaggaagtgaacaactgaaacatcgtgtaagcctggaaaaggataagcaggatttggcttttagcgtgcacaagtttacttgcaatgacttgcctctgtatgttgcttttgctttattgaaagatcaaaattttcttttggcagaagaatcattcagcattaaagctgtttctacttgctaacatactgacacacttggaccatcagggtttttttttccaggtgttagctgttgggtatgatttctcagtcgtacttctgcttttgtgtaaagcattccatgttatgttaatgactttgacatcaactgctatcctgaggttctttaaaagctctgcagtctacacaataaatggaatctcaaacatcaaatattcataa

SEQ ID NO: 22425 - DNA, 1440 bp, Oryza sativa
  Clone ID: TF_OsC246772_1
atggcgcccaatccggtcgggcatgcgcctttgtgttgcagactggtgcagggcaactttgaaactttccctcaacaggacttggtacctttaacagcacaagaggttcattctaagtgcattacattcggtcgagcagagaacctgccttttatccctttggcgacttcagcgctggtctcccaacatactggttcttcttctgtaaatgtgacaccgttgcaagaaattctgacttcgccgtcgcaaataagcaatgtcaacactgaatctattggggtgttacaagggctcccagcttcatccatcgttctggatagacctactgatgatggatacaactggcgaaagtatggtcagaaggcagtgaagggtggggaatatccaaagagctactacaaatgcacccatctgaactgtttggtcaggaaaaatgtggagcactctgcagatggacgaatcgttcagataatttacagaggacaacacactcatgaacggccctcaaaaaggaggtttaaagattgtggtggtatatcagatgatttagacgatttcagtggcaccacgggcacttcagtcagatcacagcctgattacgatgattactgcagaaagcctatcattccaagtggcaccatggttgctcctttagtgaaaaagattgaagatggtgatgaccaattgtctggatcaagtgataaccaggatgagcatgatgatgaggtgaggacttctgatggagcttccggtgatgccagtgcaaatgaaaggaatgtgccagccccaggtcaaaagattatagtgagtacaaccagtgagatcgatcttttggatgatggttataggtggcgaaaatatggacagaaagtggtgaaaggaaatccttacccaaggagttattacaaatgcacctacctaggctgtgatgtaaagaagcaagttgagagatctgttgaggaaccaaatgctgtgataactacatacgaggggaagcatatccatgatgtgcctgctgcaaggaacaaaagccatgtcgtagccaatgcctctctattgcagaacacaaagtcgaatacctactgcacagagcaatcctacacaacgatcacttgctagattctgccatacatccgtctgattgctcatatgtagcatttctgaagctgtgtattttatcggccgtacccactaacgaggcgatttttggcaccattgtgccatgtatttttcctgctgcaagcatacgttctcctatttgggaacatccgaattgtaatattgatttctgcaagtgctatttcaatgggatatgcagaagttgtgatttctgaacctgatggagcttcactcttggtcagaccttttaatgtgtgatgctgttgtactagtacatatcaaaaaaaaaaaaaaaaaaaaactcgagggggggcccggtac

SEQ ID NO: 22426 - DNA, 5649 bp, Oryza sativa
  Clone ID: TF_OsC22739_2
ctagcgagactccgagcaagcaaccaataagtgatcaatcgtctcatcgcattgatcacaaagagggcagcgagccgggtgtgacagtcctcgactccgaagacgatctgctgtccaacaacgattcagtgcgaccagccacagaaagtaccgacagcgcgggggcgctagagacttccaaattggcttgtgctcaaggctggttcttcccgcgaagagaagacgatacgccgagcgagcggagtaggaccccgagctttcccaacgccaagagatcgtgtccggttcctcacctagctgaatcgatcgcagaatgtcccaaagcttgagatattccaggattgcctgaatccccagtgccgcacagatgtctcgaatccacctcctgtcttgcaaagcctcagctaccgttcgtctgttccggaaccgagcgggaacagctgcgtagactgcgggcgccagcgaccgaattgaagagccctgcagccaacaatcctcccagaaccgtaccagcttcccatcgcccactgagcaaaccaaagaaatcgagacaaggttgcgttccttctgtgaaactgggatgttaagtccttgccacggcttatccgacgaggttctttgttgccagagccatcgcgacctcaaggctatacccaatctctcaagatcgaggatgcctagaccaccatactctatgggcgagcaaactcgagcccacgcaacgcgacagacaccgccgtttgccgtggccttcccggcccaaagaaaaccacgacggatcttatcaattcctttaattacccacttaggcgcattgattgccatgagcaagtagatggggatagaacttagtactgctttcaccatggtggtccgaccgataggagtcatcaaatgagacatccagaaaggcagtcgacgaccgattttgtcaatcagcggttgcaaatcctcttttttcagacgaaagatggaaagagggagccccaaatatgtgcatgggaaggatgcgacctggcatggtaactcgtcatggaggatctgaagatctgcctcattacattggattggaagagccgaacacttagcaaagtttgttcgaaggccagatgcttcaccgaagatggagagaacctccgtcgccacatggatctcctctactgccggacggataaatgcgaccacgtcgtccgcatagagcgagacccggaaaggaatccccaacggtcgcagcaagccaacattctcggccttcgcaaggatagaactcaacacatccattgctaggatgaacatcatcggggagatgggatctccctgccgaacccctcttcggtgtatgatcgggcaacccggctcaccattgatgagcactcgcgagctggctgtccgaaagagcatagcaatccacgagcgccatcgaacgccgaaacctttatgctccagcacttcgagaatgaactgccatgagatggagtcaaaggcctgagcgatgtccagcttcaacagcaccgaaggagttctacgatcatgcaggtattttgctgattgccgcactaacataaagttgtcttgaatgcagcgtttcttgataaaagcgctctgatttttggcgaccaaagagtctagcttcggcgagagacggcgtgagagaattttggtgaaaagcttcacgaagctgtgtaccaggcaagggtcgtccttgatgatgacccagcagcggtggtagaacatgcccgagaagccgtccgggcctggtgccttgtcatgcgggctgtcagcaattgccttccgcacctcatcctcggtgaaaggatcttccaactcctcgatatgctgtcccctagattcgaagaaatcaaggttcaccgagaaattacggtggctcactgacccaagaactccatcaaagaagtcgtgggcaagggcagccttctcgtcaggggcagtagcgacctgtgagccatgctccagttgctgcacaaaatttcttcgtcgtcgccaggcagcatgttgatgaaaaaatctcgtgttggcatcgccttctcgcagccaagagatgcgcgacctttgtcttgccatagttcgctcaagggaggcaagagcaaggtacttccttttcaattcgcgatgaagaaaacgctcttggccggaaaggccccgcgattcttccatgcgatcgaacctgccgatgagttcccgggccatctccaattgcaactttacattgccgacctttttgtcactccagctttggagagcacgaccagttgatcttagtttgaagtccaaccgggagattggatcctgcagtctacaatcagccgaccatgcttcctgaacgacctcctcaaaaccttccaatttgcaccaaaaattctcaaaccggaacctccctttcgccggaagagaaggcagtgttgaaagaagcagtggacagtgatcagaaatcaccgaaggaagagctttgaggaaactttgtgggaagagctcttctaggtccgaagtaacgaatattctgtcaagacgctccaacgttggatgttcccatccattcgaccacgtgaaagagcgtccattcagatgaagttcgttcagcgccaggtcattgatcgcccgccggaagcgacccatcatccttctgttcaggttggagttatttttatcctgatcttggtaaatcaagttgaagtcaccaacgaccatccacggcccatcacgggtgcttctggtgtccctaagttcctgcagaaaacgcaccttatctgcgtcgggttgtggaccgtaaacgaccgtgatccaacaggaattcccatcgcaaaaggagaggcgcgctgtaagagagaattctcctagagaatgcgaatcgcaagaaacgacgctacgatcccaggccaagagcactcctcctcttgtctgaatggagggcaggtagcaaaagtctgctagattaggacccaaaaattgggtagccaacggtacagagatagcatccagtttggtttccaccgcgctggcaggaggcggtagacaaatgccaaagaggtcggccagcgccaacatctgatcctgagacagctccttctcgaacagctcgttgtactgctggatagtacacacagtcggtgcaggcgcagctgggacagcagtatccttctcccccatcttcttagctaacactgactggcagcgggagaaagttggggcgccatgtgtcgcttgaagcgcttgacgcacactgcgacgcggcgtctgcagcggcgctggttgcggcggctgctgaggggctggtgggggaagcagtgccggggggattgctttcttggctctcctggagaaggtgataagcgtcggcggcggagctgaagcctcctccacagccgctgcgaacacggcagtagatggagcaggcggagatgcggccatctcatctaccggaacgacctcatcgggaaacggccccccgatctcagctaccacgaccaccgcggaggcagtcggcaaagccgagaccggagagaaaacttgtgataacggcgtcgaggacgccgccaaatgctgttctgggcacaccaaaggagcagagacagcctccactccaagtgtcgcgtctggcacggagtcaggcggcggaagcgctgactcacccggcgctgccattgccatgcttggctttgctgccagaacgaccgagaggaacgggtctgcatgggctgaaacagacccttgaaggaaggtagaagcgtcatggtgggcctcctccattgctagcgggctgggctgtgactgcacctcaggccgagacccagctgactcaacagccggcccagcgacagtcgatagcaccaaaccgccttgttgggcctccaacccaactggagaggcggccagcccaaccatgtctctcctcgaagagactgccgaatcagcctcagacgccgcgctcacaggcaagacaaactccctgtcctcctgccccaccacagagccaagagacagagattgcagagcagaactctcctttgcctttgcgaccgagaccggctcagaagtgtcttgtccttttcgtggctgccacctgcaacagctgcgaacagggctaagctttaagaacttgcttttccactttagcaccttttgctgacgtcgccgaccacgaggcctcctccgccgcgccatggccgcctccgcgccggccacagcccggacaggcttctccggcgccagcgccccagcccgccgaagaaggcggccggaacagagctccgccggcatcaccgccaccggagcggccctgtgcccaccgcctccaccgccgcctgtcgagccctgaccggactgcggcggagggggggaaccatctcgtcgacctctggaggtgtggaagaagtgccgtcgaggagggccgtcgtccgagtcgtccgagctagggcgaccagaatcaccgctggacggcgcgaaagggaggtacggctccggcggcgagatgtgatcctccatggcggtgaggtggatgagaacgacgtagtcgaggtagcgctcacaggtgccctgcggcgtgacaaccgggccaccatcctcgacaatgcgcagccatttctccttcgggatggaggcagggtcggaggtccaagcgtagagcttgaagaccgccatgtcactggctgaggaactgaccggatcacaggagatgatacggcaggaagaaccgagcaccgcagccgccgtcgcctcatcccaggcgtgaccggggatcccttccaggtgcagccgcacccggaaaagcatcgacccctccctcgcatgcagctgcctcgaccaaggcgcgaccaagagacggaactgaccgagagggatggagcggcggcgcgcaacacggtcgaagatttcgtcggactggaaggtgacgaggaaatcctccgggaagaaacggcgtaccgagaagctgtgaggagacagagagaactccgagcatagctcgtcgtgcacctgggccgcggacggcgtacgagccgccccaaccaccaccgccaccaccgcccgccggagctgcgcctcccgctccctcatcgcggccgagaacggcagcacacagatctccctgtttacccggagctccgggtcgccaggtggaacatgctcgaactccgaaggggggtttgcgcgcgccggcgacagagaggcgcagccacgctccgcgcattcaaccggcgaccgagggggtgagcatgacggcgaagagaacggcacgggtgggtcgacggagggacttcttggcggcgttggccccctctgtgggtggttatgaacgcccatagaaaatgtttgagtggtctgtccgtctgcagagcgtgcgaccgatttctggaccatgcagtttgcttgggcacactgatagtagaatatcgtctggcatggctcaccctgaattgtgttctgcccacacatcctccaatggtagccatcatcagctaggtatatgttaccataatctgtgtgggatggcggggttgccacctgaattactgcagtgttcgacgaagaacccgtgtgctgctgtgcagtagatggtgccgagattgaggctgagaaggggcgaaatccatgatcagccatgccgtactgcggttgtcctgattgattgtccat

SEQ ID NO: 22427 - DNA, 1692 bp, Oryza sativa; identical to SEQ ID NO: 13156
  Clone ID: TF_OsC1517_1507

SEQ ID NO: 22428 - DNA, 1249 bp, Oryza sativa
  Clone ID: TF_OsC73968_1
atactaaaagagttttttttttcttttccaacgacaatattgctttttggtttttcctgtgatggttcagtagaagaagtacaagtacaaatgtgcaacaaaatctaatttgtcctgatatgtatgtccaggaatattgaactctacgaactaagctagctctcaaatgcttaaaggttcactcatcaaagagcagtaatttgtatcttctctgaaaattgtgctaatcagccataattagctagtagcagttcatgaggctctcatagatgaggagaaggtttggatcgtagaaataaggatcatctagatctgctcctagccctaatgcttcctccatcaccgtcgtctccaacatctgatgatggtcgaattcatcagcgtagtgagatatgacagatgaattggaagaagaaggaggcacctcttggcacacatgtaatcctggcgtttcatcgaaattgttagaaatggttgctagatcagcaggaggaggaggaggcagccaagcagcttgttcttcttgcttgatcatcttggtgaagatggtatcatcatcatctgaatcatggtgaccatttggattggctgtcaagttgtgcaatgctgcgggattattgatgttgttaataagcctagtggtggtgcaggtgtgttcgttgctgtatgtcacttggaacatgggtgggtcgttcttatccttttgttggatttgcttggtggcctggcaacctctatcatctctatacgtacacctgaagtagctccttgtgaagtgagtgccctggatcttcttctctccatattttctccactgaaagccatcctcatgaggcacgggcgtgaattgagaccatgacgacgacttgtactcctcaccattaatccttcttcttttggcggccgatgatgatcttcttggctttccaacgacatggttgtcagctgcaacatctgctgcaggggaactactgttcgctggagtcgccgcctctgctttgatcaagctcatcaccggaacggcagcagcagcagcagaagaagaagcatgtggttggttcatgacggagagggcgacgttgagggctcgcagggcgtggttgaggaggccgtgcgctagctgctgcggctgctggtgtacgaggaggagaggctgctgcgtcttgatcagctcgtacacctgcgccacctccctcactgccaccgcttcttgctcataactcaaacaagctgattcagtaactgccat

SEQ ID NO: 22429 - DNA, 3501 bp, Oryza sativa
  Clone ID: TF_OsC17758_2
cccacgcgtccgcccacgcgtccggtctcgttctcgtctccaatcactctcctcctcatcttcgtcacggtctcctcgcttcgctagctcgcttgcttgctggctgagctgtggtacgctcgccatggcgtcctcgacgggggggttggaccacgggttcacgttcacgccgcctgcgccgacgacctcgcggcgcccggcgcgggcgcggaccagtactccgccgcgacgagcccgaagccaagcgctggaaggaggatgctgacaacgagggcagctccggcggcatgggcggcggcgccggcggcaagccggtgcgcgagccgaggcttgtggtgcagacgctgagcgacatcgacatcctcgacgacggcttccggtggaggaagtacggccagaaggtcgtcaagggcaaccccaacccccacggctactacaagtcgtgggcggtgggctgcccggtgcggaagcacgtggagcgggcgtcgcacgacacgcgcgccgtgatcaccacctacgagggcaagcggacgcgtgggcggacggacgaccgcgacgccggatcggccgccgcctccccgcctcatcgccggctccctcctcggcgacgatcccgacgctggatctgccgcctcctcctctcctcgctggctcccccgggcgcgcggatccaccgtcggctcccctcctcgccggggaggggaggagaggggaggggaggcggcgacgaggaggaaaggcaacagctcctgtcctgacgacgacgatgactgccgcaacgacgagggcgactgccgcaacgacgacgactcccgcgacgatgatgtgggggcggcgacggatgcaggaggagacgcggcggctcttctctcgatgtggatgatgactgccacgacgaaggcgcccatgactatcgaagcagcggtggacggatgagaaatgatgtcgtctaccggaaggagaggccagcgaacagtaactctactgcttgcgaatatagtgtgcacctacgtaaatcatctattttcgcaggcccttgcttgcagggaagatgaatggatcatcgagaagcttgcggtcatcgctgctagacgctcatcatttgtgtctgaagaatccttgtgctctgttccccctgcgggtttggtctctgtggccagtccccatttgccgcccagcaggggccctacaccctcgagatgctccccaaccccgccggcctctacggcggctacggcgccggcgccggcggcgccgcgttcccgcgcaccaaggacgagcggcgggacgacctgttcgtcgagtcgctcctctgctagtcgagccgagccgagccgagctgagctgagctgggccccacatccccctgctcgccacgtggcgtattttcgcctcgccgtatacgtacggccgtatagcgtacgtatacacgctcgcacgccctgcccaacacggcaatacacacatacatactctcgtacacacgtagtagcatacatatacagtatagtaggtggtagtggtagctagctagggagtgagatccaatttgttgattcgttgcaggccactgccacgtgggccacaccggaaacagtacacgcgtatacaccacacttgggatacgcgtacgtacgcacatgtacacgtagttttgtgcctttgtaactgctgagagacaggtcaaataagactgatgaatttttcatttcttaaaaaaaaaaaaaaaaaaaatactagtagtattcttatctatattttatgtttttacaatatgtcccgtactgagaataaggagataaagagagagcgaattttttttccaaaaaaaaaaaaaagtcgctaccgatttctgtcaagactgaagctactagcattcaaaccgcacaagatgaagcagcagccaaccaactgatgcagccgcagttcaacggcggcaagcggagccgcgctgcacctgacaacggcggcgacggcgagggccagccggcggagggcgacgcgaaggctgactcctcctccggcgcggccgcggtcgccgtcgtcgccgccgccgcggcggcggtggcggaggacgggtacagctggaggaagtacgggcagaagcaggtgaagcacagcgagtacccgaggagctactacaagtgcacgcacgccagctgcgcggtgaagaagaaggtggagcgctcgcacgagggccacgtcacggagatcatctacaagggcacccacaaccaccccaagccggcggcgagccgccgcccccccgtccatcctccgccgccgtcgccggcgacgacgacgacgacgccgctgccgccaggcgacgcgcaggccgaccacgcgcccgacggcggcggcggcagtaccccagttggcgccggacaggcgggcgcggagtggcacaacggcggcgtggttggcggcgaggggctggtggacgcgacgtcgtctccctccgtccccggcgagctctgcgagtcgacggcgtcgatgcaggtccatgaaggcgcggcggcggcgcagctgggggaatcccccgagggcgtcgacgtcacgtctgcggtgtccgacgaggtggacagggatgacaaggcgacgcacgtgttgcccctggccgccgccgccgccgacggcgagagcgacgagctggagcgaaagagaaggaagctggactcctgcgccaccatggacatgagcacggcgtcgagggcggtgcgcgagccgcgggtggtgatccagacgacgagcgaggtggacatcctcgacgacggctaccgctggcgcaagtacgggcagaaggtcgtcaaggggaaccccaacccaaggagctactacaagtgcacgcacccggggtgcctggtgcggaagcacgtggagcgcgcgtcgcacgacctcaagtcggtgatcaccacgtacgaggggaagcacaaccacgaggtccccgcggcgaggaacagcggccacccggcgggctcggcttcgcccggcggcggcgcggggtcgtcgtcgcagccccacggcgtcggcgtcggcgggcgcaggccggaggtgccgtcggtgcaggagagcctgatgaggctcggcggcggctgcggcgcggcgccgttcccgccccacttcggcctgcacctgccgccgccgccgccgagggacccgctcgcgccgatgagcaacttcccctactcgctcggccacgcgccgtcgccggcgctgcggggcctgccgccgcccccgcccccgccgccgtcggcgtcggcgctggcggtggcggggctcggcggcgtggtggaggggctcaagtacccgatgctggcgccgccgtcggtgcactcgctgctgaggcaccgccagggcggcggcatggaggcggtggtggtccccaaggcggaggtgaagcaggaggcgatgcggcccgccgccgccgtcgccggcgcggggcgcggcgcggcggtgtatcagcaggcgatgagcagggtgtcgctggggaatcaactgtag

SEQ ID NO: 22430 - DNA, 1191 bp, Oryza sativa
  Clone ID: TF_OsC143704_1
tcagttcttggtcggcgagagctcgaggatccggccggagagcgccgtgacgagcgccgccttgaacccggggtccctcgtcagcgtcgccgccatctgctcggccaggttcttcctcgccgccacctccgtcgacggcccggccgccgccgcctgctcttgctgctgccggacgacggcggcggcggcgctcggtggcggctggtgctgtgagtgcttggcggcggcggcggtcttgctgccggcgtcgtggtgcggcggctgggcgtggttgtgctcgccctcgtacgtggcgacgaggacggtgttgtcgtcggcgctgcgctgcaccttcttcttcaccgggcacgccggcgcgaacgagcacctgaagtaggctcgcgggcacgggttgtccttcgtcaccttctgcccgtacttccgccattgatacccatccttcaccacgaggctgaggtcggaggggtcggcgtggacgaagcgcttggagaccttgggcttgcagtcctcgcggacgacgcgcttcgcggcggcggcggcggccgccgacgtgcactccatctggtcgggggaggcgtaggccgcggctgcggcggcggcgacgaacggaggggatggcttgcggtggtgggcggcgtcgtcgaggctgtcgacgctacggatccgcttcctcgatggcgacaccgagccgccctccgacgtcgacgactggtggttcccggcgttgaccgccgccgccgccgccgccgacatcatgtcgttgacctgtccctgcagctcggtgtacttggccaccaccgcccgaagcatctcggtcagcttcttgttctcctcgctcgctcgccggagctccgcctccagcgcctcaacctcgtgatccttcttgaaggacaagaagttctcctccacgagaaccttaatcggcgccgccggagccgatgatctcctcgccgtcgacggcaggccgacgttgaggtccaagctcagggaagtctgctcaatccacgaatccatgaattgaatatactgaaaatcaagaacaggaggaggaggagaagaaggcgaagaaggcgagagccgaaatgcgcatgagctagtgaaggtgccatggcgacgacgaggaggaatatatagccaagaaggtgggcgagaggggactgactggctcggaggaggaagcatcttagccat

SEQ ID NO: 22431 - DNA, 2121 bp, Oryza sativa
  Clone ID: TF_OsC1528_1720
atggaccgggaccacgcgggtggtccaccgccggtccacgggaccgactgtccagatcggccgggaggccgatcggacggcgcgggcggtggcttggcatggctctgctcggcacaaaaccgaccggccggccttggggagcggcggcggcgagcggccgccggcgacggcaagcggcgccgcgggaggcggcggcaaccggcgcgaaagcggcggcgcacggccgaagacgacgacgcacgcgcggatcgcagcggtgctcatgggagagaaagaggaaaggaaggaggagagcgggattcctcactggcgagaacggcggccggcgcgaaggaagaaggcggcggcgacaaccggcgatgcggaggcgcggacgggcggcggtggcaccctaggagggagcagagatgggttaggggtgggttatggatttctcaaggttttatcaaccctgaagaagacagtcaaccagaagacactggtctgcagtattttaatgagttgttctgcagatcattttttcaaaacggtccctctcgcgatgatgatcataaggataagtttgttatgcatgagttatttcatgatttggcgtgctccgtctcaaaggatgaatgcttcagttcaggggaagcattttgcagccttccagaaaatatttgccacctttcagttgttcttccagattccaagtcagttgtgctgactaaagtacaaagacatctgcagtccctgatggttgtcaagagatctgcatcagagtacccaggttcatttgtgccacttttgaaaatactgggtctgaatgatcttctcatgaaatgtagatttttaagagcgttgaatttgagctgtacaacaatacgagagctccccagttctattatgaagatgaaacacttgcaattcttggctctgaacaatacaaagatccaaagtctcccagctgaaataggtcagttacaaacccttcagacattagaactcaagtattgttgctgtctcattgagttaccggaaagcacaatgaatttgacaaagctgcggcaccttgatgtccaaaaggaaccaggaaatgttcatgttagcatgcctcatgggatcgggcaactaactgatctgcaaacattaacagtatttaatacgggggatgatttatcacattgttcaattggggacctgaagaatctcagtggactaaggggacatgttcatataacaggtcttcagaatattactgcaagtgatgatgccaaagaagcaaatctagtaggtaagcaattcctaggagctttgacactggaatggtgttggagcagtcaggacatggaagatgacagtgacaaagaaattgctaatcaggtccttcataatcttcagccaaacactaacctgcaggagctctccattcgaaattattctgggaatttattccccaactggattcaggattcttcactttccatgcttgtctcgattactatcgatgactgccaagactgtaatgagatcccacatcttggtgacctgccttttcttaaatatctcctcatacataaaatggacaaatacacagtaaaatatctccttaagaagactacgacagatgatggctggaattggagaaagtatagtgaaaaggatttacttggctccaagtacaaaagatcatggtacagatgcaaccagaagcagtccacggggtgcgtggcaaggaagattgttgagcctaacaacgatgatcccaacacatggttggtaacatacttatacgagcacaaccataaacaagaagctaggccctgcgacaagccatcaccttctgatttgcacgttcagctggcaagtggcaacacccagtggtgtgtgcttagaggcttctacggtggagtgaggcagatgacggtggggagcaacacacagctgcatgagcgtgactacaccggcaacgcaaatcacagtggcatcatcgcaagacagacatggatcgagatgctccggcgcggctgcacggccggccattctcaacgtagagctgtcacctattggatatactgtgacgatagctctagtatcaaggacaagttggagattgtagatgtcgatgttttatatcagcaa

SEQ ID NO: 22432 - DNA, 1165 bp, Oryza sativa
  Clone ID: TF_OsC318264_1
ctgcaggaattcggcacgagggccaccaaccatccatcgctgacgcttccaacccaactgaattcaaacgaagcgaacgacacgaaccatgcaggcgcaatcccgcctcgctgctgccgcgagcggcggcagcggcagtggaattagcgggagcggtggcattagcaggttgggtggtggagcgggggaggagcacgaggcggtggtgagggagctgacgcgcgggcacgagctgacggcgcggctgcgggcggaggcgctgcgggcgctgcgcgggcaggggcaggccgaggccaccgctacattcatcctcggggaggtctcccgcgccttcaccgtctgcctctccatcatggccagcgcctccccgtccgcctcgccgccacaaccggacgagacgccgccggccgactcagccgtctcgccaccaccaccgcgcgcggcgagagaggacaacgtcccgcgaaagagattattgacagcctctccttacgacgatgggtaccagtggaggaagtacggtcaaaagaagatcaacaacaccaacttcccaaggagctactacaggtgcagttaccaccgggagcgcagatgccccgcgcagaagcacgtgcagcagcgcgacggcgacgacgtcccggcgctgcacgtcgtcgtctacacccacgagcacacgtgcctgcagggggcgcccgccgagcttcccgacgcggcgacgaacggtggcgccgccgccgccgcgtcgccggactacttccccgccggcggcgagacgccgtcgtcgctgcggcggctccggggcgtcggcggcggcggcctgcagcctcagttcgtggaccaccgcgccgccatggaggagcgcgagcgccaggtgctcgtctcgtccctcgcccgcgtgctgcaggggcggcagtgctacgacgacgacgacgacgacgacaccgacgtcgcctccctcggcgccgtgcacgcgcgcgcgcctgcggcggcggcgccggtcgccgcgtcgtcgtcgtcgtccgggcccgtcgacgctgccggcgaggagctggacgtcatggactacgacatgacggacgcgctgttctgggggcctttcggcacggacagcaactcgtacgacggaaacctgacgtcgacacgctgttttgatctaattaattaa

SEQ ID NO: 22433 - DNA, 1092 bp, Oryza sativa
  Clone ID: TF_OsC82840_1
cccacgcgtccggcgcgatgtcgtcgctgtacccgtctctcctctcgctgagcgagagccccgccgagtaccggcaggtcggcggtggccgctacgcgggggaggacgtcgtcgacgacgacgacgacatggctgccgtcgccgacgctgtgtccagctacctctccttcgacatggacgacgtcgagtattacacgccggaggtgggcttccactcaaagcagcacaacccgccgccagttgctgcggcgccactggaagccggaggaggcagggagcaaagccggcgggaagccgccgtcaatcttggcaagatggacaggggaccggcgccggtgagcggcggcgcggcgactggcggcgtgccgaggagcaagaacggcagcaagatcgcgttcaagacgaggtcggaggtggacgtgctggacgacggctaccggtggaggaagtacggcaagaagatggtcaagaacagccccaacccaaggaactactaccggtgctcgagcgaggggtgccgcgtgaagaagcgggtggagcgcgcccgggacgacgcgcgcttcgtcgtcaccacctacgacggcgtccacaaccacccggcgccgctgcacctcaggccgcagctgccgccgcccggcggctactcgatcgccggggcaccggccgtggtggcgccgcacggccgcctcgggctggaggaggccgaggtgatcgctctcttcaggggcaccaccgccacctcgctgctgcttccttgacggattcttgatcgagatagcagcctcttgattgagatgcccagatgggtcattttggatgtgagctggatctttgttttccccttttcttctctcgatctctgtcccgtccttgtttgcctgtttcgatcattggaaggccgggccaggcctggctggtttgcagcgatagtgatcaaatgctgtgctgctgtgtttctgtgctcttgaggatcctcccaactatcccccttgagcctaggtaatatagccatgggaaatgtaacatatatatactgtttaaccgtccaaataaaaatgtacagagcttgaaaaaaaaaaaaaaaaaaaaaaa

SEQ ID NO: 22434 - DNA, 2139 bp, Oryza sativa
  unsure (1)..(2139): unsure at all n locations
  Clone ID: TF_OsC93838_1
atggaggccgacgacagcggcggtggcggcggcagggcacgcaggtccgtcgaggtggacttcttctccgacgagaagaagaacatgaagaagagccgtgtctcgggcggcgtcgccgccgaggcggacgacgccaagggacccgccgccgccggcctcgccatcaagaaggaggacctcaccattaacgttagccgccgccgccttcttcgctcgtcgatcgccagacacctgtttaactcacggcgatctaacgcgtgtgctcgtccgtgttcgttgcagcttcttcccgccgggaacaacgcgaggagcgaccggtcgatggtggtcgacgacgacgcggcgtcgcggccggatcacgaggagaagagccggagcagcaacgagctcgcggcgatgcaggcggagctgggccgcatgaacgaggagaaccagcggctccgggggatgctgacccaggtgaccaccagctaccaggcgctgcagatgcatctcgtcgcgctcatgcagcaaaggcctcaaatgatgcagcctccgacccagccggagccacctccgcctcaccaggatggcaaggccgagggcgcggtcgtgccgaggcaattcctcgatctgggcccgtcctccggcgccggcggcgaggcggcggaggagccgtccaactcgtcgacggaggccggcagcccgcgtcggtcgtcgtctaccggcaacaaggaccaagaacgtggtgacagcccggacgcgccgtcgacggcggcggcgtggttgccgggacgcgccatggcgccgcagatgggcgccgccggcgcggcgggcaagagccatgatcagcaagcccaggatgccaacatgaggaaggcccgcgtctccgttcgcgcgcgatccgaagcgccaatcatcgccgatgggtgccaatggaggaagtacggtcagaagatggcgaagggaaacccttgtccacgcgcgtactaccgctgcaccatggccaccggctgcccggtgcggaagcaggtgcaacggtgcgcggaggaccggtccatcctgatcaccacgtacgagggcacgcacaaccacccgctgccgccggccgcgatggcgatggcgtccaccacgtcggcggcggcgtcgatgcttctgtcggggtccatgccgagcgccgacggcgccgcggggctcatgagctccaacttcctggcgcgcaccgtgctgccgtgctcgtccagcatggccaccatctcggcgtcggccccgttcccgacggtcacgctcgacctcacccacgcgccgccgggcgcgccgaacgccgtgccgctcaacgccgcgcggccgggcgcgccggcgccgcagttccaggtgccgctgccaggcggagggatggcgccggcgttcgccgtgccgccgcaggtgctgtacaaccagtccaagttctccggcctgcagatgtcctccgattcagccgaggccgccgccgccgccgccgccgccgcgcagttcgcgcaaccgaggccgccgatcgggcagctgcctggccctctctccgacaccgtcagcgcggcggcggcggcgatcaccgctgaccccaacttcacggtggcgctcgcggcggcgatcacgtccatcataggcggccagcacgcggcggcagctggcaacagcaacgcgaacaacaccaacaccaacaccacgagcaacaccaacaacacaagcagcaacaacacgacgagcaacaacaccaacagcgagacgcagtaaaaacgagttcggatcagtaattttcacatagatttccaagtttttactcttctttgttcaggataggttcttgatttctctcctttggtttcgatagctcggccgagctgtgcagtgggcacatggtatacactttcttttttcttctccactttcctggttttgcagcagcaaaaagttgtattaattcattgctttttcttagttctttttctaccgcaaaaacagctgttgatacttcgcagtaagtaataatcagtacaataataagtataataatagcatcttcctgagaattatgtacacttgtcaaagcaacaaaacaaaagaaacaatgacagcttactagatccctcttttntaaaaaaaaaaaaaaaaaaaaaaaaa

SEQ ID NO: 22435 - DNA, 1025 bp, Oryza sativa
  Clone ID: TF_OsC271102_1
gcacgaggcacattctcaccctcagcagctcctcctcctcctcttccaccaccagcaacagcagcagcggcgtgcgctctcgcctccgtctccggcgacccatggccgtggacctcatgggcttcagcccgcgcggcggctgccgcccgtccgtggagacggagcagctcgctttccaggaggccgccgccgcggggctccgcagcctcgagctgctcgtctcgtcgctctccgccgggggggagcaccaccaccgccgccgcccgcaggagaagcagtcttcgccgccgctgggggagatcgcggaccaggcggtgtccaggttcaggaaggtgatctcgattcttgaccggaccggccacgcccgcttccgccgtggccctgtcgtcggagcggcagctgcggaggcggctgccgcggcggcgtcggcgtcaccgtcgtcgtctcctgtctcgccgcctctcccgccggtgacgacgcagccggcggccgccgtgaagagcctgacgctggacttcacgaatcccgccaaggtcgcggcggcgtcggtgacctcgacgtcgttcttctcgtcggtcaccgccggcggagacggcagcgtgtccaagggccggagcctggtctcctccgggaagcccccgctcgccggcggcgtcaagcgcaagcacccgcacccgccctgcgccgccgccggcgacggccacggccacggcgcaggccacgcgcacgcgcacggcgggtgccactgctccaagaagcggaagcagcgggttcggcgcacggtgcgcgtggcggcggcgagcgcgcgggtggcggacatccccgccgacgagtactcgtggcgcaagtacgggcagaagccgatcaaggggtccccctacccgcgcggctactaccggtgcagcaccgtcaagggttgccccgcccggaagcacgtcgagcgcgccgccgacgaccccgccaccctcgtcgtcacctacgagggcgaccaccgccactcgccgccgccgccgccgcttgtttaa

SEQ ID NO: 22436 - DNA, 963 bp, Oryza sativa; identical to SEQ ID NO: 13059
  Clone ID: TF_OsC278621_1

SEQ ID NO: 22437 - DNA, 1422 bp, Oryza sativa
  Clone ID: TF_OsC61691_1
tggatcccccgggctgcaggctccgcccggagctccaattagtcgcacaccgatcccctcctcttcttcccccccttctcctctctcctctttttttcctcatccgtgcgcgatactgcgcttagtttgtgggtggggggagtgatcatcaccaaagccacaaagggggcgcggagagatattatatattctttgggaaagcgttggattagtttttctcgctttgggctttttatccggagttggagtgtgtgtgcgccgggagtggtggtggtgatggcggccggagaggaggtgatggatcggtcgacgtcggccgaggacgggtactgcagcgccggcacggactcgccgcgggcggagtccgtcgacgagcaaggggccgccgaggagtcgtcgccccggggagggcagaagcgggagctcccctcgccgtcggcttcgccgtcgtccccgctgccacctgccgcgaagcgcagccggaggtcagtggagaagcgggtggtgtccgtgccgatcgcggagtgcggcgaccggccgaagggcgccggggaggggccgccgccgtcggactcgtgggcctggcgcaagtacggccagaagcccatcaagggctctccctacccaagggggtactacaggtgcagtagctccaaggggtgtccggcgaggaagcaggtggagcgcagccgcgccgaccccaccgtgctgctcgtcacctactccttcgagcacaaccacccgtggccgcagcccaagagcagcagctgccacgcgagcaagtcgtctccccggtcgacggcgccaaagcctgagccggcggctgacggacagcagcccgagccagcggagaacgaatcgtcggcgtcggcggagctggaggtaccggagccggagccggagcaggaatctgagccggttgtgaagcaggaggaggagcagaaggaggaacagaaggctgtggttgagccggcggcggtcacaaccacggtggcgccggcgccggcggtcgaggaggaggatgagaacttcgacttcggatggatcgaccagtaccacccgacgtggcaccggtcgtacgcgccgctgctgccgccggaggagtgggagcgcgagctgcaaggggacgacgcgctgttcgcggggctcggcgagctcccggagtgcgccgtcgtgttcggccgccggcgcgagctcggcctggcggccaccgcgccgtgctcctgatgatcacctcctcttttctttttcctccccttttacaatttcccttttttttttttgcttttctttagttctccttggagtaatttggattggaggttagtacatagcttgggtgatcaatgggagtgagtggcttaactgttcaagagagcctcctattccaactctccaaattgcgtcgcgtgttcgtcatcc

SEQ ID NO: 22438 - DNA, 874 bp, Oryza sativa
  unsure (1)..(874): unsure at all n locations
  Clone ID: TF_OsC102358_1
atgacgtccttggactggcagtcgctcctgcagacgtgcctgcaggtaccgcctccggtgctggagcagcagcaaccggcggcggcggcgcaggcggatcagtacagcggggagaacgatcacggcgatctgcaggcggccgagagcagcggggcaggtaacaaggagaagcaggtgatggcgaagggcggggcggggaggccgtcggggacgaagaagaaggcgagccggccgcggttcgcgttccagacgaggagcgacaacgacatcctggacgacggctaccgatggaggaagtacgggcagaaggccgtcaagaacagcaagcaccccaggagctactaccggtgcacgcaccacacgtgcaacgtgaagaagcaagtgcagcggctcgccaaggacacgagcatcgtggtgactacgtacgagggcgtgcacaaccacccctgcgagaagctcatggaggccctcacccccatcctcaagcagctccagttcctctcccagttctaattaacgacccatatcgatcggtctcggtcggtctcaaactctgaaatgatcgatctttcaagttactacacaaacacaataacacacattcacgtgtacatatatacctgcaacaaattaaactctctgtttagcttggggggaagaaaaggagaacaatgtggcctacctcccccgtctcccgtcaatacagtacaatatactgctagttgatcatgtatgtcgtcatactgtatatacgtactccctgtacgtgtatccttgtatattttncatatgtacgctaagcttacgcatatattgtatatgtgacacaaataatgcccccggaaagttaaaatatgtcgctgttatttatttc

SEQ ID NO: 22439 - DNA, 2098 bp, Oryza sativa
  Clone ID: TF_OsC26646_1
tcagtagagcgagttctggaagaacatgtcgtctccgggctcttccttggctctcgaggcgtgcatcgcgtcgttctgcctctgctgctgctggtgctggctcatgtacgagcccctggcgtcgtcgaacccggagaagccgccgaagctgctcccgccgaccacgccgccgaacggtccctggccgccgaacccgtcgggcctcagcgcgtacggctgtggccccgtgggctggtaggacatgggcggcggctggttcggcaggtacgggtggctgctggtggcggccgccgccggcggcgcggggcggtagagcgcggcgctcccccgcgcggcgggcacgtcgtggttgtgtttcccctcgtaggtggtgatcacggcgcgcaggtcgtgggacgcgcgctccacgtgcttccgcacggggcaaccggccgtggtgcacttgtagtagctccttgggttcgggttgcccttcaccaccttctggccgtactttctccagcggtagccgtcgtcgaggatgtcgatgtcgctcatggtttggacgaccaccctcggttcccgcaccgtccggttgccagccatggagatcccctcgccgtcaccgtctttcctccatctcttggaatccggctcgtcgtcgtcgaactcgtcgccgccgccgttcccggcccgaggggagccaactctgatctcgtcgtcaccgaacgacgccgacgagttctcgggcgtcgccgctgtgccggacatgcccccgaaggaatgctccgacatgtcgccgccgctctgcaggacctgcgccgccgacgagccggagttcctgcgcgtgttctgcggcttggcgtggttgtgcgtgcccttgtacacgatctcggtgatctggccgtcgagcgaccgctccaccttcttcttggtcgggcagttcgggaaggtgcacttgtagtagctgcgggggttctcgctccccttcacctgcttctgcccgtacttgcgccagttgtagccgtcgtccgacgaccgcctctgcgactgcggctggctgtacccgccgccaccctgcacctgtggcgccatctccgacgaggtcgcctggaacggcgccgcaccgaagctcgccgcgttggcacccgcgtccatgcctgcaggctgctgctggtagccccatggctgctgctgctgctgacttctgtatgcctcgtcccccagtggggccggtgggaccggtggctggaaagtcgtcgttcgcacggcctcctcgctcgcaggcgccgtctgaaacgagaagtcggagtaggaattcctctgctcgtccttgccgccttgatcggcgctctgcgccgccgccacctccggcctccagtcaaagtgctgcgacgcgaatgcgcccgtcgtcggcgacgggaagatactggaggtcaggagcaccggcgagccgaggaagtcggcctggttcatgccgatcgggctgttgaagaaggacgacggcgacaccggcggcggcgagagcggcagcgaaggcggggtcatggccttgtacctggacacacctccgccgccggctcccgcgtttcccccgaggaggtccgtgaagctcgcgctggcgaacgagaacgtccccagccgcgaattggccgacgtctcgacgctcccggacgacgaggttgtcatcggaatccctcaggtcgcgaccaaaaccgccgcgtctcacagctcgtcgccgtgcgaactgcagtcagccgagtatacgtatgtgttcctttttcgtgtttgtgacttggaggctggagacgtggacggatgggtctacgtgctgacgtttctctacggccgagcagagacaaagctggccgggaggaaggggtcgtcgtcgtcgtctccggcggccgaggaggacgacgacggcactgcgtcggcgaggtcggccaaccctcagcaggaagcgggagctcccctcatcctcgccctcgccctcggcctcggtgtcaccgtcatccccgctacggcctgccgctttgcgcctccgggatggacgccggcagcctgcgtcgacttgcaacagtaccctctgataccccacaagtatcaggctgatacctag

SEQ ID NO: 22440 - DNA, 852 bp, Oryza sativa; identical to SEQ ID NO: 13063
  Clone ID: TF_OsC387129_1

SEQ ID NO: 22441 - DNA, 613 bp, Oryza sativa
  Clone ID: TF_LIB4371-013-R1-N1-H3
aatctcttgtctagaaagggatgctatcgaagtgatccggcgactgaaagcctgaaatgtcgatcaggctggctgggcagctaggacccggttgtgattgtgatcaccttcataggtaacaatcaacatcgaggggtcgtcgacgcacctctcaacatgcttcctggctgggcatcctcttacactgctacacttatagtaacccctaggatgtggggatccttttattggcttctgtccatacttcctccatgagaactcatcagctggaatgtcagcaaccttattactgattgcagggactttgatagacctccttatcctcagcttccttttcttcgcacagtgacatcggctcccagttgtgcatcgtccactaccatcctccctaccagtgcacctcctcctctgcatgaggcctaactctggagtgcttgacgtctgggacccactaactagctggaatggacgactggagcggctacccgccaaactcgcaatgcttccctccatactcagagacgacaagaaataacgggaggatgatgcccgtgcaattagaactgtcaaacttgagattaacacccttaccaccaccattgctaccaccctg

SEQ ID NO: 22442 - DNA, 1914 bp, Oryza sativa
  Clone ID: TF_OsC337842_1
atgacatgggataataggattaaggaggagtcttccctcctcattgcccttttaatacgtcttagacacccagacattgacttagatgcctcgggagaagtagcattaggatttaagaccgttccccattttagctgtaccaagagagacaaaggtacacaagattaccagaaagaggccaggagcatgtcatccaagaagaagagagctgccatagatctctccctggaggcagagagaagacggccagaagaacgcggcggcggcagcgatcgcgaagccagcgatggcgccgctgctgcagctgaggaagatggtgatgtcaagcaacgagagggccctaaagaggaaaccggcggcgaggaggagaaggtagttgaagtggttgtggaccaaggagaagacggctccaatgaggagatcaaatataggactcaacaagcagagatgatcgaggaggacaagcaaccagctgcagcagcaaacgtcgacgacgatggcggcgacagcgacggagtcggagctagcgcggaagagaagcacatggtaacagaggccaccggcggcgaaggcgacgacggaggcgatagccgtacccccatggcgcaagatgagctcagcgagatgcaggaggagatggagaggatgaaggaggagaaccggatgctccggcgagtcgtcgacaagacggtgcgcgactactacgagctgcagatgaagctagccgcctaccagcagcaaccggcagcagcagatgagcctaaggagaccgaggtgttcctctccctcggcgcaacggccgccgcctccgccggctgcggcggcggcttcccggaggcgaagagcaaggagcaggccgcgtggcggcggcgctctgtcggaagcgacgacagcgactgcggcaaggaggatctagggctgtcccttagcctgggagcgtcgtcgtcgtacgacgacgaccagaaggcggtggaagcaaggccgcacgacgtcgacggcgcggcggctgcggccatgatcggcggcgacggcagcaggccggcgccgagggggtacccgctgctggagagcagcaaggtgcagggtggcgcggcgccggccgccggcgagctcgccgcggccggcggcatcacgagccagagcgtcaacccggccaaccgcaaaactagggtttcagttcgagtccggtgccaaggccccaccatgaacgatgggtgccaatggcggaaatacgggcagaaggtcgccaagggcaacccgtgcccgcgagcttactaccggtgcaccgtcgcgccgggctgcccggtgcggaagcaggtgcagagatgcctcgaggacatgtcgatcctggtgacgacgtacgagggcacgcacaaccacccgctccccgtcggcgccaccgccatggcgtccaccacctccgccgcggccaccttcatgcttctctccagcaccacctcctcctcctccgtctccgacgcctccgccgcgccgtcgtcgtcctacctcagcccgtacctgctcaactccgcctcgccgttgctaatgccgggcgccaccggcggcggcggcggcatgcagcatctcaacctgttcgggaattcgccgtcgtcgtcgtctctgctagctccgcaagcgccaggctccagcaagtacccgtggtctccgaaccaccctccgctcgccggcgccggaggtaataagagaccgttctggagcgccggcggcgacggggacaagccggcgccggcggcattggccgagaacgtcggcgcggtgatgtcggacccgaacaagttctcggcggcgatcgccgcggcgatcaacaacttcatggggaaagacggcgagagtagcagcggcaagagtagtagtaagtggggcgtggttgaatcacttccaccccatgagtag

SEQ ID NO: 22443 - DNA, 1557 bp, Oryza sativa
  Clone ID: TF_OsC61565_1
ctcctcctcgtcgcgaacacctggcgcgagcgattcttggcttcccaattttgcgacggcgatcgatctttgggttttcttggtgttcgatcgatcagagcagctgaggcgaggcaatggaaggcgttgttgacgggagcggcgcgcagctggtggtggcggagctggtgcgcgtgcaggggctgctccggcagctcgaggcccacctgagcgcgccgtgctccgtcgagctctgccgcggcctcgtcgcgcagatcgtcgcgctcacggacaggtccatcggcatcgccacccggtccttctcctccgcctccggcggcggcgcgcatttcgcggacacggcgccgccgatgccggcgctgacgtcgtgcacgcccagcccgctcagcgacggctccgaccaccagccgttccggaccaccaacgccaagaagaggaagacgacggcgaggtggacgagccaggtgagggtgagcgcggcgggcggcgcggaggggccagccgacgacgggcacagctggaggaagtacgggcagaaggacatcctgggcgccaagcacccgcgcggctactaccgctgcacccaccgcaacacgcagggatgcaccgccaccaagcaggtccagcgcaccgacgacgacgcctccctcttcgacgtcgtctaccacggcgagcacacctgccgcccgggcgccgccagcgccgccgccgccaagaggccgcacgcgcagacgctgctgcagagcctcagcgccagcctcaccgtgaacacggacaccaacacgccgctgacgccggagaaccgcgcgccggcgccgccgctgcagcagcagcagcagcagcagagcgtgtcggcgtcgcccgtggcgtcggactcgtacggcctgggcggcgccgggtacggggactggcgctgctgcgacggcgacctgcaggaggtcgtgtcggcgctcgccaccgtgacgtcggcccccgaccacgccgccatggacgccgccgacttcatgagctactgcttcgacttcgacccggcggtgtacggcggcatcgtcggcacgccgagcttcttcctatgaggaagaaaagccatagcagagcagagcagaggccctgtccatccatggtggcaggagggaagaagaggaaagcttaagctttgctcttcaaggcttgagcttcttcttcctaagtaagatcagtgcaggtgtaagcagtaatttagcttaggatatctcttgtttctattctttctttaatttccttttgtttctcccaactctctctcatggagtttggattttgctggtttctgtcaagcaaaagagaggaaaataagaagattttgttactactgttctgatgaaaaaaaaaaaaaaaaaagtttggagaatgattcacttttttggggagaaaaggttcaacctttctgttatccatcttgccaattagtggatggatgagagagagcctaggcatgaaactgtagggacagcaattcatatcttgacataagtggcaagttggaccaaatcatagttcaaaaaaaaaaaaaaaaaa

SEQ ID NO: 22444 - DNA, 332 bp, Oryza sativa
  unsure (1)..(332): unsure at all n locations
  Clone ID: TF_LIB4371-039-R1-N1-B10
atgttaatgaagatacttacaacatgagatcaagaggcacgtaggatccactcgattgtcctgagaactcaagcaatccaggattaaaaccttttggggactaggagcatccatggccctatcaggcttcttgctgctgtgagggcagcctaccccgttggggatgctccagaaatgcgcaaaattctttgatccagtaccgaaggctttcgtgcggcttaagctnggatcggtggcttatatactccggatgtgtaccttgataaaggtgtgataatcatgaaggaacccggtgcctcttctgtgtgaggggaacgggcggcatatgctct

SEQ ID NO: 22445 - DNA, 1338 bp, Oryza sativa
  Clone ID: TF_OsC14991_1
gggcagcgggtatgtggctgagctcccgaaaagaggaaagtgagatagctcaatttctccttccttcctctctccatctaatctacacatgcacaaatgttgcagctgatatatggcttagctagcatatgcaaagcaagccttcctgcagtctagtcacctctcaagctacatactcccagtactgcttcatctagctctctctagtagctagctctatcatcatcgatcatcctcctctcaccggccggccaacccagagaagagattattcctcagaagaagaagcaacaagaagaagacgaaatgtctgcccagatcgctccggcagagcaagtgtgctatgtgcactgcaacttctgcaacacgattctcgcggtgagtgtcccaggaaacagcatgctgaacatcgtgaccgtccggtgtgggcactgcacgaatctgctgtcagtgaacttgagaggactgatgcactcagccccagcactacaagatcatcatcatcatcatctccaggagagtggtctgagcggatgcttccgtgatcaaagtggctatccggagtttggtttttctgcagcttcgtcgtcttccaagctcaggctgcctcctgctgctgctgccatggtttcctactcgcagcaaaaccagcagctcgagcaagctctccatgctcgccctccagagaagaggcaaagggtaccttcagcctataacagatttattaaggaagagatacgaaggatcaaagcaaacaaccccgacattagccacagggaagccttcagcacagcagccaagaattgggcacattatccaaacatccattttggcctaagccctggccatgagggtggcaagaagctcgtcgacgtcgaccccatcccaactgctccatcttccaagaagatccaaggtttctactcatagattgaggggatcaatctgccgataccgataccgcaaataggaggaagagcatcaagagcacaaaacatatatatactgtgagtaaagaagcaaaggaaaaaagaaaagaaatgctgccaccttacctttgttcatgaccaaaaaacttgtgaagacgtatgtcataagtacatagaagaaatcaactcatatagagtgaaaaaaaacatacaaaaaatcaagctactatagctcatcgatcgactgaaaggctgaataaaccattcgaccataatgttgttacatgtataagtatgtttgaagctagctagctggctagttctttatttcctctttatgtcttccaatgaaattaatttgcaaacatattaacagcactgtcgacggatgcaaatcagtgaaaaaaaa

SEQ ID NO: 22446 - DNA, 934 bp, Oryza sativa
  Clone ID: TF_OsC256574_1
gcacgagggccgtcgccgccgtcgtcgccgccgcaatggatctcgtgtcgccgtccgagcacctgtgctacgtgcgctgcacctactgcaacaccgtgctcgcggttggagtcccatgcaagaggctgatggacaccgtgaccgtgaaatgtggccactgcaacaacctctccttcctcagcccgcggccgccgatggtgcagccgctctccccaactgatcaccccttgggcccgtttcagggaccttgcactgactgcaggaggaaccagccgctgccgctggtctcgccgacatcaaatgagggtagcccaagagcacccttcgttgtgaagcccccagagaagaaacaccgcctcccatctgcttacaaccgcttcatgagggaggaaatacagcgtatcaaagctgccaagccagatatccctcacagggaggccttcagcatggctgccaagaactgggcgaagtgcgacccccgctgctcatcgacggtttccacctccaacagcaaccccgagcccagagtagtagctgctcccattcctcatcaggagagggccaacgagcaggtggtcgagagcttcgacatcttcaagcagatggagcgcagcggctagggcggcggcggcggccggagccggcggcgatctatatcggcggtgaagctcgtatgaagctagctagcctgcaggccggccactggggagagtaccaaatttcagatcccccttattatcaccgtcgtcagctcagctcatgcatgcatgctcatcgttcccctttagcatatatctgtgctcgtttggtgtttattagttaattatgtttgatcttgttaatttgttgttgcatggagtatgtaccccctataagaccagctgctgctaccgtacgatatacgtacgtatgctatatatatatatatatatat

SEQ ID NO: 22447 - DNA, 1257 bp, Oryza sativa
  Clone ID: TF_OsC1295_1
caccaatctctctctctctctaagatctctatctatctaaagatctgagctacaattaattaaaacctgataagaagaagaccctgagctcaatcccttcttattatactatatatatacttctgtatttgtgcacagtgttggtacaggtatctgcagacagccatatctatctttctagctaattggcaatatgcctgaagtccactgctcgtcctaagatttacttctccacccccccccctctcctttgcttcttcttcttcatcatcatcttcttcctcctcctgttaattaagttcttgatttctaagctagcaattgagcacacatcgatcgcgagagacgcagcggcgcccgtctaccgcggggctagaggaatgtcggcacagatcgtgccggcgccggagcatgtgtgctacgtgcactgcaacttctgcaacacaattttcgcggtcagtgttccaagcaatagcatgctaaacatcgtgaccgtccgttgtggccattgcactagcctgttgtcagtgaacttgcgaggattggtccaagcactcccagcagaagatcatttacaggacaatttgaagatgcacaatatgagcttccgcgaaaactactctgaatatggctcatcttccagatatggccgagtgccaatgatgttctcaaaaaatgacacagagcatatgctgcacgtgcgacctccagagaagaggcagcgggttccttcagcttataacagatttatcaaggaagagatccggaggataaaagcaaacaatcctgacataagccacagagaagccttcagtactgcagcaaagaattgggcgcatttcccgaacatccatttcgggttaggctcccatgagagcagcaagaagctcgatgaggccattggagctcctagtccccaaaaggttcaaaggctgtattgatcgagtacacatgatgatcgatggatcctacgtgcttgttgatctcatgttgtaagtaacttaaaaaaaaaaaaaaatctacgcttatttatttcttaagtatcatcagttaaatttgtgagcgagtatatagatgagttgtcatgatcagtgagtgatcgtatgcatgcagtgctgagaattaaaggtgtatatgcatgagtaacgttacatgcagctagtgtcgacgcacgtatgacagactgaataaactcttcaccatgttgtttttttatgtttgaaatgaattaattaattgtccaaaaaaaaaaaaaaa

SEQ ID NO: 22448 - DNA, 1544 bp, Oryza sativa
  Clone ID: TF_OsC1294_1
gcacgaggccttgcactcagcttgcagcttatagtgcaccgcacactgtcctctgttcatacaccccaccaaacacctttttttcctccttgacatgtagctagcttctttctgacttgctcgcagctggtagtaccctctctagcttattgcagggccatatcctctgctagcttagcttctctcgcaaaccccttaattccatctcatagacagccaaaagggtcaagaggaaattgggtttgtgctctccccaaaatcctccatatatagtgcacaggaggcatcattctgttcatacatatctctcccttgcttgctttgctcctggatatatagctagcttctttctttcttcctctctccctgtgtggcacgcgcctccaatcgatctcttcggtgagtagacgcatcgagatcggggggaaatgtcggtccagtttacatcggagcatgtttgctatgtcaactgcaactattgcaacactatccttgtggtgaatgtgccaaacaattgttcctacaacattgtgactgttagatgtgggcattgcacaatggtgctctccatggatcttgctccttttcaccaagcacgcactgttcaagatcaccaggtacagaacagaggatttcaaggtaataactttggaagctatgacatagcttccagaaatcagaggacatcgacagccatgtacccaatgccaaccagtcagcagcaagtgtcacctatacgtccccctgagaaaagacagcgtgtcccatctgcatacaacagattcatcaaggaggagatacagaggattaaaaccagcaatcctgagattagccacagggaggcattcagtgctgctgcaaagaactgggctcatcttccccggctccattttggcctcagcgtcgccgacggcggcggcggcggcggcagcaactaatcgcggcggcgcggcctgccggccggccaccgatcgccggcgtgcacgccggcgcgcggcggcggccggtcgagaatgcgcgcgcaggagggacgacgacgatatattattatcgcgtgtgcccctctctcttcgccgcgtaattaattaatcagttaattaattacgtacgacctactgtgttatgctatcgatccgtgttaattaattacctacgtatcttgattaattagtctcgtattatacgtactattatacgtacgtgctgtgctatgtacgtagacaacaaaaaaaaatgtgcgtgatgagttctactacgtacgtacgtactgtgttctagtgttttaatttgtatccgaaccaaggagttgtttaattaactgcatgcacatgcactggacttgaatctggagtattatgtaagtgtgcatgcatgctggattatgcaaaataaacgaattaatgaatagaactgtttttgttaaataaaaaaaaaaaaaaaaaaaaaaaaatcgagagaaaagacagcgtgtcccatctgcatacaacagattcatcaaggaggagatacagaggattaaaaccagcaattctgagatagccaca

SEQ ID NO: 22449 - DNA, 282 bp, Oryza sativa
  unsure (1)..(282): unsure at all n locations
  Clone ID: TF_jC-osflLIB3479001b04b1
cggacgcgtgggtctagatcgcgagcgganactattnttgatatggttnatnttacaaatatggacgantgccaatgatgttctcataaaaatgacacagagcatatgctgcacgtgcaacctacatagaagaggtatcgggtaacttcagtttataacatatttatcaaggaagatatccggaggataaaatcatacaatcctggaataaggcacaaaaaaatcctttaatactggatgtaaaaattgggcgcatttcccaaacatccatttttgggttta

SEQ ID NO: 22450 - DNA, 2022 bp, Oryza sativa
  Clone ID: TF_OsC17966_1
cgccccggcacgaggcgagcttcatctccactagtctcatccctccttctccctctcctcgttgaacaccgcactatcaaatcacccagctgaaagccaagaccgcgcgcgccggccggccgggcagggatcacctagctaggatacgcgccatgatgtcgtcggcgccggagacgttctcgctggaccacctctcgcagcatcagcagcagcagccgccgccgtgcgccgagcaggagcagctctgctgtggtgcactgcaacttctgcgacaccatcctcgcggtgcgcctgccccgtagctgcctcgtctcggccggctccgtccggtccgaagccagccagccctctaaccacctcatcacatcaaagcgggaccaaaaggatatctctggtggctaccccctctcctccggccgctcgtgtaaaatttcccttctgatcctgcgctgtgccagattataaggccattgcgtagctcgatcgaagaaagaagcaggccagccacagtactgcctctcttgtcgatcgatcgacagccacagcctgcaggtgtggggattcggctggccgtcgtcttcgtcttcgtcttcgtcgtcgtcctcatcatgtcgtcctcgtcctcgtcgtcggctgtcttcccactggaccacctcgcggcgccgtcccccaccgagcagctctgctacgtgcactgcaactgctgcgacaccatcctcgctgtcggcgtgccgtgcagcagcctgttcaagacggtgacggtgcggtgcggccactgcgccaacctgctctccgtcaacctccgcggcctcctgctccccgcgccggcgccggcgccggccaaccagctccacttcggcccttccttgctctcccccacctccccccatggcctcttggacgaggtggcgttccagacgccgagcctactgatggagcaggccgcgagcgccagcctgagcagcatcacgggccgcagcagcagcagctgcgccagcaacgcgccggcaatgcaaatgcctccggcgaagcctgtgcagcaagagcctgagctgccaaagaacgccccggcgtccgcgaacaggcctccggagaagcgtcagagagtcccatctgcgtacaaccggttcatcaatgatgagatccagcggatcaaggccggcaacccggacatcagccaccgggaggcgttcagtgcagccgcaaagaattgggcccatttccctcacatccattttggcctcatgccggatcaggggttcaagaagaccttcaagcctcaggatggttctgaagacattcttctcaaggatagcctgtatgctgcggcagccgccgccgccgctgcagccgcaaacatgggcgtcactccgttctagcgagctttggcaaagcggccgcaagcaccgaattcttggtggtggccctagctcgctctcatgtgtggcgccattctagctatatagcaagggtttaattagcatcagatcatcatctcttaatatcatgtgtgttgcttaattagagtacttctgagtgtgtagaagagagatggggaatcctgttgagtgcctaggtttatgcttataaccatattcctcgtagagacttttttccctgtttttctcttttcttttccttctttatttttttatcctttctttctttcaggactatcttcgtactccctattcacctgtagagtgtagagaagttgctgttccgttgcctgattgtgtcccaaaagacgtgtcttaattacgaactcatgaacatcatctagcaatataaattctagaaacccatgcatgcatgcgttgctttctttaatatttcatgtgcttttcttcaatagaaaatgttttgggtttttatcaccatacattcgttatgagattaagtgcttagtgctaagattttggcaaataaatttgtaaaatttcaaaaagagaataatataacttctttgcttccttcaactaaaaaaaaaaaaaaaaaaactcgagactagttccctcgtgc

SEQ ID NO: 22451 - DNA, 939 bp, Oryza sativa
  Clone ID: TF_OsC17966_2
gctagcttcatctccactagtctcatgcctccttctccctctcctcgttgaacaccgcactatgaaatcacccagctgaaagccaagaccgcgcgcgccggccggccgggcagggatcacctagctaggatacgcgccatgatgtcgtcggcgccggagacgttctcgctggaccacctctcgcagcatcagcagcagcagccgccgccgctcgccgagcaggagcagctctgctacgtgcactgcaacttctgcgacaccatcctcgcggtgggcgtgccgtgtagcagcctgttcaagacggtcaccgtgcggtgcggccactgcgccaacctgctctccgtcaacctccgcggcctcctgctcccggccgccgcctccaccgccaaccagctccccttcggccaggctctcctctcccccacctcaccgcacggcctccttgatgaggtgccgtcattccaagcgccggcgagcctaatgaccgaacaggcgagtcccaacgtgagcagcatcacgagcagcaacagcagctgtgctaacaacgcgccggcgacgtcgatggcgtcggcggccaacaaggctacccagcgagagccgcagcagccgaagaacgcgccgtcagccaacaggacttcagagaagcggcagagggttccctcggcatacaaccgattcatcaaagatgagatacaacgcatcaaggcaagcaatccggacatcacccacagggaggctttcagcgctgctgccaagaactgggcccatttcccacacatccattttggcctgatgccggaccagggcctgaagaagaccggcatacaaagccaggacggagctggggaatgcatgctcttcaaggacggtctctacgctgcagccgccgccgctgcagcagccacagcagcatctagcatgggtgtcactccattctaa

SEQ ID NO: 22452 - DNA, 1391 bp, Oryza sativa
  unsure (1)..(1391): unsure at all n locations
  Clone ID: TF_OsC1270_1
tttgttccctccacttcggcctcttcttcctcctccatccccatcctccatcggatgcactagtagctggccttgtaccctacctagcttagctacccacccatgtcctcctcctcgtctcctctcgctgtctgcctttgacttggaggcctagctcgtcgatcgccggccatgcgggtgcagtgcgacgtctgcgccgccgagccggccgcggtgctctgctgcgccgacgaggccgcgctctgctccgcctgcgaccgccgcgtccaccgcgccaaccgcctcgccagcaagcaccgccgcctcccgctcgtccacccgtcctcctcctcctccggcgacggtggcgccgccgccgcgccgctgtgcgacgtgtgcagggagaagaggggcctcgtgttctgcgtcgaggaccgcgccatcctgtgcgccgactgcgacgagcccatccactccgccaacgacctcaccgccaagcacacccgcttcctcctcgtcggcgccaagctctcccctgccgcgctcgccgaacagccgctcccgtcctccgactgcagctccgacgacgacgccgccgccgccgccaccgaggaggagtaccactcctccgccgcatccaccggcgccgcagtgagcgcgcctcttgacgcctccagcaacggcgccggtggcggaggaggagtaggagggagcagcatctccgactacctcaccaccatctgccccggctggcgcgtcgaggacctcctccccgacgacgacgccttcgccgccgccgccgcgcaggcggggaaagagaaggacgagcgcgtgccgttcctcgacgccgacctgttcgacgtggtcgccggccggccggagaagaagggcggcgcgtgggcgccgcacgtgccgcacctgccggcgtggtgcctcgacgaggtgccggtcgtcgtcgccgcgtcggcggcgccagcggcgacacctgtaaaggcgaagcagggacacgtgcgggacagccactggagcgacagcgacgcgttcgccgtgccggagttctcgccgccgccgccgccggccaagagggcgcggcccagctcgcagttctggtgcttctgaacgccgccgccgccgtacaatctggccgccggcgagctcgacgaacacctcgatggatcgatcgaacacctgtgtaatcactcagctggtcactactacaagtagcaatcagcaagcttgatgtgccactgttactagctgctgctgtttaattagtgagtactaagctactactagttaattttggtgaaaactatgctactttgttactatataatgaagtatgtgtatcaaactaaactgagatgttggtaattaattatcgtattttgtaaaantnaaaaaanttnaaa

SEQ ID NO: 22453 - DNA, 1300 bp, Oryza sativa
  Clone ID: TF_OsC280_1
gcacgcctgagacgagcccactctacttctccttgcaacatcgtcgttagtcctctaacccaaggcattgacctgagcttgttgtgcgcttctgccttatctgcatcccctcccggccgagacgcgaccatctttctttcccgcttcgttagctgtctctgccgatcgatcggactggacggggagacatgaaggtgcagtgcgacgtgtgcgcggccgaggccgcctcggtcttctgctgcgccgacgaggccgcgctgtgcgacgcgtgcgaccgccgcgtccacagcgcgaacaagctcgccgggaagcaccgccgattctccctcctccaaccgttggcgtcgtcgtcgtccgcccagaagccaccgctctgcgacatctgtcaggagaagagggggttcttgttctgcaaggaggacagggcgatcctgtgccgggagtgcgacgtcacggtgcacaccacgagcgagctgacgaggcggcacggccggttcctcctcaccggcgtgcgcctctcgtcggcgccgatggactcccccgcgccgtcggaggaagaggaggaggaagcaggggaggactacagctgcagccccagcagcgtcgccggcaccgccgcggggagcgcgagcgacgggagcagcatctccgagtacctcaccaagacgctgcccggttggcacgtcgaggacttcctcgtcgacgaggccaccgccgcctcctcctcctcagacgggctatttcagggtgggctgctggctcagatcggtggggtgccggacggttacgcggcgtgggccggccgggagcagctgcacagtggcgtcgctgtcgccgccgacgagcgggccagccgcgagcggtgggtgccgcagatgaacgcggagtggggcgccggcagcaagcgacccagggcgtcgcctccctgcttgtactggtgaaaaaaaaacgtgcgcttatcagccacagccagtacgaaatgtacgatgcttgtgtaccagtgtactgaggtagtagcgttagaagattaggaatttagtagtggatgttgattttgagcttaacgcgtgtcttggatgaatccctgactcctgaatgtttggggaattaatgtgagtggtagtgtcctctttgggcggcaagaattatacgccccttgcgaacatgtcgaactgtacggtctgccatttaatctgcacgttcacccctctgcatcttctgtactgcaaatcagattttgtgactcttccattaggttatgaagttttcaggatgttgcagcgcaaaaaaaaaaaaaaaa

SEQ ID NO: 22454 - DNA, 1014 bp, Oryza sativa; identical to SEQ ID NO: 13165
  Clone ID: TF_OsC1270_2

SEQ ID NO: 22455 - DNA, 1183 bp, Oryza sativa
  Clone ID: TF_OsC1273_1
attgacgtcttcgcacaggcacccagccatgctgaagttggagccggagttccccggcctgccgcagcggtgcgactcgtgccggtcggcgccgtgcgcgttctattgcctcgccgattcggcggcgctctgtgccacgtgcgacgctgacgtgcactccgtcaacccgctggcacgccgccaccgccgcgtaccaatgggcgtggtggctgcccccggcgccgggggagccttcgtcgtccgccctgcaggcggtgtcaactcctcctggccaatccgagagggcaggaggtgcgactacgacgatgacgacgccgacgccgctggggaggaagacgaagaggcgacgtcgtggcttctgttcgacccgctcaaggactcctcggatcaggggctgccgccgttcggcgacgcgctggtggccgacttcctcaacctcggcgggggcgccggggagaaggaggacgcgtcgtcgagcaaggactgcagcagcagccacgggaagagcagcgagggcagccacgagttcgccgtgcccggcgagcccgtaccggagcgccagggcttcggggcggtgagtatggacattaccgactacgacgcctccaatttcaggcgcgggtacagctttggcgcatcgctcggccacagcccgccagcgacgacgaagctcgtggcgcgcgcatcggtcgacgggcggagcactggcggcttggttgacgggcggagcaccggcgactcgcggggcggcggatccggcggaggcgactcgcggggcggcggatccggcggcgacgactcacggggcggtggatccggcggaggcgactcgcggggcggcagatccaacggcggcgactcgcgggggggcgtcgcccagcggcggcgactcgcggggcggcgcggtgcggcgagtccggcgacggtgacaaggagaaggggcgactcgtggggcggcgtcgcccgacgaatccaacggcggcgactagctttgcgaggcggcaggtctgattcgcaccggtggatggcagctcggcgacgaggtgcagtggctgggctctacggcagtgacccacctcctcgtcgaccttgggcctccctgtcgccggcgatggaggatgggcacgccggtgattttgattttttttttcaaaatctggattccaattttcttcttttttaa

SEQ ID NO: 22456 - DNA, 1429 bp, Oryza sativa
  Clone ID: TF_OsC1273_2
attgacgtcttcgcacaggcacccagccatgctgaagttggagccggagttccccggcctgccgcagcggtgcgactcgtgccggtcggcgccgtgcgcgttctattgcctcgccgattcggcggcgctctgtgccacgtgcgacgctgacgtgcactccgtcaacccgctggcacgccgccaccgccgcgtaccaatgggcgtggtggctgcccccggcgccgggggagccttcgtcgtccgccctgcaggcggtgtcaactcctcctggccaatccgagagggcaggaggtgcgactacgacgatgacgacgccgacgccgctggggaggaagacgaagaggcgacgtcgtggcttctgttcgacccgctcaaggactcctcggatcaggggctgccgccgttcggcgacgcgctggtggccgacttcctcaacctcggcgggggcgccggggagaaggaggacgcgtcgtcgagcaaggactgcagcagcagccacgggaagagcagcgagggcagccacgagttcgccgtgcccggcgagcccgtaccggagcgccagggcttcggggcggtgagtatggacattaccgactacgacgcctccaatttcaggcgcgggtacagctttggcgcatcgctcggccacagcgtttcgatgtcatcgctggagaacatgagcacggtcccagactgcggtgtgccagacatcaccacctcctacttgaggtcatccaagagcaccatcgacctcttcacggcagcagctggctcccctgtggcggcgcacagcataatgtcgccaccgcagttcatgggcgccattgacagggaggccagggtgcaccggtacagggagaagaggaagacgaggcggttcgagaagaccatcaggtacgcgtcgcggaaggcgtatgccgagacccggccgaggatcaagggacgcttcgccaagcgcagcgacaccgaccttgaggtcgaccagtacttctccaccaccgccgactccagctgcggcgtcgtgcccacgttctagcgagcagcttggccgcacgcctggaagacaatcaaagaagctcaggaatgaatatattctcccactgtatagtacatcttggttgcttagctatatatatatatatatatatatatatatatgtataattcgccgaatcgcctctaaatttgtgggaggtatgaggcttcagctgtaggtatatatagatgctagaaagatgctccttgtaaaattgtgcaggagtaaatgtaatcatgtagtcatccctccttctccaatcctttacaatacatttctgtttttttattcagcttaaaaactacgttttgttttttctcccgataacgctattgatctgatggtaaattttgatcaataataattctcgttcagaaaaaaaaaaaaaaaaaa

SEQ ID NO: 22457 - DNA, 1542 bp, Oryza sativa
  Clone ID: TF_OsC101635_1
aggtcctctctctcgccgctccccgcgctgctctgttggcttcgctgctgctgctgctgctgttctacgcgcgcgacacggaagagagaaaagtggttttttattgggttcctaagccctttttgtttccagaggcttctggattgatcggttgatctctctcccttcccctctagggtttcctgggggtggatctgaggagcggcggcgctccttcgtcccggtttatgtaaatctgatcgatccagaaagtttgtgaaaaaagagtgtggcacatacctaaagctggcttaaagtttgtccatagctaatatcatgggcgctctttgtgatttctgcggggagcagaggtctatggtttattgccgatcagatgcagcatccttgtgcttatcgtgtgaccgtaatgtgcattcagctaatgctctttctcggcgccatacaaggacacttctgtgtgatagatgtgcttcacagcctgccatggtccgctgccttgtagaaaatgcctcgctttgccaaaattgtgattggaatgggcatagtgctgggtcttcagctgctggtcataagaggcagaccataaactgctactcagggtgcccatcatcttcagaactttcaaaaatctggacatttgtttcggatattcctaatgtagctcctgagccgaattgcgagcaagggataagcatgatgagcatcagcgacagtggtgtcagtaatcaagacaatgctgcaggggacagcagtttgttagatattgctagtgcaacccttatgagtgatcttggcactgctggcaagccaaagtctttgataggctcctcatctgaagctggcgtgaaccttcttccacttgctactgatcagatggctggatccgtggattcgacatcagctaaggtgccctatacggcagaccaagatatgttcagcaaagacagtatatatgaagatttctgtgtggacgatgttgatcttagtttcgaaaattatgaggaactatttggcacctcccatattcaaacagagcaactgtttgatgatgctgggatcgacagttactttgaatcgaaggaaataccttctggaaactctgatgagcagcccaagctgatgcagccagtgaccagcaatgcagtatctgctgattcagggatgtcgatcccaggagccaaaggtgattccagtctttgtatacctgtgaggcaagctaggtccagtatctctctttcattttctggtttgactggtgagagcagtgctggagattaccaagattgtggggtatcaccagtgctccttatgggtgagcctccttggcatcctcctggccctgaggggtcatttgctggagctaccagagacgatgctatcacacgatacaaggagaagaagaagagaagaaaatttgacaagaaaatcaggtatgcatctcgcaaggctagggcagatgtgagaaaaagagtcaagggccggtttgttaaggctggtgaagcatacgactacgatccactctgtgaaacgaggagctactga

SEQ ID NO: 22458 - DNA, 1026 bp, Oryza sativa
  Clone ID: TF_OsC91_2417
caaggtactggatcttggccaggaggaagctgggagatcagaaggcgcctctcttccccacccctcacatcaccatcggcgccggcggcagctccacctcctactacgagtcatgggaggaacgtgccttcgcggaagactccgcagggcatctcgggggctgcatctggccgccgaggtcctactcctgcagcttctgcggccgtgagttccggtcggcgcaggcgctgggcgggcacatgaacgtccaccggagggaccgggcaaggctcaagctctctggggttgtggaggacggcaccggcggcgaaagccacggcatgccgccaaaccaaaagtacatgatacaaccatgccctccccaaattggcaccctgcagcacgcctacagcccaaaccctagaagtggcagtattctcgctgctgacactaaccctaattccatatgtgatgttgtcgcgtaccctgctagatccttgcttcaagttgcagctgctagaactgccttgggcaaacaagtcctgaacgcccctcttgtctcatcgaagtcgccgtcggctggtagagaacatggtaagagggagacgttgtttcttggtgctgttcgattggcacaggatcatgacacggtgagttctaatcttgacctgcgtgttgggaaaaatgaattgaagataactactgttttggggtgccgatcaagaagggactttatgtacgataacgaccgcgcggatgatgaaaagactgttgaagcaagtcacaagaaaagaagaatcgatttggaggtaaaccccctgattctaacttcttcaaccagtaatcatcaacagcaagatggtggtgatgaccaacatcatgaaaagatactaaaactttatcgtagctcctcggttgaagaactagatcttgagcttagactcggggaagccccaaaagaacagtaagtttcatatcccctgttgtatttcaacttgattaccaatgtttaatttggatttattcacccctcgtgtttccttgaat

SEQ ID NO: 22459 - DNA, 312 bp, Oryza sativa; identical to SEQ ID NO: 13181
  Clone ID: TF_OsC376286_1

SEQ ID NO: 22460 - DNA, 623 bp, Oryza sativa
  Clone ID: TF_OsC267651_1
ctgcaggttgggatttgctgcaaagcagcagctaagatagctaagctaagctaagctagcctcactccatgctcaccgctgtctcggctttctcccaggagggtagaggagtagcagctactagcggtggtggtggtcctttcaccgggtggtgctcctcccggcggcggcggccggaggcgccggcagccatggatcggtacaacggcggcggcggcggcggcgaggagggggatgagcagctggacctcaacctgtcgctgcagccgtcgcaggcgaacgagccgccggggtacttcacctgcacctactgcgacaagaagttctactcgtcgcaggcgctgggcggccaccagaacgcccacaagttcgagcgcagcgtcgccaagcgcacccgggagctcgccgcggcgcgccgccagcaggccgccgacgaggaggcgcggcgaggggcagggaccaccaccaccagggagcccacgggcaatgcctcgtcgtcgtaccagagggcgtcgccgccggcggaggctcgccgccgggacctcctcaccgacgacatcgacctgtccctgaagctatgatcgatgattagttaattttctcggcgccggctccggctgtgt

SEQ ID NO: 22461 - DNA, 1977 bp, Oryza sativa
  Clone ID: TF_OsC33740_1
atggtggctcagggcgacgacattgacgacaatggtgagccagcgacggcaggcggcagcaacggcaggcggaaggcgtgcccactgggtatccaccgggcatacctgtgcccgtcgggcataggttggcttaggttgagatgctcaaccagcccattagcctggcccgccgatcgatccagatcaaccaccctcctggccctcgcgtcgtgcggggctgcgcgcctagagaaggtcgtaattaggctggagaagcgcttgcttggcccaagcatgttgtcgcctcctgatggtttggaacttctcgtctcctacttggctgtaaaaaagagcaaagcagtggttgtctcaggcggggaagcagctgagaggcggctccttagggatcagagaatgatttactgcccaggcaagcaccttgaacgtgcatgcatccgctggctcaaagtgctcgataagctagcggttgagcttgttgaggatgtgcttgagggcctctggctcacagagtggctcaaagtgctcgataagctagcggttgagcttgttgaggatgtgcttgagggcctcctcccctttttctttttcctcctctcccccccccttcaccacagcgggcgccggcgagcggcgaggccgggccggatctcgccgccgcccaccgcttgacctccctccgtggcgctgcctccagccaaatctctaaaagctcgggaagaaaataacaaaagcagcaatggacgtcgatttttggggagtggtaattgagccgtgcaataagaaggagatcttttgtcctgaggataccctgtatcatctaacatcggtagcccttgatgaggcttacgggctaaaagactccaatgtgaaagtatttgtcgaagttaatgatgagaagtttgcgattgggacgctttcctccaaaaggcatccgcatatcaaggttgacttctgtttcaagaagaactttcaactattccacacctcactaatcagcaaagttgccttttgtggctatcaagtaaagaatttgggaaaattcactgattctgaaggtgatgaatctgatgaggaggttccaccagataatatgatcaaagaagcacagaaaagtaaacttcctgcaaagtctgctacagttgcatccgccatgcaaaaggcttttgtaaaggaaatagagcactatgagaaatcaaaagctgatgatgacaacaatgaacgataccgtgatatttcagtagttggtgaatctactggtaatgaggattcaagtgatgatgctgattatgaaggtaagagttctgatgaagaagagactactgcaaaggaaggtgagagtactgatgaaaaagagactcctgcaaaggaaggtgagagttctgatgaagaagagactcctgcaaagaatactaaagaggaaaatgaaccagtggtaacacccttgaagacatttccacatgagatggcaagatagaagcaccaattacggacaacaaaactggtactaatactagcaagagaggtagtcatcttcaagttacaaaccctcacccagcaaaacaggcaaagaggacgcccataaagaacgacacgcctaagcgttctgctagctatgtctgcaactcatgcaaaaagactttcaactcctctggtgctctgaaggatcattcaaaggcgaaacaccctgcaaccaattgatacgagataacactagtctgtgttagattgttagtgataggtaactgaatatttttttttcgccgggagagagagagtatttttgaagcagctatttcctagcctcatctgaaacaatattaggattcgagacgatggtctcttcaacataattttggaacactttatgtgaaaagattctggaacgtagataccacagtttctttatgaatgagtgctgaacggtttcattgttcaaaaaaaaaaaaaaaaaaaaaaaaaaaaaaaaaaaaaaaaaaa

SEQ ID NO: 22462 - DNA, 6046 bp, Oryza sativa
  Clone ID: TF_OsC9089_1
tctgactcctcctcgtcagtttgcccgccgcggcgccgccgccgccgccgccgatccccatccatcccgcgagcgagcagggcgccgtcgttcgtcctgctgcatccgccgcatcgctgtaaacatgaaccctttaaagaggtcattggaatcatcttctcaggaacatgaagcaggcaaacagaaactgcagaagagagagtgtcaagatttcactcccagaagatatcagcttgatgtctatgaggttgcaatgcggagaaacacgattgcgatgcttgacacaggagccgggaagacaatgattgctgtgatgcttatcaaggagttcggaaagataaacaggacaaagagtgctggaaaagtcatcatatttcttgcaccaacagttcaacttgttacacagcaatgcgaggtgattgaaatccacacagattttttggtaaaacaacactatggtgcaaagggggttgatcaatggacaggttatggtcatgacaccacaggtgttcctacaagctttacgcaatgctttcttaatcttggacatggtatctcttctcatttggattgtgaaggtcagttctgtgaattggagaacctgttagatgctaagatctacacagtttcagatagagaagagatagagttttgtgttccttctgcaaaagaaatgtgcaggtactatgactcgaaaccagtttgttttgaagatttgagtgaagaattgggagttttatgttccaagtatgatgcattgataacagagttgcagaataagcgaagcgacatgtataaagatgctgatgatataacaaaagaatcaaagagacgcctttctaaatctatagcaaaaatttgctactgccttgatgatgttggtcttatttgtgcaagtgaggccacaaaaatctgcattgaaaggggccaggagaaaggttggctgaaggaagtagttgatgccacagatcagcaaactgatgcaaatggatcacgcctatttgcagaaaattcagcgcttcatatgaagttctttgaggaagccttgcatttaattgacaaacgcctccaacaaggtatcgacatgcttctaaactcagaaagtggatgtgttgaagcagcaaagacgggctatatttccccaaagctctatgaactcatccagatctttcactcttttagtaactctcgtcatgctcgatgcctcatttttgttgatcgaaagatcactgctagagtcattgaccggatgattaagaaaattggccaccttgcacatttcacagtttcttttcttactggagggagatcttcggtggatgctctgacacccaaaatgcagaaggatacattggattcatttcgctctggaaaggtgaacttactatttactacagatgttgctgaagagggtatccatgtcccagaatgctcttgtgtaatacgatttgatttgccaaggacaacacgtagctatgtgcagtcacgtggacgagcacgccaggaagactctcagtacattctcatgattgaacgggggaacgtgaagcaaaatgatttgatatctgcaattgtgagaagtgagacttcaatggttaagattgcttcaagcagagagtctggaaatctgtcgcctggttttgttcccaatgaagaaataaacgaataccatgtaggcacaacaggagcgaaagtaactgctgattcaagcatcagtattgtctaccgatactgtgagaagcttccgcaggataagtgctactccccaaaacctacatttgagttcactcatcatgatgatggatatgtgtgtacattagcattaccaccaagtgctgtgcttcaaattctggtgggcccaaaagcaagaaacatgcacaaagcaaaacagctcgtttgccttgatgcatgtaagaagttgcatgagctaggagcacttgatgaccacctttgtctatctgttgaagatccagttccagaaattgtaagcaaaaataagggtactggtataggtacaaccaaacggaaggagctacatggtacaacaagaattcatgcttggtctggcaattgggtgtcaaagaaaactgcactcaagcttcaaagctacaaaatgaattttgtttgtgaccaagctggtcagatttactctgaatttgttctgttaattgatgcaactttaccggatgaagtcgctactttggagattgacctatatttgcacgacaagatggtcaaaacttcagtttcttcttgtggacttcttgagttggatgctcaacagatggaacaagcaaagttgtttcaagggcttctcttcaatggtttgtttggaaagctgtttactagatcaaaagtacctaatgctccgagggaattcattcttaataaagaggatacatttgtgtggaacactgcgagtgtatatttgcttttaccaacaaatccttcttttgactccaacgtttgtattaattggagtgtcattgatgcggcagctacggcagttaaacttatgagaaggatttattctgagaataaaagagaattacttggaatatttgattctgaccaaaatgttggagatttaattcatttagctaacaagtcgtgtaaggctaacagcctcaaagatatggtagttctagcagttcacactgggaagatatatactgctcttgatattactgaattatctggcgatagcgcttttgatggtgcatctgataagaaagaatgtaaattccggacattcgcagaatatttcaaaaagaagtatggcatagtacttcgccacccctcacagccactactagttttgaagcctagtcataatcctcacaaccttctttcctcgaagttcagggatgaaggtaatgttgtggagaatatgagtaatggcacaccagttgtaaataaaacaagcaaccgtgtccacatgcctcctgagttgctgattccccttgatttacctgtggaaattttgagatcattctatttgtttccggctttgatgtatcggattgagtcattaacgttagctagtcaactaagaagtgaaattggatacagcgattctaatatatcaagtttcctgattctggaagctattacaacgcttaggtgctctgaggatttctctatggagcgtctagaattattgggagactctgtattgaagtatgcagatgaggggcagctatcatccataaggtgccatatgatttgtaatgccacactttataagcttggaattgaacgcaatgtacagggttacgtacgtgatgctgcatttgatcctcgtcgatggctagcaccaggacagctctctattcgtccatctccttgtgaatgccctgtaaaatctgaggttgtaactgacgatattcatatcattgatgacaaggctattgttctaggcaaggcgtgtgacaagggacacagatggatgtgttccaaaaccattgctgattgtgttgaggctattattggggcatattatgcagggggtggtttaagagcagccatggcagttctcaaatggttgggcatcggggctgaaattgaagaagacttgattgtgcaggccatattgagtgcttctgtgcagacttatcttccaaaagacaatgtatttgaaatgcttgaagcaaaactaggctattctttctcggtgaaaggtcttttggtagaggctctgactcacccatcacagcaggagttaggtgcaaaatactgctacgagcgcctagagttcctcggtgatgcggtcttagacattctgttaacaagatatcttttcaatagtcataaagacactaatgagggggagttgacagacttacgttctgcatcagtcaataatgaaaactttgcacaagttgcagtaaagcacaacttccatcactttctccagcattcttctgggcttctgttagaccaaattactgaatatgtgaataggttggaaggttcatccatggacaaagttgaactgttatcagatggactcccaaaagggcctaaagtccttggtgatattgtagaaagtattgcaggtgcaattcttttagacaccaaacttgatttggatgtagtctggggtatttttgaaccccttctttccccaattgtcacacctgagaatctggagttacctccatacagagagcttatcgaatggtgtggcaaacatgggtattttgtaggaattaactgtagagatcaaggagacacagtagtggctactcttgatgtacagctcaaagaggtgcttcttgtgaggcaaggttttagcaagaaaagaaaagatgcgaaagcgcatgcatcttccttactgctcaaagatctcgaggaaaaaggactaataatcccaaagaatgcaagcaagacagaacaatttgaaaagcattgtggcagcactaatcccttcaacaatttgcatgtcgatgcaatggatacacagactccaaaaccaaccaaggaaaaaaacgcagctgattcaaggaacatttctgatcccctgcttggtaaaccattgcacgtgattgtgaaaacgagtaaaggaggaccacgcattgcattatatgagttgtgtaaaaagttgcaatggccaatgcctacaatggaatctgagaaagtacaaccaagctttagcagcgtgtgctcctcccctggtggttcctctcagaaagctaccccccaagcgttcgctttcgcttcaaccattacattgcatataccaaatgctgatgtgatcagcctcacaggagatggccgtgcagataagaagagctcacaggattctgctgccctgttcttgctctatgagcttcagcggcgaggtattgaagtgaagccaggaaaggctgtttcatttaacgttgatgatgagtgtgtgattcacatatcacaggttgcactgggagaaacaaagaaggcaggaagtgagaatgtagttgtatctgttaaagttgatggcaagaagacagttattggaaatctatcggctaaaaatcatcctcaatttatgtgtgatttgtttattggcaatgactttgagctttcacacagttcaaagactactagtgtcttcctgtgtgatgaagatgaaaacatgtctgacatctgtgacattatgggtaaacatctgggaaggcctgttgcagaggaaggtaaaaaggataattctgatgatggtatggacttgtcctcatctgatgatgatgatgattctttggactcgtcctcatccgatgatgatgatgatgagtcaggtgatgaggatgatggatctgatgagttaccagcagaaatggagtccagtgaagaagaggatgggagtgatgggcaggatgaatcatcttcatcgatggtgtccactgatgaagaggatgaaagtgatgaggaagatgaaattccagagaaacctgagagcagcaagctgacagctgctggatctacactttcttctggtaagaagtcaaagactgcaacacactttggccagaaaacaggggactcaactttagctaatttttcgcatttactaaaggtgataagaatactcatccagcaaaggaagatggcaagacgccggcaatcagcaaaccaaataaggagactcccgaatcctccggcacccatgcctgcaagtattgcagcaaggcatttagtagtgataaatcactccggtctcatcagaaggcaagacatccagccaagtgaactactggtggcatgtttgactgcagctgcttttgcttcaaagatgatcctctaaccagttgcttgccaccactcagctttgtacatcttctccagtgttcaccttctgaattatgataagagggtacccaaagaatggagaacagctggcctggttctggtgtgtgtcagttgttatgtgtgtttgtccatatgttatctgcgtagaaactgaataagcccccaaagttgttgctgacgataaacacgcaaatatcatgcccctgtagcctgtaggtgttaaaccaattgttcaaggataaaaagaaagacccttttc

SEQ ID NO: 22463 - DNA, 1245 bp, Oryza sativa
  Clone ID: TF_OsC312792_1
cggctggccggcctctcctatagcttagcttagcttgcgagacttcgttccactagtcttctcctaatttcttcctcctgcaaatatgcgtagtcttctgtcatcgtcgaccgtcaagtgtgtctctcgctgcacacggagatgcatgcacctcttgattgattgctcggtcgactgattgcttcttacacaccgcaactcgctctaattagttggtttagcctgtgtagatttgtagtattagaatcgtcacattcaatatgtattagatttatttattttgagacgagctagagccgcttgattattgtcgatcggtactagctagtgctacttagtaagccggctagtggagtactcaatctctgctactactcggctagcagctggctgctgctgcagcagtagaacatcaagagaggaggttaattagctagtacttagtaccttggctgctttaatgaactcgatcgatccacagctagctagcatagcagagcagcagtaatggaggagcaaagaggcgaggaggagtgggtgatgtggggatcggcagggagaagacgaatcatcaggcaatcggcgtcgtgggaggagcaggcgttcgcgcgcgatgcggcggccaacgccaacctcggcggctgcgtgtggccgccgcgcttctacacgtgcagcttctgccagcgcgagttccggtcggcgcaggcgctcggcggccacatgaacgtgcaccgccgcgaccgggctcgtctccgacagaggcagacctcctcctcctcctcccccagccaccaagaagaagaagctgaagcaccccaagatcagcaagctggcccttactatacctctttctctaaacctagcaccacctccaccgataatactacttgcagtaacgacatactactgctagcaagagatcaagaaaccatcaagaagagggtaccgagacagcaagtacaagtagttgcagatcaggacgaggacgaaccggccgggagaaggtacaagaggaggaggcttggtttggtggatcagctgccgtcgtcatgtgaaggaggagatcatcatcatcaggtactgatcatcacaccaacaacagccgccgcaagccctagctctataattgcttctgcttctgcccttgtggttggggatcagcagcatcaacaagcaggatcagtactagatctagagcttaggcttgggactagtactcctcctaaagctgttgtgcacgcttaa

SEQ ID NO: 22464 - DNA, 1332 bp, Oryza sativa; identical to SEQ ID NO: 13186
  Clone ID: TF_OsC1713_4288

SEQ ID NO: 22465 - DNA, 2771 bp, Oryza sativa
  Clone ID: TF_OsC12651_1
acaaaaatccattgaaccccacacgcccggctcccgatccgacaccaaaggagagagccgcctcgccttcgtcttcgtcttccccccgccgcgctcgtgccctcgcctcgcctcgcctcgccgaaaccctaaccctagaatcgtcgatcgcccgcgagagaggagggggagggggacgagggggaaccgcgcgtgatggggaagaagaagaagcgcgtggagaaggtgttctgctactactgcgaccgcgagttcgacgacgagaagatcctcgtgcagcaccagaaggccaagcacttcaagtgccacgtctgccacaagaagctctccaccgccggcggcatggccatccacgtcctccaggtccacaaggagtccgtcaccaaggttcccaatgcaaagcctgagagggaatcaacagagattgagatctttgggatgcaagggattcctccagatgtgttggccgcccactatggagaagaggaagacccttcatcgaaggtagccaaagtggaagtgccatcgctaaggcctcctgttatgcccaatccagcgggcatggtatatcctccacgaccggcctatggtgtagctccacctatgtataaccctgcactgaatccattgatggccagacctccaatctggcctgctccacctccgcaaccttggtttacacaaccagtagtttcggttcctcaaatggcttctgggcttgcaccacaacagccactatttccaattcaaaacatgcctgctcctatgacatcagcacctgcaaatttacttcagacttcgttccctatggcccatgttggagtaccttcacctgttacccctcaggtgtcacaacctctctttcctgtcagtacatctgctggaaacggtgcagtaagttctccatatgtagcatctgttgcacctggaagcatcccaacaagctctccatcagttgctcctgcaggagtaggatatgcagctactaaccaaggtacaggaggtccagcggctgtacctccacccgcttctaataataaagcaccagccacccaacctggtgcaaatgaagtctatctggtgtgggatgatgaagcaatgtcaatggaggaaagaagattgtcgctcatcaagtatcaggtgcatgctgaaactagccaggagttccaagtaggtatttacattgttctacctggtggagcaagagtgttaaggccagatgagctactactcgatcactactactaccaccactcgtcgtcgtctgatccatactacagcacaccgatccttccaccctacggcgacgcattctcaccgccgaaccctcctccccctcctcctccgatgtcaccaagcgacctcatctctccgatcattccggcaccaacattcacatacagttctcctccaccgccgccactctactaccctccaccgccggatataagcccaagcccgccaccgtctattccctgatagatacgcctagtctaccgaagacaacagtagctcctacagtcggtgcattcccctgttcctgttctccgtttatttaactagtttcctggaggaactgtgttcagtcaaaggaatatgttgcttctgatcttggaaagctttgaatgtatctttcccacccgagtgcaagatgttagtctagaacccctatttcccattgtcgcttaaagaaaatgtgatttgttggtcaactctggatatctcatcctgaattaccaaaatcacagtttactagaaacatgcaagcagataattcgttatttctgatggcacccgagcctgtactaataacaacttattgcgcacctagtccaccgatcgttacaccgatgccacccataatctacccaagcccaccggaagtcacacccagcccgccagaaatcacaccttatccaagcccaccggaagtcacaccaggcccgccagaaatcacaccttatccaagcccacccgaaatcacacctagcccgccagagatcacgccgtatccaagcccacctgaagttgtacctagcccaccaaagatcaccccatatccaagcccgccggaagtcacacctagcccacctgagatcaccccatatccaagcccacctgacatcgtccccagcccgccaagctatgagcctagcccacctagctatgaacctagcccaccggagtacgcgccagaaccaccggtgtacgcgccgtatccaccggggatcttcccgagtccaccggagtactcgccggagccgccggcatacgtgccaagcccaccgcagtacgcgccgcagccgccgtcatacgtgccaagcccaccggagtacgcgccggagccgccggtgtacgcgccgtatccaccggggatcacaccgagcccgccggagtacgcgccggagccaccgccgggcccgcccggcggtggtggcgggtacctgccgccggtggtgttcccgccgccgtacgcgtcgcgggggccgccggggaggcgcgcggtgtggtgcgtggcgaagccgtcggtgccggaggggataatccagccggcgatggactacgcgtgcggctccggcgccgactgcgactccatccagccgtcggggccgtgcttccggccggacaccatgatcgcccacgcctcctacgccttcaacagctactggcagcgcgccaagtccaacggcgccacctgcgactttggcggcaccgccatgctcatcaccaaggatccaagttatggtggctgccattacagtacgatgtga

SEQ ID NO: 22466 - DNA, 2099 bp, Oryza sativa
  Clone ID: TF_OsC83960_1
atgcatgaagcaagtgaagtgaaaatcccggctaggcctaggagtaatactatatgcaatccgaggctcgacgtgatcgtggcggccaaccacagcgtcttcatcaagggagtactttcgctagctatatgcatgcaggtgtccactgccgttggcagttgcgactacgcctcaaccgtgccggccgctatagtgtctagtggtagtggagtagtaaatcacactagttactgtacatgcagatccatagacatcatgctgcaactgccgctgccatggccactagctctgcacctgaactgcacaaatggagtggagtagtagtactctgctccagcaacatccaaagcataaggaagcaacaagctaagaagcagcatcattcactccacgagctagcaaaaaggatagcaatggtggaaccggggagagcgcgggagacgaaggtcaccgcctcagcctcaagctctgcaggctcagacgccgctgtcatgaagaagaagaagaagaagaagaagaagctggtggtagcaagcaggaaggtggatgagaaagacaagaagcaggtggattacaagtgcagtagaagcagcggcagagacgagtgctgcaaggtggagagccgtcatcagcagtgcacagagccggagagcccttcctacagaaacagcagcagcagcagccacgccggccaccaccaccaccgcgccgccgacggcaagaagctcggctgcaattccgcctccatctgcaaggtcaagcaagacaacccgatgcagcagcacatgcgcagggcggaggatgagctcaaggtgaaggacaagccgccggtcgccgagccgtactgcaagcgcagagcttcggtgagcgcgtgcaacatcagcagcgagcggtcggtgaagaagtcagtgaagcagcagcagcaggaggcgagcagcagcttgcagtcgtcggcgtcgatatcggcgtcgtcgtgttcgtcgacggcgggtggtggggggtcgttccgggggatgcagcagttgagcctgaggcggctgtcggggtgctacgagtgccacatggtggtggatcccatcagcggcgtcttccgggacagctcctccatgagggccaccatctgctcctgccccgactgcggcgagatcttcgtcaggcccgactccctccacctccaccagtccatcaggcatgcagtgtcggagctgggggcggaggacacgagcaggaacataatatcgataatattccagtcgagctggctgaagaagcagagccccgtgtgcgccatcgaccgcatcctcaaggtccacaacgccgcccgcaccctcgcccgcttcgacgactaccgcgccgccgtcaaggccaaagcaatggcccaccgccaccctcgctgcaccgccgacggcaacgagctcctccgcttccactgcgccaccctctcctgcgacctcggcctccacggcgccacccacctctgcgaccacctctcctgcgccgcctgcgccatcatccgccacggcttcaggccgcccgcgccgggggccggcatccgcaccatggccaccagcggccgcgcccacgacgccgtcgtctcgtccgggtcggagggcgaccgccgggcgatgctggtgtgccgggtgatcgccggccgggtgaggagggaggaggcggcggcggcggcggcggaggaagaggaggaggagtacgactcggtggccgggacgacgccggggctgtactccaacctggacgagctggacgtcttcaaccccacagccattctcccttgctttgtcgtcgtctacagggcctgatcgattagtgatcattaaccaataataataatcttagctagcatcatttccttcactcttcgttaattgcatgtaatcaatcgatcgatcgatgatgatgatgatcccatttataattaattaattcatcgttaatgtctgattattgtactatctgatcgatcgatcggtattgactagtgatcagcgtatcaatcaatttgtacaatcagatagatgtttgttagtttcttctactgaaggaggagtacattattgcatactagagctaaaaaaaaaaaa

SEQ ID NO: 22467 - DNA, 472 bp, Oryza sativa
  unsure (1)..(472): unsure at all n locations
  Clone ID: TF_LIB3598-028-P1-K6-G8
ttcgatggnagnagttcttgatggcgccgcgccgatgctgtcgtcgtcgccggcggcgagcggcgaggaggtgggggcgcggaagccgcagcaacggtgcggcggcgccgaggggtggtccaagcggaagcgctcgaggcggcgccaccgcgaccgcgccgctgcgccgccgcctcacggggggggggaggagcacctcgcgctcagcctcctcatgctggcgcgcggccaccgcgacccctcgccggcgccgcaggagcagcacgggtgctccgtgtgcggcagggtgttctcgtcctaccaggcgctcggcggccacaagacgagccaccgccccaggacgccgccgacgatggcggccgttgtcgtcgtagacgagccggcagcgacgacggcctcgccggccgtgtcctcgtccaattccggcttctgcngcggcggcggcggcggtaacatggtgcacgagtgctcc

SEQ ID NO: 22468 - DNA, 1642 bp, Oryza sativa
  Clone ID: TF_OsC154858_1
atggcgctctccactctcctcctcccctcctcctcctcttcctcctccaagacggccactgccaccgacacctccgaccgccgccgccaccaccaccaccacaaccacaccaagcgcaagaagaagccgccgccgccgcccagcttggagcaccaccaagccattcgccatgctgtgtcggagctggggccggaggactcggggcgaaacatcgtggagataatcttcaagtcgagctggcagaagcgcgaccgtccgatctgccagatcgaccgcatcctcaaggtgcacaacgcggcgcgcaccgtggcgccgttcgaggccgcgccggtgtcgtcgtcgtgggagcagctgaagagcctgctgagctgccggagcgcgacggcggcggcgcgcgtgcacgaccccgccgcgccgtcgtccgcgttgtcgcggctccgcagccacggcgccggcgcgtgcggcgcgtcgctctgcgccatccgcgacgtggtcgacgccgccagctccgcctccgcggcgtccaccgccgccgcgtccctcgaccgcgacaccaccccgctcacccgctcctcccgccgcgcccaccgcgccgccacctcctcctccggcggcggcggcggccaccacgcctccctccgtggcctctccggttgctacgagtgccgcgccatcaacgtcgagcccatgtcaaggaggtatccgaggccacgggagctgtgcgcatgctcgcagtgtggggaggtgttcaacaaggccgacagcttggagcaccaccaagccattcgccatgctgttaagattggatggcaaaaatacatcaaaaggtatctgtgcctagccatcttttgcatgcttgcagtcgcatctgcatctccatttgttgaagtgtcggagctggggccggaggactcggggcgaaacatcgtggagataatcttcaagtcgagctggcagaagcgcgaccgtccgatctgccagatcgaccgcatcctcaaggtgcacaacgcggcgcgcaccgtggcgcgcttcgaggcctaccgcgacgccgtccgcacccgctgccgcgccaccgccgcccgcgccgccgccgacggcaacgagctcctccgcttccaccccgccgccctcgcctgcccgctcggcctcaacggcgccacctcgctctgcgacgacgacgacgcctgcggcgtgtgcgcggcgatccggcacgggttcgcgccgtgggcgggcgcgcacccgctcggcgtgcgcaccacggcgagcagcggccgcgcgcacgactgcggcgcggcggcggcggcggcgcagcaggcgggcgggtgccgggcaatgctggtgtgccgcgtaatcgccggccgtgtccgccggaacgacgacgatggcggtgcggaggaggaggagggagcgttcgactcggtggccggcgacgaggcggcgagcagcgtgtacggcaacctggaggagctgttcgtggcgaacccaagggccatactgccgtgcttcgtcgtcatctaccgtgttgtccccgagtgaagcagcgaaacaagcactcaaaatcaattaattgtatcaaccatttgtattagcataatcgtccagcaatttcaacatcatataaatgtataaattaaatgcattt

SEQ ID NO: 22469 - DNA, 1594 bp, Oryza sativa
  Clone ID: TF_OsC254894_1
atggcctctgcagagagaagaataaggatgtggtggcgcacagctgggaggcctaagcatctatggggtcgccggagcatgctctacatgggccacagccgcatctacatggaccgctactacgaccccatcgagctccatgggcagccgccgccactgctcatgattccaggcggtggcggcggcggcggcggcggcggaattagcccttacttggtgcagagccagcatgggcatggtggcggcgtcgacggcatggagatggaggagggcggcggcttcatgggcgagcagccacagtgccacccgctgctctacaacctgtccgtgctcaaggacagggtgcagcagctgcacccgctcgttggcctcgccgtcgcccacaacgcccacgcccacggccccctcgacgtctccgccgccgacgccatcatccaggaaatcgtcgccgccgcctcctccatgatgtacgccttccagctgctctgcgacctcggcacggcgccaaccaccgcgccatcacaggagaccgccgccgcctccgccgttgttgtcaagaacaacgaccatgccgccgatgccggtcagatggaggacgaccatctcatgcagcagcagtggcagcagaacggcagccgccagcacgattacagcagccatgcccatgcgccgccggtgttccacagcgaaacggcggcaccggcaggcgcgacgtcggcgacggacacgatcatcgagctggacgcggcggagctgcttgccaagtacacgcactactgccaggtgtgcggcaaggggttcaagcgcgacgccaacctgcggatgcacatgcgcgcgcacggcgacgagtacaagagcaaggcggcgctgtccaatccgaccaagctgctcgccaagggaggcgacgagacgatggcggcggcggcgaggaagtactcgtgcccgcaggagggttgccggtggaacaggaggcacgccaagttccagccgctcaagtcggtgatctgcgcaaagaaccactacaagcgcagccattgccccaagatgtacgtgtgcaaccgctgcggccgcaagcacttctccgtcctctccgacctccgcacccacgagaagcactgcggcgaccaccgctggctctgctcctgcggcacctccttctcccgcaaggacaagcttatcggccatgtctccctcttcgccggccaccagccggtcatgccgctcgacgccccccgcgccggcaagaggcagcgatcgtcctcggcgtccgtcgccgggaacattgacgacaccaccggcattggcatgggcgccgcctgacgaccttactaactaactgtgattgtattgttgccatcacctgctgcatatatatgtccatgaaagattcaatccagtactgcatggctagttaaattagcatgacaatgctaattggaacacacatgttaatttggaaatcgatcagggcagcaatttcaggcagtttatcagttagttctatacattagcttatgagatgtgtgatgaatatatactgtattagctaactagctaggggctttagctttacaatataatactaaggtttatt

SEQ ID NO: 22470 - DNA, 1395 bp, Oryza sativa
  Clone ID: TF_OsC64601_1
aaaggtcaatcaatccctatgtatgtatggctgtatagttaatcttaccgaaaagaatcgaaagaatcaatagtctatggtccaggttccagcttgatggacatgccaaacaaatttgtaagtaaacatgcatgtatagggattaatcccccagaaaaaaattaagaagaagaagtgaaaaaaatgatcaattgatcagtgttaatcacgaaaagaattcttgagcttagctttgctcatgtcatgtcaataatggcagccgaccagcgcggcggaggcggtgagctgcagaattggcttcttgccgtcgttgaactgcccgccgagagccaggagcaccggcggcggcggcggcggcggaggagacacggactcctcgtcggacggcgccggcaggttgaggtcgagctccaggttgatgctcgtgcttccctctttcttggtgtccggggcggtggcggtggcggcggtggtggcggccgtggtcgccgcgcgctccggcggcgcgtgcagcggccggtggcgccgcatgtggccgcccagcgcctgcccggagccgaactcggcgccgcatatcgagcactcgtgcaccctcagcttgttgattatgctgccggcggcggccacgttgttcaggctcagcacggtggtgacgtccgggaccacgacggcgtccgcctgaggcggcggtggagacggtgccgacggcgtcgtcgtcgtcgtcagcggcggcttggacttgacgacgatggcgttggtgttggtgacgttgttaacgttgtcgtcgtcggcgccggggaggcgaggcttcttgtggctggcgcggtggccgccgagggcttggaaggtggggaagcacttgttgcacgtcttgcactcgtagacgtagaacccggccctgacgccgtccgccgtggtggccgcctccgtgtacttgcggctcgtgtacctctcgctcttcaccaccaccaccggcggctgcggcggcggcggcgcgggcgcgggcgcggcgagcaccggagggacggcggcgccctgagcaagcaggatgaggcagtgcgccatgtcctcctcctcggtggtggtgctctcggaggaggaggccggcgccgcgtggtggcgcggcctcttggtgcgcttgcgcttgacgaccccggcgtgcttgtcctccacggacatggcgacgaacgccagagcgcgctctgtgtcggcgtgatcggtggcttgcatggcgatcgatcgaaagcaagaaacgatggatggaatcgaagtggagaatgaatagcaagtttcgatctctttgcctccttatcaatggaggagaggaaagaggagtaggaatggcaaaaacctagcctagctccctagctgcctttgcttcttcttcgtcttaaa

SEQ ID NO: 22471 - DNA, 4415 bp, Oryza sativa
  Clone ID: TF_OsC63096_1
atgccgccccagcctccgccgtcgtcatccatattattattagacagcaatgtgctcactgagaccatgagacattaacacatttttcaaatggtacttggaagttatccaagtgatctgtattcataaactttacggactgaagaaagaatgaatgatcccatgtaaatgggaaagatcagctgcttatgaaaatctacgttgatgcatcagggggtacaatccttaacccccaactatttctctactttctacactaaacacattgctaacgaaggaacaaacactaggcctatcagacgtcagggtggttatctacgtgatctggtataacaggcatggcctcaacagctagggcctctgcccccagctatgagctcggctcagtttccttgacagtggtgacccagcatgggtgatacaaattcgtactttagcgacttgaagatgaaacttatatgaacccctctccatagtctggagacgacgcttgatacgaaggatcgactggcatcgcgctgtaaatcctcacatagatcacatgtgctgccggtcgtaactacaataccaaggccaatgatgaggttggtcctaatattcctgaaagcctgggggagcttggtcagcacacccagaagaaaaacattgctccgaaggacgtatgggagaggagttcaggctggaggctgtcaaaaagccaatggaagctgcaagcaattgcgcgggctcctggttcgctcacacggtttatgcctgacgatgttcctggggtgacttctccaatggtttacattggcatgctgttcagctggtttgcgtggcatgtggaggatcatgatctgcatagtctcaacttcctccacactggcgcacctaagacgtggtatgcggttcctggtgatagggctgttgagcttgaggaagttatccgtgtacatggctatggaggcaacactgatcggatcgcgtcactagcagtgcttggtgagaaaacaacactaatgtccccagaggtccttatagacaatggtgtgccctgctgtagattggtgcaatatcctggtgagtttgtggtgacattcccaagggcttaccatgtcgggtttagccatggattcaattgtggagaagctgccaattttgcgactccccaatggttgaagtttgctaaagaggctgcagttcgaagggctgtgatgaattatcttccaatgctctcccatcaacaactattgtacttgctagcagtttcatttatatccaggaaccctagagaactactgtctggaatccgaacttctcgtctaagagatcgtaaaaaagaagaccgagaactgttggtcaaacaggaattcttgcaggatatgattagtgaaaatgaacttatatgttcatttcttggaaaaaaatcggttgataatgttgttctatgggagcctgacttgctgccatcgcttaccgctctacacccctgctcgtcttgctcaaaagctcctgaaaagaagggtgaagatggtcccagaattggatctacccaatccagctcaaaagatgacagctcatctgatggtactgcatgtatgactgggacacaatctaaaggcttgtctatggatagcaaacaagctcctgagggagaaaagcttgataccgatgacggagatgacctgccttttgatttgagcattgattctggttcattgacatgtgttgcatgtgggattcttggctatccatttatggcgattttgcaaccttccagaaaagcactggaagaaatttcccttgttgataaggaaagatataaactgagttgtgaaaaagagatttgttcaaatgtgcttccgtgctctcctaatgatggtagctccggatgcccactcatcgccaatagatcgtccagccctgtggaaaatgctaacctcagtcatcaggatgtgaagccaattagaagtgacatttctttgatgggaaaggagtttaatggaaccctagggaaacatattggcacttcctgttcttgtagcagtgaaaataccattcatccttacggtgacacagaaacccctgagaagaaaataccaagtgattgccctggctcagagttgagtaaacaatcaggcagaggtgatgttaatgtaccagatgtcgaaggtagtgaggaaactatcagctggaatacaggctgtgcatttgcacggcctcggatcttttgcttacaacatgcccttgagattgaggagttgcttgcgagcaaaggtggagttcatgccctcatcatatgccatgcagattatgtcaaactaaaagcacttgcaatatcaatagctgaggaaattgagtttcagtttgactataaagatgttgcactagcaaatgcgtccaagtctaatttgcatctaattaatatttcaattgatgatgagggatatgaggaagagggaacagattggacatcacggatgggtctaaacctcaaacatagttccaagattaggaaagaaacaccagagagtcaagaacagcctcctttatcattttggggattattttccaagccatcacctatttcagttgtttcaaacttgaaatggctttgcaggaaagcacggactccatataaggtcattggttatgcttccagccctgatgttgtggcaactccagacaaagttaagcccgcagttacaaaaactcagatagacacttctggaaatgctcatgaaaacattggaagtgaacaaactctgcaacaagattgtgtcctgcaagaatccaatgatgtagctgatatgtgcaagcgtcccaaggtgaatgatcaggatggacattctcttattaatattccaattgctgttgctgaatatcctatgatgcatcaagtttgtgagcgtccagattcacccacaactgttgcagtgtcagctggcaaacctaccagagaacaatgtggtgctgaatcaactgagttgagtactgtaaaacagttcctggacaatgggcttatcgctgagggaggcagcatgaacttcataagtaatcatgagcacttagaatctgacaatgcaacttcagtgtgcaaagatgaacaattgcaagttcaacaagatcagttggccatggtactttgtaataatcccaacacagaattggttgcaggagaattacatgggggggcagcatcatcaacccttgaaaatgaggatagctgtggtaatacgtcttactgttctgacactgtattaaagaacagcgaacctgatacagatgatcaacctgaaacatgtgatcgtagtgttgttcttgtaacaccaaagtcgagctgtgaccagatgatttctagcagtgacagaagttgcagtctgaccttggactgccctgtctccactgatgctgccttttcaagcgaaaagctgtctatggctcatgatttgatgggcagtgagttgcaggcagtccataattcaaaggctgaggttgtggccagtttgactgatgtcaagggtgctaagctcaatagcattcataccacacaattacctcatgaatctccaagcagtgatttcatcatttcagaaggtgcgcaatctgcttcaacaactgcaattcccagaaaaaatggaacatccatgcacacagagtcaaattcaattgatattttacttggagttctagccgatgaatctaaggtctcttctggaaaggatgaggttggcaaagcttccttgacattgatgacactggctggcaatgaccaatctgcagatgatgtaactcaggatgaagttgcagagatcactgatccgtcgcatggcttctgctcatcagacatagtgtctagaagcattggaagttcaaacagaacaaatatcatatgttatgccagacgcaaacacaaaagaaagagcggatctgagttcaatattaatagtccccaaagcttggggagctttgtccgctctccatgtgaaagcttgagaccaaggactagacctgcgattgttgaagacatgacaaacgaaacaaaaactgcagaagcttcaactgcaaataagaggaagaaggcaaaggtggaagcatttcagtgtgacatagaattttgtgacatgacatttgagactaaagctgaacttcgtgctcaccaacgcaatatctgcaccgacgagtcttgtggcaagcgcttcagctctcacaaatacctgaagcgtcatcagtgtgtacacagagatgagaggccattcaaatgcccctgggatggttgtccaatgactttcaagtggttgtgggcgcaaactgagcatatcagagtccatacaggcgagcgaccgtacaagtgctcggctcctgactgtggccagagtttcagatatgtctcagattatagtcgccatagaaagaagtttaatcattattga

SEQ ID NO: 22472 - DNA, 2658 bp, Oryza sativa
  Clone ID: TF_OsC43957_1
tttttttttttttttttttcacgttagtcacttttcttctctctatacagataatcgttttgaccatcctgcatgagagcatcgcttgggtttttctggagcgggctcatcagaaagagaattttattggtcatgtacatgttgatgtcatgttatgacaagggtgtaggcactacattttttttttttttttttttaattagaaacgcttcttgcatatatataccaagattgggctatctcaatctataaggaaagataaaaagtacttgatcattactgatgatcataaaataaagtacacttcaggaagaaggaatgacctaaaatggctccttcaacagaggaagaatagggctagacaaggtacacaaaggtaggcaaggccattgccgtcatcgttaacgttggcctcgatcagctgtctccgttctgctgcccgaagctgcatgatcctgagggcaagaaggagaagggattctcagagatgtcaaatccaggtcgagtgaagtcatcaagcccaccgaagcaaggatcaaagctcaatggcgagaaatagcgtggatcatcggccatcttcatgtcaagatttgggatgtcgtccgatgagctaccggggaagttatacccagcgctccccaccatggtgttcatcgcctcgctgccttgaggttgctctgatgctcctgttactttgatatcatccatagggagtgcaggcgtgtgcccttggaaaagagcaacatgcccaaataacttgtcttttcttgagaaggtagttccacacgagcatagccacttgtcgcggccacagtgcttttcatgagtcttcaagtccgcgataactgagaacttcttggtgttgcaacggctgcaggtgtagctcttgtcacagtggcttctcttgtagtggttcttcacacacaggattgtcttgagaggctggaacttcttgtgctctttgttccgcttgcagccaacatatgggcacgagtaccttgtaactggtgcagactctaagctagaatctttcgaaggtttcgcaagagctgcagcagttttgtactcgtctccatggcccctcatgtgcatcctaagattagcatctcttttaaaacccttgccacagatcaagcagaagtgagtatgtggtgctaaaatctcctccttctctaattgcaatactacataagacccaggggggagattctctctctcaccaccatcatcactctccttcacatcatggtcttccattggaatcggttctgacccttccccaccacaaggattttggcagttcatcatctcatcgctttctgcctgagtagtattaaggctattcatcagctcctcatagtcatgggtcttgctaatgtcaggaattgtggcttcgtcgtttgcgcttggtcgcaggttacaattggtgcccaggatcataggagcacaaagtgtgttactgagatgtctgagtgccgggttgctgctgattgggttcttcatcgaaggaagcaaggaaccagctgttgaaataagctgaattataatacaagtgagatcagcagtgacaagctgctgctttgcttgtgcctcgctggaaccaccagcaacttggctctcacgattactcatagactgcacgatgtcttttacctgcttgatcttctgctcaaggaaggataagttgctcagcattgcctgagggtcccaatccattgtaggattattcggggaaggatttgattcgaactggttaccgattttagcttcaatgtcatcaggtaaatacaagctggaagactgaaccccaaagagtggaggaaaagcagggaacgattgaccaggtcttgcaaaacatggaggctggtccgtggaactgaatcgaacaccctgttggtcaggatcagtattccttgttgcattacttgccattgatggcaaggctttcaaggatgtctctgaacttcttcccaagccactgtccatttagattcaccaaaggccaaattctacttcaatatgcccttctatctcatggaactacagtccttccaatcaggagctgatctatagggcagtcatgaaaacgcgagtagaatttgaggctccaccccgggcgcaccacgaaaccccgcgccctgctcgcggtcgccgggatggattgggatcggatcggcggaggccacggcgacgccgagggcggcggcggcggcgagcggaggagtcgacggcgagcgaggggaaatactcctcggcccaccgtggtggcgaacggcgagacgatttcctatttcttcgtgggcaaaaacacaaatttacggaggggtccctgggaatatgagatattgggctcaggctcctctgagcgagtagaatttgagctaaaatgggactcgggagggcgggtgggtggctttataggaggagcagccctgctggttcctggctcccgttgaccttaggcaattttccattggttaaattggataacgagtttttcctttggttaattggatactgagttgtggctccgctcgtttagctagcgaaaagagcctctgctcgcgagtcgcgtcgattaacgacgtaaccctcacatatttgctactctctttatcctaaaaatacgaactaaaaatattaaatcggacgcgtggg

SEQ ID NO: 22473 - DNA, 3675 bp, Oryza sativa
  Clone ID: TF_OsC82170_1
atgaggccctcgccgcctcccgccgccccggcggcggaaccggtgcccccgtggctgagatcgctgcccgtcgcgcccgagttccgccccaccgccgccgagttcgccgatcccgtctcctacatcctcaagatcgagcccgccgcggcgccgtacggcatctgcaaggtcgtgccgccgttgcccccgccgccgaagaaggccaccttctccaacctctcccgctccttcgccgcgctccacccggacgaccgctcgccgtccttccccacccgccaccagcaggtcggcctctgcccgcgccgcacgcgcccggggctcaagcccgtgtggcggtcctcccaccgctacacgctcccgcagttcgagtccaaggccggcgccacccgcaagtcgctcctcgccggcctcaacttccctgcctccaggcaactcaccccgctcgaccacgaggtgctcttctggcgcgcatcggccgaccgccccatcgtggtcgagtatggcagcgacatgtcgggctcgggattctccccttgcgccgcgcagccgcagccgccgccgcagcagcaaccgacggcgcgggcggcggcgcaccttggggagacggcgtggaacatgcgcggcgtggctaggagccccggatcgctgctgcggttcatgccggaggatgtccccggggtcaccacgccgatgctctacgtcgggatgatgttcagttggttcgcgtggcacgtcgaggaccacgacctgcacagcctcaactacatgcacctcggggccgccaagacgtggtacggcgtgccgcgcgacgccgcgctcgcgttcgaggacgtggtgcgcgaacatggctacggcggggagattggtgcagaatgcaggggaatttgtggtcacttttccaggatcttatcactgcggtttcagtcatgggaaccatccaatggtgaaatggagacacggagctctcgaataaaggagaagaagaaatgcgaaggggaacaactggtcaagaagatgttcatccaaaatgttattgaagataatgaactgcttagtcatcttctaaatgacggatcatcttgtattattcttccagcaaatgcccatgatggtcctggtctttctactttgcgctcaacagatcaatcaaatatgaattccagaatatcacataacctatgcagtagggaagaagctccagaagcctcaggatgcttatcgccgaacaggaatggtgataccagaaattgtatttcatcagatacgcataacatggaaggtgataagggagatataatgagcgctactggattgttagatcagggtctattatcatgtgtcacttgtggaattttaagtttttcatgtgtggctgtactcaaaccaagagattctacagcacgatacttgatgtctgctgattctaattcaattaataaccagctttctatttctggagggagtattctggcagatgcgccaacaaatgaaaggaatggtgtcatttctcgtccatattctgaacactgttgcaacgaaataatggccgatgatgcagaaatcgataagaattctgctcttgatctcttggcatttgctcatgggggtcaaccagatcctgaagaagatccactggagaaaatactgaagattgcacatggcattaacaaatcacaacctaatagttcaaataatgttggttgtgttggaacaaagctgtcctcaagtagcacagagcgccaagaaagaccatcttcccagaacgctcattgtaatggtagctcagttatttcaaatggaccgaaaggtgttcgcacgagaaataagtatcaacttaagatggtactttctgaaggttttcaggcaaaggatatctattctgcgaaggaaaagaaggttcaatcagaaccatcaagctcaaaaggggatgttaaggagacaattgatgttagtggcacagagaacgatgtcggatgtaaaagcactacaatctctgtcagtgaacacaggggttctacaaagaatatgtattcagtgaaggaaaagaaggttcaatcgaaaccatcaagcttaaaggggactgttaaagagacagttgatgtcagtggcacagagaacgatgctagatgtaaaagcattacaatctctgtcagtgaacacaggggttctacacctatgaccaatagtttagctgcatcaatcgtgaaacctgacaaggattcatcaagaatgcatgtattttgtcttgagcatgctattgaggttgagaagcaactgcatgctataggtggttctaatattatgcttatatgtcgtccagaatatcccaaaatagaagcggaagcaagattgttgggtgaagaaatgggactggtatatgactggaagggcattcatttcaaggaggccaacatggaggacaggcagaagatacaggaagttctgcgggatgaggaagcaatacctacaagcagtgattgggctgtaaaattgggtattaacctttattatagtgcaaatctggccaaatctcctttatataacaaacaaatgccatacaacagagtcatttatagggcatttggctgtgattctcctaatgactcgccagtaatgttcaatacttgcgaaaggaaacaaagccaccagaagaaaatagtggttgctggccggtggtgtgggaaagtatggatgtcaaaacaggtccatccatacttggctcacagagttgaaagccaggaagcggaagaagcagatagaatctgttcttatcattttgatgagaagcacaaagctgagccagttgggaattctagtagagtggaagcctccaaaagaaagagtagcagtttgacagacgtaacagaatcaagcaatagaaggggggaaatacctggtgaggaaacaaacaccaagaggcccaaacattctcaagagaacaatctcagagctttggaaaccgctgctgaagttgtggtgccctcaccagctggaacaggtctccgcgttagctccaggattgccaacagggcaaacaagctaaaatcaaagatggaaaaggaggatgtcccttctagccgtccaaagtctaacataaaggagaaaagcagtcatgctagcggtcagaaatcaaatgttcaagaggcgaatgctaattctgctagccatttgagagcaatgccaccaaaacagaaggctgaagcagaagcaaagaagcaaataagaactccaaaacctccaaagcaagcagtggagtactcgtgcgatattgagggttgttctatgagttttcgtacaaagcgggacttgtctctgcacaagagtgatatctgcccagtgaaaggctgcgggaagaagttcttctcgcacaagtatctgctgcagcatcgcaaggttcacacagatgaccgtccgctaacatgcccatggaagggctgcaacatggcattcaagtggccatgggcaaggactgaacatctcagggttcatacaggcgacaggccctatgtttgccatgagccaggttgcgcacagacattcaggtttgtctcagatttcagccgtcacaagcgcaagacaggtcattctgtcaagaagaagaagaaagcaaagagttgagctcgtattacagcaagctagttatggtagaaccggacgcagtaggaggtagtttgt

SEQ ID NO: 22474 - DNA, 1157 bp, Oryza sativa
  Clone ID: TF_OsC87628_1
atggcgctcgacgggaagccaccggtgccgccgccgtccacgccgccgatggactcgtgggcctgcggtggtcgccgctccaagcgccgcggcggcggcggcgggagcagcgggagtagtggcagctccggcggcggcggcggcggcgagtccgaggaggagtacctcgcggcctgcctcttgatgctcgcgcatggcgtccgcgacgaggccgaggtcgtcggcgtcgcggcggcgacggcgaagccacagcatgggtacgagtgctcggtgtgcggcaaggtgtacgggtcctaccaggcgctgggcgggcacaagacgagccaccgcaagccgccgtcgccggcggccgaaccggcggccggcgaagagccgtcctccggcggggtggccggcgaggcgaaggtgcaccgttgctccatctgcctccgcacgttcccgtccgggcaggcgctgggcgggcacaagcggctgcactacgagggcggcgccgtcggagacgccgtcaaggagaagaactccctgaagaccaaggcggcggtggcgacagcggtgctgaaggacttcgacctgaacctgccggccgcggcgacgacggcgggggacgaggccgagagctcaccaccggaggccaagagagcacgtctgctgcttctcgtctaattcacttctggttgggcgatggagacgggtggcatgataaacatgccgtgtttagatggttggccagcagttctggtggaaataatataatggggccccatgattccccagctcgctgtgtcgaatactcctacagtcctacatgcagatacggcacatttgcaactggtggatgtgacagttttatggcctttgggatggcgctagcaaaagtgccccagccctcaaatacccatgtaacatcacttcttgtctttcagcaaggatggccatctgcttcgctgtcgcatccaggtgcacgttcgataagccttacctttctattgagatatcaatcatatgaaacccactgggtatccaccgggtataccatacccaacgggtatgggcatgggtatgaatttctacccgccaattctatcgggtatcaatcgggcgggcaaaagcgggtcaggcataagcctgacgcaatctttatctgtaatgtcaactaa

SEQ ID NO: 22475 - DNA, 2600 bp, Oryza sativa
  Clone ID: TF_OsC2514_6
acaaagggagctctaatggcagtagctctacacagctttatgagctgagaatggctaaaaattttattattacagtaggaagatgaattaactatgatatatagctagcataaacaacagtatataatttgaaaagttccatatatatgaattgaacagcccataccctcccaaaagaacatcgaattattaaacctcaattggaacatcaaaagagaaaaagctgggtaaattcgacttacttacccagctttgaaataatcttgacatgaacatcatcatcaggcagttcttgtcgaacgatcgatgagtaccccacgaacaaaatttgtttggatttgcttgcatgattcattcgctattcatccatggctgatccgaggggtactaacagcatgccatggctcgttgctccggttgcccggagcccgaagagttgctctagctatgccatggcttgttgctgtggtggtggtggtcgtacggcgccgccgacgacgccgacgtcgtcgacatgcagggatcgaagccggccatgctcattatgttgccgtgggagaaggctcggagacccaagaagtccctggtgaggccgtcgttgccggctccggcgacgccattgccggtgtcacgatcggacctggcgcccctgctgctctcgtctgctgcgatgaagtgggacgcttcgaaggcgagcccgtagccgccggcgccgacgcaagtgctcgacacgttgctggtaggaggaggagggggagcattggtggtggcggcgctgctgctgctgttgtgcgtgctcgccgccgccgccgccgccatgtgggcgtggctcgacgggcggctcagcgtcgcgcccatctgcgccgccttctgcagcagcgcggtggcggacatgtgcgccgaggaggcggcggggtgcggcggcgcggatgacgtcgacgagaacccgaagctgaggccggcctgctgcgcgccgccgctctccggcgtggagctcccgatgaactcctggtccagcctcgccgacccgtacatcgccgccggattccccgcgccggccatcgcctccagctgctgctgctgctgctgcgccgtgagccacgacggcgcgaactgctgctgctgctgctgctgctccctcttgaggcacagctcttgcatcagcccatgcccccccatcgccatcgccgcctggtgatcaagcacatccgccacctgcgagaagagcatcccgccgccatgctgctgctgccccgccaccgccgccgccgccgtgaccgccctcgcgctctcctccgccagcgcgtcgcagaacgccctgtgcgtgatgaagctgtcccgccgggagaagagggtgccgcaatcgcagcggtactcgcgggtgccgcagaccttggagtgggccttccagtcggagtggacggcgtagcgcttggagcacttgtcgcacttccacttcttctcgccatgctggcggctgaagtgcttcttgatgccggtgaggtcgccgagggcgcgcgccgggtcgtggtggacgcagccggcctccgggcacacgtacaccttcttcctcaccacctccttggggttccgctgcttcagcttccatggcaggttgtgccctcgccggtgcagctgcaggttctggtctcgctggaaccctttcccgcagatctcgcacacgtacctgttcgtcgccatcagcgtcctcggcgacagcgcgatcacctccgcctcaggatctgggttgccggggaggctgcgcttcttcttggcgggaggaggagcggggtgggacgagacgctggcctggtcgccggacgccgacgtcaggttccacatggcgcggcgtcccggggagcagcttcgctgctgctgagcggaggctgcggctgcgccggcggccggcccggcctgggccgcccgcgcccgccccgcgctcggccgtcccggacgacgtctcgacctcctttcgggacgcatgctctatcgatcggcccggggcagcggctaccactcctcccggtgccggtgctgctcgcgtccacgtaccacgtgcctcgtgcaccgatcgctcgcggaccgcgttgccggcccgggcgacgccgtggtcgcctcaccctgctaccgcggccccgcgccatccaccggtgtgcgccgcgccgtgcaaccgccgcggcggaggctgccgctgcgccgggtgggtcatctcagcaagaggcgggggcgtgatcgaacgatctcaaattctcaattgccgccggggagcccgctccctccatccgagaatctttcttttgcagaagttccgtggacgcgggtaccactcccgccgatgctgctgctactagcgtccaagaagctagctgcctcgagcataaaagctcgcgtcacgcctttgcaacgcaggccggacggtgggggcgacaccgagctaccggtcaccgcggcaaccaccggtcgtggacgcggcgagcaaacgaggcggcggcggctgctgctgctgcgtgtgggagaagccaaggtgaggaagtggcggagctgggcggagaccgggagataagaaagggagccaagagcggtgcattcggacgcgtggg

SEQ ID NO: 22476 - DNA, 1110 bp, Oryza sativa
  Clone ID: TF_OsC182396_1
atggcggtggaggcggttcttgaggcgtcgagaagtagtagtgaggaggaggcggaggtgatcgtcacgcacggcggcggcggcggcggcggaggaggaggaggacaggtggaggggtgggggaagcggaagcggtcgcggcggcggcgaccgcagctgccgccctccgaggaggagtacctcgcgctctgcctcctcatgctggcgcgcgggcgacgcgacggcgacgacgtggcggcgtcggcgtcggcggcggcggcggcggtggagcaccggtgctccgtctgcggcaaggcgttcgcgtcctaccaggctctcggcggccacaaggccagccaccggaagccgccgccgcccgccatggtcgacgacgacgaggtggtggtggagacgaaaccggcggctatcgcgacgccgtcctcgtcggcgtcgggcgtctccggcggcggcggcgggagggcgcacgagtgcaacgtgtgcggcaaggcgttcccgacggggcaggcgctgggcggccacaagcgatgccactacgacggcacgatcggcagcgccgccggcgccggcgcgtccaagccggcggcgaagacgaccgtggcggtggcggcgagccggggcttcgacctcaacctgccggcgctgccggacgtcgccgccgccgccgaccagcggtgcgcggcggaggacgacgaggtgctcagccctctcgccttcaagaagcccaggctcatgatcccggcatagctagccaagcccacaagatttgtttaattttagccataaaattccattaaattaaacccatagttttttctgttaattactttcttaatttggtgattagtcttaggaatgatgattagtttgtgtatatagccattgtttgttcatctatcatttgtatcttgtaattaatcccctgttagctagatttggtttaattggatataggagttacagatcaattctttcattggttgaattggtttaatttatgtatatatatacatatgtaaaatacatgtataagaaaaatacgcatatgtatttaatttttttgttaaaaaaaaaaaaaaaactcagctatagctaaataaaaaaaaaaaaaaa

SEQ ID NO: 22477 - DNA, 759 bp, Oryza sativa
  Clone ID: TF_OsC32707_1
ggtcaccctgcggggcccggcgcgggatcgatctccccccaaccaaaaatctctctctcaatccattgatccattaattcacaagcttatcgaatcggagatgaagcacccgaggcaggaggaggaggtgtcgctggcgctggcgctgagcacggactgctcgtcgacggcgtcggactcgtcggcggcggcggcgggcggcgcggcgaggaggaagagggcgcggcggaggagcgtggtggcgacgtcgggggaaggggagttcgtgtgcaagacttgcagccgcgcgttcccgaccttccaggcgctcgggggccaccggaccagccacctccgcggccggagcaacgggctcgacctcggcgccatcggcgacaaggcgatcaggctgcacagggcggccgacaaggagcacagggacaagcacgagtgccacatctgcggcctcggcttcgagatgggccaggcgctcggcggacacatgcggcgccaccgcgaggagatggccgccgccggcggtggatcctccgccgacgactgggtctggcgctgcgacgcgcggccggaggggatcgccgccgagccaccggtgttgctggagttgttcgcctagttaccgctggtctccattagtttcgtccaagttttgaactgacgcagtgtgtgtcaccattaattagttcatgtacatggtctagaaaaaaaagtcaggttcattcgatcttgtaactatgaataggggtttaatttttttttttc

SEQ ID NO: 22478 - DNA, 2129 bp, Oryza sativa
  Clone ID: TF_OsC3319_1
cccccctcctcctgctgctgagcatcgtcgaacaagttgttgtgaattatgtcacccgtttcttggtacatgacactttacaatagcatatcatcaactctccactgccctccgtaatgcactaatgctgtctcaggaaagtccaatgagaagcaaacaacaaaaagattccatgcacgtcacgattagcaagccctgcttagctttccggccggcaagacacaaaaaacactagctagcctagcagcatatgcagcgtctaattacaccacacgatctcgtcgtcttaatttgctggtgaaatggaacgtacaagaagagattcgatcagaggtagacgaagagatggcgcgtttcgcgagctagctgggctggactggattcttctttggctacatgatgcccatgctgttagcgtgctgtaggcgacgccgcgtggcgtcgacgacgtcgaggggatcgtcggcgtcgccgccctcggtgacgacggacgagacgtagctgcgggcgacgtcggagctcatggcggccgctctcgcccggaacttgtggctgcagctgtagcaggtgatctgcagctgcgtggcgtcgacctggcgtatggcgtggtcgcggagcacgtgcgcgcggctgagctccacctgcgcctggtaccgcatccgccgcgcggtcgccagctcctggtcggcgagctccgcctgccgcttcgcctgcgcgcgcgcctcgtccgcggccgccttctcggccatcgccagacgcagctgctcgtgggcggcctccttcagcctcgtcgccgaggccgacacctcgccgctgctgctgctgctgttgttgttgccatcatcgcgtgcgccgccgaacccgatcgagagctgcagccgcattgcgtcggcgaccggctgccgcgacggaagagcagcagcaggcgaatgcggcgaagaggaagcgtagtacccaacggcggtggcaactggagtaccaccgaggctgccgcctgcgcaggtggtggtggtgcgcggtggcatgagctgcagctccaggctgtgggtagtgtggcatcctcctcgccggccaccacacggcgtcggtggcgacagcgccgggtcagtgaaccggtggtggaacgccgcgatgctaccgccagcaggagccggcgccgcagcacggggactcaccattgccggaccaccaccaccagtagcaggccaggccaccgggctcaccaccaggtcgctcgacgggctggcgctggacgccgtccgcgacaacgaagccggcaccgcaaaaagctgctgctgctgagacgacgatgctgccgccggcgcaccaaccacgacgccaccgccgcgtcccggggacgatgacgcctcggcggcgcgtggcctgccggcgttgcacgcgtcctggtgctcgatgaagctctccaccctggagaagacgcggccgcagtcgcaggtgtggccgcgggtgccgcaggtcttgaggtgggccttgtagtcggagtggacggcgtaggccttggagcagcgggcgcacgcccactggcggtggccgctgtgcttgcggcggaagtgcttcttgatgccgacgaggtcgccgagcgcgtgggaggggtcgtggtggaggcacgtcggctccgggcacacgaacacccgcttccgcgccgcctcgccggcctcccgcttcagcagcttccacggcaccttgtgccgccgccggtgcatctgcaggttctggtcgcgctggaacccctggttgcagatctcgcacacgtaccggtcagactccagcagcgtcctcggcgacagcgacaccacctccgcgtccgggtctggcgtgccggctggccgtcgcttcttcttcgccgagccggcggaggcggtggcgatctgcagcgaccggaacggctccgtcgccgcaccggacgcatcctgcggcggcacggccgtcggcgcgcaagaactcagcatgatgtccgcctccgcgcgcgcaccgccggtgaccactcccacctcttcccttacaaccaagaattccccttcctcctccaacctagccaatctctccagctctgtgacggatgaaacacccgtcacagataacccatctctgaccggtatataagtcat

SEQ ID NO: 22479 - DNA, 883 bp, Oryza sativa
  Clone ID: TF_OsC722_1
gctcgtcattaagagcgaaagaaagttacttggaattctttggtttgttgtaatgacaatcacgagagaagaagcggagagcaaggagatggagagcctacgggtgcacgccagcgcgctgctctcgctgtcgtcgcctgcagcgtcggcgtcgcagccgacgtcgtcgtcgtcgacgacggagggggtgttcgagtgcaagacgtgcagcaagcggttcccgtcgttccaggcgctgggcgggcaccggacgagccacacgcggctgcaggcgaagctgctgagcgaccccgccgcggcggcggcggcggcggccgagagggacagggcacgcgtccacgagtgcgccgtgtgcggggtcgagttctccatggggcaggcgctcggcggccacatgcgccggcacaggggcgagacgggcacgacgaccgtcgtgctcgcggacgccgacgactcgggcggcgccaccgtgccgcagccgccggagcccatgccggacctgaactacccgccgctggaggacgccggcgacggctcggagcctgagttacttaaccttcttgtataagttgcatcgatagatatacatgtgaattgaattggcgtctgtacatagatatggtggatggattctttaccaaatttgatcgaaaaaaagaactaaattttggagcgtgatgatcatagcatgtaagttgtaacaaatgattgttaactgtaagataggaattctattcatttgttctcttctgtacaaaattacaaataggttgattaattagttggtcggttgtggttgattctttgtaaaataccaatttactagtataaatatactgacagcttattgtttcaaaaaaaaaaaaaaaaaaaaaaaaaaaaa

SEQ ID NO: 22480 - DNA, 507 bp, Oryza sativa
  Clone ID: TF_jC-osleLIB3474010a01b1
cacggagaagcgcgggaaatcacacctcgtcgcagccaagatctcctccagtccaaacgcatcaaagattccaagatgtgctctggagatgatattgatggagacatgagggttgaagcaacacaacacagggatataaggcgctacaagtgtgaattttgcacggttgttaggtccaaaatatgtctcatccgagctcacatggttgctcatcataaggaagaactggacaaatcggaaatctacaagtcaaatggggaaaaggttgttcatgaaggtgaccacacctgccaagagtgtggtgcttctttccagaagccagctcatctgaagcagcatatgcaaagtcactctgatgagagatcgttcatttgcccacttgaagactgccctttcagctacattaggaaagatcacttgaaccgtcatatgcttaagcatcaagggaagttgtttacctgctctatggatggttgtggtaggaagttcagtataaaggcaaatatg

SEQ ID NO: 22481 - DNA, 1703 bp, Oryza sativa
  Clone ID: TF_OsC1528_2323
ggagaagcgcgggaaatcacacctcgtcgcagccaagatctcctccagtccaaacgcatcaaagattccaagatgtgctctggagatgatattgatggagacatgagggttgaagcaacacaacacagggatataaggcgctacaagtgtgaattttgcacggttgttaggtccaaaaaatgtctcatccgagctcacatggttgctcatcataaggaagaactggacaaatcggaaatctacaagtcaaatggggaaaaggttgttcatgaaggtgaccacacctgccaagagtgtggtgcttctttccagaagccagctcatctgaagcagcatatgcaaagtcactctgatgaggatatagattcttaactgtgtgaagcattggatcccaaagaactccaaaatgcgatgaggcatatttaatcttgtctggactagtaacaggttgggatgaccaccttgtgaagctccaacaggattgcctcctcacgctctttcaggagagatcgtacatttgcccacttgaagactggcctttcagctacattaggaaagatcacttgaaccgtcatatgcttaagcatcaagggaagttgtttacctgctctatggatggttgtggtaggaagttcagtataaaggcaaatatgcaaaggcatgtaaaggaaatccatgaggatgaaactgctactaaaagcaaccggcagtttgtttgcaaggaggagggctgtagcaaggttttcaagtatgcttcaaagatgaagaaacatgaagaatcacatgtgaaattggactacgtggaagtagtctgctgtgaaccaggctgcatgaagacattcacaaatgttgaatgtttgagggctcataatcaggcttgccatcaatatgttcagtgtgatatctgtggggaaaaacacctgaagaagaacattaaaaggcacctacgagcccatgaggaggtgccatctactgaaaggataaaatgcagtttagagggctgtgaatgctctttttccaataaatcaaatttaaccaaacatataaaggcgtcccatgatcaagtaaaacctttcgcatgtcgattcacggggtgtgaaaaggtgtttccatacaagcatgtcagggacaaccatgagaaatccagcgctcatgtatacactcaggcaaacttcacggagatggacgagcagttactctcgtgtccgagaggtggacggaagaggaaagctgtgactgtcgaaactcttacgcgcaagagggtgaccatgcacggcgacgcttcgtcgttggacaatggaactgagtacctgcgctggttgctttctggtggggatgatgattcgagccaaactcattagccgtatcatctttgcatctgattgtgatggtcatggtgtcaatggctcaatgctttgtcgtaaaggggtgtgctagcccactcacgttggtagttagatggccgtggtgtttttgttgtaagtagttggtctgaatttagaaagtgcagcagttttagaggaagcctactagtagtatatatttgtagcataatggcgcagtttgagttgtgagttgtaagtattttgattctttactgttttgaccactgttcttggaacctcaaaattatttgacttgttgaatgcaaaaaatgatgtgattacaagttttggttcttcttgaaaaggttgtacctgaaa

SEQ ID NO: 22482 - DNA, 1077 bp, Oryza sativa
  unsure (1)..(1077): unsure at all n locations
  Clone ID: TF_OsC14_2
cccacgcnttcgcggacgcgtgggcggacgcgtgggcttgcttcagatttcgatcagcttcagggttgacacaacagagaggttggttcacaaagtttcagtaagtaaagcattcattcagatcatgaagaggtttgcattcgaggacagcgatatggcgcgcgtgctgatgctcatgtcgtcgcacgggcagcaggagcaggcgctggctctgccggtgccggtgcagctgccgctcgccgccgcgcgcggcgaccgcgccccggagcgcgcgttcgtctgcaagacgtgcaaccgcgtgttcccgtcgttccaggcgctcggcggccaccgtgccagccacaagaagccgaggctcgacggcgacggcgacctctccctgtccaagcccaagctccacggctgctccatctgcggcctcgagttcgccattggccaggctctcggcggccacatgaggcgccaccgcgccatgaccggcggcatgccgcgggcgatcgtcgtcgacaagaagcccgacgtcgtcgacgtccacgtccacggccacgacgacgacggcggcatcaagcgcggcggcctgtggctcgacctgaaccatccaccctgcgacgacgccggcgacgacgacgccgagtgcggccacaatgccgccggcgccggcatcacgttccaccagttcttggataccggagccatggccgttgactgcgtcggctactagctctctttgccggatttttgccggatactacaatacttatatgcaccgattaatcttggtgcaatttctcttttaccttttctttttcttttcatttcttcttcttcttgttgagaaatccacattttgtagcggtagaatatattagttcctaatacaacagagcatggcacacgttttgggtgccaatgatcagatgctgtgctttggggttaatctggaggattacatgagataatattcacctcctgatgatttcctggatttgtgatcaaaaccctttgatcaaatggattaatgtaattatctgaattgagtaaattaagtatagagcttgtggttttcagttgctactc

SEQ ID NO: 22483 - DNA, 1150 bp, Oryza sativa
  Clone ID: TF_OsC83619_1
cgggccgcgggcagcaatattaaccattctctcgatcgagtcagaagctagctagctaaaactcgtctcgtcgatcatcttgtgttcgatacgatctccagttcgttcggtttctttcttgaccatgaccaagcatccgagggacggcgaggtgatcagcctctcgctgtcgctcacgctcggcgctgccgcggatagcggcgagcggaagaagccgcggcgcgggtcgtcgccggcggcgtccgggagtggggacttcgtctgcaagacgtgcagccgcgcgttcccgtcgttccaggcgctgggcggccaccggaccagccacctgcgcggcggccacgggcgctcggtcgggctcgcccccgccacggccaaggggaccaccaagaaggtgcaggagaagccggcggcggcggcgacccacgagtgccacatctgcggccaaggcttcgagatgggccaggcgctcggcggccacatgcgccgccaccgcgaggaggccgccgccgccgccgcggcggtacagatgctaccattatctggtggagggcaccgcgcggggccaaatctggaggtcttcgagctcggacatgttagatctggcattggagccaccacccttgccgtcactaaagaatccgacacaagagggctggggataaacggggcctctagctgccaagcactagagggggggagggcgaacgcgacgtcgggtgtggcggtgagcgaggagtgcaaggcgaggttccaggagctgagggcggggcgggcccacaggttcgtggtgttcaagatcgacgacgcgatgcggcaggtggtggtcgacagggtgggcccacgcgacgccggcttcgacgagctcaccgccagcctccccgccgacggctgccgctacgccgtgtacgaccacgacttcaccgtcagcgacgccacggccacggcggccgccggcgagggcggcgaggcgccgcgcagcaagatcttcttcgtgtcgtggtcgccggcggcggcggacgtgaggagcaagatggtgtacgcgagctccaacgaagggttcaagaaggagctcgacggcgtccagatcgacctgcaggccaccgaccccagcgagctcaccctcgacgtgctcaaggaccacacctcctaa

SEQ ID NO: 22484 - DNA, 654 bp, Oryza sativa; identical to SEQ ID NO: 13235
  Clone ID: TF_OsC171199_1

SEQ ID NO: 22485 - DNA, 730 bp, Oryza sativa
  Clone ID: TF_LIB4309-044-R1-K1-G6
cagacccggacgcggaggtgatagcgctgtcgcccaagacgctgctggcgacgaaccggttcgtgtgcgaggtgtgcaacaagggattccagcgggagcagaacctacagctgcaccggcgaggccacaacctgccgtggaagctgaagcagaagaacccggcgcaggcgcagcgccgccgcgtgtacctgtgcccggagccgacgtgcgtccaccacgacccggcccgcgccctcggcgacctcaccggcatcaagaagcacttctgccgcaagcacggcgagaagaagtggaagtgcgacaagtgctccaagcgctacgctgtccagtccgactggaaggcccactccaagatctgcggcacccgcgagtaccgctgcgactgcggcaccctcttctccaggagggacagcttcatcacgcacaagggcgttctgcgacgcgctggcgcaggagagctccaggctgccgccgacgagcctcagcagcctcaccagccacctgtacggcgccagcaacgccgggaacatggcgctcagcctctcccaggtgggctcccacctcaccacctcgctccaggacggcggcggccaccaccaccacccgtcccccgagctgctccgtctcggcggcgcgggcggtggcggcgggggccgcggctgggagcagcatcgccgcgcggtttgaccacctgctgtcgccgtcgggcgcgtttgtcttccgccccccg

SEQ ID NO: 22486 - DNA, 2843 bp, Oryza sativa
  Clone ID: TF_OsC2514_9
ggagaggaagcacggatgtatttacaagtctgcatcttacattgttctaggtttctctctaccaatacaggcaggtggctgaaagaatgatgctagccagagcacaaaacccaaggttattgcaaaaagaaaacctcacaggattgtgcggccgttggtctttctcttggcctcctcccatggcgcctgtgcagaccccatgtccagctctcctccaaccatcaatgccgggaggccaccatttgcagtggagccacccatggtccctccaatgccaagcccaaggaagtccagagtggcaggcttgggaccgtacagtgccgatggtcccatcatcaagtccggcaaccctgaattcccagtgtcataggtgagaccaaggccaagaccgccaggtagcatcggcccaggctccatttccatttgctggttgctcctatggtgccactgttgtacactgttatcggtgaacattcgatgtggcagcttggctggcggtggcggctgtgggacgttatccatgaaccttccttgaggcggatgaggatgcggatgtggatgtggatgtggatgagatgttgttggtgtgttaccagtagtgaacctcccttgggatagcttggatgggggagacgatgaggtggaggcggcgagcccaaactccttcaggaaagatgagcttgattgcgaagcaccaacctcagcagccttctgcaggagagcggttgcggacatgtgcggtgctggaggtggagcaaaggagcaggggtcacttgcatttgtctgtgggaagagagaagacggcgcaccaattgcaaggcagaggaatgtgggatcgacgccgatgagatcgcggagggatctgctttggggagtgctgctcgttgtgaccgacgcaaacagaccagcgaacgtgctcgtcgtcgtagctggagcgatagcattggtaacgctgcttcccgtgccgcagctggtgctgctgccatctgtgccaatggcctccgagggcgagggaaggaaacaaggcagcatcggagtgtcattatccagcaggtttgagtcctccagttcagcatctttgtatcgatccacttcctgaaagcaaacctcctcatctcgctcatcttccacctctatcttggcaatcactgctggcttagcaaccacctcttgctcatccacatttggtaccactgccaccaccggctgaggatgctcctgcagtatcggaggcggcggcggcggtgatggagcgcactgctgcggcacctccgccaccgcctggctgggctgcggctcatcgacctcggccacaggtgaatcctcattctcctccagctccttctccttctccttctccttcacctcctcctccttatccttatccttatccacattctcctcggcctccaaatcaggcgggcgaggcgacggcggcgcaggcacggcgagcaccctgcccgtctcctccacgagcgcgccgcagaaggcgcgatgcgtcacgaagctgtccctcctggtgaagagggtgccgcagtcgcagcggtactcgcgggtgccgcaggtcttggtgtgcgccttgaggtcggcctggacggcgtagcgcttgccgcagcgctggcatgtccagcgcttctcgccgtgcttgcggcagaagtgcttcttgatgccggtgaggtcgccgagggcgcgggtggggttgtggtgcacgcagccgggctccgggcagacgtacacccggcggcgcggcggcgccgcaccggggccgcgctgccgcagccgccacggcaggttgtggccgcggcggtgcagctgcaggttctggtctcgctggaaccccttcccgcacacctcgcacacgaacctgttcgtcgccagcagcgtccccggcgacagcgcgatcacctccgcgtccggatctggcgttccggggagattcctcttcttcttgaccaccggcgccgcccccgcccccgccggagccggctccaccgccggcccgggctccccctccgtccccgtccgattgggtggcatgacctccatccgagaatctttcttttgcagaagttccgtgcacgcgggtaccactcccgccgatgctgctgctactagcgtccaagaagcaagctgcctcgagcataaaagctcgcgtcacgcctttgcaacgcagcccggacggtgggggcgacaccgagttattggtccccccaacttcaagtaggggagcaaatgaggcggcggcggcgggtctgcagctagatttctcatcatcttgaccggtggcaccgccgtcggtgcgccttggctggacgccgcagtaggcgccgctgttgccactccggtcagtgacgctgccagctgctgctgctggtgctggtgctgttggtgtgacatcagcggcttaatctggtcatgctggtccccatccctgctaatcccgaagaacgccgccgcagctgcagccgatgaattcgatgccatcacctcccaaattttcccaactcagccgcaggagcagaaaatttccttttctgttgcccccgttggattgttcctcggattggcagcagtgttcttcttcttccttccttcttcccccgtggctcactctctcttctctctcccctactgctgtgctcttcctgctagctccccaagaagaagatagaacaagaagtggagaggagaggatggaagaggaaggctaacaagcgttgttgtctcatttctttcatttccttgtcatacttttctttctctctctctctcttctcctgctcctttccttccacgctcgtatatggcccccctctctccctaaagatattttatagaaattc

SEQ ID NO: 22487 - DNA, 1096 bp, Oryza sativa
  Clone ID: TF_OsC13219_1
ggtcgatgcgcgtgccggcgcccgtgcgcgacgagttcgtcgtcgacgaggagccggaggacgtcgccctctgcctcgtgatgctgtcgcgcgacaccggccggccatggaactcgagaccaagcgacgagtactcatctctcatgtacaacagcagctaccaccaccaccacgacgccgtctccgacgacgatttggagttgtccctctcctccccgtacgcggacaccgagatcaggaccaagaagaggaggaagacgacgggtgcggcgagcaccgccggcggcgagaagcggggccggtacgagtgccacggctgcggccgggctttcctgtcctaccaagctctcggcggccaccgcgctagccacaaacgtataaacagcaattgcagccttgtcaaacctccggccgatcagccggagccgagcatcgaaacatcgttcagctctgcctcgacgtcggtgtcaccagctgacaccatgatcagcgcggccaccatctcgaagacggtgaagaaagcaactaaattcgtgtgcccaatctgctccaaggagttcggctccggtcaggctctcggcgggcacaagcggtcgcactcgatcgcaggcgagctctacgagcgcggccacgccgacggcattgtcaagctggagcaacctttgctcgccgacaggtttcttgatctcaatctgccagctccaggaggagatgatggctgaagcttaattaggaggagatgatggctgaagcttaattttggttcctccaagttttgacattttttggggagagcatgggtatgtacagattcagattcaattcattcttttggagtttcagcttagttgatcatgagggattaaataattatattgttaggtctttagttaattactccagatttttcgaccagttttgttttgaatttagtgctttttgttagctctgttctgtttttgctccacattgggaggaaaataagaacatcatatgatctcaattgagaactggtacaatgaaatgcttccagaaaagatttcagttgaaaaaaaaaaaaaaagggcggccactcgcgatctagacggacgcgtgg

SEQ ID NO: 22488 - DNA, 1010 bp, Oryza sativa
  Clone ID: TF_OsC3878_2
ctacggcaacggcaggagagggtgcgggggcgggggcggggggcgctctcggtggtcgcggccgaaggcgcggatgtggtccttgagggagcgcttgtgcttgaagtcggagccgcaggcgcagtgccagcggcggccgcagttcttctcgtgggtgcgccagtcgccgcggacggcgaggggcttgccgcacttgcggcaggcgaagggcttggcgcagtgcttccgcttgtagtgggtctgcagcgtgcggaagtccttgagggggcgcgcccgcgggtggtccacgttgttccggcaccccgccgcgcagcagaagcacggcagccgcagcatcgccgccggctgcgtcccccgcagcgactccggacccctcctgtactgcgacccatgcccccacatatgcatctgcaggttgttgtatctgctgaaggtcttgcagcaaacagggcaggcaaagtgtgtaggaccaatgaggatctgggttggggtagggatccaatacttgcccttggtgagctttcccatagagaagtagtccaagcagaggtcatcactagctgcttcttcttcctcctccctctccacctccaccttgtgatcatcatcatcatcaccatcaagctcttgtgatgtcgtcgcggtcgcgccgagaggattgctcttcgcgaaatcgatgaccgagctgttaggatcaggagaaggcaggccaatttggagtgatatgtccacatcctccatgacctcctcttccttctcttgcttataacagccatggatcttgttgtgatcatggattgaagggaggaggctgagaagagggatttcctcctttttaggaagggaattgtggggagaggaggattgagagattaggcttctttggttggggaagatgtgatctttgcttggattagccatggcagcttggagagattacttgctggagtggagcagtgcagcaaggggatatgtattatagagagaagaaagtagagctagagagagag

SEQ ID NO: 22489 - DNA, 1479 bp, Oryza sativa
  Clone ID: TF_OsC4331_1
agcatacaacacgatgtaccaacgggtaatatctttcatcatttgttttttcgactgcttcggaaacagataccactactttccaggttataaagatccttgtcatgggtaaaagagagttgcataacaggctaacagcgagcggtaaaagatggggagaccaggggaagagagagagagagagacagaggcaagccgggggaaggtctgttcttcacaggacccttcttcattcatcttctcagtcatctcttcctaccataggcccaaattgctcttgctgcactgctaatgtccagcttctgacggcgcagaccaattgggggcaacagcgccacctctgagctcctccatccactcctggaagaacttcggatcaaaaccaccctcctcatcctcctctcgatcacaattcgcttcaactcctccttcctccatcatagaaatcgatgcctctgcagccgctgtcgccacacccttgttcggctcggcgatcgccggcgtgtggccttcgaagagagcgagatggccgaacagcttgtccttgcgggagaaggtggtgccgcaggagcagcgccactgcgcctcctcgccgcagtggcggaggtggctccggaggtcggcgaggacggcgaagcgcttcttgccgccgcagcgctcgcaggcgtagagcttggggcagtggctccgccggaagtggttgcgcgcgcacacggccgacttgagcggccggaagcggcggtgcgcgcggttccggttgcagccggcgtaggggcacgagaaccgcacctcccggccggcaggcggcttcggctggccgggcctggagagcgcgtccagggtcttgaagcggtcgccgtgggcgcgcatgtgcatccggaggttggcgtcgcggcggaaccccttgccgcagatgtcgcagaagtggacgtgctccgcgagaagctcggaggcgtcgagctcgacgacgtcgtagtcgccgtcgcccttggctgcttcttgcgggggttcctgaggcacggagaccaccacgggggggagctcctggacggtagtagccggaggcggaggtggagccgggagggaggcgacggtggaagagaggagggaggcggcgttgaggacgacgaggtgggcagcggaggagatctcggaggagacggagtggatgtcggaggaagagaggggcccggattctccggatatagatgcggcgatgcggcggcggacggcggccatgcggtcgccgagagcaaccaaccggaggagcgcgtcgcgggcatccccgtctcctcctccggctccggcgccgccggccccgccgacgagggcgccagagggatcccctacttccatggccagcgtcggcgccgtggcagccgttggtggcgcgacggagccgccgccaccgccgccggcgagtaggtgggtggtggacttcatttcccacccccaccttttttcctgcagcccggggat

SEQ ID NO: 22490 - DNA, 1244 bp, Oryza sativa
  Clone ID: TF_OsC478_3
tgcatccccgggctgcaggaattcggcacgagaccacacagcaaccagccagctgccacactagcttgaggcgagcgagcgaagcttagctagcggatataacaagtcgtcgatctgcttgctgcttttgtgaattgcggtggaagcatgtcgagcgcgtcgtccatggaagcgctccacgccgcggtgctcaaggaggagcagcagcagcacgaggtggaggaggcgacggtcgtgacgagcagcagcgccacgagcggggaggagggcggacacctgccgcaggggtgggcgaagcggaagcggtcgcgccgccagcgatcggaggaggagaacctcgcgctctgcctcctcatgctcgcccgcggcggccaccaccgcgtccaggcgccgcctccgctctcggcttcggcgcccccgccggcaggtgcggagttcaagtgctccgtctgcggcaagtccttcagctcctaccaggcgctcggcggccacaagacgagccaccgggtcaagctgccgactccgcccgcagctcccgtcttggctcccgcccccgtcgccgccttgctgccttccgccgaggaccgcgagccagccacgtcatccaccgccgcgtcctccgacggcatgaccaacagagtccacaggtgttccatctgccagaaggagttccccaccgggcaggcgctcggcgggcacaagaggaagcactacgacggtggcgtaggcgccggcgccggcgcatcttcaaccgagctcctggccacggtggccgccgagtccgaggtgggaagctccggcaacggccagtccgccacccgggcgttcgacctcaacctcccggccgtgccggagttcgtgtggcggccgtgctccaagggcaagaagatgtgggacgaggaggaggaggtccagagccccctcgccttcaagaagccccggcttctcaccgcgtaattcagcagctgcatggatccgatccgtcagagagtttttgtctagggagtgaaattcagtcgaaacacactattcgttgattcgttttgtgccgctattgtttaatttgttcctgcttttgtacagagcaagcgagtgatacatagccatacatacagtcatacagatataggtctagctcttccttggttctttgtaacactggaactgtacctgtatcttttacactttgttctttgacagtcatatattgtagaccataaaaaaaaaaaaaaaattcgaccaac

SEQ ID NO: 22491 - DNA, 1826 bp, Oryza sativa
  Clone ID: TF_OsC111363_1
atgcccatgcccatcgggccaggtatccgcggatacccggacccgtgggtaaaattgccatccccgggcacacgtgaaggaactgtggtaggggagaatgagggcacacatgcgggtttaaggtggtacccgaacccggcacccgcattctcaaacccgaacccgctaagacttgcctactccactaccgcttctactgcttggttcgagtcgagggtttctccttctcccaagatggggagcgtggagctcggagcggaggaaagggaggtcgccggcggggagggggggagcaagggggcggcgcctcctgctagggatattaggcggtacaagtgcgatttctgcagtgtcgtccgttccaagaaggggttgatccgtgcccacgtcctcgaacaccataaggatgaagtggatgatttggatgattacttgggacgtggtggcggcgagacgtgcaaagagatggaccatgattgcaagcattggatcccagagaactccaaaatgcgagaaggccttgagtggactagtaccaggatggggagacccttctgggaagctccttcaagaatgcctctttcacgctcttcttcaggatggggagactctcctgagaagctccatcaagaatgcctcgttcacacactttttcagaggcccttttcctgccatgtagatggttgccccttcagctatagcaggaaggaccatttgaaccggcatctacttacacatcaaggaaagctatttgcatgccccatggaaggatgcaaccgtaagttcactataaagggtaatatccaaaggcatgttcaggaaatgcataaagatggctctccttgtgaaagcaagaaagagttcatctgtcctgaggaaaactgtgggaagacttttaaatatgcttctaagttacagaagcatgaggaatcacatgtcaagttggattatagtgaagttatctgctgtgaaccaggctgcatgaaggcatttaccaacttggaatgcctcaaggcccataacaaatcttgtcatcgacatgttgtctgtgatgtctgtggaaccaaacagctgaagaagaacttcaaacgtcatcagagaatgcatgaaggttcctgtgttactgagagggttcgatgccacctcaaggactgcaagttgtcattttcaaagaaatccaatctggacaagcatgtgaaagcagtccatgagcagaagcgaccctttgtatgtggattctctgggtgtggcaagagtttttcgtacaagcatgtaagggacaaccatgagaaatctagtgctcatgtgtacgttcaggctaatttcgaagaaattgacggggaacgaccacgtcaagcaggtgggaggaagaggaaagccatacctgtggagagtttgatgcggaagagggtagctgctcctgatgatgatgccccagcttgtgatgatggaactgagtatttgagatggcttctctcaggctgattcgtcgtgaaccagaatacagaaatgtgagatctttggatatcaagggtgttgatatggtttgagatactagtagcaacgttcttttcctttgtgcatgtataggtaaaacatggaagtaattttgataagacctctatgtactgtctcagacatcaagttaccagaagtccagaatgcagaaacgccagatctttatatgctcaagggtgtttatgtgctagttaggtagcaacgttctctctttttgtatgtataggaaaagtgaaaggaattttagtagaccctaatgtcttgtgacaggcatggtaatttatcaaggttggtttgttctacagtgt

SEQ ID NO: 22492 - DNA, 1263 bp, Oryza sativa
  Clone ID: TF_OsC3319_2
ctagatgccggcgccgacgccgccgcccctcaggtgctcgcgcgccaccgccgacgcgccgtggccgtcgatggcggccatggacatcacggcgagcgagcgctgccggcacgcgtggcaggtcacctgcgcgatcaggcgcgccgcgtggtcccgcagcgcgagcgccttctcgagctccccgcgcgcccggtggcgcgcgcggcgggcgtcctccagcgcgcgctccgccgccgcggcctcctcgcgcgcccgctcccgcgccgcgtccgccgcggtcttctcctccagcgcgcgcctcacctcttcccgctgctgctcctcctcccctcctgccgccgcggcgcaggcgccgccgccgccggacgccgcggcgacgacggcggcggggccgattgagagctgcagcttcgtcgttgtcatcgtcgtcgcgtgttgctcgtgggaggaggagccggtggtcgtggagttggacgagaacgcggcggccaacggcgccgtggtggacgccgggaggagctgcagctcaggcggcggcggcggcggatgatggtgatgatgccgcagcgccgcgggacggatgaccggcagcgtcgtggccacgggcacgacctcaccgcgcacacgtccagagttacacgcatcctggtgctctatgaagctctccactttgattgctatatttgatagagatattatatacttcattcttaaataattggctatgtcactatacaggtttaaacttctggtaatttttcgggagaagacgcggccgcagtcgcaggagtggccgcgggtgccgcaggtcttgaggtgggccttgtagtcggactggacggcgtagcccttggcgcagcgggcacacacccactgccgccggccgccgtgcttgcgccggaagtgcttcttgatgccgacgaggtcgcccagcgcgtgtgccgggtcgtggtggaggcagctcggctccgggcacacgaacacgcgcttccgcgcccctccgccgcccgcgccgccgccggcgccgccgccgccacccgcggcgccgccgtcctccgccgccgtcgccgccgcggggcgcttgaccagccgccacggcaccttgtgccggcgccggtgcatctgcaggttctgctcccgctggaacccctgcccgcagatctcgcacacgtacctgtccgactccagcagcgtcctcggcgacagcgccaccacctccgcatctgggtctacgtacacacgggctccatgatcgaacaccat

SEQ ID NO: 22493 - DNA, 879 bp, Oryza sativa
  Clone ID: TF_OsC24770_1
gcaaactaaggctaggctcgccgcgagaggaaggtaagtaagtacgtacatttgcgcgaggtggacgagcttgacgatggcgagtgggcaacgagcggtcggcgaggggagcggtggcctccgcccgacgacgcacgtcgcgggcggcggcgggagcgcgcgcggggagtatttcaggtgcaagacgtgcagcaagacgttcacgtcgttccaggcgctcggcgggcaccggacggggcacacgcggatggcggcgcggcagcggcaggagcacggcgccgcgggggccgccgtcgtgggggctaccaacaaccagcggcgggtggtttccgcccaccagtggcacctgtgcgccgtgtgcggggtcgagttccgcatggggcaggcgctcggcgggcacatgcggcggcacagaggcgaggcggcagcggcgacgccgccgccggcggctgcggctgcgagcgccggcgccgtgtccagcatggagccgccggagatgatcgacttgaacagcccgccggcggtcgaggaggccggtgaaggtgatcagaggttgagcgtgcggaacaggagccccatctgcttaatctgctcgtgtagggtggtgttctctgtttggtgattgtgtgcgcgcggttgcgtttccaatgccattctagtgggaccaaggaagttataaaataaagtggggccaaggatctcgatccgtcttaaaaaaaacttaatttagtaattggataggacaaaaaatggatatcccccccccttgtattagattatgtcctatccaagtactaggttgagttttttttggccggagggagtatgtagtataatatgtttgtgcattttccgtgtaaaaaaaaaaagtgccctagc

SEQ ID NO: 22494 - DNA, 936 bp, Oryza sativa; identical to SEQ ID NO: 13257
  Clone ID: TF_OsC328939_1

SEQ ID NO: 22495 - DNA, 1600 bp, Oryza sativa
  Clone ID: TF_OsC11776_1
cccctcccccccggctgaacaaaaaaagaaaagaaaaaccctaggccgcctagagagagaaaggaggagaagggttcgccggcggcggatcggatcggcggcattcactcgtcgtctcgatggagtacgcggcgccggcaggggcaggggcagggggctactactactacccgccgtcgcagcagcacaagcctcgccgtcccccgcggcccgccgcccgctgggtcaagcactggatcccgcaggatctcgccacctcctccggcaaatgcgccctctacaagtgggtcagggaggatgtgtacaagaatctcaaggacggcaaggccgtgccggagccggaggcggtgaagcctgaacccaccacggagatcctcttcctctgcagctatgaaaactgtggcaaaacctttgtcgatgtcgccgccttaaggaagcacgctcatgtgcacaacgagaggcagtatatttgtcaggagcctggctgtgggaagaaattcgtagatagctccaagttgaagagacaccaccttattcatacaggacagaaggattttatctgtccccatccaggctgtggtaaggccttctcattggattttaacctgcgttcgcatctaaaaacgcatgcgttggaaaactatcatgtatgcccatttccagcatgtggcaaaagatttacgagtgactccaaattaaaatcccatgtcaagggccatgaaaagactggaactccgatcacagcacaatatgtgccatcatcagataaaccacaaagcagcagtaagcctgcgacaccagcaacaactaagcctacaacaccagcagcaacgaagacgacaacacctgcatcaactaagcctacaacaccagcacccacaagctttgctgagcgaccatatgtctgcccatatgatggttgtgggaaagcctacattcacagttacaaattgaaccttcatctaaaaactcagcatcctgaacatggtcaagaagagaatggtaggattgctgcacatgcaagtgagcatgctgtaaatgatcgtgccaatcagtataactatgctgagattgtcgaccttgcaccgaatccaaaaaggagcaagacaaattcagggcataagaccccctcatctaataaagcctacaatgtcaagatttctagcgtgttgcctgctgatatcagtggagtgaagaatcagtggccaggtaagtatgaagatgacagtgaagagacagaagaagaccagggcaacaacattgaagatggctggagatatggtaaccagaatgccgatgatgaggaaacagaatatgaagattaaccaaacgattctcttttgtcctttactaacatcctgctgcaatatatgcactaactagacagtagacgtggtggctgatacctttactaatctgcgtgcattctgaaccctggaagtagattagagaagtgctgttcttgagagtagtagaatcagatggccgtgattgtgtggtttggtcataaatagtctttgtatgcgacttattctcgttcagttttttatgctcgatctatgtattcaatcataagttgtgttatcatcgttttgtaaaa

SEQ ID NO: 22496 - DNA, 1021 bp, Oryza sativa
  Clone ID: TF_OsC343306_1
atgggagagcgtcccctcgccatcgccgccggccgtgaccccatgttcgtcaccgcctacgccgtgcacccggacggccacgacagcgacttcctcgacttcctcctcgagctcatggccgtcggcaagatgaaggagcgggtcaacgtgctcattagtttaccgacgatggaagtggccaccaatacggcgacacgatcgccggtgaagctaatgctggtgctgacactgtcgccggcgagcaaggtgatcgccaagggcggcggcggcgtgaagcgggtgcacctcgacggcggcgcgttccagtgccggacatgcgggcggcggttctccacgttccaggctctcggcggccaccggaccagccacaagcggccgcgggtgcgcgccgacggccttgacctcctcctcggcgcgcgccccggcaagctcggcgccggcggcgcctcgacgccggtagtgcaccggtgcgacatgtgcggcaaggtgttcgccaccggccaggcgctcggcggccacatgcgccgccaccggccgctggtgagtcgtaatggcacaatgtccacgacgtggacggcggcggcggcggcggcggcgacaatgtccggctcctcgtcggaagagcgtgacgacgacgacgacgacgacgtgcacaattataatttcatccactttttctgacgtcttcgtcgtcgtcaccgccatggaccagcaggaggactacactagtgatctgcagcttgagctcgaggaagaagaagacgataaccaacttagccagctcgcggagctcgacgtgcagctctcgctgtcgctggcgtgcggctcgacgacggcgatgtcatcgtccggcgatgaggaggacgcggagccacggcgtcgccggcgggacgaggaggcggcggcggcggcgttcgagtgccggacgtgcgggcggcggttcccgtcgcaccaggcgctcggcggccaccggaccaatgggccaggccctaggtggccacatgaggaggcatcggcctag

SEQ ID NO: 22497 - DNA, 1317 bp, Oryza sativa
  Clone ID: TF_OsC3878_4
ctagcgcggcggcggctgcagggaggaggcagccatggaggacgaaggtctgacgacggcgtcggcgtcggagacggcgccgtcgtcgtcgtcggcgtcgagggcggtgtgggcgtggccgaaggcgcgggcgtggtccttgagggagcgcttgtgcttgaactcggagccgcagaggcagtaccagagcttgccgcagttcttctcgtgggtgcgccagtcgcccttgacggcgaaggccttgccgcacttgcggcagaggaagggcttgaggccgtgcttgcgcttgtagtgcgtctgcagcgtgcggaagtccttgagcggccgcgcccgcgggtggtcgatgttgttccggcaccccgccgcgcagcagtagcacggcagccgcagcatcgccgtcggctgcaccccgcgcagcgactccggccccttcctgtactgcgacccatgcccccacatatgcatctgcatgttattgtatctgttgaaggttttgaagcagacagggcaggagaactgggttgggccgatgaggatctgcgatggcgtcggaatccagtactgccctttgttcagcttcccgatcggcgtcgacgagaaccctagcggcaccacctcgtcgtcgccgccgctgccgccgccgtccaccttgcagtcctcctcctcctcctcgtgttcgacgccggcgccggtgagcccggagaggagatcggcctccgtgccgccggcaggcaggccgatgcgcagggcgaccgcggcgtcgatgtccgccgttgtcccggcgacctccacgtccatcgggtcgccgccgtcgttgtcgtcgccgcagcaggtggggatgcagttgaggtcggcgaagagcggcgcgcgcgcggcggcggcggcgggggtggccgtcgacccggccgccgccccctcctgatcctgcaggtggtggtagcagcagtcgccgtcgtcgtcgtcgtcggagtccgagtcagccgctgcgtcgacgacgccgccgcggcgcgccggcgtgggcgacagggacagcagcggcagcgcttcccgcagcggcggcgacggcggcgcctgatgctgctggtgcaccggcggcgggtggaagaatgcggccggcgggtactgatgatgatgatgcgcgccgacgccgacgccgacgccaccggcggtaggatacagggcagcgtaaggcggcggcagcggcggagggaggtgagcggcggcggcggcggcggcgggcgcggtggggaaggagctagccgaggtgcagtagtagtagtaagggttcttgaagaagctagtgtaggggtcttccat

SEQ ID NO: 22498 - DNA, 494 bp, Oryza sativa
  Clone ID: TF_uC-osroM202007h05b1
tttcaccatcccagccgtcctcctcctcctccggcaagcttctaaaccctagccgcaacgcaaaccctccactcctcctctccccttagcccccccctaacgccgccgcaaattaaccgacgtcgacgatgatgcagactgccgggcgccgccgccaccgatgggtcaaggagtgggttccgcaggatctggtcgtcgccggtggcccatgcgcgctctacaaatgggtgcgagaggataggttgtcagctctcaaatccagggacaaggaacaagaagcagaactggcaaaacctgaaccaaccaccgaggttctcttcctgtgcagctatgagggctgcgggaaaacttttgttgatgcaggggctcttaggaaacatgctcatgttcacggggagaggcagtatgcgtgtcactatgccggttgcgacaagaaatttttagacagctctaagctgaagaggcattttcttattcatacaggagagaagaac

SEQ ID NO: 22499 - DNA, 1530 bp, Oryza sativa
  Clone ID: TF_OsC3878_1
cacattaagaagaaattaatcaaataaatgtataagctacaaagctagtactaattaatatacataaccatgcaagagcatgagataaagagacacgtacaaacatacaacaaatttatcaactagaaaaactaaacgaatcaagtttacattgcaacatacatacacatatccatagtctaatcaatgaaacctcgcactatcttgtacgatttgttttgttttttaaaaaatgtgacgacaaagaacaccggcggatgggaacggctacggcaactcgcacaatcttatacggtccattttttttaaaaaagtatgacgatatagatcaccggacagacgggaacgacgactacggcaactcgcacaatcctgtacggttcgtttaaaagtaaaaatatgacgatgcggatatcaccgggtgctgcgtcaccgttggaagcttatgatgcggtctttgtcggcgggggtggtggcggcggcggcggcggattcggcgacggggaggtggtgggcaccgaaggagcggacgtggtcgttgagggagcgcttgtgcttgaagtcggagccgcaggcgcagaaccagcgcttgccgcagttcttctcgtgcgtgcgccagtcgcccttgacggcgaagggcttggcgcagcggcggcagcggaagggcttggcgccgtgcttgcgcttgtagtgcgtctgcagggtgcggaagtccttgagcggccgcgccctcgggtgggcgacgttgttcttgcaccccgccgcgcagcagtagcacggcagcttcagcatcgccagtgtctgcgtccccttgagcgactccgggcccttgcggtactcccgcccgtgcccccacatgtgcatctgcatgttgttgtatctgttgaaggttttgttacagacatggcagatgaactgcaccgggccgacgaggatctgcgccggcgtcgggatccaataccggctgctcatcgccacgccgctctccgccccgaccccgccgaacatatcccccacggcggtgatgctgctcgacccttccaccgacgccaccgcctcgccgtactgctcttcatccccctccaccttgcaaccgccatgcataggcttccactcgtccatctcctcctcccctacgtcgtcgtcatcctcctcctcatcgtcctcctccatggtgacctcctgagcgctagatcctgtaaccggcaagccgatattcaactccacgccaggctccactaccccggctgcgtgtgcactgctcatgatctcttctttcacagggtgctcatgcctcttcgaattcccctcctcgagcatgctgagcagcggcaaacaagtcataccgctcttatgatcttcttgaatttcacctccgccatcttcaccaggtactactgtttcttgatccctggaagccatcgaggacgacgaggagaaagacgacgaccacgacgaggatgacgccggccgcggcggtggcttgagccactcgaagaaaggcgaggcggcgacgacctcaccttccat

SEQ ID NO: 22500 - DNA, 1465 bp, Oryza sativa
  Clone ID: TF_OsC337334_1
ccgcgcggcgcagccggagagcacgtgcagagagatggccgtcaactccggcgatcgcgcgcgcgcgcgcgggcaccacggagacgacgacgaggagggtgtggccgtcgtcggcgaggactacccctactgctctgactcggattccgacgacgacgacgacgtcgaccgctacgtgttccttgcacgccagcccgcgccgccggtggaccgcgacgatgccgaagccgacgccggggcggaaggaacgggttgttgcaaacggaagaggcgcgtcgtcgacgacgacgaccatgatgacggtttctcgccgcgccagccggcgttgctggatggcagcggcggccaagcggcggaggaggaggaggacgccgaggggagctctgatgatgatgacgcaatggcgccgcgtggggaggcaggaggcggcggccgcggccgcggggtcgggaaggtatcacgcaagaaggctcgactcgtcgacctgatcagatcgccattgttgccggccgagctggatggttcggataaggcggcgccgccacctccgcgcggcgtgtgtcccaagaagatcgcggtggtggtgcaggcgaagaacaggaagcgccgcaggttcgtcgacggtggcgaggagcaggagccgcagccgcagccgccggtgcgcggcaagagaagcagaggccctgacctcgaggcgagcgagggtttgcaaacggcttcggcggcggcggcggcggcggcggcagaggcggcggagagagcttccaagcgcttcgtctgcagcatatgcgggaggtgcttcggcagccaccaggcgcttggcgggcatgtcctcggccacaagaagaaagccaagaacgccgccattgccgccgcagcgcgcgacgccacgacgacggcggtcacggaggccgtggctccagcaagccaaaggcaaagcttcttcgccgccgacatcaacggacaagacgagcgtggatgcgatggcgccgagggcagccgctacgacgacgacgaggagaagagccccgtcgtcgttgacgacgttgcagcatgccatgacgcggacgtcgacgaaagccgcggtcacggtaaggccgagtcggcctctgccattgatgccggcggggacgcgggcaacaacaaggtcgcccatggtgacggcgaggagaacgacaagatcgccggcgtcgtcgttgcatcaagccacgacggcgatagcgacgtgggcaagatgaagatcgtgcagcacaagtgcgacgagtgcggcaaggtgtgcctcacggggcaggcgcttggcgggcacatgagcaagcaccggcggacgcgaccggcggccaacggcggcgaggggcctgcaactgcaacggtggcggacgggggagcccaaactgttcggctgatcggcgacgatgtttgcttgcagagagcggtggcaatcgctgggtttcactcggctcagtaa

SEQ ID NO: 22501 - DNA, 550 bp, Oryza sativa
  Clone ID: TF_rsiceg_8849.y1.abd
gcacgaggggcttcccctcaacacattctgcgcactcttcgatatcctcagccagttacggtgcggacggttactacggtggagagggctctgtgactgattacagttccgcctctgagtcagttgacctcacacattctcgcactcttcctcgacctagtgctcttctaggtgccaacatgccacctgcgccccagtccatgatgggtcaggtcagctccaaggtgtcatcaagctcccagaagaaacacaaatgcaagatttgcgataagcgtttcactcgtcccagttctctccaaacacacatgtatagtcacactggagagaagccttttgcgtgcgaggttgagggatgtggccgccacttctccgttgtgtccaacttgaggagacaccgcaaagtgcacaagaatgacggaggtgcagatcatccatcaccagaagatgcataagctgcctaagctgcctgagaggtcgattcctcaccctctctagacatttcgtaactggattctctacgtcatggtagttatacctttatcctcttgca

SEQ ID NO: 22502 - DNA, 486 bp, Oryza sativa
  Clone ID: TF_OsC48690_4
gacagatatgacggccgccctgcaagcgctgctcgacccgacggcgctgtccttgggcctgcccacgccggcgatcaacaaggaggagtacctcgccatctgcctcgccgcgctcgcctgcacgcgggcggggaaggccctggtgggagtgggaggccagcagcaggtgcaggcctgcaataagtggctgtgcccagcgcccgcggcgcctgaggagctccgcttccggtgcaccgtctgcgggaaggccttcgcctcgtaccaggcgctcggcggacacaagtgcagccaccggaagccgccttccccgggagaccactacggcgccgccgccgcggcgcagcagctggcatccgctggtgactcgaaggaggactcggcgtcgtcagcggccgggagcactggcccgcaccggtgcaccatctgcaggaggagcttcgcgacggggcaggcgctcggtggccacaagcgctgccactactggga

SEQ ID NO: 22503 - DNA, 2411 bp, Oryza sativa
  unsure (1)..(2411): unsure at all n locations
  Clone ID: TF_OsC57972_1
gcctttgcggaggcgagaggcggaacacgaggaggccaccagaaaattcctccctcccccagggaggcgaggcgaagcggagctctcctcccaaattccccaaccctccaccgcctccaccgccaccgccatgcgcatccgccgctacgccgcgcgcctcctcgcctcctccaccgccaccgccccctcctccctcccgccgccccccgccgcctccgcggcctggtgccacgccgccgcggacgattgcgccatctgcgacctcacccgctccgcctccccgcaggtggtggcgccggacgcaatcaagcagaaggggcacattgccggccgggcgctggaacccgagctcaggagcgatccgcgcgtcggactagccgaacgaactcctgttccggaagatcaagggcgcgatatagatgacggtcctcccgcgaaaagatctctcacgtttactgatgctgcggcgaggctagaaggttcgggaaatgttggtgctggagttgctactgaaccagcagctagactaggagcccccgttgctaatggagctgttagtgggcaggaggatagagcagcaacttgtcttgcggatgaatctgctgcggagctgattgctaccggggtaacttctctcgttaccggagcaaccgctgaaccagaggttttaaaaggggcttcatttgctaatacaaatgttaccgagccaagagtttcggagagagttcctcttgtgcgtgaagctgcaactgagccagaagctgaagtctctatgcgagaagttacagaaggagctctccctgatggtgaaggtgctgcaaagttggaaattacaggggggctttctcgagaatctgctgacaaaatggaagttacaaagggaatttctcttgttactgaagcttctgctgattcagaacttgcacagagagttcctactgaaccaggagttgaactctctctgccggaagttacagagagagttcctgttgtgactgaagatttcactgagctaggagatacattcagtggcctacatattacagggttcgcttccctggataatgaaggttccgtggaacaagaagtcacaggaagtggttctcttgtaaatgaagctacagagatggaagttaaggaaggaacctgtatcttcaccagagttgccacagagctgggagatactggtagagtttctgcttgtagtggagatggtgacattgctttagatgagccacgacctcctgattgtgtttcggaggttgccaatgtgaatgttggaaatgcaggagaggctgttgcgagcaaagtgcagccttttagagacaatgcagaaagtgttggtggttctattaattcaacaggcaatggccatgttagctccaaaagtccaactgcagatgaagcagcaccacctggtggatgtactgatacacccagtgtttcatgtttatcagacattgtggctagaagcatcggtaagtcagggagaacagatatcatatgttatgttaggcgcaggggtaaaaggaagctggaaatggtggaggtaaaggaagaaaatgttgaaatggatgacagtgctatctgtgatcaatatgatgataaagtggcatcagaaagaactggtccttgcgagagtgtgacgtcaactgctgtatctgtagagattaaaattgctgacataaagagagagcttgaagataattcaactgctagcaagggtaaaaagaagagggccaaaaggtttcaatgtgaaatagattattgccgcatgacattcaagaaccgagctgagctttctgttcataaaaagaacacatgcacggtcaagtcatgcggcagacatttcagatcccacaagtatctgaggcgccaccagagcattcacaatgatgatatgccatacaagtgtccatgggagggttgcagtatggctttcaagtggtcatgggatcggggtgagcatttccaagtccatgctggcaaaagaccttataaatgcacaacacctgggtgcagcaagatatacaagtttgtttcggacttcacccggcataagaggaggtgcaaacctcagaggtaaaagcttgtgtgatactacagatttaggataggagtaaaaatcttgtacttgctactgtagatgttttttttatttatttgctggatgatcggtgttgttctagcgacctatagccggattgcttgttactttgttgagaaaattttacaatctgtagttcggcaaattttnaatgcgtgtttctcnaatatcgttntacattntaaaaatgctgcttcataatatccgagatgtttttccggtgcngtntntntntaaaaaaaaaaaaaaaaaaaaaaaaaaaaaaaaaaaaaaaaaaaaaaaaaaaaaaaaaaaaaaaaaaaaa

SEQ ID NO: 22504 - DNA, 2130 bp, Oryza sativa
  Clone ID: TF_OsC78077_1
gctcatgcgaacaacatatatgcaattgcaaacgcatggaaataatgtaacagtatatatgtatgtactgatcaattcgcagatcaatcactccttgtcgttatcatcagcacccccgcgagacgaggagccaatgccgacttgcagccacggtgtcgtctcccctgccatgctcacgtccttgagatcgctaagcctcgctctcttgacggtggtgctgtccgcctcgtcctctgctgcggcggtgcttaacccgaccgcgtcgttggcgttctggctgccggttgtcgcggtagccttgttccgttggctgggtatcgccggcgacgatgggatgtataccggtggtggcgcgtcgagatgaaacgagctgccgccgaccttcggacggactgttgcggccgaggccagcagtggcgggttcgccgcgatgctgaggtcgagagcgggctccggtgcgtccaacattggccggaacgagagcgggacaaggtcgtcggctaggggtgggactgaggcggtgtgatccgccgaacttgacgtcagccagtggcaccgtttgtggcctccaagcgcctgcccggaggtgaacagtcgatggcagaccgagcattcgtgcatcttgcccttcttcttcaacggtgcagcggcgagcgcggcgaccggcggttctatgggcacgatggccatcgacagttctgccgcggcatcgctcgtgccggcgtttccatcaccgtcgatgcttgcgtgcacgttcctcctggcatcagaagtggccttggcgggattgtcctcgctccgatcagcgacctctgcatggtgtgatggctcagccacctctggcggttgctctccagcttggcagcgaagcagcccttcaccttcttgtggcttcttgcacgccttgcactcgaacatgcctcgaggcacggtcgagacatactgtggcgccggcgccggcgggggaagcgccatcactgtatccagtacatacgtcgtcggctccatgaacgtgatcagtctcttatgttccttactcgcggaagaagatgaccgttgttctgcttcagtgacgcctgcctgatctaccttggacgacgagagcatgaccaggcaattggccaggtcctcctcctcgccggcagcgcacgctgagggtgtcggtgacaaatcgactcctgtgcccttgcagcgacgcgagcgcttccctttcaaccaaccggcggccggtgcagaatcctcttcgccgtcggcctcgggcgaaggcgaccacggttgcagcgagtgatccacgtcgtcctcgtcgtcgtcgtcctcgccggagctgcacttgccgtgctcgaggaaatgctcccacgacgtgaactccttcccgcagttcttgcacacctggcggctcctcgtgacccggttaggattggtgcggagctcgtagacgtgtgtcgctgcccctgacgacgacgggccgcccgcgttccaaggatcatctgccccgccgcgcgcacgccgcacggcctcatcgccgagcgaatcgtcgtcgtcgtcgtcgtcatcatcggcacccaacccatcgccgtcgccgacgccgtgggccctcatgtgcccgcctagggcgcttccgcacgtgaaccccttgttgcagactctgcagaagtgcttgtaccccgacgcctgcgccgccgtcggcggcggtgcccgaggtgatgacggcgacggctgcatgatcgcagcaatgccgcgagttctcctgaacgtggctcctttgacaaggtctttatcccacgtaacattgacgtggcgcttatgtggcaatttgattcgccccacccaacctcttgcacccaccagatccgcgcgccaatacatccactccccctcactatagccaacctgtcgaaatctagggctcccaaattttcccctctctcctcttctctttcctacccatgttttgtttggtctttggaagtaacagagagacaacaaatgaagaagaaaaccggcggaatccacttctagtctacgcacttgggggtcataatgcggaagagcaccacgaccacaagaaccgtggtggccttggaggcacggtcgaagagggaaggcaccggtgaggtcgccgcccaccat

SEQ ID NO: 22505 - DNA, 2537 bp, Oryza sativa
  Clone ID: TF_OsC2514_1
tattgttttaatttattaatcacgagaacaatatttttttctctagagggttaactgaatgactgaaagtgtacaagaactagaaaagatcaggagggtaattaagtctcattatctcccacatacatataaattgtctgtcagaatagaaagaagtagatagttaaatctcctaacagttataccttgatcaaatgcaattaacccaaatacatttaacatgatctatttatttaaataaattgaaacaatactgtctaccatatttagcatagtacttacctcgtgcaacatgtaaactacagcacaagtcgtttgcttcctggttcaaatagctacatcatgcaatagattgagtttatttaaagatctattgcgtcaccatacttggtgctcagattcggctcggcattagccctggcctgacccttttgcacggaggcacgcaagaacacctctcacatgcgtcacgagtctccgcattctctggcacccgccaagtacagaacgccttccgtcctgggttagtgttgatgcgatcggtgccgcgcccctagcgctgtcagagctcattgcatcctgcctccgttgaaggacgacgacgccgacttcatctcggcctccaaggggccatgcatgtcgctgccgccaccgccatggtgctcccctctcgccatcgacatccccctcacgaaaccgccgccgccgacgccgaggaagtcacgcgtcacgtcgccgtcgccgccgccgccgccgccgcgctgcaggctgaacttcacctcgtgctggtccatgtcgtacagcctcgggtcaatcatgctgccactcccaaacatgccctggtggtcggcgttgccaccgccggcgagcgagttcatcaggctctggaggtgcatctgcccctggtcgaccatggtcgtcccgcggccgtgcgggatggacgacggcgccgacgagccggcgaagccgccgccgaacacggacgcgccggcgccgttcgcgctcgacgtgctcgagcccatctgcgccgccttctggagcagcgcggtcgccgacatctgcggcagcatcatggcctgatcattcgcgtacatcccggcaggagaaacctggtggtggtcgccgccggagaagttcccaccggcgccgaacagcgccgccgccgatgtctctgaaccgccgccgccgccgccaccaccccctccttcgctgaactggtcggtgttcgtcatctgtccctggctcgcgtggccatggctggaagtacccgagctgttcgcgctgttggcgatgtagccgaggttgtagagacccggacccgacggcgacggcccgccggtgccattcccttggaggtcagggagctgcatgaggccatggaacggcttaccctgcaagaatccgtgcggaccactgccgtcgccgccgtcgccgaacccctgcggcgccgcgccgaggaggaacggcgccggaggctgctgctgcggcggcggcaggggccggaacgcggaggcgctggacgacgacaggaggtgctcgaggcgtgcagccatggcgccaccgccgctgccgccgaagcggaggaggtccggggaggcgccgtgatggtggtggtggtggccgtggtcctggagggtggaggcgaggtgggagccgacctgggagaggctgagcgccatgttggcggcgccggcggagccgtagaggtggccggcggcggcgggtggcagccgctcgccctcgggcccccctcgggtcgcctcccgcgaccccgccccgccctcaccaccgagccgacgggccccccgccttcctgcggccccccccccctccctccctgccctgcccgccctggcgctctcctgggcgagggcgtcgcagaaggcgctgtgggtgatgaagctgtccctccgggagaagagggtgccgcagtcgcagcggtactcgcgggtgccgcagatcttggagtgggccttccagtcggactggacggcgtagcgcttggagcacttgtcgcacttccacttcttctcgccgtgcttgcggcagaagtgcttcttgatgccggtgaggtcgccgagggcgcgggaggggtcgtggtggacgcacgtcggctccgggcacaggtacacccggcggctcaccgcctccagcgggttcttctgcttcagcttccacggcaggttgtgcccgcgccggtgcagctgcaggttctgctcccgctggaaccccttgttgcacacctcgcacacgaaccggttcgtcgccagcagcgtcttcggcgacagcgctatcacctccgcgtccgggtctggtaaggttctcttcttcttcgctggtggcgccgccacggccgcttgaccggccgccgaccctgccgcagaagccgccgccgcggcgttggatggcgccataggtggctggtggtggtggtgttgctgctgctgggcaaatagcggcttaatctggtcctcatggtcgccatccctaattccaaacaacgccgccacagctgccgctgatgagttggatgccat

SEQ ID NO: 22506 - DNA, 1381 bp, Oryza sativa
  Clone ID: TF_OsC46145_1
cttttttttttttttttgttttctgtgatttgtccttttgaatttgattaatgggagcagcccaacattaccaacctgcataattcagaaggaaggggggtaattctcaattctgaccaactacccagccttattttgaatattgtacatgtatgcaaaactataacccaaaagctaagattttgtaaatcatatgcacaagcactggatgaaaaaacgactgatctgagcagctcattcttcgtcctcagtctcctcatcgtcgtcgctgctagcagctctgtacctcgccccgtccccaacattatctccctcttcctcagtctcctcgctatcgtcctcgtacagcacattcctcggccactggtgctcttcgacaacactaacaggaggttggtatggctctgtgtaacccctgcgcttagggaccttgggcagtggcatcttggccgtcaaggagggcttgcttcttcgcttcgacatcttcgaagaggcggcttgagcaccggcatcctggtagtgattagggtgctctttcttcagatggaggttaagtttgtactcatgaatgtatgccttggcacaaccatcataaggacagacgtatgggcgatcagctgagggagtgggtggagctgctgacggtttcggtgtgtgactattatgggagtggtctgctagaccactgcggtttgttgcagacccacctggattctggagaccacccttttcatgctgttgcttgatatgagcccttaattttgattcctgtgtaaaccttcgagcacattctgggtacttgcacacatgatagttatccacagaatgtgttttcatgtgtgcctttaaattaaaatccaatgagaaagccaaaacctttccacagccttcatgagggcagacaaagttcttctctcctgtatgaataagaaaatgcctcttcagcttagagctgtctaaaaatttcttgtcgcaaccggcatagtgacacacatactgcctctccccgtgaacatgagcatgtttcctaagagcccctgcatcaacaaaagttttcccgcagccctcatagctgcacaggaagagaacctcggtggttggttcaggttttgccagttctgcttcttgttccttgtccctggatttgagagctgacaacctatcctctcccatggaattcaagcagccggcaactgcaagggatcccatcagatcctgcggaacccactccttgacccatcggtggcggcggcgcccggcagtctgcatcatcgtcgacgtcggttaatttgcggcggcgttaggggggggggggctaaggggagaggaggagtggagggtttgcgttgcggctagggttgagaagcttgggggaggagga

SEQ ID NO: 22507 - DNA, 1870 bp, Oryza sativa
  Clone ID: TF_OsC3319_3
ctacatgatgcccatgctgttagcgtgctgtaggcgacgccgcgtggcgtcgacgacgtcgaggggatcgtcggcgtcgccgccctcggtgacgacggaggagacgtagctgcaggcgacgtcggagctcatggcggccggtagtggcgcccccgccgccgcggcgcggaacttgtggcggcagctgaagcaggtgatctggagcagcgtggcgttgacctgccgcacggcgtggtcgcggagcgcgtgggcgcggctcagctccacctgcgcctggtgccgcattcgcctggcggtcgccagctcctgctcggcgagctccacctgccgcctcgcctgcgcgcgggcctcgccggccgcctccttctccgccatcgcctgccgcagctgctcccgcgcctgctccttcgcggtggccgcggccgacgcctcgtcgcttgtcccagccgcgcccatgacctcgtcacggccgatggagagctgcagctgcgtggaggcgtcgttacactgggagacacccgtcgggtgatgctgatgcgccgccgcgtagaagcacgcccccatcccgcccggagcggcggcggcgccacccgcgttgaacggcggcatgagctggagctcgaggttgtgcgcgccagcgcccccgcggtaatgatcgtacgacggcggcggcggcgacggcgccatgtcgaaccggccgcggaaggcggcggccttggggctcggcatcgagggcgccccggccccgggccaggcgacggggctggcaaccacgtcgctggacgggctggtgctcgacgcggtccgcgacagcgacgccgccgccggcgcctgcaggtccagctgcttctcctgctctaacaccgctacgccgccgcacgccgccgtcgacacgttccctccctccgccaccgccgccgcctgcccgcggctggcattgcacgtgtcctggtgctcgatgaagctctccacccgggagaagacgcggccgcagtcgcaggagtggccgcgggtgccgcaggtcttgaggtgggccttgtagtcggagtggacggcgtaggccttggagcagcgggcgcacgcccactggcggtggccgctgtgcttgcggcggaagtgcttcttgatgccgacgaggtcgccgagcgcgtgggacgggtcgtggtggaggcacgtcggctccgggcacacgaacacccgcttcctcgccgcctcgccggcctcccgcttcagcagtttccacggcaccttgtgccgccgccggtgcatctgcaggttctggtctcgctggaacccctggttgcagatctcgcacacgtaccggtccgactccagcagcgtcctcggcgacagcgacaccacctccgcgtccgggtctggcgtgccggctggccgtcgcttcttcttcgccgagccggcggaggcggtggcgatctgcagcgaccggaacggctccggcgtggtcgcctcgtccggcggcggcccggccgtcgtcggggcgcaagaacccaacatggcggcacaggaagaggcaaaataatccctcttttttttcctgttcttgtctgatcacaaactctcagacgatgtgaacagaatgcattgcactcgttcgttctatatagaggacgatgaagaacaacaagagatcgataggcaaaacaataaactggagggaatgggagtactataatatactactcctaccaccatgagcttgcaaggaatcaacaagatgtgagagagggaagaaggaagaaagggtcttggagttggcttttgtgggctgctacagagacaactccaaaggaggagagagagagagagagagagaggaagcagctttccaccggctttaggttttagcagc

SEQ ID NO: 22508 - DNA, 1188 bp, Oryza sativa
  Clone ID: TF_OsC3878_5
tcaccctactcgcgaagcggaggcggaggcgtggtcgaggtcggaggaggggtcgtcatcggcgtcgaggtcgtcgaaggagtcgatgccgcaggcggcgtggccgcggccgaaggcgcggatgtggtccttgagggagcgcttgtgcttgaagtcggagccgcaggcgcagtaccagagcttgccgcagttcttctcgtgggtgcgccagtcgccgcggacggcgaacgccttgccgcacttgcggcacatgaagggcttgatcccgtgcttccgcttgtagtgcgtctgcagcgtccggaagtccttgagcggccgcgcccgcgggtggtcgatgttgttccggcaccccgccgcgcagcagtagcacggcagccgcagcatcgccgtcggctgcgtcccccgcagcgactccggccccttcctgtactgcgacccgtgcccccacatatgcatctgcatgttgttgtatcggttgaaggtcttgtagcagacggggcaggagaactgggtagggccaatgaggatctgggacggtgtggggatccagtactgccccttggtcagcttccctatccctatggacgcgcaacccagcggcagcgtcgccgtcgccgccgccgccgccgcctcgtcttcatcctcctcctctcctccttcctcctccacttgcatcctgctgcttcctccacctgctgccgatgcttctgctgctgctgctgctgcagcttggttgccggcggcggcggcggcgtcggaggggctcgggctcgggaggccgatgtgcagggccacggtcacctccgccgcctgatcatcggctgctgctgctgctgatggtgattctcgtttgtcgtcgttgttgctgcaagaagcggcgccgccgccgccatggctgttcttttcttggccttgcttgtgatggtggtgatgatcttgatcatggcggcggtggtggtgatcgtcgtcgtgggtggtggagggagtgaggctgaggagggggagggcttccctgatcggaggggaggaagggggaggtggtgggtggaggtaggaggagtagaggccggagaaggaggcggcgtagggcggaggcggcggcggcggcggcggagggaagtggagggggtggtgggagcggtggtggtggtggtagcctctcaagaagttggtgtagggatctcccat

SEQ ID NO: 22509 - DNA, 1841 bp, Oryza sativa
  Clone ID: TF_OsC2514_4
gaacaacaaaagaaactcacttgtaacttcgtactaagctaaataaacaaaagaacgacgttggtcaaaggaaacaaacaaaagttggaagatactgctaaattgctaactgaacctggctgcttccactattttcaccgtcttacttcgtgctgcatgtgtcgaattcacagtggtttgctacttggtgctaattgctaccagacgctagctagctagtgctattacaggattggtgagctactcgggttcctctcccacggatttgcctggccgccatgggcggcgccgaaggtctccgcggcgacggtggcactcccggccaagctgacagcgccgccgatgggttggatgaatgtcgggaagcccctgcttgtcgacgcgcctgtcgggctcactccaagccccaagaaatctagtgttgccggcttggcactgaacagtgtggactgacccatcatgagctccggcaagctcaccggaccgcctgtcgcgtcgtatggtaacccgaggccgagcccggaggacagcattggggatggctccggctgtaaccgcggcggccattcgggcagcgaactcgccgggagtggcacttgcatggtttcttggtggtgatggtggtggtgctgttgctgctgccctgacgacgaaggcggcgccgacgatgacgatgacatgtcgaggcccacgcagcggagaaaggacgagctagacgaggtggcgcccatctgcgcggccttctgaagcaacgccgtggcggacatgtgcggcgacggggacggcggtggcggcggagcgaactgctgccggtcagctggtacaggcgccgtaaacagcgacgacgacgcgttgggcgcgaggcacagcgccggaggcttggcaggcaccgcgcgctcctgatggccacccgctccaactccgatggggtccgcgtactgcggcgcctgggccaccgacggcggtgcaaacatgctgctaaggaggctttgcgacgtcggcgccacgccgctactgctgctgctgacacaatcattaggagcggcaaccggcggcggcggaggagcagtaactggcggcggcgccggcgccggcgccggcgtggcgaactgatccagtgcagcatcccgatctcgttgctccggttgcgccgcgggagccggagctgcggccggaggaggtggcggtgctggcgccggcaccggcgcgggtggtggtagaggcgcttgcggcggcggcgcaccggcagaagccgaggtcccgtcctcgtcggccggcggcggcggcgccgcgcgcgccttggcgctctcctcggccagggcgtcgcagaaggcgcggtgggtgatgaagctgtccctccgtgagaataaggtgccgcagtcgcagcggtactcgcgggagccgcaggtcttggtgtgcgccttccagtcggactggacggcgtacttcttggagcacttgtcgcacttccacttcttctcgccgtgcttgcggcagaagtgcttcttgatgccggtgaggtcgccgagcgcccgcgacgggtcgtggtgcacgcacgtcggctccgggcacacgtacacccgcttccgcacctccttcccgctccgctgccgcagcttccacggcaggttgtgcccgcgccggtgcagctgcaggttctggtcgcgctggaaccccttgttgcagatctcgcaaacgaacctgttcgtcgccagcagcgtcttgggcgacagcgcgatcacctccgcatcaggatctgcaccaccacgcgaacgaacgctcgatcggtcaccgtcgccatcgatcatctcgccatcacgcataactctggcattagccat

SEQ ID NO: 22510 - DNA, 1541 bp, Oryza sativa
  Clone ID: TF_OsC154556_1
atggatgcggggggagtggagctctctggcgtgatgcatcggtgtagggtgtgcgggaaggggttctcgtgcggccgctcgctcggtggccacatgcggtcgcatatctcgtttggggaggcggcggcggagctcggcgccaatggcggcgtggttgggtacgggctgagggagaatcccaagaagacgaggcggctgtctgagtttgatggtgatggtgatggtgaggaggtggaggtggaggagggtggcgatggcggcgagctcagggcgtgccgggagtgcggcaagctgttctcgtcgtggcgctcgctgttcgggcacatgcggcgccatgcatccggcggcggagggaggaatcacgacgacgacgacgatgacgacgtggatgtggaggatgagttcggcggcggggaggaggaggagattgtggcgccggcgccggcggcggtgactgtgatcgcggcgccgccgaggcggaggcggcggtcgatgcgcgtggcggcgcccgcgcccgcgcccgcgccgccgcggccggtgctgctgggcgggttcgagaaggaacaggaggacgtcgcgctcggcctcctgatgctctcgcgcgacaccggcgtgtggcgctcgccggtcgcgcgcgcggatagatcatatctagcgtggacgatggcgaggcatcggtggtatgtgcaggcggtggcgctgctggtggtgctgaaggcggcggcagggtctgcggcgccgccgacgacgacgaggagcaggagcagcagcacggtggtggccgggatggtgttctgcgaccagtgcaaggacggcgccagaggcctcttcgactacccgctctacggtgcgcgggtggcgatcgagtgcggcggaggggagagcccggtgacggtgcgggagtgcaacaccaactggttcgggggattctccgtccgcatggagggcacgcccgagatgaaccgctacccctcccaagaaacggctacggctacggctacaactccgacgaggattcagctctgctccagtacggcggcgacgtcgcgaagagcaggaagcgaagggctagctaccactctcccaattccatctcctcgaagaagaagcagcagccgcgcgcggcggcgccggcgaagcggacacggtacgagtgcccggggtgcggcaaggtgttcgcctcctaccaggcgcttggcggccaccgcgcgagccacaagcggatcaacactagctgcagcgcccccaaggtctcccccgccaccgccgcggcggcggcgcccgcgccggagccgagctcggagacgtacgcctcgctgagcaccctctccccctcggcgtcgccgggctcggcggccgccggcattggcgaccgcaaggccaacaacaagtcgtcagcggaggaggagaagttcggcggcgcgtgctcctccgacgagctctacgccgagctggagctggagcagcgctcgccggcggcggccgcggggtttcttgatctcaacttcccgccggcctcatcggaggttggcgtgaactga

SEQ ID NO: 22511 - DNA, 1955 bp, Oryza sativa
  Clone ID: TF_OsC2514_2
atccaccaaatgtactgctctagtgctgtgtttaaatgcagaggcagtggcagctacaggacaagagcaaggaggcgaacgagaacaaacaaatgcaaaagacagcacaggagaagagaggccgtgaacaacaaaagaaactcacttgtaacttcgtactaagctaaataaacaaaagaacgacgttggtcaaaggaaacaaacaaaagttggaagatactgctaaattgctaactgaacctggctgcttccactattttcaccgtcttacttcgtgctgcatgtgtcgaattcacagtggtttgctacttggtgctaattgctaccagttgctagctagctagtgctattacaggattttacttcatctcttggtccagtgagccggccatgcccatcccggcggcgccgccgtgccgcagttgaagccccggcgcgccgccgctcacgccgaggaagtccctcgtgctcagcttgccgtcgtccacgccggggaagccgccgccgacgaacaccgttccggcgccggtgccgcccccggtcgccgagagcgtgttcatcatcagctcccggagctggctctcgttctccgccgtctgagaagcagtgctcctcgacgagctctccccggacatgatgaacccggctgctccggcgggcttaccgttcagagcgccgccgccgccgccgcttccgagacctctgagtagcgagttcacgctgccggcgccgccgctgctcgtcgtcgcgcccatctgtgcggccttctggagaagcgccgtcgccgacatctgcggcggcgggacggtctggtcggacgagctgtacaaggacgagaagccgccgccgccgcccatcatgttcccggagaagatgctccccgagtcggcgttgttaccgctgttgccgtgctcgccgctgccggcgcgggcgccgttcccggcggcgacgccgttgaactgatccgggaagacgagtcgtccctcctggtggtggtggtggtggccgccgttcccgccggagaagtagctcaggttaaggaggccgccgccattgctcccctgctgctccggcagctgcattaggccgtggaacgccggcttgccgtggagcagcgaggtgtgggcctgtccgtcgtcgccgccgccgccgaggtagaacggcgaggaggacgacgacgtcggctgcgcggcgcggaacgcaggggagccggccgcggcggacgacgtggccatgaggtggtcgaactgcgcggcggcgttggcggcggtggtgatggcggaggagtggtcctggaacggttggagctggtgggaggcggccatgccggtgaggccgccgatggccatgccggcgccggcggcggcgtacagggcggcgcccatgggtggcataatcctgccgctctcctgcgccagcgcgtcgcagaaggcgcggtgggtgatgaagctgtccctcctggagaagagggtgccgcagtcgcagcggtactcgcgggtgccgcaggtcttggagtgagccttccagtcggactggacggcgtagcgcttgttgcacttgtcgcacttccacttcttctcgccgtgcttgcgggagtagtgcttcttgatgccggtgaggtcgccgagggctcgcgacgggtcgtggtggacgcaggacggctccgggcacaggtacacccgccgccgcgtctccttggggttcttctgcttcagcttccatggcaggttgtgccctcgccggtgcagctgcaggttctgctccctctggaaccccttgttgcacacctcgcacacgaacttgcttggattcccgggctgattcctcttcttcttgggcggcggcgtggccgcgaccggagcagccgcgttgttctgcaggggaggctgctgctgctgctgctgcatctgcggctcgccgagaccgaagtagtgtgcagacgaggcggctgccat

SEQ ID NO: 22512 - DNA, 1416 bp, Oryza sativa; identical to SEQ ID NO: 13224
  Clone ID: TF_OsC348190_1

SEQ ID NO: 22513 - DNA, 4050 bp, Oryza sativa
  Clone ID: TF_OsC391117_1
atgtcgctgcagccgccggcggtggagccgccggagtggctgcggacgctgcccgtggcgccggagtaccacccgacgctggcggagttcgccgaccccatcgcctacatcctcaggatcgagccggaggcgtcccgctacggcatctgcaagatcgtgcccccgctcccgcggccccccgaggacgacaccttccgccgcctccaggccgccttcgccgccgcggcctcctccaatggcgacccctccccgaccttccccacgcggctccagcaggtcggcctctccgccaggaaccgccgcgccgccagccgccgggtgtgggagagcggggagcgctacaccctggaggcgttccgcgccaaggcggccgagttcgagcccccgaggcacgccgcgccgcccaggaaccccacccacctccagctcgaggccctcttctgggccgcctgcgcctccaggcccttcagcgtcgagtacggcaacgacatgcccggctccggcttcgcctcccccgacgagctccccgacgccgccaatgccaccgacgtcggggagacggagtggaacatgcgggtggcgccccgcgcccgggggtcgctgctccgcgccatggcccgcgacgtggcgggcgtcaccaccccgatgctgtacgtggccatgctctacagctggttcgcctggcacgtggaggaccacgagctccacagcctcaacttcctccacttcggcaaggccaagacctggtacggcgtcccccgcgacgccatgctcgccttcgaggagacggtgcgcgtccacggctacgccgacgacctcaacgccatcagtgagccattatgtgactgcaatagcttgtaaactgtcttatctcctgaggtgcttctttctgctggtgttccctgctgcagattggttcaaaaagcgggagaatttgttatcacattccctggagcttatcattcaggctttagccatggatttaattgtggggaagcatcaaatattgcaactccccattggttacaagtggctaaagaagctgcaatccggagggcttcaactaattgtggtccgatggtgtctcattatcagctgctttatgagctagcactctcattgcgtccaagggagcctaagaatttctattctgttccaagaagctcacgtttaagggacaagaataagaatgaaggtgatataatggtcaaagaaaattttgttggaagtgtaaccgaaaacaacaatttgcttagcgcccttctggataagaattcttgtataattgttccaaacgctgatttcttcgttccatcctttcctgttgcactggaatctgaagttactgttaaacaaaggtttacagctggtccctgcagtattagccagcaaggagcagaaaatatggctgctgatcatgtggctgtagacaaggttacagagattcaggacatgagtggatccttatatccttgtgaaaccagtcttgtgggctgtagcaatagaaaactttatgaaacaaaatatggccaacgggatgctgctgctttgtgcttatctacttcagagattcagagcagaggaattgatacagcaagatcacatccagcaggcgggatcttagatcaaggacggttgccatgtgtacagtgcggaatactaagctttgcatgtgtagccatcattcaacctagagaagcagcagtacagtttatcatgtctaaagagtgcatctcatcgagtgcaaaacaaggaggaattggtgcatctgatgatacctcaaactggattgaccagagtcatgagattagtcctccaccaggtccagcatctggaacagatgataatgtaaagcatgccgtaagtttggcccatgtctctgatcggtgtagagaactatatgccagcaatacagatggatgcacctctgctcttgggcttctagcttctgcatatgactcatcagactctgatgatgaaacaactgaggatgtttcaaaacatagcaagaaaaatgattcagtaaaccaaagcacggatcctcaaatcttggaaacatcagctagctgttccagtacagttcagtgtcaaaagacaaattcacacttgcatgaagaggaatgtgaggcaagagccacatcattgatgaaacctgtaagccataatagtaggcccattagtcagtctaacagggatacagatatcgaccattttatagaactgggaaagtcaggaacacagtgttcaggttatcttgatttggttgatgatctaactacatcagttttaaaatcctcttcagatacttgtgtaagtgcagctaaagcctcaatggatccagatgttttgaccatgctcagagaaaaaaaaacatgtgtttacaactacatgagcaactacaccaagggcataaactgcaaataccctagagcagagtcagcagcaaaagtcatagcagaagaacttggtatcaagcatgattggaaagatatcactttcaaagaagcaactgaagaggacgttaaaaagattcagttggctttacaggatgaagatgctgaacccactggcagtgactgggcagtcaaaatgggtatcaacatatattacagtgccaaacagagcaaatcaccactttacagcaagcagataccatacaattccatcatttataaggcatttggccaagaaaacccagacagtttgacagattatggatgtcaaaagtcaggctcaacaaagaaaaaggtggctgggtggtggtgtgggaaagtttggatgtcaaatcaagttcatccacttctagctcgtgagcgtgaagaacagaacagtagcgtagtgtacggcaaagcaatgttcactactatttcccatggcaaagtacaagatgaagcgtcaacaagatgcaatacaagcaaccgaaccccatcaagaagaacatcaagaagaaaaaagggggtatctgctgagaaatctaaaccaaaaaacaagagatccactgcttctgatgaagctagtatgctttgcagtggccttggaatgaactctggagttatccatgaccaaactgaaaactctgatgattatgacaaacatggcaatggagatgaaattgaggaaggaacaaatcctcagaaatatcaacaacgtaaattgcaaaacgtgaccaggaaatcaagttctaagaagcggaaggatgagaaaagaacagatagttttcatgaactatatgacgaggataatggtgtggattattggcttaacatgggtagtggagatgatgccacactaggtaactctcgacaacaaagtcctgatccagtgaaagtgaaatctggaggcaaattgcaaggtaagagaaaatctagcaagtacaagtccaatgatgatttgttgaatgaagaaaataagttacaaaagatgaacaaaaaatcaagctctaagaagcaaaagaatgataagataaatagacaacttcaagaagatcaaaccgaagatgaccatatggaccacttagttgacgtagcggttgcagatgaagtcacactagacaatgaggataaaattacagaagacaaaattgatgacgtgaaagtgaaatctagaggaaaatcgcaaaatggtaagagaaaaggcagcaaacatcaggctaccgatggtttgcgcgctggaaataaagtggccaaatttccgtgtgatatagaaggatgtgacatgagcttcagtacccagcaggacttgttattgcataagcgtgacatttgtcctgtcaaaggatgcaagaagaagttcttctgccacaagtacttgcttcagcaccggaaggtgcatatagatgaaaggccacttaagtgtacatggaaggggtgtaagaaggcattcaagtggccatgggcgaggacggagcacatgagagtccatacgggggtaagaccttacgagtgccaggaacctggctgtggtcagacattccgattcgtttcagatttcagccgccacaagagaaagactggccattcctctgataagagaagaaagaacagtacataa

SEQ ID NO: 22514 - DNA, 860 bp, Oryza sativa
  Clone ID: TF_OsC48690_1
gcacgaggctccctgcagctacgtactgtacttgttagcaatcaatcccatcaaatcatccaccggtcgctgctgctgctacgtactatacagcttgattaattaggttttacgagaagccacgagccaaaccctcacgttggaggagtcggagccccaggcgtcgcctcgtccggtccccccatgcaactgccccaaatccctcggcggcggcgccagatccgccgccgccgccgccgtggtcgtcgtcgtggtcgtcgtcgccgccagatccgccgccaccggtgctctctgccgccgagctcgcgccggagaggggaggggagcagccggtgagctccccgccaccagatccgcccgcggcgcctgaggagctccgcttccggtgcaccgtctgcgggaaggccttcgcctcgtaccaggcgctcggcggacacaagtccagccaccggaagccgccttccccgggagaccactacggcgccgccgccgcggcgcagcagctggcatccgctggtgactcgaaggaggactcggcgtcgtcagcggccgggagcactggcccgcaccggtgcaccatctgcaggaggagcttcgcgacggggcaggcgctcggcggccacaagcgctgccactactgggacggcacgtcggtgtccgtctccgtctcggcgtccgcgtcggccgcctcgtcggccgtcacggcttcggcgtcaggttccgggtcgtcgagcgtgaggaactttgacctcaacctgaaaccggtgccggagacggtggccgctggcgtcagaaggtggggagaggaggaggaggtgcagagccctttgccgttcaagaagcgccggctgtcaagccca

SEQ ID NO: 22515 - DNA, 2251 bp, Oryza sativa
  Clone ID: TF_OsC359_7099
ctaacgaccatagatggccttctgagaggatgactctagaaccccacagggtggagagagggcagcccaaccagaagacgacagcacacggagccagacttgccaagcgaacacgcagtcgagcagaatgtggttcgtcatctcaagctcctgagcacaaaaggaacagaccgggtgactatcgatgccacgcttctggagaagatcagtcatccagtagcgcggcctaggagatctgcttagctcctgtgcaggaccaaagattgatgagatgcgggcgtgccagtcagtttgctccggcctaggagatctgcttagctcctgtgcaggtacaaagattgatgagatgcgggcgtgccagtcagtttgatcctgcagccagggcaacgactcccctgccactttcatgtccttgaggtcgccgatcttggctctcttggcgctcgtgctgtccgcttcatcgtcctccgtggtcacgccgccggccgcgtcgttgatgcggctgctcgtcgcggtggtcttgttcacgtggctcccgttgctgtgccctgtccaggactgcaggtacaccgacgccgccgcgttgaggcagagtgcgccgtcgttgagagcggcgacctgctgctgctgctgctgcctggccgcgaccgcttctgccagtgggttcgtcggcacgttaaggtctagtatccgctggtcggtagggtcgaatattgggcgcccgagcgtgagctggtggcacatggcggccatcatggcgtggtcttgggcgacgggctggagcttcgtgagcgggtccgttgcgcccgacgtcagccagtggcatcgcttgtggccgccgagcgcttgccccgacgtgaacacccggtggcagatggagcactcgtgcaccttccccttcttcttgaacggtgagacggcggatggcgccaacggtgtcggcgcgaagtcctcgaccgacatcatcatggccatatccgtcgacgaagctccggcgaggacaatttcacctgcgccaacgccgcttgccgctgccttgccgtcagcatcagcactggcaccgatcgtgtttgcatccatgctgatatcgctggtgatgacatgagaggtggtggccctggtattgtcatgaggagcggctgagacgtgttgctgctgagtctgagtctgactagtctcgttgcggctgctctcgagcttcgcggcgaagcatcctttcaccttcttgtggctggcacggtgcccgccaagagcctggtgcgatgtaaacaccttcttgcatgccttgcactcgaacatgccacgtggcacggtcgagatgtgctgtggcaccacttgcggagcgatcactgtcatctgagccatcatgggggctgccatcgagattggctgcggcaccaagaacctgttcctctcctcgtccttgctacctgatgcgcaggactcttggtccgcgtcgtcgacgacgatggctggctgtgcaacacgcgacgatgatgacgaagaagaagagagcatcacgagaaagttggcgaggtcttcctcttcggtagacggagccggcagctgtagctcggacacggagccggtcccgacggccatcactttagcacggcgcgagcgcttccctttcgaccacccgcccgcagccagtgtgaggtcgtccccctcctcctcctcctcgccgtcgttttcgtcgccaccgtcgtgaagcggcggcgaacggagcgagacgtcgaggcgaccgtcctcctcgtcaaggccgcacctgccatgatccagcaacgtcttccacgacgtgaactccttcccgcagttctcgcatgtcctgcagttccttggccgcccgggattggtccgcagcgcgtacatacgtttcgtcgtcgtcgtcgtcgggctcccggctgcctccgacggctcgccaccaccatcgcacggtgacagcgaatgatcatcatcgcggccgtcgtcgtcgtccatcgtgtcgttgtcgtcgccgatgccgtgcgccctcatgtggccgccgagcgcgcgaccgcacatgaaccccttcttgcacaccttgcagtggtgcctgtacgtcagaggaggaggaggaggctgcggcggcggtggcgggaccagccgcagcgactgcggcggcggcggcggccgatggctccccgcgacgaccatcgccatgatcgcgcgcggtcgatcgacgacgctttatttgggcagtgggcaggcatgcggggccggtgcggtcgag

SEQ ID NO: 22516 - DNA, 1677 bp, Oryza sativa
  Clone ID: TF_OsC78077_2
tcactccttgtcgttatcatcagcacccccgcgagacgaggagccaatgccgacttgcagccacggtgtcgtctcccctgccatgctcacgtccttgagatcgctaagcctcgctctcttgacggtggtgctgtccgcctcgtcctctgctgcggcggtgcttaacccgaccgcgtcgttggcgttctggctgccggttgtcgcggtagccttgttccgttggctgggtatcgccggcgacgatgggatgtataccggtggtggcgcgtcgagatgaaacgagctgccgccgaccttcggacggactgttgcggccgaggccagcagtggcgggttcgccgcgatgctgaggtcgagagcgggctccggtgcgtccaacattggccggaacgagagcgggacaaggtcgtcggctaggggtgggactgaggcggtgtgatccgccgaacttgacgtcagccagtggcaccgtttgtggcctccaagcgcctgcccggaggtgaacagtcgatggcagaccgagcattcgtgcatcttgcccttcttcttcaacggtgcagcggcgagcgcggcgaccggcggttctatgggcacgatggccatcgacagttctgccgcggcatcgctcgtgccggcgtttccatcaccgtcgatgcttgcgtgcacgttcctcctggcatcagaagtggccttggcgggattgtcctcgctccgatcagcgacctctgcatggtgtgatggctcagccacctctgcggcgttgctctccagcttggcagcgaagcagcccttcaccttcttgtggctggcacggtgcccgccgagagcttggtgagaagagaaaaccttcttgcacgccttgcactcgaacatgcctcgaggcacggtcgagacatactgtggcgccggcgccggcgggggaagcgccatcactgtatccagtacatacgtcgtcggctccatgaacgtgatcagtctcttatgttccttactcgcggaagaagatgaccgttgttctgcttcagtgacgcctgcctgatctaccttggacgacgagagcatgaccaggcaattggccaggtcctcctcctcgccggcagcgcacgctgagggtgtcggtgacaaatcgactcctgtgcccttgcagcgacgcgagcgcttccctttcaaccaaccggcggccggtgcagaatcctcttcgccgtcggcctcgggcgaaggcgaccacggttgcagcgagtgatccacgtcgtcctcgtcgtcgtcgtcctcgccggagctgcacttgccgtgctcgaggaaatgctcccacgacgtgaactccttcccgcagttcttgcacacctggcggctcctcgtgacccggttaggattggtgcggagctcgtagacgtgtgtcgctgcccctgacgacgacgggccgcccgcgttccaaggatcatctgccccgccgcgcgcacgccgcacggcctcatcgccgagcgaatcgtcgtcgtcgtcgtcgtcatcatcggcacccaacccatcgccgtcgccgacgccgtgggccctcatgtgcccgcctagggcgcttccgcacgtgaaccccttgttgcagactctgcagaagtgcttgtaccccgacgcctgcgccgccgtcggcggcggtgcccgaggtgatgacggcgacggctgcat

SEQ ID NO: 22517 - DNA, 2160 bp, Oryza sativa; identical to SEQ ID NO: 13431
  Clone ID: TF_OsC198558_1

SEQ ID NO: 22518 - DNA, 1368 bp, Oryza sativa
  Clone ID: TF_OsC135231_2
atggccaccgtggggcagcctgatgccatgagaaggatcaccgttcactacgtgaatccgccgccgatcgccggcgccggagaagcacacgtcgatggcctcgacgacgaggttcttgattatgtgattggtgatgttcttcaggatcaggagggtctgtatcaatcgatattgtatggcaaatacggggatgacatgagaggggcaagaaacactgctcttgcccaatctgatggtttacattactactatcacggagagaacagcagtggtgaagcaacaacctcgagaaattcagaaatcgaccaacagattgagtatgacttggtgttcgctaggcagctgcaggcaatggataatctgacaattgagacacctgcagatgaagatgatgatataagctgcgtaccctctccatctgactctgaaaccgatgaaccggcagaaggcaacaacgaagaggctgccacacaggatgataacgatgatccagacaacatgacatacgagcaaaggcaggcacttgtggaatctgtaggaaatgagaacagaggtttatctgatctgcttatctcctacttggagacatggaagtacaaatcaggctttttcccaaggaaggcaaaccatgataactgtcctatatgtctatccgctttcagacgccgagaaacactcattacattggcttgcaagcatagttaccatgaaggttgtattgctagatggctcaagattgacaaggcctgcccagtttcaaatatgaagtgtttggaccttcctagcgtgtgaggaggcgatcaacaaggctgaccactatgactcgatgagacggcatatagtggttcagcatctgctctcagtattaattaaaaagggaaaccttaactcccaaaaaaaacagagaagggaagaaaaagaaacacaacaacttcggagagcttccggtggacggtgagcccggccaaccgggagggcgcggtcgcggtggccgcggcggccgtggtggccgaggaggcgctagcggcggcggcgggggcgggggcggtggtggtggcggtggcggtggcggcggagccggcgggaaaggagggaaaggcggggccggtgggcacggcggcgccggtggcggtggtggtggtggcggcgggaaaggcaggaaaggcggggccggtgggcacggcggcgccggtggcggtggtggtggtggcggcgggaaaggcaggaaaggcgggcgcggcggggacggtggcagcggcggggccggtgggcgcggaggcgacggtggcagcggcgggcaaggtgggcgcggcggggacggcggcggcgttaggagctgcacaaacagcagagggacccagatgctaa

SEQ ID NO: 22519 - DNA, 3058 bp, Oryza sativa
  Clone ID: TF_OsC13232_1
tcacttccatatttgggtaccaacaattttgttgccccacatgccaccaatcccctgggaactaacaccctttgtgcccatttggttgggcttctcttgattctctaaagaatttggccccggaagctgaaagctctggcaccggtcccggtattcctcaggaagctcttctgcggccagcaagccatcaagcatgccaaagtatactgtcatatctcccaaggatttagagcagattgggcaggtgtagtgactacaggtgtacgcctgaaagcaagctgaatgcatgaaatggccacaaggtagacctttaactgctgcactcgatgtaaataggaagtcgcagcagattgggcaattcatctctagcatcttttctcgacatttatgctctttccattgtatggtcactaactttatcatgacaaaacagccaaaaatctgattctctggatctcggtatgaaggacaacatccaggtaatactgtacatccattgcgatcttctgactgaggttggggcgatttctgctgagcagctatccagcggctggtcatgagattttggattagataagccttcctccttgggtcaagagtagaatcacgagaaacctttcgtatctcagcctcaagctcactctggttcattcggaagatgtccttccaaccaggcttaaacatctgttcactctgatcgaacttttcctggaaatgatcttcttctggatgggaggcatcgcttgaagggccagaagaagtaggtgatctcttccaccattcatttagccattcatcaaacattgtattcttagttacttgcctccatgtgtccagcatattgttctgttcatctagactaagcgctgatgtaacccagggtaacattgactgcagaacctcagctcctgtacttccaattatacggcctacaatcttatcctgctcctctacagaaaaatgtttatcaaatagtggccacaattcaagttcttctctatggacatgattagacagagtaacccggatagacttgcacattccttgaagctttgtcaaaagttcattattctttttggaccaatcgatcctattatatggatgaatgtggttcgctccaactgcatcagcaccaccaagaggatgcttcaaatcagcatgcaattgtgaaagctcaaaaagaatagtggatatatctttaaataattcttcttcctgcttgtggtcaagagtatatgagtggctgacattgtgcagtgtctctttcgattcaagagcaggaaatacaatttcatcttcagcattgctgtgtgctctataaagaccccacagtaaacgaaaccttccgatgaattggcgaagggaagattcatccccatctatgagctttctagattccacatctaagaactccaaatctttgcgaattgccttatgaaatttgaatattgtgtcaattggccttgaaatgttatctgggccagaaaaggctgcatctgtctcccatgaaaaaagacttgaatacaatgaaggagcagaataattgagagacagcgatcggaaggactctgccaaaaacatattctgaagaaaagcttctgcatcctgatcattcagcttcgatacaaaccacggtaaaacacgctccaataacttcaacggtatgacacagagactcttatataaaagttccctttgtttctctgatgaaaaatgaatcctagcttgaggaagtacctttgtttcctcatttttgaagtgcctctcgattttctccattatctgatcagcttgtgaacatagctcagagtaaaaatccactgctgttgatctggctcctgttatttggatttgttcaattaaacatctaaatttattaaaccgccgttcttcttcagcgtgctcctgctcaaaggacacttgatcgttgactgctggaaatataacctgatcctctgcaatactgtggaagatgcacacatccgcaataaattgaagtttcacattaaagtctgatatatccgagaagtccccagattgttggatccttcttgtttcttctactatatcgctcaattcttttcggatagcattgtgccaacacaaaatctcatctattggatgcataacaagctgactataactagattctgcacgctttctctttccagttttaaagtgctcatgtgagcatccatacttgtctgtttgatcaatagcatccttgcatctaacattgctttttgaacaaggactacaaaaatcatgtgatattgttttcactgcttcccctccaatccacgcaaatacaacctgttggagaagtttctcgtccggaactattttatgtaagcagttaagaatatcttggtgctcatcagatgaaacagaagtagcaagccatggaaggaactctgccatcatattgacagggatgctgcataagaattgccagactaaatcagcttgctcttcatgtgaaaacttcttaatgagcagtgggaagacctgctcttcttccttggacatatgttgggttataaacgtttgaattgcacctgtacaggacgcgagttccctccgaagaccatcatcattccgcacatcaagctttaacagagagaacaggtgtgcaaacagatcattttcccccttatgttcaagggaatacgtgcctgctacatttttcactcgaatatcaagtgctggaaagataaccgcgtcctcggcgtcgcagtggtgcctgtagacggagaagaggaagcggcaccgcctctcgagctcccccacgtcgccggaccgctccgtggcgaggcgcacggccgcggcgtgcagcctctccagctccgcgcggatcgccttgtggaagtagacgaatatcagcatcggcgcctcggccgccgaccccgcggcggcggccggtggagaaggcgagcgcggcatcaccgcggcggcgatcgagccctcgtcggccaacggggtcgccatcctcctcctcgtcgtcggcggcggcggaggcggctgctccgcgtgcgcgtctgactcgccggacgcgtgg

SEQ ID NO: 22520 - DNA, 3942 bp, Oryza sativa
  Clone ID: TF_OsC13232_2
cggacaatctatgttaatactgaatcttatgcgtcgaaggcttagggggcaaaaaggaagtgcatgtagcgtccattttgacagcttacactagacctagtagattgcagctaggcttgacaaaaatgaactagctaagggatgaaaaatatggtagctatgctacacaactacacgatgtattgtaagtctatatttacatatgccaaaaacgaagaaagaataattccccactagtttggcgtagttgcaacacacaagagcacgcatgacgcatggatttctttaagttgatgtatatttacaacaatatatatattcaaaaggaatttcgaatatgagagggaaaatctcgcctggttaatctgatgttgaacaatcagctctatcaatcttgataactctagtgttatatgaaccgcagaagccgcatttgtgatacagccaatggaaccgagaccttccttttctttcacaatcgttacaaagtatatcctggcaccggtcccggtattcctcaggaagctcttctgcggccagcaagccatcaagcatgccaaagtatactgtcatatctcccaaggatttagagcagattgggcaggtgtagtgactacaggtgtacgcctgaaagcaagctgaatgcatgaaatggccacaaggtagacctttaactgctgcactcgatgtaaataggaagtcgcagcagattgggcaattcgtctctagcctcttttctcggcatttgtgctctgttaatttcatccccaggcagcaattgcacttcatgcaatggaagaaatcaacaccaagaccatgcacatcatctcctgtgtcgctttctctagtatgatcaggcaacataagtattctttccatcgtatgatcactaattttatcatggcagaatctgcaagtgaacagcttgttgcagcatgcagcaacaagcttgcagttccttttgtagtgctcacaaccaaatatttgcttctcctggtctcgatatgaaggagcacatccagggataccggcaccttcactacactcttctgattttggctctggtagcttctgctgagcagctatccagcgactggtcatgagattttggataagataggccttccgccttgggtcaagtgtaggatctcgtgaaacctttcgcacctcagcctcaagttcactctggttcattcgaaatatgtccttccatccaggcttgaacatctgatcattctggtcaatcttgtcctgtaaatgactatcttctggagcagaggatgcctcttctgaagaatcagatgatgtcggagctcccttccaccactcgtttagccactcgccaaacattgtattcttagtggcctgtttccatgtatccagcatcatgttctgctcttcctgagtaagtgctgaagtaacccagggtagcatcgattggagaacctcagcaccagttgaaccaattatacgacctacaagcttatcctgttcctccacagaaaaatgctcatcaaacaatggccacaactcaagttcttctctatggacatgattagtcaatgcagcccggatagacttgcacattccttgaagctttgtggcaagctcgttgtactttctagtccaatcaatctcatcagaggaattaaaatcgtttttctctgcttcactgacttcaatgtgggggtgggtcaacctctcatgtagctgcgaaagctcagcgagggcatcagatatatctccaaataattgttcttcttgcttgtggtcaagagtgtacgagtgactgacattgtgcaatgtctctcttgattctaaagcaggaaaaacaatttcatcctcagcattactgtgtgccctgtaaagaccccacaataaacggaatcttccaatgaactggcgaagacaagactcatcaccatcaataagctttccagattcaacatctaggtactctaagtccttgcgaattgctttatgaaatttgaatatagtatcgattggccttgatatgccatctgaacaagataaagatgcatctgtctcccaagaaaaaaggcttgaatataatgaaggagcagaagaattgtatgatagagagcgaaatgactttgcagaagccagcgatgaactaatagcaagattgccagtttctactctcaacccaggaatacagcaaggttttttgctacatggacgtgcttcagtgtcatcagtctgagacaagtcacttccattagtaccaggaacagattctgcatcatttcctcgctttcctggcctagaaccattttcagtctgcggatgcagagaagcatctgtattgctacgtgaagcacatggacagaatggccgacatttttccagtccatcaacttcatccaataggcatctcatttctccagatgttaagcataagtactccccagaattggatttgtcctctgaacgagctttgcatgcccaaccagagaaaagggtaaccagtgctgtttccgatgatggtgctgccaagcgcatattttcaagaaaagaagatgcctcctcatcactcagcttggacactaaccatgggagaacacgttctaataacttcagtggcatcacacataaacttttatacagaagttgcctttgcttctcaggagagaaaagcatcctagcttgaggaagcaccttggtttcttcatcacagaagtgtttctcaattgtctccattatctgatcagcatgtgaacacaattcagagtaaaagtctagtgcagttgattttgctcctgctatttggatttgctgaattaaacatctaaaattgttaaaccggcgctcttcttcagcatgctcatgcacaaaggacagctcactatcaactgcaggaaacacaacctgatcctcggcaatactgtggaagatgcacacatctgcaataaactgcagccttgcattgaaagatgatatatcagagaaatttccagattgctgcatccttcttgtctcctctgctatatcaattaactctttacggatagcattgtgccaatacagaatctcatctatgggatgcctttcaacctgaccatcaatagattctgcatactttttgttcccagctttagaatcttcatgtgaagaaatatggttatctgcatgatcaatggaggaggcatccttgcaatcacaggttgcttctgaattagacttggtggaattctctgttacttttctcgttgttttcccttcgatccacgcgaagacaacctgctgaaggagtttctcttcaggtactattttacataagcagctacggatatcttcatgttcatcagatgaaaccgaagacgaaagccaggggaggaactctgccatcatatttacaggaatgttacataagaactgccacactagatcagcttgctcttcatatgaaaatttcttcgtaagcaatggaaagacctgctcttcttctttggacatatgttgggagagacatgtttgaatggcccctgtacaggatgcgagttcccttcgaagactatcatcattttgaatgtccagctgtaacagagcaaacagctggctgaagagatcattttcccctttgtgctcaagagaataggttcctgcgacattcttgactcggatatcaagtgctggaaagataaccgcgtcctcggcgtcgcagtggtgcttgtagatgttgacgaagaagcggcagcgctcggcgagcgcccccacgtcgccggcgcgctccgtggcgaggcgcacggcggccgcgtgcagcccctcgagctccgcgcggatcgccttgtggaagtagaggaatatcagcatcggcgcctccgccgccgaccccgccgccgccgaagccgtaggggacggcgaccgcggcatcaccgccgcgagcgtcccctcccccgccatgggcgtcggcgtcgccat

SEQ ID NO: 22521 - DNA, 2090 bp, Oryza sativa
  Clone ID: TF_OsC4555_1
gttttttgtttcttgtggagcgggggacggaccaccagcctccaggttagtatttttttttttttttttagaagcatatgagaccagacttgtagctctcataacaggttgtaaaatgtaactagtaaagatcttttctgcaccacgacatacaatgtaaaatgtattccagatatgttaaaggcatataacagatgagccttgtgcccacagtttaaaacacgctactctgaatgatcggtcaaaaagacccactgaacgggtacatctggggtgagagtcgcaacgagaagaatgaagtgtatagcattgcgtccttacacgagtaagacagcattgatacagccatcattctctgggttgtttgtaacttgtgcatatttaccccaaacaacttttccagcaggggttaccagaccaagttcactaacgttcacctcaatgatagttccccttgtcaaaacaccaagagtagagtacatttgaccatttgggtttttcttcacagaaattatgtcaaggttgaaagtacatttcagctcagggtgagtaacatgggcctttgtgaaacgaaggccagttggcctaataaaccgttcatactttggtggtttccttgtaaacccaggtccaacaaaggtggccttagtgaccattctcttccactgtttggtttttctcttgccagttcgtaaaactttgaacatttcttcttcagccacaggtctgacctttggcaaaggaacctcccatttgccagccttttccatcctcttttgcttaattgtgttgctgagaaccttggcacgttgtgtctgatcacggtccagcagatatggaggaagagcaccctcttgaacatcatcaaccttctgccgagaagttgactcgtcgtgcattttcagggtcttcttcatctgtgccttctcggcataccgcttcttggcgaacctcttacccttagcaccaagcaactgccgggcatccctggatcgcttgtgcacctcgcgcgccgcccgcttgcgcttgcgctcctcgtagtccaggcgccggccatggcgcttctggtgaagctctatgtgatctccctgcggcatggcggcggcgaaaccctagcgggagctcgagctttgggtgggggaggaggaaagcccggccggctttggtccagtttctaagaatatgcccaagaatgccctgcactgtgactcccagtgttccttagccagacgaacacgttcaacccgctccatctgtattctcttctcccagtactctggacaactatagcttagtagcatgttcagctcatccaagtgtacagcattaggaaagactcctgcctgtcggcacagtgggcactttgatttgcgctcggcagacttcagcccatcaacgatcgtaacggatgcagcagaacagctgcacaagtagcaatatatgtgaccacaggaaagagcaactggatcaaacacggtatccaagcaaatcgaacatgtcaagctaatgtcgacacgcatagagtcaaagaggttgcatgaaattgttggtttgtcatcatcgaatacgagagaacaatccccaaagagctccatagcaccgttgttcttcttgcttcttctcaagttcatgtagaaagccatcagctcacagagccatggggattgaagtatttcaatatgcagactctgggcttgagctttgaattcctgcccttgcttcgagtaatgtatataattattaatataaccattgaggaccgtcttaaatccaaagacaagaacaatgatagatacgttaattctaacaaaaatagtcactgatgccaggtgcaactcgagaagcttcttggccttttcattgaagcagccaataacggctgacatctcattgagaagagatgggaaaaaactcccatcacatacagagcaatggccggggcagcggccggcggaggagccgtcgttctcgtgggattggaggtcagagcggcatttcttgagcaatttcttgagccgcttcagccccacgcccgggagctcctcatccatccccttcatgtacttctcgtacttcttggcaaacttcat

SEQ ID NO: 22522 - DNA, 14410 bp, Oryza sativa
  Clone ID: TF_OsC2965_2
tttttgcatcgcctcaaactggaaccgaatacttcgattttccaaagaatcggcacagtaaaatgcaccgtagctgtacatggactataatgtatatttacaccctcgatttacagccctatagttttacagctaaaaaactaacgtgtctaatattatacatactaatagaaagcgaaagttgtagaaagagaaattaaggcctgaatattttcatcatcctagatacttgcgtccgacaaaatgggcatcgtgaaaccgaacttgagcatcgattacaaagaacatgaccgcatggtattatagtcatgttgacctccgcattcaggcagacacgacatgaccatgctgacttggcaacatcagcttctctaactgctgcctccgctttctcctgctccacgagtagagccacttgagattctttaagctggtcttgcaaggaaagagtagtctgtagaagcgtttcctttgtagcatccatccttacccctgcagctgaaagcatatcgtggactgcctgtaccagctcggttgaagataccttcccatattcaaggccagtagccacatcatctgcagcttcagttcctgtgttgatgggtgagaagccctgctgtccacctgcagctctaccactatccagttgcaatggtgcaggagagagatcagccattgaaacgcttttaaatgagtaaacctgactggaaagtagcatgcaagtttcaccagcagaagtctccactggaaacctgtaaagagcttggccagctgatggccttacatcttcagggaccctgccatatctgagcttttcaccctctttccccgtcttccatgccacaatttctccactatagaatggtcttaaaggaaggaattgaacctggcgagcatcttgggacaacaactctgctcccagggaaccattgtaccttccttcacgttttgaaactccaatgtcagtgcccagacggagtattttaagcacctctttctctgtgccatctgggcatgcaaatactgaagcaatcggcaagatcacgggtgcccctaatctgtaactaacaacaatagcaatagcatcgtgtattgtcaaaaagtttgggggctctgcaactagaatttgacccgtggatttgttcacaaagcaaacacttctgtgctttccattgcttgaccattcaggaaatggaggacgctggctgcttcttgtaacgtcttggagcatggggagtaatagaaagcgagtatggagacgctgaacaaactgcaggttctgtgatatatcctttagtacactttctatctgcgccagattgagtgcttcaaatgaaggaaaatgattggatacaccaatcataacaatccttaacgcatcttgcaacgatttactaagcagcttctcttttattttgtccagagtaacagagcaaatgctattcaccatctttagttcttcttttccatccagttcctctacaatgacatcagaaagcttctttatgcccaacgtgttgcaaatattctggggaagatctgggtgagcaaatcttatcctggatgtatctatgttactcagtaaatgagaaccatatgggtcaatatatacacacgatacagctgataccagcctgcaaccatcgtccggtattactgaatcaaatatgtcttctgatccatctgtggcttggttgacaccagaacacatgaagtctaaaatttccatcacagcgcggagttcatttggattcaggcgttggtaaccacatgctttttgtatatccaaaagaagttcccttgcataagtgtttgtaagggtttcctgcatcccaatttctctgaggatggtgacaaatggaagataaagacttggaagttcaaaagcaaaaggcgacatgttgattgtcagacgagcaaaaagtgatttcactgtgactaagcgagtcccgtttgcaactggtataaaagccagggtctgcaactcatttttctctgaagaagatattgttccccatattttatccaagtattgcaagatccgtagaaaggcatcttccaccgtcattattcctgatgaagttggccagtgtgccagtgtgtcctcaccattgcctctcccaacactctgcaagtgcttcagaactgttgtgaaggcaggaggactccttagtcgaaatgctccccaagaatattcaggagggataattgcttgattggtaagaataggagcagaactccatgctaatggccagtcttttgataaaattgattcactatatgaggcaagtacccttctaccccctctcttcccaccaatacttggaaaacctttttcggcaggaataaatgcgattttgccaatcttttcgcaaaaagaactgtcatacaaagtagcaaaattagcaagaatcacattaacaacagattctgccaaagaccaaagctcaaaaggaatttcgtttttgctgcctgaaaagtctgcctcaaagtcactaggatcttctgaagatgacacaatatcatttcccatggactctatttttgttgcacactgtactatcatatcagcctctgtagatgttcgaagacctgcttttctgagtataacaagccaaccatctgacaagaacctttcagctgggaacttgtgtctctccccagagaatactgaagtaagcaaagcatctgaagggtcaagtaattcccttggtttgaacaactctgtacaaaactcatttgcacttgtcagaaaattagtctctttcaaggtgtttacaacagaagagttcagctgcagatctttccagttagaatacaagtaggctagaatgtcttcttgctcttgagctgatttatttccaaagccaggcaaagcaaaccttactagtatttcttggtcactcaattgttcaacccccaaagcctgaagaaatagatctgcattagctgtactagaaaggcaccgagaatcagcagggtgaaagaatgctgtgggagaaagaatgcaatgatcggaccctgacagactagtgtatgttcctgtaactgttttatacattggaagctctctcaggacatccaattcttctctctgatataagtggttactggacaatctgaactctgagacaaacaatgcaaacagtttatcacagtcttcacttgatagactaagtggcaaaggtaaatggccaccattttttattgcaaccagtttagaagcaataatttgtccaagagtccggtcacgtgaaggaaacaaattgcatattgtaccacactctggaaaagataaatcaaaaactggtatattcaacttgtaaagcagagcaggtaaccatggaaatgctgagttcattgactgaaatgcagtatcaagtatgctgttctgttcagcttctccagtctcatctcctgggtgggcagacgtgtcaactactctagctgcactatctccactatcaggatttgaatcatctgctggtggtacaaatattagatggcattctttcacacggcagagaacaggtctgtctagatatgctggaattaagggccagtcagataaaagtgaaaggtcaccactcattgaactaaatattttccagaagagcctaatccattcaggacttggtccagcagttgatgaattagcattattatcccaaggaatccatggagacttcttctctactgcaaggtgcacccaacgttcatcaaatatgtgcttcaaatggcctgacaacaagtgaggagaaaaacttcttagctttagaggtctatgaataacttgagtggtgagcaatagctccaagaagggcttttgtaaacattgatgatggataaagtgatgcaagaatgggcgcatcaatagctgctgctcctcacttgctatccaaagttcggtagatcccagccttgttagacattttgtcgatgtcggaaacgggactcctttgagctctgtgatgatagatgacagcacattattttcagcagcttgggtcctatgggatgctgagccaccagtcttgctgatatcctcgacaaccccccgaccaaagtcatagagagcttttccaaagtatgtcacaatttcaagcgcgtcacccccagaagcaccctgcctttgtgtatttctatggtaagacacagagctgcttgaagatggcatagaatttgatattgaagaattcattatttcagattgttgattgctaactcgtgattcctcatgtatatgaagatctgagaaacggtatgggtccatatctgagaagcaatattcaagaacatccatatatgtttcaatagatcggagtaaaatggatgaagaagcttttagtagatccctaaccatcttgggcctgatctctcttacattaactccaactgcttgaatttccctaaccagctcccagggtacagaaaatacagggtagtgctctttaatgaaactacagacactagcagatggcagattatcatcatctccactccctgaatgggataagaacataccctcatccactttaacaagattcccaccataaagttgccaaacaggaagatcagccaagcgtacatagaaaggtcttatcacttgctctaccaaggattgccaatctgctttagatgctcttggtgaattcacattagttacagtagagccatacccagtgagtgaagcaggatgctgcttcgatctgggccagaaagagtacaccctatcaccataagcctgtaaaattgtactcaccgagtgtgcagaccttgattcaatagcagaagacagaggatccttcctaagcttttgaaattccaggaccatctcaacatatgaatcacgcacacatagcataagttccttattccatgcctcaaccaatttgtttttatgcatttcaaggtctgacagagatttatcatgtgagctgccaaaaatgtaccgcccaccattatgcctcacaataaaatggcctagagttgtgactggcatgcttatagacccagatagtggtaagggagataatatgcaactggatgcatgtatattggttgatactccatttcgagctatgtgtgccgctactccagcaacaggggttaagttataggcgagataccgcctgtcaagagccatgtttcgtgtttgccctgatccaaggcaaagggcaacaaaccatttgtcaatataattgcagccattgtcaatcacatgcacatcaatagcttgcattttaatagcagcacttgtacttgcaaatattctggatagttgaaattttctccatttcttttctgaaaatggattccttaaagtggctactgatgggtcaacaagtacagagtagttcaaagttggctgagaagctccaccttcccatgttgataaagatacctgaatgattgacctcaagaataggagagtgctggatggattttgtgtaaatcgatcaaaaatatgctttactctattgcaaccagcttcaagttctttcaggcactttgatgataaaggcatacgaataactgtggagtttgctgaagatagtgaagcctcctgtgtaacacgcattggtgtgaactgatcatgaaacctctcgaccaggtcatttcctatcaatgagaagaatctagcggatgaggtagcagtggaagtcgtgccaccagtcaagcccaagggatcaaaaatgtagaaatagccaccagaaagaatactcaaggtatcgcacacaaaataactgctaagaagtccaagtccatagttaagaatgtttcccttcaatttccatggaggaggaagttggaggctgcaaacttcttctctgctcattatcgttccttcaaagacgactgtcaatgaagaaccctggaagtcacctaaactctgctgcagcaaggactgctttggatgatctcgtttatcatagataaggtgcactttcttcgcattgcaatgatcagctagctctataaggtcaaacaaaagaaagtcactctcaccatataaagccagcaactcacttattttagcatattccatgcaaggcaaatccgtcattagctcgttatccagtaatgatgatccacgaagagatcgaaccccaagcctattagctagatcattaccaatactaagatgcacaaagctctttgaagtaggatcagcattcatccagggtgcatcattgtagacaagatttctggcaggtgtcaaaacaccaaatgaatcgggaatcaacaatgaattcaccatcatatcaggtgcttggttatcaggataacaatcaacaaatgcttccaaaacacgatgaacaaaacttagttgctctgtagacaatggctctcctttggcatcgctttgtaaacactgaagtacattcagataatctgctgcatcaaatgtctgcttcacacccaaaaccgacagtaacctcttatattccgacagttcagatggaactgcataaaggtaagggtgatattttacaggtgaatcaaaagcaagtgcctgaggtggcacgaacctatcacctatataaacccatgggtgtccatccagattccgttttagaatgttggtatcggctgtgtcaataatatcttgcaattttgagtagatcagttgaatttccttttgcggaacagcatcattggtactgtcttcagaaaacatcttgagttcatcataagacttggagatctcaactaactgggaagataaaatgtttgcatttggtgggtctaaccaaccaagttttctttgcagatacatggagcaagaatcagcactaagaatccgcatttttgatgaaacaagccacatttgtgattttggccttgttgtgattggaggagccacatgatcttcagatatgaaccatggaagtccttttagcaatggtgcaacatggactggacaccaagatatatttttcagctctgaccaaaattcgtcttctggtagatcatgatcgaagtttgagaacaaagataaaatagtttcttctggatcatacccatccccatcgttttctgcttcaaaacttccatcagtcttagaagcttcctgattgtcatccccatggaaggtttttttatcctccatgtttgaagccttgaattcaagaaaatttagataggtaagtagccttttcccatgctcaagcgcatcatcttgttgcagtgaaactgacctcgcaatgtcaagcaaagtactaaaacccaatttacttttaagtccaaagcttgcaagcagttcaattacttcagtcgtcatgaacttctctgaaggaaagaaggtttctttgtgcagcaacttatgtaactcaggcacacgaggatcataaagtctggagggatgtacccatgcaccactcgctgccaggacgaaaggggtttcatgtaatgcagctctcacagaagtatcattttctgccaatagtttcacatcacggagaattgctgaaacaacagctggttgtgatagaaactcggatattcgaggaagcacgtggtccttgtaaaattcagccttttgaggttccctaatagcaaagtatgataccaaaattgacttctcctttgccgattctgttcttataaaactttcattcaacagatcctcatgaacaccttcaggtttaagccattttctaggacttgtcaggctaacaagctctctagatttataggattcaaatataggaagattcctgattgtattcatatgggaagagttcatgtgatttcctgaaaaccactttgactggaaaataaaactgcgtagctcatgtgtttctgccagtgaaatacccatgaacaattccttgatatcctgaaaattagaagcaacagactgcacagcattcaaaacaccaactgcagtggcttcctgaacaaaatttgccagctgcggatgttctatctgcagatcagatctcagaaagaaacatcccagtttctgaagcaacgagtacatattttcactccacccatcatctattattacatttgaagcattgccaagttgcataagcttgccatctaccagtggtaatataggccattttgcaaaaattgaaagatcttcacatgaatgtcgcaagaaattccagagtgacaccatccattccacacttggctgaccttgatgtccaggagaccaaaataactgcttagcatgctgccattcaggtggcaagatcctaggcaacaactcaaggagaaaattgcatgtgaataagtaaatgtttgaccgtgcagaacaagctatgtcatataacttcttcaaaatggcatccggtaaagagttatcaacaacaagatgtggtatagagtccttcagaagctcaaattccatttgtgaagaaaagaatactctttcaccctccccccggttggtaaatgttgtgaatgatccatttgccaaaggaagaagagctaacccttgcaatttatcaggaaaggaaggatctcccatgtcactcaagcagtactccagaacaagtattgcttcttctctatttctgaagccacgcttccgtcggatcaacaaattcctcagcagatgaggattcaagagatgaactgaaggatatacgttcaagaaactgtcaactatttgtttggatacagataccacaggcaaaccagcttcagaaagaacttctgccagttcaatggcctttgaaaaactgaaatcaggaaagatagcttgccttgttgacacccaatgtccccctcgtgcttttgtatacagaacatgaagtccaagttctgcgatagatacataaagcttcctcaccatggaagaccatggctccacacctacagcagtaggccaaaatgagagaaacagatcggagggaccaagctcttgtgcaatggctgcaagcaggtgaccataagcaggagcagcaacatcttcaagcagtgcaagattccattctgatcgtactcttcctcccccagccatgtcatttcctatccagatatcccttcgatttgaagatagttcaaaataagcattcacatgcactggcatgctagtgttgattggtaaaggaagaaagcagaaggctcgaccctcaaaaaatttcctgtccttagaggatccaagagacagttgcttgagaaccaaatcatcaaggttgacttcagcttcaccagacagttcttttgtattgtccacagtcacagaatgcagataagcagcaacagatgcccagggaacaaagaagtgggacttactaccagaggcagttgacaactttctagcatggcccccacctatactctctgttaagatccatgaatgcaccaagcaagcagcagggctttgctcaaagatagagaccttttgagaactccaaggtaaatcactatctttagtcttattcaacttattgaaaaattgattcctatccattcctgatggttgatttccatttataaatgcaagcatcgtattaagcgcatgaggttctttggccatctcataactattatgcttcgagacacgatgtacaagtttcatctcctggctgtcactctccttgacatacagagttatattctttacgttgcggagaaaaagtagagcctcagatacaacttcagagaaggaagagaaaagcatttccacatcttggggtgtatattgttctcgctttatttggcttctagaagcagcagcctcgttcctaagagggaagcggaagagtgtgcctggaaatggctgttgcaagttgcaaccaaagtgtaagaatggggtgaattgatcagggaactgttctaagatcctccttcctacaaattttatccttagacctggatgagatggagatattcctggcagataagaggcatgcggatcaaacataacaatattctcaccagaaacaaacccaggaatgtctgtgaagtgatatacacaattgaagccaagaccaaacctgcctattgcaaaaggtttctcaagtttgctgtcttgaccaattcgtgagatggcataaagatcctggggactaaaaattgagtcattgaagcagtagagagcaggcccctgccattcagccatttcaggtgatagaatagatgaagtaccataatgggtcttatccagtaaaaacacaacctcagaagccttagcatcttctgcattctgtaccaactcaaacagaatccctggtccatctgcatacatctcaacgatgtgcttaagtcgtgtagtcaaatcttcatgctgtccaaaagcctcagcaacccctgacaaactcaaattcattgagtccgaactctcagcaagcaagagacggcggagagagcggacacctagcctttccgccacatcattagaaatgttgccatggacaaaattgtgaacatacttcttcgaattgaaagcaatgcttggtgcattcccagtgatgtcctcatcaaaatcaagaagccaaggggcatcattaaatacaagttcagaagacagacagagcctagctgaagaatcaggaagatatatttgtgtttggtggtcctgaaaccgaaactcagctagatgctgcacaaccaagacagctgttctaagttcctcagcttgtagtgaagtcgaagctttccttgtggccattctggtcaaaatactagcataatctacagggtcaagttgctcctttatgccaagctctaagaacaggtccttgaatactgctaaatcaattggaatcacgcgaatgtaaggtgccagatgaaggtgtccagttaaaactacttcatcagtttttgcaaatccatcccccacccatatccatctacagccttcaagtaccaccttcactatatccatttcatcagatccaatcaaattactcagtagcgaataaatcttaggcatcaccaacgctaactcttgccggagtacttgatcagtcacaatttcattgtttttacccagctcaagcaattgagctgcaattacacttccagatggaggagacaaccaacctaagctatatgacaaggctgacgaagtgcattcaccatcaagtatgcgtgagctagcagaaacaatccacatgtcgtcctgcatccttacttgcttaggtggagcaaccattgatgatactgaaggccatggcaaagctggacttggggcagtaaccaacacaggacaccaacaaatcattctcaaatcactccagaatttttcaagatcagcttcccaagatgtatcgcgagatctgagcacggtggtaactttagctagcatatttaccttcttacggccatcaaatggcttatgtacataccatttgtgagcatgaacttcgagataagaaaggagcactttaccccttgaatgggccttgtggtgatctttgtgcacgagtgagtcgatgtgccgagcactttgtattatggtatcaatagatacagatgttcttagccccaagcagagcaacatatcaagaacttcggggttttgaaataagccatggggaaaacaatctgattcctggagaagagcatagagctcttccacccgaggatcataaagagattgaggacttttcaagaccccattggtcgtaggaacaaatctaaggaccttcaaggcttccttaaaccttggattttccaaggacagctgaggcagatcttgcaagatggttagtagaactgaatcacgaaactctgtttgcaactcatctaacctattcagaacgtacctctggtagaagtttgattttggcatgcgctcaataccataatatctcattattatatcttcatcacttggggatatgcagaagacaaagtcatcattcagtaattgctctgcaacaccaagaggtggcagatactttcttgaagtggataaatccgagaaaccataagaactgggagaccctccatcaaataccctaaaaatgggtaactttttgcatagatttatgctcatatcagaaaggtggggtcctaagtaccattttgcatcaagaacaaactgatatagttcatttttttcagcaggagtgatgcgctgaaacaaagcttgcaaatcaacaccctccaatgaggcaaccccaaagattgaatggagtactccagatgcatcaccatcatacacataattagacaaatgctggcacgtactcaaatactttgtgtctagtatcttgcaacctaatttggtcaggagttccttcatcaaattagacagtgagcctgtattaattaattttgagactgtagatgctctataaaggtgccctgaggtagaaggtaatataggccaatcactaaacaaatcaaggtcatatgaacaatccccaatgtattgccagaaaagtttaaaccaggctgctgtaggagatgatccacccgattctggatcccagggaacttggtttcggcatttccatccaggaggaaatagccagggaaagaactgaagaaatgttcggccttcaataagtgaaatgttaacctgagaactactggctatctgatacaacttgtctagtattacagggggaatgcttcggtcaattattctatcgctaacagcagaaagaagctcatactctatgctatcacagacataatattgattctcctgtgaaataccagaaaaaatcccaaactgtttatttgctaatggaatcaatgggaggccattcatgcatttgccgatattaccactgtccagatcagcaaggcaatattccaataatattagcttctgagatttttctaatgtaccaagattttcaaaatccttgaggaaatgtcgcactgtagcaggagttactattttgagcatatacttcgaatggaacttaggaaacatatcagcaatcgcacctggtagacgaacgacaggcatgcctaacatcacaagagcctcactgagatcatcacttcttgaaaatccctcgtcatgaagcaaactctcagctggtgttatccaagtcccacctttgatctccgagtgaaatactggagaggtgtaaataaatttacagatttgttccacgagaatactccagggctcctcgtacaaaccagttggccataaggaataatatgatattttggagtccaaaactgtacgcaactgtagcagcagttctctgaacaaaggagcaacaacatcttctaacaataacatattccagtcagagcgaagcttaccacccctgtccatatcagctccataccaaatgtcacgtcggttggatgatacttcaaagtaaccattcacatgcacagataatcctgtctttactggcaaaggaagaaaacagaatgcgcggccttgtctgagaataacttcctcaggtcccacgttggagatgcaagcagcaacagaagcccaaggtagtaggtgaagatcataatccttggcagcagttgttgcaaaaataccaattttacttaatgcagatgccattccctgtacaataaaataggtatagctcttcttctcaaacttctcacccaaaaatgactttgatacaaaatccattgaaaaggaatctatcttttgctcagaggactcagcagcagtgccagaaaacctgacaagggcttgtcgatgccagcgcaaattgtcatgctgtgaccctatggagcaagagtacactatctttggttcactcataccagattcccatacatacatttcaagtgacagcacatttttaaggaaaagtaaattatatacagcttcttcgtaaagttgagcaaacagagataagatatcatcttctgtgtacacttgtctcgataaccgactaagagatgcttgctcagcagtccttaaaggaaagcgaaacaaagttccctgaaatggtgctttcatgtcacaaccaaatgcacgatagggtgaaagctggtcgttgtacagtgtaattgctgaagaactgacaaaatctatacgttttccaggatttgcagctgacacattcggaagataagcaccctggggatcaaacaggacaatgtacttgccactcacaaatgatggcaagtcagtcaagtggtacaccgagttaaaaccaaccccgaagcggccggtcttccagacctgggacaccttcctgctgtccccgatgcgggagatactggcgaagtcctcgtcggtgaagacggcgtcgttgtaggcgagcaacgccgggccctgccattgcgcgagggcgggcgcgagcagcgagcctgcgccgtgcgcgcggcggtcgaggcagaggcggacgcgggacgcccccgcgtcgtcggcgttctggatgagctcccgcagcgcggtggtgccctccgggtagttggcgagcacctcgcggatgcgccgcgtgaggtccacccgctgcccgaagtcctcgagcagcatcccgccgggatccat

SEQ ID NO: 22523 - DNA, 1632 bp, Oryza sativa
  Clone ID: TF_OsC359_6081
atggggcaggtggcgtacgcggcctcgagccacttgtccaggcacccgccgtggaagcggtgcccgcacggcgtctccttccactccgccgccgccgcgtcatccctgtccaggcagatcgcgcagttgtcctgctcctgcccgtcgtcgacgtcgtctctgggcgcctcgacgatcgccgccctactcgacgcgcgggtgggagccgctgccgccgccgcctccgcggacgacgacgggatcgtcgtcgggacgtcgtcgtcgtcgaagaagttgcggaatatttctcataagttaatgagaatcgccgacgccgcggtaggcgaggtgcctcagtggagccggggttccgcgttgttggcggctctgtaccgtgcactttgtgagtcttgcacgaagacggatcccagcgcgacctttggtgggtgccctctctttctttctatctgggcagctgagaggattgcgatcggccgccctgaggtggaccagcacgcgtacgaggagtcactgtacgaggagcgaccagaggtcgactaccctacgatgggtactctgtggtgccgtcgtcagcgtcgatgggctcacgtccaggttaggcggtcgtatcctgagtttgttatggagttcgaccgccttctgccgactgacgttgtgtgggagccctacagtgcagcggctacccaggctcgtgcgtcgttgggtctgtccacactctgcaccagggaccaggcgtactggatgactacggttccgatggtcttcgacatctgcgttgagcctcacgcccctttccgcgtgatgcggcagttcggcttccgtcagccctttccagtaccgtttccgaccaccgtcccagctgctgttcaccgggtcaccttcgctcccttggagcagcagccccacgttgcgagcactagagacctctatgccaggcaccgcgaccaggactttgctcgtgctgtcgacgacatcaaccgggtcgtcgttaacggttcaacgacgatccaacgtttaggcgtggggattccggtacccgtagaggagcacctgacgacgtacacgtggatggtggagtcgatgcgctcgattctccgagtgctcacctgtcgtgtagacgacgttgctcgggcagacgcagctgtacagcggccacccgtactgactggtccccgtccagctgcgcacgttcctaggccgactccccctccgcacggagggtttcgtgcaccgttcagcaccccgccttcctcggctaggccttctgttgtgccccccacagcgcagttctggcagtacaccgggacttcgtcacaggcagccggcacgtcgagtcagggtccaccactggaccatgctgggacctcgtcggaccgcttgctgccttccaccttgctcttcgacatcactgacttcgacttcgcttcaggctcgacagaggacgtcattggcccctcacagctgggaggcgcaccgccggtgcagacgcaggaccaggcgcaggccactcctccgcgggacactcgtgctacccgtgctgtgccaccggatcgtttcacctactcccaggaccacgtgcgagcacaggcccggaggaccaagcgtggtcgcggcgcggggcagggccagtag

SEQ ID NO: 22524 - DNA, 1842 bp, Oryza sativa
  Clone ID: TF_OsC13033_1
cgccggtgggttgcacctcgtctcgctctcgcgccaagaaagcaccgcgagttcttcttcttcatcctccatggccacaacctgcgtcagctgtccgccgtcgccgcgccacacttgcacctcgtctcgctctcgcgccaagaaagcaccgcgagttcttcttcttcatcctccatggccacaaccgcgtcgctgtccgccgtcgcggcgcggccactgtccgtggcctggctcaagaagcccctgtgcgcctcgttccagcccgtgccgagggcgaggccggcggcggcggcgaggatggccgtgagggcgtcggcgtcgatgaaggagagggcgacggccgggctgacggccgcggccatggcggcggcgatggtcctccccgacgtcgcggaggccgcgcagggcagcctgacgccgtcgctcaagaacttcctcctcagcatcgtgtccggcggggtcgtgctcgtcgccatcgtcggcgccgtcgtcgccgtctccaacttcgaccccgtcaagcggacctgatcttctccttctccttcattcacagacacgcctcgatcgctgtcttgtatcgagatcatcgtctctttgcagtgttgttttggagattctgtaaactgatttacgatatggagatatggagttgttgatggttaattgcttccataattctattgctgtatattgttcttgacgctgatctgccaatctgttcttttgctgctggtggtaattgtccttatggggaagagtgccctcagatgcatggagatctgtgcacaacctgtgggaaaatgtgcttacatccttatcgtcctgatgagagggaggaacataccaagctatgtgagaaaaaccacaagcgtcttgagtctttgaaacgtagccaagagatagaatgcagtgtctgcctggaccgtgtgctctcaaagcctactgctgctgaaaggaagtttggactcttatctgagtgtgatcatcccttctgtatttcatgtattagaaattggcgtaacaattctcctacgtctggaatggatgtgaactcagcactgagggcttgtccaatatgtcgcaaactttcatactatgtcattccaagtgttctttggtacttttcgaaggaggaaaagctggagattattgacaactataaagccaaactcaagtctattgactgcaagtacttcgattttggaactggtacttgtccctttgggtcaagctgtttctacaagcatgcctacagagacggacgcttggaagaggtcatactgcgacatcttgatgctgacgatggaagtacagtgattgccaaaaatattaggttgtcggacttcctcagtcggttacatctttagggaccagtgactgtatatatgtcaaataattattgaagttcgcagcaggcctcctggaggaagcaatcgtgatctgaggacaaggaaaacagaagttttgtcgcaaatacgctcaatagtccaaacgttagaactaaactgttgaaaaactttgccatatccactcatcttgcctcctggccagcagtgattcagtaaacattcactggccatcgtgccaaagcacaggtgtataatactattccttcctcaatgctctctactgagggaaggctgcctgcacccaaccacaggccacctgatgccgtgtgattgtacttgtatgaaaagaaggaactagaaaaaaagaaagagaggatgaaacaaagattactcttcagactacaaaaaaaaaaaaaaaagggcggccgctcgcgatctagaaccggacgcttggttgtcttggtctgagggagagaaggaaaacaagaaagga

SEQ ID NO: 22525 - DNA, 1647 bp, Oryza sativa
  Clone ID: TF_OsC2967_1
gctttcttttttttttttttttttacagcagaagcatttgattcgataattactacagttcaatggcaacattgtttagcagcattttcctcagtatgattcaggactagcacatatagagaattccaaacaatattgtcactttaactgagacaattcataaagcatcttcacttgaagaaactaacatgaggttgccttccagaaataaaaaaccataacggtacgaaataccggcatcatcaacataagatgacgattaatgacagcaacctgagttcctgacactgaagcctcagttatttcccattctttgctgaaacaaacccaaatatcggccaaccccggaatatacacgatggagggaagacaagtattcacaggaatcgcggagtaggcagaccattctgtgcgccataaatggaaagcagctctgtggctgatcttccactaaaattatcataagatcgattatgtacgggagccatcggactccaccagtgaggttccccagtttgtggccagaaggtctctgaactccagctgtatgattgattggcatgtctaggggcaccaacaccattacggatgttaccgtttgtggtgcttgcggtttcagtgagaggaaagtcatggggggctctgatctcagctgacgatgaggctgcaatgaaagatgtgattgacaaagcccttggtcgaacccttctggtcgcaggaggttgtggattgcttgccatggatgatggaattgtttgttgaacagcgtgacttgtcataccatggccatggcctctagtttcagacgcagcagttaatgacctcaaatgtgcaagattgcttgctctgcgagctgtcggcctgtggaataaggaattatcatgcatatgtggtcgcaatctttgctggttgcctccatcatatcttggcattcctatgccaaatggggcggtggaatgattgagtgttccaggcatttgaacactacctaaatactgctgttctctctcatggtttcttggctcagattcattgaaaacttgagtatttctcaaatctgtagttgcatgaccttccgtaccagtaggacgctgatggaatggtatgctttcagtactggcagtagaactagaaggcgcatacattggatggtgaaaaccatgcagagaccctatatactccaaaaaaggatttggctcagattcgctttccccaaaaacagaggtcaatggtgtattgaagggacaccacccaaattcaaatgagaacgggtagtcaaaggtttcaccattcagccagtcacctgtatcagaatggctacatggttggctctcattcccatagagccagtgacctttctcaatattccgacaatttgggcactgcatcaccccttttgcattaaatgcagatccaatgcagtctaggtggaactcgtggccgcactgcagccgcgcggtggacctcgccgccaccccgtcgccgcacgccaccgcgtccaggcagatcgagcacaccgccgccgccgccgccgccgccggcgaggaatccggcgacacctccagatccatcggctccgccgcgaaggccatgagaggctgacgtggtggggcccggatgtctgcgagaggagggggggatgtctgt

SEQ ID NO: 22526 - DNA, 5871 bp, Oryza sativa
  Clone ID: TF_OsC32063_1
atggggaagcacaagggccgagctgccagcagcggcttggcggcgtcgctgctgccgcatgcgcagggtgccgtccccatcgttggtttcgggggttaccatggcgcctcccgtgttgagcccgccgcgccttcgtcctcgaccgaccccgatgcctcgattctcctccctcccgatgtggacagtgaggtgctgcagcacctaaggagattaggaaggaaggatccaacaacaaaactcaaggcattatctacgctctctatccggtttgcacaacaacatagtcaggaggttttgcaaattgcatcacaatgggcattcgagtaaatgaggctgctgcttgattataaaaatgaaattcgtcgtgctactcgcgataacatgcctggcctcgactgaactgtcaatgggggtgctgatccgcatgttaaggtttttatgtgtcctagctggttttctcagtgtgaccctgttcttgaggctgcgtaagctgctcggcattcgtttgaggctgccttcccacaatcagataaaaggttggatgctttaatgttatgtgtgaaggaaacatttcttcacttgaacgagaatttgaagttaacaacacaagcattgtctgacaaggctacaccaatggatgaactagaagatatgcaccagaggggaggcattgaggcaggtcaggttactggcacagtatgtcacaagtcactgcaacaaccaagtgacgagcacaaacagttattcgttggatgggtaatatcatcatcattgttagcaatggcaactctgattgacattttgctaggtgtaaaattacaaaattgtgtccgtgacaattccagttctgaaaatacgagtctttcaaaagttctatctggcacattgtcttctgctgaatctgcattttctatgaataaatattttcttgatttcctcaagtcaaaaagtgcgattatacggtctgccacatactcactgcttgcaagttatatcaaacatgtttctcatgttttcaatgaagaagccatgaaggtactatctcctgctttacttggtgccttcaatgaaaaggacccatcatgtcactcctctatgtgggatgcatttcttgctttctctagaaggtttccagaggcttggtcatattgcaacattcacaaggttgttttcagccggttttggcactttctacaaaatggatgctatggatccaagcaagcctcataccctctcctggttcagtttttggagtctataccatctaaagctgtaactacagagcaatttgtttttgacttcttacataatctctgggctggaagaaaccagaggcaattatcagctgctgacagtttggcattctttactacctttaaacagagtttcttgtggcttctaaaagttctaccgagacattctggaggaggttcttcggatgatattcctatcaagctcataacttactttcttgcaaaagttgtttggcatgattaccttcgaataccatcttccaaaaaccaggatattagtttgagtggattgtctgatgaagcaatcagtggtgattgtcagttatctcataaggagtcactgttggcatcaagcacacgctacccaacttattatcttcaggatttggggaaatgcatcattgaaatattggatgagatttcagctatggaaaatcatttgttaaatattgcttgtgagactctattgaaggactgtttggatataatccatcaaagggagagtttgccaaattttcagtatcatgtggaacaagttgtgtccttttttatttcgttggatcagctcattgtacagaaaggtaaaacatggccattggaaagcttagcaagaccactgaatgaacaatctgtgccagctatcaagtctatgatccagaaggacactccaattgttgttaaacttctatcagttttggttgaaatattcaggcctgtccctttgttcttgaagaattcacagaaagagagtgaggaatctgtccaagatgagtgcttctttgaccagtggtgtacgattattaaatatactagtgctaagcaaaagcaccctgttgataataagaactcacacgttgatgaccaatttgaattgctgacacttatacttcaaaaggtaagagaaagaattgctgggggcaagttgagaaatttgcagaaaaatggctctctaccagaacattggcggcatgacctattagattctgctgcagaatctgtcttctgtgatttgcctgctacagattcccatgtccattatgtatgtgctgcacttggtggctcagatcaagatgaccaaatttgttttctttctgctgatactgtccacaaaatgctcgggtccattttgaagtgtttgacatcagtactcatgacatcaacttttgagtgggcaaggtttgcatatgtggtgttattgcctactgaaccaaaggactcgaaggttataggagcacaatccttttcatcaaacattaagatggctcattttgctttcaaagttcttgagggtagcttatttgccctgagaagactagaggaagattctttatttccttctgttctggcagctctgtttatcattgaatgggaatatagcatggccttaacactcgatgaagaacatgacttgaaaggttataaagaagatattgatgttgggtcttctgcatgcaacagttcagatgatcatttggatgagggaatacatttgaaagctaaccttgcagagagtatacataccttttgccaaagcttaagtccatccttttggagtgatcttcatccattcaccttgaataatttgttaaatattttagctcaatctgtcaggtgtgctttatttcagacactagagttgccaactgagagcacatcagtcttatgctcagagtggatggtgaacatgttgaagctcatctctcttgatcacacaaaattgcagagttttttttatcttcttttatctgagggagaatattggccactctgggtgaaaccatctttacaaaatgagaatgcaccagtgaagatcaaatttgagccagttattacaaatgaaacgggactgaaacaccatcaatttgttgcttttgttgacaagcttgttcttaaccttggctttggtgaagtgatcttaggtgttccaggaaatacatgttacaacacatcacaatcaattgatactacttcaactgttccttcattgtctagagcatgggttgctgctgagattctttgcacttggaaatggaaaggggggagtgtattcagcacattcttgccttctatgattcagcacttgaaaatggaatcatgtgcagaggtcagcatattgtccatattgcttgacacattgttggaaggagcttttcatgagtgtaaccagtgggtactgttcaatgcttggcacatttctgacaatgagattgagaaaattcaagatcattttctacgtgctcttgtggctttgctatttagtatcaatagcatcaatgagtgtatttggagagaatccgaggcacttgtattttttgagaaactactgagcaatctttttattggttccacagtaaatagaaaatgtgtaaagactcttccctttgtcatgagtacaatcatcaaaccgttgtcaggcaaactgaaattaaatgaagcttcttgttacactgatttggtggggcaaaacatactgagttggcttgatgtagccatctcttgcctatcatccagcccgagggaagtacttcaacaagacattgttgattggatgcaagtggtgttgtcttgcttcccgttgaatataacatgtggaacccagaaactagaagttaagattgaacgagagatcagtgatacagaaagatcattattgctgactctttttcagaagtacaagattttctgtgccattgaagctccgtcgctgtccaccagtggaactaccctgtcaacaatggttgaactattgggggtgaaactgatagcagttatggttggctattgctggacagaacttcaggaaaatgatttgcattttgtgtttcatacagtacagaagtggattgaatcagctgttttgcttgtggaagaaatgacagatgccatcaatgatgctgtaataaaccagaaatcaaatgaagatactttggagaagcttaaattagtggttagctctatagatgagttaactttaagcttcggtgaattcgctttggttacactgtgtcacctcaaccatctcgtggatatccaagaaacggagaacttccagagtttgcaaattattaaatcaggggattttgctgatagaaataacaatatgatggaaagtatgcttcgtttgttcttggcttctggtgtttcagaggcaattgcaaagtcttcttgtgaagaggcttcatccatcatagcttccagtcgcgttgcttatatgcatttctgggaacttgtggcatcatttgtcatttatgcttcaccacagactagaagatgtgcactggagtcgatggaactgtgggggctcgcgaagggctcagtcagtgggctatattcaattttgttctcttcacagccaatctctcatctgcagtttgctgcttattctctacttctttctgaacccctctgtcaattttcactaataaaggagtgttctctgggatcaaatagaccactgactcaggaatcttgcatgggacaaagtattgagttgatgccagattcagagaagacactagatctgagagaagaactctcatcgttaattgagatgcctacttctgaacttctccagacagatctgttagcccatgatagggttgatgccttcattgcctggtcattgttgttgtcccacctgcaattactaccaccagcttccattactagggaaaggcatattcctttaaggactggtgcaccttgtggaaagaaaaaagatgctgaactcatgcctgaagcagaagttgctgcgcaagcttctaagaatgccataattacatgttcactgctcccatgcattgaatccctttggccagttgggacatggcaaatggcctcacttgcagggggactgtatgggatgatgattaggctgttgccttcctatgtgcgtacatggtttactagtttaagagatcgttcattgtcatcctcaatcgagtccttcactagagcatggtgcagtcctcctcttctacttgatgaattttctcaggtcaaggactctctgtatgctgatgataatttctcagttagtgttaaccgctcggcgtacgaaattgttgctacatacaagaaggaggagacaggaattgatcttgtcatacgcctcccgagctgttaccctctgcgccatgtggatgttgaatgtaccagaagtttgggcatcagtgaagtgaagtgcagaaaatggttgctttctctcacggcattcgtacgcaaccagaacggcgcaatagcagaggcgatccacacttggaaaagcaattttgacaaggagtttgagggggtggaggaatgcccaatctgttacagcattctgcacacgagcaaccacagccttccccggctggcttgcaagacgtgcaggcataagtttcatggtgcttgcctctacaagtggttctcaacatccaacaaatcaacgtgtcccttgtgccaaactcctttctagtccggctgtgctgcgctatgcctattttttttttgcaccgtagaaatttaaatttatactccgtagttattatgttttgtcttacaaatttaatgaaggttagataaaaatatgtagttcatgtgtctccgttgtcccgtaattcaaaatgcgataattatc

SEQ ID NO: 22527 - DNA, 1249 bp, Oryza sativa
  Clone ID: TF_OsC302675_1
tgcaggaattcggcacgagggctcctccccctttcctttccccacccaacggcatctcgtctccacgcgagggatggcggcggcggcgagggaggcggcggagagcccgaaccctaggtcggcgccgcggcgtgcggcggcggcggcggccaaggacgccagcagcttcctcagcccgcgtttccggtcggcggccgcgcaggccgggtgggacgaggagtcgctcctccacgcggcgctcgtcgtcgaggacacccccgtccgcgagtcccgccgcaggaggcgggcctccaccacctcctcctccgccggcggcggcgggagcgccggatctaacactaggaagcggaggtcgtggaggcagccgccgggatcgatcccgccggtggtttttctgctcgacgacgacgagaagaagccggataccacggcagatggcaagaaggaggtgaaggaggaagaaaagaagaccgtcgtcgttggggagaaggaggcctgttccgagaaagcagcggcaaccagcgagctgccctgtatggatcgcctccgggaggagctgtcttgtgctatatgtttggagatctgcttcgagccgagcaccacgccttgcgggcacagcttctgcatgaaatgcttaaaacatgccgcagctaaatgtggaaaaaggtgtcctaagtgccggcaattaatcagcaattcaagatcttgcacagtcaacacagtgctctggaacaccatccagctgctatttcctagtgaaaccgaggcaaggaggacttcaatcgcttcatcctcggaaaccaacgacgacttggcgcaacaaatctctcaaagaagtaacagcatggcacaaggtggcataagaagcagcagttccaatggcatcggctacatcacgcagcgcagcacaagaagcagcgctaccaacaacaggagcttcacaacaacaggcagcagaagaagcaccttcgtcgcacaggagggcagcagcacagcaacagggagaggctttgtccgggcttcgcagctggtccctagtgccagggtcgtctcagtgagatcacaccagtctgatgacgcggcattggcgtacaggctgcagcaggaggagttcatgacggctttcgagagcgagggcgagaggcagccacctcggagcagcagcagcacggtgtccgctgctcgagcgaatctgagagctatggcctcccgggccattcgtctccgagctcgtggctggcctgtctag

SEQ ID NO: 22528 - DNA, 1778 bp, Oryza sativa
  unsure (1)..(1778): unsure at all n locations
  Clone ID: TF_OsC63595_1
tttttttttttttttttttttttttttttnagccaaaggcactgttctacctttttttttaatcttttgnccctctttacatgatctaanaaatganaaaggggnaattttttcttctctttttttttttaccctagtctgactgacggatgaacatgatatgagctgatgaatcggtagtttcagagtcttctttcctcctgcaattgcctgcagattttgcagcagatggattgtggcactggaggagtagaggttgcagctagctaagaggaaggaggccgctgtggccggcggtagccgagctccatgacgaactccttggcttgagcgcccagcgacgcctggacctgctccaccggcgagctcttcagccacagctcgagcaggccttgcaatgtggtcgagggggagattgcctcgccatggcatgtgatctccacctcatcttcacttgctaggtcaagcttattcatgatgtacctctggatcaaggaagtctgcagacttccatctttaattctcacgtaatatgttggtagctgaggcagcctgggatcttgtttctggtcaggtgaagggacaagcaaaaaccatactggtctagttattccatcatgcaaagcaccagttcttgtagaaccaatctgtccctgctgtgaatcagcatgttgtcctttcctcagctcatagtctgaggtggttttatctttcgatgatgcagattgtgaaggactgcgattattttcctctttaacttttaacttatttgagcatggcataacctttctgccagtaactaccagtttgtcttctgtgtcatcttctgccagtaacttaattgagttttttattttgtcttccttggcagcctggcctttaggacctgatctaaaaaatttcgtcctgtttgcagtgtcaaccaagctatttaaaggcttcttgagatcttccttgtcaattgtatgatcatccttcctatcttcagaagatgactggattgtgacatctacatcagtattattcttctttttattgccagtttttgtcatcttggcagattgtgctgctgagattttctgagttttatgatctcgaccttcagatttatttgctagcttgatggttccattattaccaggagagtttacatgggagactgctgtccttctcgcagttttggttctccgtcctgtcaaaccagtctgtactgccaccctcggagtgtcaacaaccaaggaagaaagtgacctctgttttctctttactggcaatgtcacagttggagccttaggagcaccaacctttttcactttaagtggaaaaaccttattcctgatatcttgaacattatggtcgggcctgagtttctcttcaggatcacagccaagatcaatgttgcatactgggcagtgatcgacttcttcgtcatctattttctccataatgcactccttgcaaaaggtgtggaggcactcggtgatggcggtggcctcccggaggagccccttgcagagcgggcacgtcatgcacgccacgagcgcctcccgccggacgcgccgcaccccgccacgcgcggcccccatctccccccgcgacggcgccgccccaccaccaccaccacctcctcctcctccccctcctcgtccaaggcgacctccactcccaacctcgtccaaactcaggccggctccggagggcggcggcggaagggagactcgggaacacgcagcgtcgtacgacgggagaaaccggcggcggcggcggcggagctccgg

SEQ ID NO: 22529 - DNA, 607 bp, Oryza sativa
  unsure (1)..(607): unsure at all n locations
  Clone ID: TF_8955298
aaaaaaatnttganccatcanccaatataccanccataaatattcanttnaatgcaaagcnacaaatnccagggattatttactgcaggagggggcattttgcagggaccantncttttacctttttttttaatcaaatttgtaggtcaatggcaaaaaaaatttctaatcaaaaaacggcacggtaatatnaatcnctaaacnatcttgcnatcnaacaancncncagtgtttactgccctgtgcttttnctaaaacttcaaancantntttttgcatntgggacaggtnttcttcncaaccagccattgcctgacgcatccaacatggaantcatgtccacagtccaatgtccnaaatctccccntcaacatnccttcctggcaaaaacagcatggtctcctcccanangctcccacccccanaanaaaattcctttctttagaacttgtccctctccccctgaggccgtggcaanatgctatccttctccatgccanaccccanaaatttttntnntnaggcntccnntttttntaatcacccccaaaangaccactaattcccccggacattcaccttcggattcataaccnccnccgcccac

SEQ ID NO: 22530 - DNA, 584 bp, Oryza sativa
  Clone ID: TF_OsC71294_1
tttttttttttttttttttttttttttcttaagaaaatcttcaacttcatatacaattaattcgtttgtacactcgaatagtgataacaagttaaatcaatgagaaaaaaaaaagcatagtcaacattgtcgacgtagtagtagaactagaaaccatcagttgaccgttgaacaaacaaattccacctcgcctgcagcggatccgccaccatcggatcggccaccagcacatgcacatcctctccggccgtcgtcgtcgccgctgccgccgccgccgtcagctcgcgccggcacatggggcaggtccctagcttcacccgagcccaagactcgaggcaccgcgagtggaagcggtgcgcgcacggcgtctccacccacgcctccgtcgtcgtcttctccccaccgccgccgccgccgtccaagcaaatcgggcagttgctgccgtcgtccggcgcctccaccgtcttcatcccgatcaacgcctcgccgccaccgccgctgccgccgccgatgtagtcgtcgacgtccatctcctccgtaccatcgtccttcaactggttcaccgactcgctcgacgtcgccat

SEQ ID NO: 22531 - DNA, 1385 bp, Oryza sativa
  Clone ID: TF_OsC93699_1
atgggtggctcgtcctccaccagccggcgccgccgcgacgagtactacgcggcccggcccccgccgccgccgcaccactactacacctacccaccgccccctcctccgccgccgcaccaccaccaccacccgccgccaccgcctcccccgccgcaccaccaccaccagcacccctaccggcctccgccgccgccgcaccacgccacctcgtcctcctcgtactactaccaccacccgccgcccccgcacgcctaccacggcccgtggcaccccgcgccgcgcccgccgcacccggagcagcccgcgctgacggggccgccgcccgagttcgtggatcaccagcaggcgcggaaggtgaagaacgacgtcaacctgcacaaggacaccatccggctcgtgcccgacgtcacggaccccgaccgacgcctcgtcgccttcaccttcgacgccgtgaccgacggcagcataactatttattactttggccgcgtccgaaaaaactgtactttctcttcagtatatccagaattacaaacacctacaaagatacctttccagaaaggattggctcaaaagtttgtccagacctctggatctggtgttgatttgggattcttttctctggatgagctttcaaatccttctggagaagtattcccactggtagtttatgcagaagcttgtccacctccagaggaaagtcaccagcctaactccactagggcacaaattactcttgctgttatagagaagcatcacaatgaccttcgagttaaagttgtcaagcaaatgttgtggagtgatggcgagaagtatgagctacaagaaatttatgggattgtcaactcgactgaagctgatgttcccgacgcagatgatagtgatatggggaaagaatgtgtcatctgcttgacagagccaagggacacagctgtttttccatgtaggcatttgtgcatgtgcagtgaatgtgcaaaaactctaaggtttcaaacagataaatgccccatatgcagacaacctgttgagaaattaatggagatcaaagttagaagtcccgagccataaagacaccttcgctgtatgctgcccgtgttgcggatcctcaaataatgagctggaatggtgtatgagaagcttcgatctggtcgtgatgcttcttttttgtttctggcgaactgctgaaggtgcctttggaaattttggcaagttttcccggtgtacagaacatgtaaatggtacggggcatgtccattaaccacgatgtacagttctctaagctacgactctgaatttgggcatgcaaatgtgtaagaattgtgtcaatgtatgttcgccatcctggatacgctcttccattatgtttttttgatgaaaagcttcaa

SEQ ID NO: 22532 - DNA, 1674 bp, Oryza sativa; identical to SEQ ID NO: 13293
  Clone ID: TF_OsC100587_1

SEQ ID NO: 22533 - DNA, 696 bp, Oryza sativa; identical to SEQ ID NO: 13294
  Clone ID: TF_OsC392270_1

SEQ ID NO: 22534 - DNA, 2741 bp, Oryza sativa
  unsure (1)..(2741): unsure at all n locations
  Clone ID: TF_OsC140765_1
gcacgaggttttttttgtttttaaattgatcagaaacaagatcagcatttggattagatatttcgtttgttcctttctgtcagtacttagtacacattgcgcttgcacaaaacatatttacatttctcaagaaacgctagctcgtatacttttggttgttaatgaaggtgattcaagaagcctcctcaaaaccagggcttcacaaactccacatctaaagctatagagtggcagctcttcttcctcctaagacctaaacctcaaaaattcatatgcgctcgaacaacatcctcaataggagattggcagattgggcaactcctgttgctcgatttcagctgatcggcgcaattgaaacaggtgcacatatgtccacacctgtaaagtagagagtcaacttgcgtctgatggcagatgcagcagcttcccctttttgctggtgtgtcgggttggcttggcatcaaccctgcttcgcgaagtgcactgcacatctcctctttaatggagtgctggatctttacttgggatgcaatacaactttccaccaacttccgtagttcatatatttcatgatggacctgtgccatttcacttctaaccctgacctccatttcaaggaagttttggttttcatgatgttgatgttcaaacgaagaatgctgccagccttcttgttggtggagatgggagacaggtgctaatgaacactgtgcagataccctctgatcagcattctgttgttcatcattctgtctccagtataagcgctcatcataatatccttcaaaatcatcaatcatgtgttgttgcctttgtttgcgcaagattgttagcaacatgttgttcattttattgctaaaatcactctcaagagactttgagacatttttgctctcaagaagattgcagatgtcagcattgccagacaaagcaccgctgtctgcttgtgtggcaacacacaatgatctccatgagttaggggaatctatccaggggcgatcattaaattcattctgagtgtgattctcaatatccccaatttcatcctgattccagctgtctggactcatggcttccactggtgcaggccaaccaagactacttatccatagtgccctctcttcccatgaaccattcaggctttggttgtcttcttctcttagattatcaccccttgaggatggagtgcaaagttcatgcaatgtgcttatggtacttggcgagacatcatcaacggtactatgctcgtcatacctcacgaaactcgatggctcagaatattcctgattctgggtacataattttaccatgtttttgcaaccttcctgacattgattttcactgttgctgttctgcccatcattttgttcatttcctaaaccatccgaagaaactagtctctcaacagaaccagtagacttctcagccaaaacctggccacccttatgttggttaccagcaatgcacttgctgagaaaagcttgtgttaggcattggcttgtggtataggcctcatgctcatgttttggaaggcgtggcctgactggttttggtagagtccaaacttcatccttaactttaaatccctgacgcaacagcctaagacgaagcatggactgcaaggtgtcaaagagcatgacaatattagcggaagccacataaggaacaaacaagcttaaaaagtacttgtgttcgcatagatacaatctgcaaaacgaaacatgataatgtgatttgcacatgacaatgatcagcagtgccagttgggaacatgatctaccaaacagccatatggccccatccttgggggactggatcctgcctttgtgcgagaaccgcgacacgacgtggcggtcggcgaccgcggcgagctcgcacctccggcaatgggccatcatggcgacgagctcctccattgcgcggcggccacgcaccgtgcggactaccagctgcgtcggcctggacccgttgataccggcgatgttggtgggcggctccaccccggcgcgcatcggcgcgggcgacgggggcgcggactgcgacatcgcgacctccttgttggcggcgtccagctcgtcgtcggggatcgacgacgtgccgctgagcttcttgacgatgcaccccacgcggccccgcggcgagccgccgtcggagtcggaggccaggtcgcagggccgcggcgtggcgggccccaccgcctcgatctcccgccaccgctggatcagcgacgacgcgcgcggcgccgcgggcgggagctccgcgccgcacctggccccgcctccgcaccccgcccccgccccngacgacgcgtccgacggcgctggggacggctcccggaacacggcggcgcgggcggtcacggggcgggtggccgacgcgagcgcggacagctcggcgtccctcgccctccgcctttgctcctgcggcgcgggggcctcggcggacgccgtggcggacgcggccgccgccgccgccgcccaccgatccagtatctgcttccgccgcctcggcgtgggctccgccgccgccgccgccgccgccgccgccgcgccaccagcagcatcgtggtggtggtggtggtggtggtggtgttggtggtcggggcagcgcgggcgcggcgactgcggcggcgggacgaggatgttgaagaaccccctggcgggctgcctggaggatgccctggaggggtccctccatggcgtggagtcgtgcggcatggcggccaccgaagatgttgccat

SEQ ID NO: 22535 - DNA, 1683 bp, Oryza sativa
  Clone ID: TF_OsC46309_1
cgacgatgcatcgggagagagagagttgtatttttttttttttttttttttttttttttttttttgctgtatcaatcatatttatcacgattatgattgctattatgtcaccaaatccattatttataccggtaaaaacttgtccctgatttttttccctttttacatagatgaagcagaacaaatcggcatcctaaggtaatacctcgggctgagcccttttatcaaaccaatacatcaaatttgtcattccgattttctggaggtgatttatgcaatgctgaggatgacaacatcatgacgttgcttttggtcacctgcccatgcctggcaatggcaatcctttgatggagaagaatgggaatgtgcaggccttctttcggaacctataacatgctaatttgaaccggttgttgtaacacaaggggcagaagacgcagaagtgttgccactacttgtcgctgcagtagttggattgttttctgtaactctctcattgcttgattctgtactgggaataacttcagaagtggatattgctgggccatcacttgttctaccattactacctctagtttccagacgctccatcatccttgatacggatgcaattccagcattaacttctcttcttacttcagaaccaagatctgccacagatgaatgacgcgaaaaaagtctctccttccatcctcgagtactttttgtaatagattccttgtacttcatagagacagcatttaagcgagacttcagagagtctgagaaagactgaagatctgaaggcccagctctgtcgttgtttactggagttgattgcccagtggaatgcctcctgttgaaaaacctagggctagatacaggggtactatttccagatgaaacaacagcatcttgatcagcatcgtaggtaagcatcccaggactttgattgcctgcttcttcatgggtgttagcatgcagtgataattcaccagttgtgtggacaggacttgattcattatccacttccccttgaacggacgatgaagaaactgaaccagcagaaggcatgtttggatgcgaagaaaaaactaagaactgtggacgaccatgagagccggaacgacccctgtgtccttctcttctaccaaggtggtgtgaccttcccattgcagcggctgctgctaggtgctgtaatatacgctcttcaagttcagcatcattaccaacaacaggtaaatgctgaacctcaaaatctccaagagcaggatgatgaaatatagttgtatttcgagtttgattggtccttacattcctttcacgctccactgcctcgagcagctcttgacacacactctgacaccattcaagaatgcattggaggtggaactcgtgtttgcaaccagtcaatgtggaagggtcactctcacagaacgcctcaaggcagatactacatgcatcatcacatgcatcctgaatcccaccctcaacaaaggctgcagctgatgtcaaaccctccatcttggctttctcatcagttccagatgccattgcaacggaatcacaacactgatatcaggggcaccgccgccgacgccgacgaggacgcccgatcggatcccgctgcgcgcgcgaggcgatggggagcacgaaaccctagctagctagctagcctcttcgcctcctcctccaacctcctct

SEQ ID NO: 22536 - DNA, 3576 bp, Oryza sativa
  Clone ID: TF_OsC67131_1
atgtccagccctggaaggagtgggttctcccctgggttggcgcagttgttatcatctagagatgaagcgaaggttagttcccagaagtcgcacttggtatcgtaccatgacgagattgggcaccaggatattgagaggacgctagagcatatatttgatctccctcacaagtcggtggtccggcctccgggtccgattgatgtgggatttgtgcgctcggtattgcggaatcaggcaaggaagtttgatcttggcgggaaagatagccgtaaatacgatgatggtgttctgattgtggataaaggtgctgggcaaactaaggttgttcttgatgattcgagcatttgtggcaagttcaagagcatttggggacctttgcttgttgagagctcggcatcattcagcagcgctagggctaacacctgcgtgtggaatggcaagtggatgtatgaggttaccctggagacgtccggagtgcagcagcttggatgggctactctctcgtgccccttcactgatcagaaaggagttggtgattctgatgattcatatgcatttgatggccggcgggtgaccaaatggaacaatgatccagaacaatatgggcagatgtgggcagtaggagatgtgattggttgctgcatcaacttggatgctggggagatcagtttctacaggaatgggaattttcttggtgttgcctttgatgggattcgcaaagtgggacctaggaaaggctactatcctgcaatttctctctcagaaggtgagcgttgccatctgaacttcggctcacatccattcaggtatcctgtagatgggttcaatccaatcaaggattttggaattcttcaccagagagattcctcatgcattcctgatgtgttccgtctactagaagttcaaaatctggaaaaatctgaatctgcatacttcgagaaactaaggagggtcaagaaatttgcacctttacgtgaactatttcgaccaatttcggaagggatatgtgcagaatttttcggtgccgctgaaggaagccaagggtgttctgaatatatcacctggggatctttcatcacccttcttacagatgttttcagggtacgggagccgcatgatttcttatgccttgaccaggttcttgaactttttctacagttcccggggtgcagttcattactgcaggagctcattgtggctctttcttgtatgtgcaaagctgctccacttgtgttgacagaatgcccattttctggaccatatccatttttagcgctggcttgccacattcttaggcataaagatgtaatgcatctatggtggaagtcagaagattttgcattctcatttgaaggatttcttacgatgaagattccaaacaagcaggacttgcagtaccttgtaccttctgtttggtggcctgggtcttctgaagatgaggttagcatgacattatcgatgacaacactctccgatgcaattaagatcattcacctttggcaccgtaaacccgaagagaagaaagatggatcatgccgactgtcttatccatttttgctcgatttggaggcgcagacagctcggagcctcggagttcttcccttctgctttcctggaagactgcatcgccatggtggtgaagtcagaaaggttaatcttttcccttgtgtaaagatcaggtaatagttaaaacaaaaaaagattcaataacaggattgcagaaggaggcttctgcacaaggtgggaagccagtaccacccaaagaaggattcacagaatcgtgaaatttttgtaggttgtagggaaaaattccattgtaaatacgagatatgaaacagaaaggaggtgtcagatctacatcaaccttttgtaattatgtagttaaaataaagaaatactagatggtttatattggagggacctctagtttttttccctcgtatatcattgaataagagcctcactatttttcttaaaaaaaaaaaaaaaatcactgttggcctgagatttaaagaaaatgccaagtacataccatcaacttcgaaaggcccatgcaagtccatgcatgaaaaatctgcacatattgcctctgaatgcagtgcattctattttgtgtcccagcaatcacaatccatttctttactagaagaaactgataggcagataagagaaaaatcatgcatggagcaagtaagacgcttgaaggaagcccgcaatagttatcatgaggagttggtggattgtgtcaggcattgtgtttggtatcgtgccactgttttttcttcatggaagcaaaggggaatgtatgcaacttgcatgtgggttgtggagcttcttttggtgctcagtgattcttcttccattttccactatattcctgaattctatgtggaatcattggtagactgtttccatgccctgcggcggagtgatcctccttttgtctctcctgcagtatttcttaagcatgggctagcttcatttgtcactcttgttgtcaaacactttgatgatccaaggatatataaagaattcatgtttgtatttgagaacaatcgggaggctataaacagaatgccaagatcacttctgtcagcttttggtaatagatcatggatacctgttaccaacatacctttccaactctgcaaaggttttggctttgcttcatccaagaatgctgaaccttcatcatctgcaactttccagaatgtcctactcagggagacatgtattcatgaagaagaactgtttttatcctttctcaatcgacttttcaacacattaagttggactatgaccgagtcctccatgtccatccgtgagatgcaagagaagcgccgggttgccgatttgcagcaaagaaagtgcagtgttatttttgacatatcatgtagtcttgcaaggatcttggagttctgcgccagagagatccctcatgcgttcctcatggggccagatatgaatctgcggaggttggctgaattagttgtctttattctgaaccacatcatattagcagccgatgcagagttctttgacatgactctaagacggccagggcaacatcaagaaaaaacaaattgcactatgatcttggctcctcttgttggcattatcctcaatcttatggaaagcagcagtacttcaggccatagggagttaaatgatgtgattacagtgttcacaagcatggattgccctgccacaatccattttgggttgcagtacctactgagctacaattggagcaatgttctccgaggtgacgcttcccttgcaaagctagctcagcttgaagaattctcccattactttatgcacatcactatgtcagcggatggcaatgaagagcaaggtttcagcactgccagtaatgaagaggacaactgctgcatatgctacaattccgattcggataccacattcgagccatgccatcacaggtcctgctacggctgcataaccaggcacctcctcaacagccaaaggtgcttcttctgcaatgcagtggtgacttcagttaccaggatagctgattcgcgcatcgaatctcggtcacctttggcaccgtaa

SEQ ID NO: 22537 - DNA, 2185 bp, Oryza sativa
  Clone ID: TF_OsC44374_1
gcacgaggagagaactagtctcgatttttttttttttttttttaaatgaaacataccgcccggctggtttctcaaatgaagcgttataaaactgtacaatgacatacaagacatgttaacattgcggtctggtactatttactgtttagtaaaaagtacattttatatatggtttcaacattttgacgtatcaaagctttacaggttacaattttaccactgccttccctcgtcttgctaagaagcaaaacttgttcactccagttgcgccggggtacatatacttttgcaaaaattcccaatttttacattatgcaagccaatagcgtggcggggatcacacacaccagggctttgcactaggattgatcattcctccagaaaccgaccaggcccataaagatttgctgcaaatctatgctaacgtcgcaactgaccacagaccagttctctaaactatttctcgaacatatagatgaatcagacatattgcgctcacataatctctgcgaatcttctcactttgacatcagtgcaggggaagacggcatgacatgataaagaaaaaaaggattcacttggattttcataagcaattgcttgtccattgttatatgttagcagtttcccatttggtgtctaaaacaactggaagaaaagacttgtagaaccatcaccaaatgaccgaatatcagcaggctttaccaatgctctacacagggggcaagtccgttctcgctcaaaccattcagagacacagtcctcacagaaaatatgtttacagcggaggaggacaggaacatgcatcttttcctgcaccaggttccagcaaaaaacaagttctttaaacaagatagagtgagagttcaagggggtatcctgttctgctgtcgcataagacccataatgcacatctttacgtgacaatgctttcactgcagccaagaatgactgaaccttttcaactactgaagttaacttgaaggtcaggtacagtccagtggttaaagatgagaaaagactcccatattccttgttcagaaagaaacggtaccaaacaggagttggcaacaaggcacgatataggagcagaaggtattccacaagggttagcatttgaccggtagttacgacctctgctattcttatagtacataagtagcatgcacttaatggccattgctgcctggcgaaccattgtatctgcaagtggcatttggttagaaatgccaacatgatgataaaaatcgcatgccaaaatggcggtatttcttttggcggaagcatgaacagaggtctgagaagatcatcattcctgtaccaccaatagacaccaaacacatgaatcatgaagattactgtaatcccgacaagcacagcaatttttctctcgcccttcaaagcagtttgcttccgcaatatatcatttgacttgaacattacagcagcaatccaaattgtgacaaagaaaccgcttataatcacacaatggcacgagcacaagagaatgagtattagaccttggagatgctgccgtatgaagacgacgagcagcagcagcgagaatggcagtatctgctcgatccacctcgcgacatggtgcacgtcataccgctggtaggcgcggtccccacccccgttcccggacgcgccgtccgcgcccccaccactcgcctccgcgtcggcgccgccacccctccccgcggcagccgaggccgggtcaacgtccccggcggcggtcgcctcgatcgagtcctcccccgacgaggccgcccccgcgacgcccgccgcgtcggcctccccggggccgccctggatccggatcgagacctccccgtccccagccgcggccgcggagagcagcccatcggcctccgacgacgacgacgaagaagacggcgaggacgacagcgccgagggcggccccgcctgcggggcgccggggccggaggggacgacgccggagtactcgagcagcgcagcgagcggggcctgcaggaggctggaggcggagaatctgaagccgtagcggcggaggcccgacggcgaggcggccccaccggcgcccgcgccggtcccggcaccccggcgatgatcggaggagcctcccgccggtggctccatcgccggcggcagcggcggcggcgaaaccctacaaggcggaggcgaaggaggaggagacgag

SEQ ID NO: 22538 - DNA, 570 bp, Oryza sativa
  Clone ID: TF_LIB4833-026-R1-N1-C5
ccggccactttggcaaggatgccgccgccgccgccgccgccgccaccgcggacgccatggaacatgcactcccctgcagcgatcttcaccacctgagagtgggcaagacggcagagcagagctgctcggtgtgcctcaagaatttcgaggagggcgactacatctggtcgatgccctgctcccacactttccatcagctctgcatcttgggcgaccgctcctgcagggtctgtcacccggctgctcccccatccacggaggagaaaccggaggcccctcggactgttaattgattgaatgaattctcgcggaatcagtgcttgtttaactgatcaatgtcgtggcgtgcaacaaatctgcatttctctgaaaattgcaacaaacctgctactctctgaataatctgaattttttgtctccagttttcctgggaatcccttatggaatatttctttttgtctccagttatctgtgaatcccttatggaaatttgtaaccggatgtttaaattcacatagttatatatatttacttctgctttcacaaaaaaaaaaaaaaaaacccgcggcc

SEQ ID NO: 22539 - DNA, 2502 bp, Oryza sativa
  Clone ID: TF_OsC37567_1
ttaccccctgcttctgcttgcgttcgcgcacgcatggatcccacaaccaccacgacagattccgagtgcgacttcatcaagaagatccctagttggatgataaggaattcgccaatgcattgtatggaggccggccactttggcaaggatgccgccgccgccgccgccgccgccaccgcggacgccatggaacatgcactcccctgcagcgatcttcaccacctgagagtgggcaagacggcagagcagagctgctcggtgtgcctcaagaatttcgaggagggcgactacatctggtcgatgccctgctcccacactttccatcagctctgcatcttgggcgaccgctcctgcagggtctgtcacccggctgctcccccatccacggaggagaaaccggaggcccctcggactgttaattgattgaatgaattctcgcggaatcagtgcttgtttaactgctactctctgaataatctgaattttttgtctccagttttcctgggaatcccttatggaatatttctttttgtctccagttatctgtgaatccctctcaaccttctcaagcttctgttttgcttgagagagtatgtcatccgcattacttgttgtagacataatggtaagattttctatggaagccccatgttctagcaccgcggaagcaatagcaatttcagtttcgcctccaccatagtcaaacaacttgagaacttgtagatgtgactttaggcaagctatgtctttcaatgcagatgaccaatcatcagaatgaacgtcacattcctcctcaaagtataccttatcttctctccaaaggacaagttctttcagttctgtacaagatctgaagaaattcaacaatgcatgtctgccctttctctctttgaaagcaatactcagctcaagttttctaagacttgtaataggcacatggcccacatctaagtaaacattgtcgatgcttctagtctgacttgacaagttgaaccatacttctcgaagcataggagctccaagaatacttatccatgtggaagacgatgtccgacttgagaaagatttcattccctgtgctgctccaataatgaccttctcaagttttggtgcccattgaattgtaatgtgactaacactggaccgccaaatttggaggaacttaaggctctctgatcggattcgctcctttccctcactgaacatgccaatgtcaagctccctaaggctgacacattggcaaactagagcaaacaaattctcgtcgcttattctgcagcatgccaaatctatgacagcaagacttgaaacatgatcgaggtacatatcagggatgttgaaaaagcagagatgcagagtcctaaggcttgagcaattaagactttgaagtgggaactcaatagggtgggatggccattgacagtttgccatcaccactgtctccacatttttctttcttagaacatcacaccactcctcaatcttctgttgagcaccattgttgatgacagatgaatcaattctgaaataactaacagggccaggatgagagaggagaatcgatgttattttacctgacaagtcgattctttcattgggcatgccaccttgatctttcattgcacgaacaaggtccagatcatgaaagatgagaggttttcccagccatagttcattccaaggactagagacaactgatccatgtagagtgagctctttgccaacctcaaacgcgatcatcccgtcgcttccatccacgctgctgggaagttgctgaactgagctcgaaccggctccctgatcctccacgcatgcatccccatgggcttgaaccgaagcagcgacatagccatcaccggcgcggttcccctcctcgagcctgcggccgcggccatcctcacgcgcatcgcggcggaggcggacgctacgtccctgatcacgcccggcgccgatgcgtagttggtgggttggtgcggcgtccttgcgctggccaacgcagcgcgcgtccccaaatccatagccgcgggcatcctcatcatgcgcgctgccaccgctggggccttgatcaagtccaccgaggccgcatgcttggcctcgcgcggcatgcctcccctgatcgctgccctcgaactcgaacccacagctatggccaccttcctcgcgcgcgacgcgcttacttccactgatccctgttgctacggatggtgcggcgcccatggcatgcctgcggccgctgctgctgctgctgcttccgaccccaaaatcgaatgcatgttcgcggcggttgtccgcgacgccgctgctggtgccttgctgttgctgcgtcgcctgcgcttggccgcctccaccgctggcgctgggctcgcgattctctcccaaaacttggagtccatggctgccgaagcggtagtacatggttgaactcggagccctcggaagggagccgagggcagcttgtatagaagcgcgctccccggggtgggcggtggcgaaggccgccat

SEQ ID NO: 22540 - DNA, 2988 bp, Oryza sativa
  Clone ID: TF_OsC382714_1
atggcggacacggggagcctggagaagatggggcgagagctcaagtgccccgttcttggcagcctgagccttctcagttcggcggtatccatctcctgcaaccacgtcttctgcaatgattgcctcacggaatcgatgaaatccacgtcgagctgccccgtgtgcaaggtcccgttccgacgacgagaaatgcgaccagcacctcacatggacaatctggtcagcattttcaaaagcatggaggctgcagcaggtaccaatgttgtctcaacacaggaggctcctgtggtaaaacttgcagatggatcagattgtgtcaacagcgggaaaaattccaaaaggtcacaaaaatcattgacacgaaaaaggaaggtaacatccgagatggaaaaaaatacagcaaaggatgctacagcttctgcatcccaacctactacaaagccttccttctctactaacaaaagaatacaagtgaaaccattccctgaatctgagacaccaataagagctgagaagattatgaagcctgaagagccaaaaaataatctgaataatgatgttgaaggaaagaataaagcagtggcatcgggtcaacctggaagtccttcattgtcaccctttttttggctaagggaacaagaagaacaagaaggctgtaccgctgagacgttaagtgaaacgcaatctttagacacacccttgcgtcataatgcaccctcttttagcgatattaaagattctgatgacgaaatccctttaaatacaactccaaatagcaaagctgcggctacagaactctttgacagtgaaatatttgaatggacccagagaccatgctctcctgaattgtattccactccattgaaaaagcagagtaaagctaagagtaaactagatcaaattgaagagaagggtgatgaagaagatgtgcatattggtggttcatttgataagctgggtaatgcaagtaatgcagctcagcttgtcaatacaaaagcaacaaagcagaagagaaagaaaacaagtcccagtaacaaaaacagtgcaaaattgtccaatcgtgctgagccctgcataaaaaagtctgatgccaatcaacaaggttcaaatagacgtaaaagtgctgccctaaaatcttgtcagaaaagcagcagtgctgtagggaggaatacttcaggtagaagaaacaaggcctctagcaacagcaagccaattcatggctctagtgataactccccagagtcatatcttcctaaggagggtttggatgttgaagcacctgacaaacccctttctgaaaggatccaaaacttggagaaaactagtcgacgaaagggaagtgcaaggaagctggaaatggcagggaaaactatttcagatactacagagaagaatagtgagccaagaagtaagagagtcagaagaatgtctgaccacgctatagctaaaccggttgaagttccttcaggatctggaaatgaaacagaaataccacagcttcacaccctcacaaaaggcagcattcaacgcaaatcctccaacgctagaagacatagcaaagtttgtggagaacaggaaggtaagaataaacttgagaacacgacaatgacacctattattttacatgggaaatgccaaaataaagaggcagtatgtacagctccttcagtaaggactgcatctgttaagtacaagcaagcaaaatttagcgaacaaccagattgttttggaacggagaactttggaaaccttcaagcatgccctgcacgtaatgttttactgaagaagtgtgaggtatctactttgaaggtttcctgtgctttctgccagaccgatgtcatcacagaggagtctggagagatggttcattatcaaaatgggaaacaagtccctgcagagttcaatggaggagccaatgtggtgcactctcacaagaactgccttgagtgggctcctgatgtctacttcgaagatgattctgcctttaatcttacaactgaattggcgagaagcagacggatcaaatgtgcttgctgtggaattaaaggagctgcacttggatgctttgagatgagttgtcggagaagtttccacttcacctgtgctaaactaatcccagaatgcagatgggataatgaaaattttgtgatgttatgccctctacatcggtctacaaagttacccaatgaaaattctgaacagcaaaagcaacctaaaaggaaaacaacactcaaaggaataaccggcttttccaggtcatctcaaataggatccaatcaagattgtggtaataactggaaatggccatctggatcaccacagaagtgggttctctgctgctcatcactttctagttctgagaaggaacttgtatcagaatttgcaaagttagctggcgtgcctatttcggcaacttggagtccaaatgttacccatgttattgcatcaactgatctctctggtgcttgcaaacggacgctgaagtttctcatggcaatcttgaatggcagatggattgtctccatagattgggttaaaacttgcatggagtgcatggaaccaattgatgagcacaaatttgaagtcgctactgatgttcatgggatcactgatggtcctaggttaggaagatgcagggttattgacaggcaacctaagctgttcgacagcatgaggttctacctccatggggactacacaaaatcctacagaggctacctgcaagatctcgtggttgcagcaggtggaatagttcttcagaggaagcccgtatcaagagaccagcaaaagcttcttgatgacagctctgacctcctcatcgtttacagcttcgagaatcaagatagggcaaaatccaaggccgaaaccaaggctgctgatcgcaggcaggctgatgctcaggctcttgcttgcgcttctggaggcagagttgtgagcagtgcatgggtgattgactcaattgcagcctgcaatctgcaacctctttga

SEQ ID NO: 22541 - DNA, 442 bp, Oryza sativa
  Clone ID: TF_LIB3432-023-P1-K1-D7
cggacgcgtgggtttgtgatgctctgcactgtaggaattgctagcattgggagatagaatgggcaccgtaagcactggcctttcagaagacgcgctgtccaagtgtctagacagaagcatgtacatggccactacttcaggaactcatgaagattgtgagagaaaatgcagcatatgccaggcaagttcatttgcatgagtagattgcgcatgacactgtttgcagagttggattgtactgactactatgtacgaaatctttctgtgtgcattcttcaggaggaatattcagatggtgaggaggtgggcaagatggtctgcaaacattactaccacttctcctgcataaagaactggctccggcagaagaactggtgtcccatttgtaaatccgtcgctctgaataccaactagcactagcagggtgcttcttcagaaacca

SEQ ID NO: 22542 - DNA, 1862 bp, Oryza sativa
  Clone ID: TF_OsC45320_1
gcccaggtatttttttttttttttttttttgatagggcgatacaaaacatctgtgctgttcttttcttatattatatcatcaataaatatacagtgggataacattcacataacacggcagaggcaacaaggaaccagtacttccgagaagtttcgtctccgtggtgcctcagggcttaagaggtggccatcttgactcaaagaggtctccgcccgtggcagacacaagaaacatatacaacttgaaagtatttattctgtgtcgcagcaaacctcaaatacacaccagttaccattcattctggagcaactcccttccatatgcatcacagagactactggagctgatcctcgttatggatagtacatatatcctgtgagtgtgctcttcaaagaaccgtgcatatcacttgtcatccagttgtttttgtagaaagtcgagaaccgagagacgccgctgctcaagactggcctctccagattccagcttcaaattctcaaggcatttaattgcttcctcaaaaccctcaactgccatgctttcgttcccaagatttctatcgacatccgcaactttggcaagagaagttgctacatcaatgacctgggaagccacagctgagtgttcttttactgcacttctgcgaacgtccaacgaacgcgcataatagcttcttgctgagtggaggtccccatcataatagcaaagatctccaattttatttagtgaaactgagagagtatggaccaactccagatcctttttgggcaatttcgagaggaattcagcactttcttcatagtaagtgattgctgaaggagcatctcccaaggtccgacagcagtccccaagcattcctaacacagctccaagttgagaacacagttcttggttgtcttctttagatttcaactcttccctgatgtcttctgcacacatactgagccttgactttgcactttcaatgttctgtgcgcgaaaagccctcatcgcttgctggaccagaaaagctcctctctccatggagacatgctcgtaaatgaccttggtcttgtcacttgcggcttcaccatcgcctgcagcatgtgatctcttgattcgggcatggccatcaatgaagcggtcgacaaggccttgaagctcatcatcaggctcgatcccttggatgtcagcaccacacaatggacagtccttaaagcgcaatatgcatgccttgcagaacttgtgcgagcacggggtgcatttgctgctttgatgtagcagagcgtggcagaccacgcagctgagtgggccaagcttgaaggtgttgttggagtcatagccaaaggggcactttgctggcaccacacgaggatcggtgttagcattgccagttttttcattatcgtcgtcgtcggtgtgattgttggctgtgacaggacatgaggtggttttgttgtctgattttacggggcatgtggcgccagcagaggcgagtttggcaaacgggcatagagagctcataatcggttggtcttaggtggattattatttaccttctcctccccggggggaggggcgcaggctcgggcccgcggccccggccgccgcgccgccgggcggccgcggcgccaggctgcctctgagcggcctctgcgctgggagccgttgacccgcccctgcgccgctgctgcctcgggagatgccgagagggagagggagagggaggaggaaggcggagacgacgagaccgaggaggcacggccacgtgaagggggccggtggcagcaggcggatgcgcgccggcagaggtaggcctcgtgcccgtgccccgccgctgggggtggggcgacgctggggcctcgtgctcggcacgcgtcgc

SEQ ID NO: 22543 - DNA, 650 bp, Oryza sativa
  Clone ID: TF_LIB4309-027-R1-N1-G2
cagtcaaaagaggtgggattagattaataatctatatgagtaactgccagtgtctcttctgttcagttcagttcaggacataaatacagggaaagaacttacaatgggcagccgctctctttttactccagtcctacccatcgcaaactctttccatcttttttttaacacgccctttgctgctcgcgctgcggccaacagcaaggcaacaaatatgccaccctgtagtagatcgatagatacacaagaagaagacgagagaggacagacaaaaatggaagaagaaaaagaatgaagaagaagcagcagcagagctcttgtttcccctttttcctgaacaaagcttcgtgcagcaaaacttcgctttttccatcagttttattcccttccctactgtatttccacaactttacattactgaatatgcccgaaccacctccgcgatcggcgctcggcatagtgggcatttgccaccactgcgaattagctcgtttgcacattttgagcaagtacacatgtgcccgcatctgtataatagagaatcaatttgcgcatcggagcatacgcaacaggttcccttcctcactggatcccattttgatccatcgtcagatagatccgtcggataccctttcaggtcctgcaaagcg

SEQ ID NO: 22544 - DNA, 534 bp, Oryza sativa
  Clone ID: TF_uC-osflM202026e07b1
gtctactcccgccatggcgcggcacacggctcctggtgctcgccgtcccaacccacgtctcaccagacgacttcgtccgcttctgcggcccttacatcgagcacgcctccgatatccatgtcgtcagggatgatggggtggaggaccggtatagcgtgctcgtggagtttgaggatcagaagagtgccgatgggttctacttggacctcaacggttggaggttctcgtcatccgaggtagaggtttgccatgttctgtttatagttgctgtccaatatacaccatcaaccaagcctgcggtgactccaccagttggatccactgagctcccaacatgtcctgtctgtattgaaagattggatcaagacatcagcggaattatggcaacgacttgtgatcattcgttccagtgttcatgtgtttcaatgtgggtcaattcatcttgtccggtttgccagttttgtcagaagcagtctaagaatcctacatgttctgtttgtcaaacctctggaaacctatggatctgtataatat

SEQ ID NO: 22545 - DNA, 6299 bp, Oryza sativa
  Clone ID: TF_OsC34959_1
atggccgaggaccacgacgcggaaggggtccggatgacaggcgagggcgcggccgacggctgcgacgcccacagcctcgccggcggagaggaggagatcggcgaccagcgccgccgccgccgcgcttcctccacgcaccggccaccaccgcctccaaggggatatctccgtgggcggtggccatcgtcgacctcgccgcccttagggccctccacgccggcgcacgaagggctcgccacggaggacgagcggagtggagctccagacgcgccgccagcggtaggcgagcgcggtggtgcgagtcgcgtccttgacggggaggcgggcgacgcggaggtcgtcggggagagtgctaacgctgtcctggccgtcatacccctcggcggcggaaagcgtggcaccgatgccggaggcgggatggccgaggaaccaccggagacggcctctgacttggaggcggccttggacgtcgcgaggacagcggcgagcccctcgacggaggtcgccatgaaggtcgtgtcgctgtcgcacgacgcggagcaggggatgaggcagttcgtcaccgaggtcgtcagcgtcggccgcttccgccaccgcaacgtcgtgccgctgctcggctactgccgccggagaggcgagctcctgcttgtctacgactacatgccgaacggcggcctggaccagtggttgcacggccaggttcatctaagaagacgttgtcctgtccttcgggcaaccatatacctgcaacgatgtctcggaatagcttctagtccactccagcgtgttgccggcatgctgggtgataacgcctgggagaggatccagctgctgtggaacttccaagaggatgtccaagatatgaagagcaagatgactgacctcaaggttgcacttagctatgcagacaagcactctagagagactgacgacgacgcattggtgctacgacattggctcaacaagtacaagtctgttgcctacgacatggaagacacgttggatgagttgttgactaatgcgatgatatgggaaaataacccatgcacggttaaattgttcttctcatcaatcaacccactcattgtgcgcatcaccatgtcaagtaagatgagaaatattcggatgaagttagataagattgctgaggaccagaagaaattcccctctatgcaattggctaacccaactggacaagacagtaccgataagtggagagaaacctttattggtcacacagacgaaattgagatggtagggagggcaagagagaagaaagagatattaatcaaggtgttgcagaacgatggaggccaagaaatctctatcattcctgttgttggccttggtggtatgggtaagactacattggccaaagctgtttacactgacaaggagacacatatgtttgatgtgaaagcatgggtccatgtctcaatggaatttcagctaaataagattgtgtctggcattatatctcatgtagagggcagcactccagctaatattgctgatctacaatatttaaaatctcagctggatcgcatactctgcaacaagttatatctcataatcctagatgacttatgggaggaagggtggtctaagttggagaagctgatggaaatgttgcaatctggaaagaaaggaagcaagataatagtgaccacccgtagtgaaaaggttgtaaatacattatctaccattcgtttatcatattttcataccgttgatccaattaaactggtgggtatgtcaattgatgaatgttggtttatcatgaagcctcgcaatatggaaaattgtgaattctctgaccttgtagacattggaaaagaaattgcacaacgatgcagtggagtacctctagttgctaaggctcttggttatgtgatgcagaagcaccgcacaagagaagaatggatggaaattaaaaatagtaacattctggataccaaggatgatgaggaaggaattctgaagggatttattcaagatactgatgggcaaccacttcagaaggttgctatggaatatgttaatgaattattggggatgtccttccttacaatcttcacttctcctacagtgctggcttcaaggatgttattcaagcccacactcaaacttcatatgcatgatatggtacatgagcttgcaagacatgttgctgaaaacagaaatactaaaagggacaatttgaatttccactatcatttattgttaaatcaaaacgagacatcatcagcctataagtctttggcaacaaaggtcagggccctgcattttaggggatgcgataaaatgcatcttcctaagcaagcattttcacatacattatgtttgagagttttggatttgggtggacgccaagtgtcagagctaccaagttctgtttataaactaaagctattaagatatcttgatgcttctagccttcgtatctcaagcttttctaaatccttcaaccatctattgaacttgcaagccttgatactttcaaatacttacctaaagacattgcccacaaacattggttgcctccaaaagctgcaatactttgacctatcagggtgtgccaaccttaatgagcttcccacctcttttggggaccttagtagtcttctcttcctaaacttagcaagttgccatgaattggaggcgcttccaatgtccttcggcaatctgaatagacttcagtttctgagcctatcagattgctacaaactcaactcactgccagaatcttgttgtcaacttcatgatctggcacatcttgatctgtcggattgctataaccttggaaagctcccagactgcattgatcaactctctaagcttgagtatttgaacatgacaagttgttccaaggttcaagcgttgcccgagtctctatgcaagctcacgatgttaaggcatctaaatttgtcatattgtctaaggctagaaaatctgccctcatgtattggtgatttacagcttcaaagtttagacattcaaggctcctttctccttagagacctgccgaatagcatttttaacatgtccacacttaaaactgttgatggaacattcacatatttagtatcttctaaagtagaaaaactgagggagaatctgaaattggaaggctgttgtaagctggatggaggaagcactgacctatgcagtcggattacggaactaaaaaagacacactgccatgaattagagatacaaggtcttgaggattttaagcatttggaagggatagagcatgctatacttctcaacagcttgaagcttacaaagttgattttttcatggcaaccgaagcagtatacaaatgaaacggctcatcacaaaacggtgcttgggatgctcgtgcctcctagaagtgtccatcaccttgctatcaaaggttattgtggcatcgagttacctaagtggatgttggatattcgttcctacctacctcatcttaccaccatctttctgcacggtctgatggaatgcaaccgcctccctccacttgggtgcctaccacacctgagagcattgttaatgaccaaaatgcctaaaatcaagagtgttggtccagaattttatggagactacggaagctgccagaagctaagaatgattatcttggcttcaatggacaatttggaagagtggtggacaactagatcatctaaacaagataacgaattatcattaatccctgatttacagatgttgtgggcttccgattgtccaaagttgaaattcctgccttatccaccaaggagcttgacatggttcatagagaatagcaatcacgtgttgccagaacatgggtttgggaaccttacatctgctacttatccacttcatctttccatcgagcgtgcacccaattctcgcgaaatgtggcgtagggctcagcacctttcttcaatcgagtctcttactctcatgtctatagctggccttagagccctgccagaggctattcagtgcttcacgtccctctggagactcagtatattgggatgtggtgagttggagacgctgccggaatggctaggagattatttcacttgtctggaagagatttcgatcgacacttgcccaatgctgtcttcactgccggaaagcatacgacgcctcactaagctgaagaagttacggatcaccaactgccctgtattgtcagagaagtgccaaggagaggacaggcacaagattgctcatattctagagcccatattcctgttggctgatactgttagcagggttcttgtaacagcaaactggagatctaaaccactggatttccgttggcacttgtctctcttgaagaaacgaaagggttggctcagttgtcgttcatcactctcagtggctgcttaccaggctggattaaatctcgatatctgtttgtcagtaagacaagttagcagatggggatcagagaagttcagaactggtggaggtgctcatatccgcgagtcagtaccacctaatcatatggaggattatccaagtgggagatcaaaagcagctattggatttctcagaagaggtggtggtttctcttcgagaaatcaaagcactgaagagaggaccattcagaactatgatggaccaggaatcaccacaagactcaatccgatgaaaaccaggctgtctgataatcaggagagaccaagatacctacgtgactcattcagatcttcaacctcaatggccattcatggaagctcttccaaagttccgcttaggaaattcggtgacgaaaaacgaaggcaaacgttgttggcaggggtagacattgctgaaagtagcagcagaaatgctgggggcaaacatctggagggtagtaataagagaatcgttgtcgatgataggagttcagatgttctgcatactgaaacagaaggcttggctactgaacaagaccaattgatagcacccaatgctggagtttctgattctgctagttcgtcagatatttctgaacatgcagttgaatccttggtaaggagtgctgctccaagttctagaacccgtagacagaaggacaaagaattgaatttgggtcaatcaggagtttgctcttcgtcatgtactaacaggcctactatatcaagatatgctcctgccgatgtgaagcgaccgtgtaatcatgctagcggagtacaacagcatggtcataacaatctggactgtacttcagtacctaattttctgccatcaggttgctcatctggttctgtttatagcaggaggtttgatgcaatgagaaaaaggacttctgatgggggaagtttttctagatcaaggggcttaagtggaacggctagcttagacgattcacctcctgcataccctgccattgctggtcctagaatcagaacaactacaactgaacgggcttcacaacaaaatgcactaagaagcagaaggaattttcaggattcagcagtgtcagtaaggacaagaagacctccttggggtgctaggttcaggatctctgaggaaagagaggatggcatgatttctcagcgtgattcttccatagggaatcaacagtcagatcaggtgcattcatcttcggaagaggcctctacagagagctcctcaagaccattctctgcagaattacctcatgcaatttactcatctagaggagagggatcaaatgctttcactgcaaggagaagaagatcaagctccctttatgaggaaagacctccacagacattccatgatcttttcagagaaagaaatggccgaagacacatatccatagaaggaattgcagaggtattactagctctggacaggattgaacaagaagcagaactgacttatgagcaattgatggtgttggagacaaatatattgcttggtgctttcacctcccatgatcagcatagtgacatgcgcatggatatcgacaacatgtcctatgaggaattattagcattaggagacagaataggctctgttagcaccgctctttctgaggagcaatttgtgaaatgcctcagaagaagtatatatataccagtggctacaaaagcaaacgcgcaagttgtagacgacatcaaatgcagcatatgccagggagtctactgctactaagagggtgaagaagttggacggctgggatgtgagcatcagtaccatgtgtgctgcattcaccagtggctcatgcagaagaactggtgtccaatatgcaaagcttcagctgaaccttctactgtgagctaatcccacctgggagattcaagcctgtaaatatttatcatggatttggcgtccatcttttt

SEQ ID NO: 22546 - DNA, 2387 bp, Oryza sativa
  Clone ID: TF_OsC88477_1
ttttttttttttttttttctctctctcccccccggccctcttctctcgcaatcgcatcgcaccccctcccccccgagcttgactccggaaaccctaggcagcccagccatctcagctctcggcgacggcgaggcggcgctcgctgggggtgcggccgcggcggctgagcttttgccagatccggaccaccgcccccagttccggcgccgcggcggcggcggaggcggaggcggaggtgtgggagtcgttggcgattcggccccgggggtgggtgggagagggcgccgctctgatcggtgctccgactccgagtggttctaagctaggaaggatgatcatgttacgttttgctcaagattttgcttcacactgataagatctcagcatttggatgattaacgcatattgaattctttctcaataaacatgggagctaattgctgtatagctgcaaaagagaggcctcagccatgtgttactccaattgaagtgtcagcattcaggaacgtaagacactctccatcatggagcttccggtgggataaccgcacacacatagaagacataatggaaatgcccgcattgttttccaaccatagtagtggaagcattcggcctgaaacaaagagtggctcaattgcgccaactgatggcttttctaacggaggcagcccttctgatatgttcaacaagctcaagtgccataaatctgacaggaagagggagtcatctaagattgcgagatctgaccttcgagcaggtagatccaccacaagcaattcttcccctgaggcaaagctttccagaaaatcgctagacacagtaagtgtggcttcagattcgaagatgtcaatctctgttccttcaacgccgcctgctatatccagagcagatccttcatcatcctccagggggcattctctaccaacagatgcagattcaatgaggaaagcacgtcgatcaccagggtatcaactgtatagacaggtctccgacagcaagattccatctctcaggtctctcaacgagggcgcctctcctgaaggaaggccatcctcctccatgctctcagtctgcagcaacgatttatctgcagtaggatcacatggcgagtcatctgatggttggtcaatgcgaacattttctgaaatggtcgcatcatctcagagagagagatggtcagttgatagtgagctcttaggttctgtttcgagtaaaatgacaagatcaaatgcttctaataatcctactacacattcacctgaccaagaggtgtgcaagctatgtttaaagctattaaaggaacggtccacatggaatgctcaggaactggctgttgttgctgttttattgtgcggccatgtttaccatgctgactgtttggatagcttaactgcagaagctgacaaatatgatcccccttgtcctgtatgcacccatggtgagaaatgtacagtgaagctatttgggaagttggaatcaaagacaaagaacaagatacctaaaaatgtgatagttgatgttaatctagatgggagctctaagcatcagaaggaaagtaggagagagcccagattaggcacaagttctagcttgaagggctcgtttagtcgcccgtttttgagaaggcatttctctattggctctcggccatcccagtcaatttcagagagcgagtctgccagaaagaagggcttctgggcaaggcactggagggaatagcataactgccagtcatcatcgagaaatccctcttgaagaggagctgtactcccaagcgagagcaagcatgcgggagctgaagtcaagccgaatcggtgcaaatgatatgacatggctgttgaacgacctccgcattgaaggtttctcctagccatagtcatattcggccgcaagcacttgtcgtgctggaaagggtctcgatagtagaataacagttgatatagtatactatgcaactgaggtttatttcagagcccagtcgcagtttagtagcgagtaatctaacagaaaaaggggatgatggccttcagagttgagaccgaaggtccattgctgtgttgcaaggttatatataatccagcgtcccagcaatctagttactatgttttgtggttttgtattattggttatgtgccccctttattttatggttgcaaattcatatagtttgggaacttgcgtacatatttggaatcttaactcgggagatgctatttattcatgacaacgcatcacagaaggcatgtaacggttatgtaatgttgtttgtcatcttcgcagacgtggtaatatgatggtcatgcatgtttttaacaaaaaaaaaaaaaaaaaaaactgagactagttctctctccctcgtgccgattcctcagcccgggatccac

SEQ ID NO: 22547 - DNA, 1886 bp, Oryza sativa
  Clone ID: TF_OsC84895_1
cttattgcatggcatcatctggcgccgagccgcgacacgtcacacaatagtttttatcttttgttacatgccaaaatttgattgatcgatatatttcttttttaaaaaactattgtaattacatcgtctttgattctgacatttgcttattctgacgatgagagaaacaaatctgtacatcaagaagagaagctctgtatctatcatatctcagctactcaagtaactagccgtacgcccggtcccaccgccatcgccggcgacgagctcggtcgccgtcgccggcgggctacgggtaggggtcggtccagcacacgtccccctccgccgcggccttccaccgccggttgaatatctgcagctcggtgtacgaccgctgcctcacggcgagccggtcggtcgccgccttcgtcgccgtcgacgaaccgcttcgccgccggcttgccgccgccgtcgccgagcgtggggatgccgcggtggaggacgtactcgctgtcgacgatgccgacggcgagcctccggtcgccgccggcgcagtacccgagcttgaagtcgaggccccacgcgtagatgaggtcgttctggatcatgtgccacgcgcaccgccatgccgcccgcgagaacaccggcaccatcatctccacccaccccgtgcatggcggccccgtgctgttgtcgtcgcatctcccccctcccctcgtcttgtagaatctcctgtgaacttggcctttgcgggcgcggagtgtgaggcggtggtggatctgggagcggtggtcgagcgcgggctgggagatctcgaggcgttcgcggcggacgacgcggaggtagcggatggggtcgaagccgtccacctcgatgtcctcgtcccagaggaagatgtactcatactcggccaccatgtccgggtgtaagaacctcttcccgaaccaccatttcgtctggtccttcgccgccacgtgaatcgcccggtccgaccacccgagttccctccacccgtccatctcgccgtcgtagtggaacaacatcaccgtgaacctgtcaccggggaacttggagacgagcttgtcgacgacggccttctgctttatgccgacggggatggcgaggaggctcttcgccggccgggcgacggcggcgcgccgttcggggttgccgccgagcggctccatctcgaagttggacttgtcctgcacgatgcccttcggcaatggctcgctgcctgaaggcctgcactgattctcgcagatgctgctgccggcgagttccgctcgctggacgccgccggcggcggcgccggtgcctgcctcttgcacctcgctggtcggagccctcgtctccgtctcttgcacctcgctcgtcggagccctcgtctccgtctcgcttacgaccatttctctcggccgtaactccttgtgatcaagcgtgacgattgcaccgccggcgaacaccagcacgaagaagatgagcgccgccggcggcgcgacgccggagaaccgcttgcgcggcgtggcactcggtgcagccggtccctctgcgtcaacgtccgtgtgcccaccacggcaccaccacgtcttcttcttcttcctggcttcctgctcgcctgcctgccctctagttatcgtggtcggcgtcaacggaatggagacgtgtgtgttgaacggcgccgttgggtggatgatgcactgcgttgttgctgctgctgcgcgtgtggtagacgccccttgcttcgggtccgcagaagggagatacacgcggtggaagttgttcatggtcagcttcctccggcaggtagggcacttcttctgagcctggattgaggccttgatacactgcttgcaaaaaatgtgaccgcagatggtcgatgacggttcgaccagctcgttcat

SEQ ID NO: 22548 - DNA, 1657 bp, Oryza sativa
  Clone ID: TF_OsC74850_1
ttttttttttttttggatgctaatagcacaaaaagtttcttataaaccccaggtgcttcaattgcatccagtttgaagaatttggctgaacataagtacgtgctagccagatctctcacgagtctcttctgtgatttgcaaagtcaaattgttctgtttaccgccgcgtgctgcttctgctgcctcgtcggcaccctgggcggagcattagtacgtgcttgctgcgtcttttatctctcacaacagtgatatgcaaagtcaaattgatgtgtatacagtggctagtagcttcagtttcgcagcagtgacatgaaccgagtttaaaactataatatactcttagtcataacaacagcattggataattctgccatgttatgagccgtctgatagtgaggcatgaaacatagaattggtaccaggcttgcgattataaccgacaaaaaacaaacctcccacaacctttcctgctattggtgtgaagtgtctccgcctttcctctgccattgttgcctagcaggttgcccttgcccatgtggttgtcttcttgaagcatgagatcgatgtctccttcgatgacctgaactgctgttgtgcttggtggtaccaccagtgctgtttgtctggttgagtggctccgttcctgaggttgaagttgtggtgtcttcacaagaatcatcaacggtgtctccttcggaagcagtaggcgcgctgggaggacgagggatgtacattccaggctgtatggaaaggtctttctttggttcaatcaggccatttcgttcttgttgtagattgaacagcgatgcgaacttttcttgacggatcttctctgactcagaatgaagtacttctttttcatcttcgtccagatcaatcgataaagatgccagttgagaagtatttgcacctagcagatcacgaacatgctcaatatccttctcatcaaacactttgcggcaaactggacatagtcctttgtgctgacttacattgtgatgcttagctgagctggacaaatccaatccttcagaagcatgaataacttcagtagttgctgctgtactactcttcttcgagtcagtatcatcattctgtagccattcccaccatctcataatgcagtcactgtggaagcagtggtagcacgacatcaacttcataaatggcaaagcagaaccatcattctctttgactaaaggatatagacaaagtgggcaatccccagctggatgattcatatttgagagcatctccacagcttcctcacacagcgtcacaagcatcgggtagcaggaaagttctcttgccttgttctggatgctgctaataagatacacctgtcgattctcatcaaggcccttactttccacggcataaacatgaggaggtgcttttggatactgagaagatgctttaattccaagaaatagctccacgaactgctgcgaggagtcgtcggcggtgcgggggcggacgtggacgacgaggtggggagggaagccgcgcaccacgcggcagtcgtcgccgtacaccgacgccaccgcctccacctcctgccgcacctcctcctccgcctccgccgccgccgccattgcttcggtgaagattttccttttttccctcgccccgttctcctgctgccccggctttttac

SEQ ID NO: 22549 - DNA, 656 bp, Oryza sativa
  Clone ID: TF_OsC116722_1
cgatgtaacaagaaagatgattttgactgtgcttcaaacttggtagagtgggggtacaacagctgcgaactaacgcatttagccatagcaaataacaaagctgcaattagcaaccatagtgccactagcataacaagactgaatttgctccagactgttcacagcgaaaggggatgcttgaaacaaaattttcaggttaacataaataatatacaacagcagctaagatattttgaggctagtagttctttggggcaggtttcactaaacccagtccagaaccactccccaaatgcttgaaatctctcgcctctagacgctcatcatgggcagcgaatccagttcctcctttttccaaaggaacgaaattcctctccttgcacggtttgttgcacaccaagcagaccttatcagttacaaggaacttgtcagagcacttcttgcagaagacatggccacacgtgctgatcgtcaccagggacatggtgtttgttagggtagacttgcaactggggcacatgtagctcttctccaccgacttcttgtttttctggtcggtgttttcttcagtgaaggagatagggaagagcgatttcaacttgagcttctcctgtccctcggggcagattgtgtcagtggagggagcttctactttg

SEQ ID NO: 22550 - DNA, 517 bp, Oryza sativa
  Clone ID: TF_OsC57414_1
cccgggctgcaggaattcggcacgcgcgtggcaaacccgcgctctctctctctctctctctctctccccctccctgccgctgctgccgccaccgccgcggcggcgccccgattcggtgatcccccgctcgcccatctccgccgtgacgtatcggcgacgcggagggagccccccaccccccacctccggatctagggtttcgaggcccaggtggcgttgcgctgcgcccccgctcctccgcctctcctccgccgccgagggttcgcgtgaggtttctgcgtattaccagctctgtacttaatttactagtgagaagcaaaatgaagtgcaatgcttgctggcgggagttggaagggcaagctgtatcaacaacctgcggtcatcttttatgtacagaggatgctaagaaaatactgagcaatgatgctgcatgcccgatttgtgatcaagtgctctaaaaagccatatgagacctggtgatacaaattcaaatgatgattggacacatatgtcaatg

SEQ ID NO: 22551 - DNA, 457 bp, Oryza sativa
  Clone ID: TF_LIB3432-009-P1-K1-C1
atttgactcaacaaaagacatcagtgcactgcactgcggacacacgatccatctggaatgcctatacgagatgagatcccatcaacaattctcttgcccggtctgcctgaggtctgcttgtgacatgtcccatgcatggcaaaagcttgatcaagaggtgcattttccttctcccattgcacagcttatccattgacactgaccatgtacatatacatacatacatacatgcatagaacaccatccaaataactcttcactcaggttgcagcatcgccgatgccagtgatctatcagaagaaaatgatatggatcctatgcaacgactgtgggacgacatcgaacgtgcaattccacatattgggacacaagtgccccggatgcagctcttacaacacccggcagacaagagccgcccctgctgccgcgtgctccagagtctgaattctgaagaaca

SEQ ID NO: 22552 - DNA, 1163 bp, Oryza sativa
  Clone ID: TF_OsC252488_1
atggcaatggaagccggagcaccgcggggagccgccgccaccaccagcggcggtggcgggggcgcgccggaggcgggggcggagctggggagcagtggcgcgccggtgacgtgggggcgggtgtggagggcggggcaggaggcggcggcgcacgcgctgctgctctgcttcaccgcgctcctcgccctcaagctcgacggcctcttccgcggctcgtggtgggtgctattcacccctctatggttgttccatgctgttattgctcgatgtagattttcgttacctgctccttcatcaccacaaagttgtcagatggcttcctgccattccattgttgccacaccattgctagttgcttttgagctgcttctatgtgtttatctggaaggtcatgatgaaccttttattgatttaaagcttgtattccttccactattagctttggaaatcattacacttgttgacaatttcaggatgtgtggtgcactaatgcctggacatggagagactatgacagatgaagcaatttgggagaggcttcctggcactccatctaacgcaaaatttttcccactccgagctgttttcttacctatacttttgcttcaagtgactactgtatcgtttgctatttggatattctttgaaaggcttgttacaaaattacgagctaaaaagatcactgacggatatatttctttctcatcaaagattgatgaattgtttatgatgatgcaacatggttcaaggctcatcgcttggtggtctattgatgaagatagcaaagaggagcaagctcatttatgctatgcaaataattctgggtatagtaccttttgcagctatccaccagagatggtaaaagagatgccgaagaaagttcttgacaaagaggtgaaaaaacgcaagataaaattttaggtgcaatcctaaatggctaagcttagtccactgcagtgtgataagctaaaaaatgcactgatcctatgtcggatatgctttgagagagacatttgcatagttctgcttccatgccgccattatgttctttgcgaagcgtgctctgataagtgccggtcatgcccaatttgtcgagtgagtattgagaacaagctacctgtttgtgatgctatgagttcagctgattcaataagtgatacagt

SEQ ID NO: 22553 - DNA, 2115 bp, Oryza sativa; identical to SEQ ID NO: 13317
  Clone ID: TF_OsC380357_2

SEQ ID NO: 22554 - DNA, 1882 bp, Oryza sativa
  Clone ID: TF_OsC565_9
ggagcgcgtcgcgtccgcaggggccgcctcctcctccggatcgtggggcgatgagcatgcattcttcaagagggatgagaatgagataagtccgtactcatggaatatcacagggacatataaaggaagttggaactttgctggttccacaaatggttcttctaggtttcttgagtttacaaaattgaagggcgatgcggttttggaactattaagtacaccgacaaagataagcggggtgcactatgttcagggatctgttacattccatgatgttctagacaatgctcatgatcgtggagttgctcagataaggttagaaggcgtgtacatatggccttttcggcaacttcggatggttgcaaacagtggtgcagatggcgagccacttcaagaagaggattacttcttatcaaatccatatcatttgctgcggattttctcctctcaagtgttccaagaaacctctgaagagaagaaccggaggaagaattctcttacttacgacatggagaagcattgtagcgtcgaaatagctgctaaggtggtccgtgtgtcctctaacctaaatgagggagagcatgagaaataccgtttggagggattgatggagagtacagcagtggatgatgatggagagtgtttctcaccgatcttattaaatgcaacatcattgaatgttgaagtttattacaacaaagcagtcaattatacactgatggtcacttttatctccttcctccaagttttgttactgattagacaaatggaacatagcaacacccaatctggagctgccaaggtttcaattctaatgatagggcaacaagctatcatggatgcatatctttgtctactgcatctgactgctgggatattggttgagtctctctttaacgcattcgcaacggctgctttcttcaagtttgtcgtattttctatatttgagatgcgatatctccttgccatatggaaagccagtagaccattgaacagtggagaaggctgggaagtaatgaggagagaattgtctgttctttacagccgcttttatggcattcttttgggagggatccttctcatgtatgagttgcacaattttctgcgcccacttcttttcctgatgtactccttttgggttcctcaaattgtcacaaatgtcatccgggatacaagaaaacccctgcaccctcagtatattttaggcatgacgatcactcgccttgctattccactgtatatatttggttgccctagcaatttcatgcgcattgagcctgacaagacatggtgcatagctgtgacaatattcatgggtatccaagcggcagtgctcctgctccagcactattttggttcacgctgctttattcctcaccagattctccctgagaaatactgctaccacaggaaggtagaggataacacaaatcagcccattgattgtgttatttgcatgactacaatcgaccttacccaaagaacaagtgaatacatgtggcaccttgtgagcatatattccactcaggctgtttgcaacgttggatggatatcaagatggagtgcccaacttgcaggcgctccttgccgccagcttagatgagcactactttgtaccatatagttaacaagtaggtagctcagcatattcaaggtgggaattgaggtgcaataagacgagttgcaaccatgggtggtttctcgaagatagctgtagaaaatctgttacgcttttaatctcaagtgatctctgtgttgtacacaaatcattgtaccaattctcccacggaggaaaaaaaaattttacttaaaaaaaaaaaaaaaaaaaaaaaaaaataaaaaaaaaaaaaaaaataaaaaaaaaaaaaaaaaataaatataa

SEQ ID NO: 22555 - DNA, 821 bp, Oryza sativa
  Clone ID: TF_OsC68848_2
agccaacaattaatcttatgtatactgtatagttctcatagatatatatgtacacaagttccctatagtaatgtatcgtactaccgttcatagcttcacgtaatgcacataacacagaatgtataattttttcagtacaattggaacatcaaaatcacagctgacagcatgacatactttacagatggagcttttctttttccatcagaacttgtaacgaagaacaaacacccattgctcattcccatgtctactatttgattgttggaattgctcaaactgcatagaggcggataatctggttaatcttggctcgacaaatggggcatacccatttctttgattctatatccttcaagcaggacatgcaaccaggcatgtgaccacacggaatgcaggcaccttccacaggagcatccaaacaaataacacaggttcccggtggagtgttaccgctgttgcttgcattagcatcactttctgcaggttttgcatcatttcgttctctgcaggttttgcagagcttaccgctgtaccaccgtcagcagaaggcatggttacgtcgactggcgtggaatctattgacggatactgaataggaccatcgtagaaggttcccacggcaagtggaggcgcagttgggactggaagagatggaagcgcctcctgcggaaccacgaaagtgctgttctggcttttgttgtgtttggacgaactttggccagagcttgttccaggcacgtcccacccattgtatgtgctactgcttgatgtaacaactggtacttggccacttgtctttgaaggcgcagaagtatctg

SEQ ID NO: 22556 - DNA, 977 bp, Oryza sativa
  Clone ID: TF_OsC15124_2
caaatgagttactaattgctcaggagttggcacactctagggttcctggtagaaaaggccgctcagctggcaggggcagggacgaggttggaacttggagtcttgatttagaggatatgaagatggagctacaggctagaaaacagagggaagctgccctagaagctgctttggctgagaaggagcatcttgaagaggagtacaagaaaaagtttgatgaggcaaagaaaaaggaactatctctggaaaacgatttagcaggaatgtgggtacttgttgctaagctgaagagaggggctttaggcatatctgacttgaatgttgatgatcgatctattaatctagctgacattactaacggtacaaaggaaaacaaagctgacaaaaatgtagctgtagttgagaaacaactttcagataataccgtgaagtcattgactgcagaggaatacagaaatccagaatttgaacctcttcttgttcgtctcaaggctaaaattcaagagatgaaggagaaggaaactgattccttgggtgacaaagatggaaattcccatgtctgcaaagtatgttttgaatctgccactgctgcagttttgcttccttgtcggcatttttgcttgtgcaagccttgctcgcttgcctgttcagaatgccctctatgccgtacaagaatcgcagacaggataattaccttcacctaaagtgcatgttatcttaaaaggtaacttgaagcacccaatctcttcttgtaaaatcatcagtggtatatgattcttttttcccctagcaaagaaggtgcctttttatgttccttctgtgtttgtatcccaattcttttttttttttggtttgctctatagctttcccagttcaacctgttctttgttgtacgagaagttacaagatataacttctctgcaaatatgtatagatatgcgactcgacagtataatacatttgcttttttttttcct

SEQ ID NO: 22557 - DNA, 2221 bp, Oryza sativa
  Clone ID: TF_OsC102400_1
atgccgcaccaaaccaaagccacagtccagcagcagcgaccaccagcagcagcttccgtcgtccgcgccggcgcccaagaagaggatgcctctgctgcaggctctctccgtgccatcctcgcccagatccccctccagattcgccctcctcaaggcctccatcctgcccaacaagtgacaatgcgagtgagaagcagaatggaacccatgaaattaacggtgaagagccggtgcggcgtgtgctcccacggcgtgaagaccggcgcggcggcggtgttcacggcggagtgctcccactccttccacttcccctgcatcgccgcccacgcccacgccctcgccgccgccaccgctctctcctgccccgtctgcgccgcgccatggcgccaggcccccttcatcaacaagcgcaccaccaccaccgacgaccacaagcgcaagtcctacgacgacgacgagcccctcctcgcgcccaaggccgccgccggcgccttcaaccctatccccgaggacgacgaggacgacgccaccgagttcaggggcttcttcccggcgcgccccaggagcgggctggccgtcaccctcgccccggacgccgccctcgtgtccgctgggcggaggcacggcaagtacgtggtggccgtgagggtgaaggcgcccgccctgcgctcctcgccctccacgcgcgcccccatcgacctcgtcaccgtcctcgacgtcagccagggcatgatgggcgacaagcttcacatgctcaagagaggcatgcgcctcgtcatcgcctctctcggccccgccgaccgcctcgccatcgtcgccttctccggcgccgccaagcgcctcctcccgctgcgccggatgacgcgccagggccagcgctccgcccgccagatcgtcgatcgccttgtcgtctgcgccgccgcccagggccaggaacagccgcaggccgtctgcgttggcgacgcgctgcgcaaggccaccaaggtgctcgaggaccgccgcgaccgcaaccccgtcgccaccgtcatgctcctctccgacacgcagcagcagcagcagcagcagcaggatgcgatccggcgcccgccagccgcccctccggccacgcgattcacgcacgtcgagatccccatcgggccaggggaggagccggcccggtcggcgctggtggcggaggaggacgacgaccagttctcggagcacgccttcgcgaaatgcctgggcggcctcgtcagcgtggtgatgcaggaggtgcagctggagctggcgttcccgacgggcgagatcacggcggtgtactcgtgcggccacgggcagcaggcggtggcccttgggggcggtggcggcggcgcggcggtgagtgtctccctgggcgagatgtacgcggaggaagagcgggagctgctggtggagctgcgcgcgccgctgagccagagccacccacactcgctgtccgtgcggtgcagctaccgtgagccggcgtcgcaggagacggtgcgcggcgcggagcagcagctggtggtgccggccctccacggcgggagctcgtcgcggcggctgcacgacctgttcgtggcgacacgggcggtggccgagtcgcggcggctggcggagctgaacgactacgcgacggccatccacctgctgtcgtcggcgcgggcggtggtggtgcagtcggcggagcaggggctggttggcagcctggacacggagctgagcgacatgcggtggcggcgcgggcagtcggcaggcaggcggcgtggcggcgagtcggaggagactccggtggggacgccgcgggcgcgggggggagagccgctgacgccgacgtcggcgtggcgcgcggcggagcagctggccaaggtggccatcatgcgcaagtccatgaaccgtgtcagcgatctccacggtttcgagaacgccagattctgattctcatcatctatcaatctcagctcagcttgtaatcaatgataattttcttttctttttcattttcattttcattttcttcttatgtgaaatgaatcaacaaacacaagatatgtctccacgacgaagaagaaagaagaaaggcagaattaagaagagggaggagtccctgccggagcgcggcggacgtaaattacatctactccctccattactgttttctttttctcttctctttttgtactcctattcaaaaatttgaactagtttagacagtctcatcctctct

SEQ ID NO: 22558 - DNA, 1689 bp, Oryza sativa
  Clone ID: TF_OsC88980_1
atgtcggcgcgcgacagggagaggagaggacacagcgacgaaagcagcgaagtcggcggcgcgtcgctgcccgcaccgcatcgatcgcctcgccccggtgagccatgtcggcgcgcgacagggagacggccgtggcgctggcccgcctcgccgccgcgctggacggggcggtgctcggcctcggcacggcggcgctcgccgtcgcctcgtgggtcaagtggctcgccgcgtccgggcagctgcggcgcatcgcctccgcgccggcggccgccatacccgacctccgctcgctcctcgcggagtacggcggccggcggcggcagacggcgaccagccgatcctcgcggaggtgcggggccacgtccgcgccgccccccgaggcaagtacctcgtccccccaggctccggcgagcactgcgtcgtcgcaaagcatacccagctgtgcttgttcaatgaatggagaggcatctttgggtggacctttgatctgcatgctctctttttcaaatcaattaaggagcagattataacatcatttagatgggttccctttgtatatgttgatcctgaaaacttgactggaatggtccatgtgaagttagacttgtagatcctgaaaacatgactggaatggtccatgtgaagttagacagggcaatgcaaccattacctcttacaactgtgtatcataaacttaccccagtcgactcaactccttacacattgtttcagactattattggcaatggttacccaattgcgttgttggatgaggaaaagatacttcctgttggaaaggagattacagcaataggctatattcgacctcataaagcaagtgttgagatcagctcatgctcagaaataccttttttcttgtctgaccttaccaaggatgagatggaagccgagttgtcttctcgtgctaaaacactcttttgggctagtgttgttcttggaacaatgtcagtttgcttgctgggctttgcgacttacaggagctggaagaagatcaaagagcggagggaggcaaggcaagcccaagaggtatttcgacaaactactgatgaagttacagacgatcagtctagcgatgaagaggctggtgaaatgggagacgggcaactatgtgttatatgcttaaggaaaagaaggaaggcagcttttattccttgtggtcaccttgtctgctgctgcaaatgtgcactgattgtggaacgtcagttcgacccattgtgccctatgtgtcggcaagacatccgatacatgataaggatctacgacaattgaggcttcttgatgttttgctgataacccttcgacactgtatggtcacccagattgtctgcgagcctgaagacctcaactgatcatcctgcgtgcactagtctaagctacttggctaacaaaactatgttaccctgaattttgtgtatatatatgacgtgttagtcactcccaggagaactcatatgggcagagatcaccggatacttttcatagtcgcatagaatcctgtagctagccaaactgccagagtcatgagtgacgcctatagttgcaattacagtactaccaagtttttgttggctctcccttctcatgtctgtgcattctgtaaagatggttttgccgctagcaaaagtatgatggttcggatttttaaaaaaaaaaaaaaaaaaaaaaaaa

SEQ ID NO: 22559 - DNA, 744 bp, Oryza sativa
  Clone ID: TF_OsC63513_1
cccgggctgcaggcccataacaggaaaagaagtcagaacaggttggaaggacctggactttcagtttctcaaaaggtttgtattgtattagcactgttggtggccaatatatatggtcccgcttgcagtctttttctgctttccgtcgatggggtgattctgaacagagaccactagcacgtcgcgcttggggcttggtgcagcatgctgaaggcttatacagagcttcttcattctttaaccttttgttatttctttatggtgcaagatataaaactattgttgaaaggattctgaaagcatgacttgtttatgagagccccaacatgaatagggcagtaagctttgagtacatgaaccggcaactggtttggaatgaattttcggaaatgttgcttttgcttcttcccctcttaaactcatcctcagtaaagaagtttcttctacctttctccaaagataaatcagcaagttcttctggcgatgaagcagactgccctatatgtcgctccagtcctagcattcccttcgaagctctcccatgtcaacacaggtattgctattactgcctgcaaacacgttgtgcagccacaaactcgtatagatgtgcaaggtgtaatgagattgttgttgcaattcaaagacaaggatcaagttagtttagagttgaatccatatacatacagtgtaacaaaagccaatacagcttactggattcgcgacatctcacatgattttttccca

SEQ ID NO: 22560 - DNA, 1651 bp, Oryza sativa
  Clone ID: TF_OsC32218_1
ctagtggatcccccgggctgcaggactaaaatgatgatgaacaagtaataggagaaggcaaacggttttgtctccaagttgactgtcagttgggtatcgtttcatagcttaaaattttgagcctgcatgaacttttgcattgtctatttgattcttcaatttattgtgcacttgtgcagtaaagcccatgtgatctgtacttgatggtttctaacaacatatccatgacatcttcttcatttccttacatgctagtacatttgtatttgcttagatattgttacatttttttcagatcattctgtgtttccccattttcgcaatcactactgcactatgaaactgtattactggactacccacaaaactatacaatatgaaataattctctgattggggcgctggagattcgtcctagaccggccggggacgacctcttcttccctttcctctcctccgccgccgctcccccgactccggcgagcccccttccccccacccatcggcgcggaggacgttgccgggatgagcgtctccccttcaaccggacgcgatctcccggggcgctcccgtatgcccttgcgctgctagagatccgggctcttctcggatctcaggagtacaagatatagtgtaccagctctctctcattcaacatgtggagttttgcgtcaaacgccatagctggaagcataaggaaaaaagcacagccctcaaaatgcagtcaatccaatcctgattgctctgatgatgatgtttcttcatgtgcaagtagagaggaaggccttgaatgtccaatatgttgggaatccttcaaccttgttgagaatgttccctatgtcttgtggtgcggtcatacaatgtgcaagaattgcatcttgggtcttcaatgggctgtcgtcaagttcccaacccttcctatacaactgcctctcttcatctcatgtccatggtgtaacctgttatctttccggctagtttacaagggaaacctcaagttcccacgcaagaactattttctgctatggatggttgagagcatgaatggcgagagagcaaagttccattcccctagtcatgaagagcgccattctttatgcccttctggtggtggcccaagttccagtcaacaccatcgaagacctgctccacgaacagaaagcgccagtggcagagaaaggagtgttgctggcaacgttttcaatacttacagcatcagtgcatctctccaaaagataatgttgtcttttgttcagatgacagccaagtttccactcgtgataattttccttctgatagttctatatgctgtccctgcaagcgtagcagttctagtattgtatgtccttgttacagttttgtttgcactgccgtcctttttgatcctctactttgcttatcccagtttggattggctcgttagagagatcttcaattgagttatattgtactccatgtcattacagtttataactcagcagcagaaaatttagcatttgcaatctcatgtgctctgggggaggatgtcaagtgtgatttcttatccattcgattgaggccttcagggacagtagttgtaagatggaactctaattattgcattgatatacatgaatcactcaggttttactgtaaaaaaaaaaaaaaaaaa

SEQ ID NO: 22561 - DNA, 684 bp, Oryza sativa
  Clone ID: TF_LIB4833-034-R1-N1-D8
ccggccgcgcgcgttctcccctcgcccgccgcctgcgcgcctatctccgccgcgcgagaggtggcgcggtgcccagcgcgcgtcctgctgcttccaccgcgtcctcgcctgcctgcctgccgatcccacaagtagaattttgatgttggcaaaatcagggtctttgagatagcttacccttttgggctagagaatgtggaatttcgcgtccagtgcttggggatctggtttagggaagaagaacactcccaactgcaccccgtccaatggtgattgctctgatgatgaggcatcttcgtgtacaagcagggaagaaggccttgaatgccccatatgttgggagtccttcaacatagtggagaatgtgccatatgtactatggtgtggccacaccatgtgcaagaactgcatcctaggacttcaatgggctatcatcaaggttccgacggtgccaatccagctaccattctttgtctcctgtccctggtgcaatctcctgtcgctccgcattatttacaaagggaatctcgcatttccacgcaaaaactacttcctcctttggatggttgaggggatgaatggtgagcgagccagatcgcgctctgctattcatagtgagcaacaaactacatgggctctcagtagcagtagggcaagtggaatggaagttattcgaatcccatc

SEQ ID NO: 22562 - DNA, 822 bp, Oryza sativa
  Clone ID: TF_OsC25814_1
ttttgaccttttttttttttttttttttttgaaaagggaaacaaaagcttgcaataatgatctcctttacataatatttatacactctgcacacaggagataagatcaaagaaaaaaaaaacatgctgctgcatagcttcgatcctccccttccccacacatataactatcagtctacatcacgccgtccaccgggcgcttcagcgatccggcagctgatgcccaccgtcaaccactatgctaggcagctcgctctccacgccgccggtggtcgccggcgcggtcaccgcggcggccacatgagaagcgccgttctcggcgctcgccatgtcgtcgccgccgccgtgccgaaccaccacctgccgcagcagcagcccctgcagccgcagcaggtagctctgcccagccggctgcgacgacctcacgtaccgcgccatcgtcgccgctgtcacctcgctggccgacggccggtccggctcggaggatggccggaggttgttgagcgcgctcaggtcgaggttggggaagacggagcaccggcaacgggggcacttgacattcagccggagccactggtcgatgcactccacatggaaattgtgcgcgcacgggagcccacggacctgcataatggattgggaaaagaagtctttgtcagtccttaaaaatgctggagaacgtaacttcataaaccatctctagtcttgttttaccctcgaactaacaaaaatgctccactttacttctaaccatgcttttttattctttatacaagttatattcttcgttgaaattgtggcatgtacacattattactctttt

SEQ ID NO: 22563 - DNA, 1016 bp, Oryza sativa
  unsure (1)..(1016): unsure at all n locations
  Clone ID: TF_OsC192480_1
tgttgctgactgtttcntttgggtttcttctccgatggtttccnngtccgctatgtcttgctgaccgcacgagggtgctctgctcgatctgcctcgatggcatggaggccggccgcgccgtgcgcatcctccccggatgtagccgcatcttccaccagtactgcgtccaccggtggctcaccatctcaccgcgccgcctcgtctgcaacgggtgggtcacgctgcagtcgccggggacctcgccgtctgccgccgcccgccaagcctgctctggattcttgagatcctggcgttgccaccctaccgatcatggctcaggtctcggttcttgacgagttcttgttgaattctcagcgattgttgtcgtcggtttctaggctctggacagcggttcttgctgatttcttattcttttcggaggattcttggatgggactgcatgtaaattgacttggtgctgtaattcgttggtagaaatcagtacgcttatgcatagtttcacccctttttctactcttaacaggtcaacaactttgtccggattcagtctaggtgatgaatgaatggaatagctaatactgtgaatacaccaacttgttgcccatttttattgtgaatacacccaacctgcttcacctctgatagtggttgcccatttttattaggatttcctgatttttatcaccatgctgctcctcttgttctctaccaaaagaggttgctatgtatgggttttcagttcgtagtgtcttgatttctgagttgttatatcttccgtactttctgtttgcttcaacctgttagagttattttatttcgtgtgagttcctgattagattgggcgtttatttgtaccctgaattaattgtctactgcttaccttttcctgtatatatgtattgtgtgcttgtaaaatttcccctgcaccctgcttacccttttctgtatatatttattgggtgcttgtaaaatttccccctttgaagaggtgactgtaggaaaaaaaaaaaaaaaaa

SEQ ID NO: 22564 - DNA, 1018 bp, Oryza sativa
  Clone ID: TF_OsC88712_1
cccacgcgtccgcacgatggagcccgtgacggcggcgtcggcggcggcggcggcgagcgaggagcaggtgacgcggcgcgtggcgagccggatcatccgggcgctgcagcaccagctgcggctgctgcaccgcgcggggcccgagttcttcgtgctgggcgcgacggggaacgtgtacacggtgacgctggcggcggcgccggcgtgcacgtgcccggacccgtccgtgccgtgcaagcacatcctcttcgtcctcctccgcgtgctcggcctctcgctcgacgaggcctgcgtgtggcggcagtcgctccgcccgtgccaggtggcgcggctcgtcgccgcgccgacgtgcgccgaggcggacgtcgtggcggggccccgcgcgcgggagaggttccaccagctgtggtcggcgagggccgccgccaaggccgaggagagccgccgccgccgacgacgcgacgaccaggccgccgcagccggcgcgtcggggaggctcgacggcgcggcctgcccggtgtgcctggaggagatgtcgccgcctggggcggcggcggcggcggcgatgctgctgacgtgcgcgatgtgccggaactcggtgcacggcgagtgcttcgcgcggtggaagcggagccgggggaggcgggcggcgacgtgcgtggtgtgccgggcgcggtggcggcagccgagccgggagcaggagaaggagccgtacatcaacctgtccgcgtacatgaacgacgccggcggcggcgacgtcaacatggtcgccgccgacggcgacgacgggggactgtgcgccgggtagctcagttcggtgacgtcagctgacgtaaacgtgacacggatgtaaattaacgaagttgtacattgtatatagtgctaacaatctcaattcgttgcgtttcatgacatttttttcgttgtttttcgtagaggctgaccttgctacttcagttattcatataatcatattcctgtacataattgatatgttaataaaaggaacatttatttt

SEQ ID NO: 22565 - DNA, 2046 bp, Oryza sativa
  Clone ID: TF_OsC4354_1
ttttttttttggggcccaaattttttttatccgggtaaacaaggggagggagaattacattttcctttcctactcttctcaaccaaagagcactacaacactcaaacaagacaatattcttatttacattcagacaatgcataaacttgagaagatgctacacaatctaactggagcatctatcgatcaccaaaaaaaaaagttaaaaccaccgatgacatacttacagtacataattgtaaccggcaaaatgatcatcaactaccttttcatgcttttggttagacatgatatgctttatattttctccatattcggtaaacctttctgaacttgtgcaaacctcaatcagcttaaagttgtgattgagactacatggcgcgacattgcacaaccaacatgtacaaatttgtaacgttcatctgagttagcgaagtttaaacatcatatacgggcatgcgttcttcaatgggcacacggcagattggacatttcttgcacttatcagaacaagtcttgcataatgttctgtgccggcaaggaagtaagaccatgcatatctccccctcgtagcaaatcctacaaagaaccttctcattttgaagcctttcaaattcctgctttggtacatttggtaatttctgattgctctcccaaagctgcttcggagcctccatacccctgctccgagacgagcctccgacaaattcgtgactacctcaagtggatagccacaaacgtggggtgtccccagtgggcttgctcttctttgctgccttcatcaatagaccaccaaccaagaagccttgaaccacgatgaagaaaagcaaagcaatcacggacttttgatgagattgtaaggtaattaggactaactggtccatttcgtaatagtagaacaaccttctccaacaatcttgctagagagaaaaggacaccagcgccttgtaaaataaacagtggggagaacagtgcaaatatcggaatatactgagcactaggaggcgtaccctccaagcgcatacaaagcaaaacttggaaaatcaccagtggtattttcattacgtgacctcctatgtcaggaagaccacagagcctctcttgttcatgatcttctagtgatgggaggagaagaccactctcccaatcacggtatctaattgccgctgatgatgagctagcctccccaggattaggagatttatgaatcatgggattaaaccatccataatttataaacaaatcccaccatcccaaagcaccaacatcaccagacagcttcaaaagtgtgaaggttgtagcagctataagaaacaccatagaaattgcaacccaaaagtgaggaagtgtctcccaaatagcttcatcgctcatactttcttcatctcctggcattaaagctctacacattctgaaattgtcagcaagaataatcacttcaaaggccagaagaggaaggaatacaatcttcaaatcaacagtcggcttacttttaactctcaaactttcgagatatatgcaaagcagcagctcaaacgcaataagcaacggcgctgcaacaattgaatggcaaggagcccaatgacggccatgaggaagcgaaggggctggcattgaaaaccttccacgggcaacaatgccatgaaatagccatagagggatgaatataatccaccaggagtaggctgtgcggccgtcgactttgagcgcgaggaggagcgtgaagcagaagagcgccgcgtgcgccgccgccgcctgcgccgtcttccccacccccgcccacgtctgcgcccgccgccgctgcatccctcacctcctcaccgcgccccaaaccccactggaaattaatctcttccgctcccgcgtccgcctctccctcctccttggtcttctccccgctgcgcctgcgccgagccgagccgccgacgaaggagtgggagacaaaagtgaggcgacgaggacgaagggttccttcctctctctctctctctctctctcccctcttagactctagcccttttccggaaacgtgggcggacgcgtggg

SEQ ID NO: 22566 - DNA, 498 bp, Oryza sativa
  Clone ID: TF_jC-osroLIB3475009f05b1
cttactcgtatggatcaaaaagctttagtaaaccaagtacctacccacagagtagtacatcatcatcgtcatatcctcactatgaaactgcacagagttcgagccctgctgtaccttcttctacttatgacaatcaggtttgcccaatctgccttgtgaaccccaaagacatggcgtttggctgcggacaccagacctgctgtgattgtgggcagagcctcgaatcgtgcccaatatgtcgcagtccaatctccacaagaataaagctatactagcaatggcagtttggatcatttgcgaatgggtggcatactggagaccaccttgtgtcacattgggcgatggattgtattggatgcttcaagtgcaatccatgcaaagcctttgaacggcttgcagacaagcccgttaagtactgggtttgcatcgacaaggatcgcaaggccagcaatccactgctccaagattgtggagcaggggatgtctcaagtattgaaa

SEQ ID NO: 22567 - DNA, 355 bp, Oryza sativa
  Clone ID: TF_LIB4371-053-QB-K6-F7
ggctgagcgagagccaatccaagatgcaggtcgcatggaagcaatgcgagcagggcatcctcgtcagcttctctccttggtcgaagccctcaaagcacacagcgcagtcgctctccctcgcctcgctcacctgcgcttcctgcagctcggccatggccttgcttgacgcaggcacagagccgaacccaccattcctgtacatatcgtcctcctctatgtcaggaacctgctacagactactactccaggaagagcaggacccacatgagggccaaagcccaatcctcgttaccatgggtccgcgtgggttgcgtagcccagctatctgttgtccagctggcttctgtgtgtgtcg

SEQ ID NO: 22568 - DNA, 580 bp, Oryza sativa
  Clone ID: TF_LIB3434-055-P1-K1-B3
cccacgcgtccgtgaataacaaggttgtcttgcccaactgcagccatgctatgtgcatgaagtgttaccgccaatggcgctcaagatcccagtcctgccccttctgccgtgacagcctcaaaagagtaaattctggtgatctgtggatgctcacagatgaccgagatgtcattgacatggcaacgattactagagagaaccttaggcgcctgtttatgtacattgagaagctgcctcttgttgctccggacaacatcttctatgcctatgattctcatgtaaaataaccagagctactcataatgacctactcataattgttttcggagagtgacgcatgtgttattcattcatgcataggatgttccttgtcgcaggatgtggctaacctcaggagcagactgaactttgacaagagaacttgggaattctgactagatccaatgctgtggtcagatgttgtaaatgcttgtacagatttgtaatttgcagcgtaaaaaaattagtgaggaaaaacgttgtgttccacattgaactcctagtgtgaaaatccaagtacatatatgctcattaccatgac

SEQ ID NO: 22569 - DNA, 985 bp, Oryza sativa
  Clone ID: TF_OsC183489_1
ctagccgcacacgcgagcggagccagaggaggagacggtagcggcacacgcgagcggagccccagctggagacggacccacccggctccaccacggctccagctctctccactctcactccccgattcgccggcgagcaggcggcggcggcggaggcaccatagctcaaggcttcctctccgctccgcaggtaccaagatgaaggtcaagattcttcagtggcattcggtggcttcttggacatgggacgcccaggatgaaacctgtggtatatgcaggatggcattcgacggctgctgccctgattgtaagttccccggcgacgattgcccgctcatctggggctcctgcaaccacgctttccatctccactgcatactgaagtggggtcaattctcaaacatccagaccaaagatgaaggtcaagattcttcagtggcattcggtggcttcttggacatgggacgcccaggatgaaacctgtggtatatgcaggatggcattcgacggctgctgccctgattgtaagttccccggcgacgattgcccgctcatctggggctcctgcaaccacgctttccatctccactgcatactcaagtgggtcaattctcaaacatccacaccactttgcccaatgtgccgtagggagtggcaattcaagggctaatggcatcaaccaaagatgattaattgtgttcgtgtagactagtacaaaagcaatcatgtaacatctagcaggttgtgtatattttttccctgtaattcctaacttcatcaaagcatctctccctttgaggagcaactgatagaccctaaccatgtgaccccatggatcagtggcatggaattcctttggtgttttcaggttgcttgaatttctgggaagcttcctgttaggctgtgcctggtcacctggccttgctgccttgcatatgataagctgtatcccagtgaggcttgactcggagtaaactagtgccat

SEQ ID NO: 22570 - DNA, 809 bp, Oryza sativa
  Clone ID: TF_OsC46775_1
ttttttttttttttttataagaaacttcttgggtattgagttgttgacttcactttcctagtgtcgtgccgctgtactgtagctgttgcgagttacaatgtgtaccaattaaccaatacatgaagctgggaattttccttccctaattgggcatcgaaagcaccatattcctcttaaaaaaatataacaccgtatcctactgcggctttttgttagcgttcgaatacctcctgggtaaaccatttggaagagctggaaggagtcaaagtgacttctccctgtcccacattattccgttactccttgtaatgacaaatataacaattaactcaccacacctacatcagaagaggatacaagttttattgtgattatttgaccgctatcttttatcaacattagtacatactgcactcctataacagcctattagagtcctccatggatgcggccttcgacgaaaaccttttatgcatcacagatggtgaaattagtacagttttactcttgtatcaattggccttcgacagatagggcaatgttcgacttgcggtccacattcagcacatgtctggtgtccgcaaccaaaagccatgtcccggggtttggagaggcaaactgggcagagttgaggttctgctgctctagcatccacgcttggtggggatgtaactgatgctgtgattgctgaatctacaggtgcctcatccctaggatgagaaggcatactccggaagctatttgctcgagatggtgctgctctcgagattgtattatagcttgcaaagggagggggcagtggaactcgc

SEQ ID NO: 22571 - DNA, 879 bp, Oryza sativa
  Clone ID: TF_OsC1795_20
ctatggcttctccttgggcttataaaaggactttttaacgcaagcaatcctcgccaccttgaattgctgctcatcggcgaagtaggccgccgtgtcgacgttgaaccagaagttgtccactctaccctgtctagttatcatggacggtgatgatggcagctcagcgaggatatcggcgccgttgatgcagtgccccttgatgacgacgacgagaggacagggggctctgcacacgtgacagcgcctgtcctcgctgacgaagcggacctggacaatgcatctcgcgcaaacacagcggtggccgcatggcccgatcgccacccactctaatggctccacacacaccgcgcagcagttggtagtagtagcagcagtgccgccgcgggctacgtcttggagctcgatgtcgacgacgacatggcacactgccttggtgctcatagtattgggtggttgtttcacgtggtatatgttggatcgaacacaagtaaccaagtccccttttattattgccgaattcatgtttcgacagttggcgcgccaggtaggggttgcgtcgagtttcctatcaacgagcgcgatggaatcaatttcatgagtcgccgacttcgctttcgctttgggagttttcacttcctttccgtcgaccacttcttcaagctcctcttctctgacttgatccaaatcagtcagggggaaactcaatcgttggctcaccttcgctgccgtcgactggtgtttccgcttacacggctgacctattatgccgccattagtgggcatcttcgctttcaccgtcgaccgccttcgtcgccgccgactggtgtcttcattgttattgatggacgactttgttcccacattggccacttccgccat

SEQ ID NO: 22572 - DNA, 420 bp, Oryza sativa
  Clone ID: TF_OsC37567_2
atggatccgacggccgggacaggttcctccaccaagaagatccctagttggatggtaacggagctgccaatgctatcgacggaggccaaccgcttgccacagatccctagttggatgataaggaagccgcttatgctatgtatggaggccggccgctctggcaaggccgccgccgccgccaccgccaccgcggacgccatggagcagagctgctcggtgtgcctcaagagtttcgagaaggacgactgcatctggtcgatgccctgctcccacactttccatcagctctgcatcttgggcgaccgctcctgcagggacatgaacgccaatgaggagtgcaaggagctttctttggtagaggatgaagcttctactgcaagagaagcaagcgagctgggaagaactagaggaagcttttag

SEQ ID NO: 22573 - DNA, 1161 bp, Oryza sativa
  Clone ID: TF_OsC49416_2
cccacgcgtaacgccactcctgcgagagacgcgcaggaggcaacatccactccaattcaacccaatcacccgcggcgagccgagcgggcggcggagcacgacgacgacgaggtttaggtaggggttcttggcttgtcggcgtcggcggcggcggcggcggaggatgaggaggagtcagcgatgcggaggaggttccaggactccgtcaaggccctcgaggccgacatcgagcacgccaatgagctggcgtcggagttcttgcgggattacgacggggcggtgatccagatgcggatggcgtacagcgccgtcgcgcacttcctcgtgcagtggatcgactgcaagctcgccggcgcgctcggcctcctcaagatcatgatctacaaggtgtacgccgatggcaccacggctctgccggagtgggagagggaggccagcatcaggcaattctacggtgtcatcttcccgtcgctgctccagctgccgagtgggataactgaattggacgacaggaagcagaggaggctgtgccttcagaagttcaggaaggtggaggagagggtctcggaggtggatttggagagggagctcgagtgcggcatctgcctcgaggtgaatgccaagattgtgctgcccgattgcgcgcactcgctgtgcatgagatgcttcgaggattggagacaaaatttcgtttacctgaatgtggtgttcaagaaagagagaaaaagattacctttgccatatattggctggttgtgttcctcaggatgtaaagtcagttgtaaatctcctgcacttctgatagagtaccacaatgccctctccacagagtctttaaccatcttcatgcatcaagatgtagtccatccaatcaaacctgcatccagaatgactttatttataactgcagcaaacattctattgaactatgtcctgctcttgagcaggaacaccaaatcaaagtcgtgccccttctgccgcgcctgcctcaagaaggtgaatccgagcagcctgtggttgtacaccgacgaccgcgatgttgtggatatggatacgttgactagggagaacattaggcgcctgttcatgttcataagtaagcttccacttgtagtgctccatgtggttgaccttgacatttacgagtaccgtatcaagtga

SEQ ID NO: 22574 - DNA, 695 bp, Oryza sativa
  Clone ID: TF_jC-osleLIB3474039b05a1
aggatatccaatggcacatatatgttaaacaaatagcaagtatcaatacacacttttcttgactgagcaaagtagcagaagaaactaggcatgtgaattcttttacaacactccgaccggtcactgcagcaactacaacatttgaaaattttaaaataaaactattctaaagaaacaatcacgcaccaccatatatagtcattttgttatcagatgtaccgccggaacattctagaacatagaccaccaactctttttggtacccacatgtacttcagtggcacttggggatctacagtacagttgccttctaccactcctagcaggatttgtaaagcataaaactagagcgaaaccgataaggcttacgactggagcagcagcaataaaaagccatccactgcgcctgcgtgcactgcttggttgctcatcaacacgaacattgtgttcacttgtattagtctcttcgatagcaccaacagccatctgacgagttacctggacctcttgttcatcagaattttcttccacaacctgaatgtctcttacattggttgtggcttgcttggacctttcatactctgcatcatctgtaggaagctcatatcggcagacaggacatgtatttctagaactaaaccatggcaagatgcacgatgaatgataaagatgcatgcatggtagctgttttgctc

SEQ ID NO: 22575 - DNA, 704 bp, Oryza sativa
  Clone ID: TF_LIB4371-036-R1-K1-F5
gattccgccgcggaagcaagctcgtccggtttccatcgtcgtctgggatcgggctcgctaagacttttcttgatttagtaagctgatccccctcagttcgttgtgaattgtgacggattcgggaaaaattcaggcactcttgatcagggtttggggtttagcagtctcggttattccaaatatcataagaatcatgagtactgcaagtactgcacgctctaggaagcgagcccatgatggatccagacaaaaagttgatgttataaacttggaaacaactgctccagtggtgaacactgggagccagcatgaggctctgatccttaggggtacacggacctcacccatcgatgttgaagctctagatgataaaaggaggagcagaaaaattatgaggcgctctgtggctgtagtggatccggagaaggatactggtccgggaggttatggcgttgctggagctatattttcccggggcagaaattttcagggtgctgtacatgttatatgcctttctccgatagggaagaagggaccagcaagccgaaaaatgtggcccaaaccagtacgacgcatgccaaggttgctccaaaggaaccaacctttacctgtccttggtggtgtctgaacaaactggacaagccatccacgacaaattgcggtcatatcttctgcgagaaatgcatccaggcatggctcaaggc

SEQ ID NO: 22576 - DNA, 501 bp, Oryza sativa
  Clone ID: TF_uC-osflM202003c01b1
atttttcattatttttaggtcagtgtattgcttaactggcccctcgtcggcacagtggttggcagtgctctcagtctcaccttcacctaccatgcgtcacttgctgcagtcgtcggagcacctgaccgccgcgacggcgacggcggcggcgtcgggcggccggggcgtccacacggacacgttcctcatcctcgccgccgtgctctgcttcctgctctgcgtcgtcgggctggcgctggtggcgcggtgctcgcggctgtgcaacccgtcgtcgttcgccgtcgaggcggaggaggcaatgcccccggcgccatgcaaggggctcaagaggaaggcgctgctgtcgctgccgaccgtgtcgttcgccgaggcggcggcggcggaggaggaggaggagcggccggagtgcgccatctgcctcgccgagttcgcgcgcggcgacgaggtccgcgtgcttccgccgtgcggccacggcttccacgccgcctgcgtcgacgtctg

SEQ ID NO: 22577 - DNA, 1259 bp, Oryza sativa
  unsure (1)..(1259): unsure at all n locations
  Clone ID: TF_OsC349_4
aaccaacactggacaatgtagatgagtagtcgacaggataaaccggccgacgacattcacaggctcgattccatgtcctgganagctcagaaaagcaatcaagagcatgcactggactaaaaaggggaccacagcttaaggcaaaatagagagagaaccgctgaatacaataatagcaagttgatatgtgacccacagaacattaatatgaaggatcttatgccatacagtaccctctctacaaatcatccaaacacaatccctgtatgggacaagtacgcacgataaacgtccagcgatagatgtaaggcatcaaaagaagctaacgatggagctgttcggcagatgatacggcttgtgtttgtagcgcagccgtggcaacaaacaagcgcagacagcaggtggggatagcagaaaaaaacttagtaaatacgaactgctgcttgatttcagcgaaaataagtttgaggagattcgctgagctaccagcatgatatgtttctaccgaaaatacaagcttctgaaacattaacaatgcagcctacccatcgtaatcattagttatcacttagtgctaatacttgatacgagaaacttgaagccgcttttgctcccgaaagagaattgtctagtgaccatacttctggaactcccactcgctgttgtctagagggcacacttgacgggtcttgagccaacggctgatgcagtggaagtggaatgcatggttgcaaactccccaagcgacggtgcactcctcgctggtggcgctcgcctggttcgcctggcactcgatgcagaggtccatgatgtggttgcggcagatggcgcagttgtccacgacgatgtcccaggcccagagggagacagcgttccacttcttgatctcgaagcgcttgcccttcttggccccggaggaggaggcgccggcgatggaggggggcacggccacggcgacgtcgcccttgtccatggcgaaccctagggtgggaggggagcgcgaggaggaggagtagattgggacgagacgagaagcgaccgcgcgacggcgttccacttcttgatctcgaagcgcttgttgggcttgcgggagtaggggccggcggcagaggaggatccctcgccggcgccggcgggggcggggacggggggcggcggcgcgttgatgtcggtctccatggccgacatcgtgagctctcgatcgacccggattcaggaattccaccagaccaggttgggattggaagatgagatttttt

SEQ ID NO: 22578 - DNA, 457 bp, Oryza sativa
  Clone ID: TF_OsC1795_44
aaaccacctcccctgcggtcacatcttccaccgcgcctgcctcgagacatggcttgactacgaccacgccacctgcccgctctgccgctcccgcctcctcgccgactcctcctcgccgccggccgccgccgccgccttggcccggacttagcgagtggattcgattcgactcgattcgattctccgacgagccgccccgcgccggctacgcgccaccgtctccgggtggcctccccgtgtgggcgtaggaaactagagagagagctctttgccttttttgcactttcacccctcactttgtcccttttttttccgtttcgggcggtttgtgcctgtaccgtgtaaatacctcgcagcaagagagtgctcctacgggtgtagcactttttgtgagctttgtgtataaaaccttctcggaatagcaaccaaaaaaagaaaaaatcgcatttacactgtt

SEQ ID NO: 22579 - DNA, 726 bp, Oryza sativa
  Clone ID: TF_OsC134110_1
aagttaaattggtttttttataacttgtaaaagttaaaatttaatttacatttttataacgatataacacatgttaatacatcatctcaaatatttttaaattttttcataactgtttgactaacatacgaacaaccagaaaacgtcccctccagttgaaaatccactgtccacgcgcccacacgaaacctagctaataaccatctatctttcggcgacgatctcccccgtggcggggctactactcctccctgccacggtggtcttcacggccgccgccgccgccgccatcttccgctccccctccggcgcccggccaaccacgtcggcgcggcacacggggcaccaccggctcttcctcagccacgagtccacgcacggcgcgtggaagctgtgctcgcaccgcggcagccgccggcaccggtccccggcctccagctcctccaggcacaccgcgcagtccccgccgccgccgcccttgacgacgtcgtggcacggcagcgcgccgatctcgtcggcggacaggcccttccctcctcctcctcgggctccaccgccgttcccctccgccgcgcgcccgggcgccgcctcctcctcgccgcgcgacgccccgcgcccgcgccgcagcgcccagaagacgacgacgatgtggacgaccagcatcagcgcgacgccggccaccaggaggaagatggagatcaccgacgacgacgacggcgacgccat

SEQ ID NO: 22580 - DNA, 1139 bp, Oryza sativa
  Clone ID: TF_OsC17323_1
gtcggattccggttggaccaaagggtccggatccccgggccgcacgcatccgcaccagatcatcatatcatgcgcaccgcctccaccgcgacacgccgtgtgagcgcgggagcacctctcccgacgagccttcccttctcctcctcgccttcgcgtcagcccggcatggggttcccggtctgctgctactccgagctgctgctccccaagcagctgctccacctcctcctgctgctcggctacatccgccgtttcctcctctgggcgttccacgccgtcggcctcggggacctgctggatctcggggacgagcagcaggcggtgctgcaggaccacgcgcgcgagcaccgcgcgccggcgcaggcgctgccgccacagcagcagcaccgccgcgccgagttccggacggtgccggcgatggtcatcgaggaggttctgccggtggtgcggttcgacgagctggtggccgcggccccggcggtttgcggcggcggggactgcgcggtgtgcctcagcggcatcggcggcggcgacgaggtgcgcaggctcagcaattgccgccacgtgttccaccggggctgcctggaccgctggatggagcacgacgaccagcgcacctgcccgctctgccgcgcgccgctcatccccgacgagatggccagcgcgctctgggccgccgccggcgtgcccgacgcctccgacttcgacttctcctacttcggcgcgcccctcacgccgatgcccacgccgactctgctacggccgcacgagctgctgctcactggccttggcggctaccagtaaccagtgaaccgccgctgttggttcacggagttggcaatatccacctactgcacagcagggcaccggcgacccggaatgcgcagtttttacaacgactgaattggtcgtcgtgttcggggaagaccaagaacaggaggcgccttcaactgtacataggcaaaaatgagtaaagcaaaccccccaaaaaaggctagatgattagtagatttttatttttgtttttgtttttgtacagaagattccatcttccaggtttgagaagtagtgaatctttgtgctgattaaatttgttcagtttggcgttttggatgcaacaatctgtggcattttggacc

SEQ ID NO: 22581 - DNA, 567 bp, Oryza sativa; identical to SEQ ID NO: 13442
  Clone ID: TF_OsC337952_1

SEQ ID NO: 22582 - DNA, 1592 bp, Oryza sativa
  unsure (1)..(1592): unsure at all n locations
  Clone ID: TF_OsC25814_2
tcagcgatccggcagctgatgcccaccgtcaaccactatgctaggcagctcgctctccacgccgccggtggtcgccggcgcggtcaccgcggcggccacatgagaagcgccgttctcggcgctcgccatgtcgtcgccgccgccgtgccgaaccaccacctgccgcagcagcagcccctgcagccgcagcaggtagctctgcccagccggctgcgacgacctcacgtaccgcgccatcgtcgccgctgtcacctcgctggccgacggccggtccggctcggaggatggccggaggttgttgagcgcgctcaggtcgaggttggggaagacggagcaccggcaacgggggcacttgacattcagccggagccactggtcgatgcactccacatggaaattgtgcgcgcacgggagcccacggacctcgttgccaacatggaattcctccaggcagattggacactcactgcagtctgtaggaacagctttcagtctgaacttcgggagttcttgaatcagtgcctcaactgcctctctctgcagaaggaggaccaatttaaaatcattctgctcaatgacactggatttcagtgttactttgctccttaatacaaatccagaagtcttcagagacttctttgcatctctgagatcgctagcaaataaatacatggaaattttgtctagttgggcagctgttaaataaagaccaggatgatatgcagtatcttggcccattcctctcatttccaagccaacggcctcaaatgcccaatcaggcacacggatcatgtcaaccaaaaccccatattcagagactggtattccctgttgtgccctctgctggagagcatgccttcggcttagccactttccaacagccacacacgcaatacaggcgagaccacagtagctgaaaagcagccatataaggaagccccatttttgtccttcctcgggtaaatggaaatgtcgaagatgaccaaattttacaaatagacatgtgtagacattgtcaagtgctaatcccatgccggcggcaaggccattatcgacgaacatgagaaggcggaagatgaagacggtggtgtagtcaaccacgatccatatgtgcaacgggtgggcgcagagacgatacctcttccagttgatggagaccatgattctgaaaccaatcaagcaaagcaacagatgaatagattcttcaaagcatattacagccatagcggggaaggggggagtagagaataaacttagtaccacttgaaatcgaccccccgcatcgccatggcctgctagctagatctggccggaggagcgcggcagcatccacgcccccgcactccgctcacttcagtgagcccctcacttcaactccagctagggtttctcgcgaggagagagagagagagagcggcgtcgcactcggcggcggggcggggcgacgcgaggaggagggagtacggcgtccccctcccggcgtcgacgcgagtagggcccccgcgcggcggcggcggcggcgccgggaaggtcgcgagcggcgaacgcgccggagagaggnggaggaggcggcgaacgaagaagctttcagc

SEQ ID NO: 22583 - DNA, 1239 bp, Oryza sativa
  Clone ID: TF_OsC29695_2
atggcgacgccacgatccccaagcccccgtggcgacgcgcgcctggactcggcaccgctcctcggtggcggcggcggcggtggcggccgtcgccacggtggcgcgctgcggcggccgtcgctccggggagcggctcggttcctgcgccggagcggtcgccgggcgatgcgcgagccgtccctgctggtgcgggaagcggcggcggatcagctggaggagcggcaggccgactgggcctactcccgccccgtggtggcgctcgacctcctgtggaacctcgccttcatcctcgttgccgccgccgtgctcgcgctgagccgcgaagagagcccgtccatgccgctccgcctctggatcgttgggtacgccgttcagtgcgtcctccacatggcctgcgtcgccatcgagtaccgtatgcgccgcggccagagcggtgaatcccccatggccgccgacgaggagacaggaaccgatggatcgtcgtcgtcaagtgacgaggacgccggcgagcgtgctccccgtggccgcaatggcgattatgttcgtattgcaaaacatctggagtctgctaatacaatgttctcctttatatggtggataatcggattttactgggtatctgctggtgggcaagttcttactcatgatgcacctcaactttactggctttgcatcgtctttctggcatttgatgttttctttgtcgtcttttgtgttgctttggcttgcatcattggaattgctgtttgttgctgcctcccatgtatcatagcaattttatatgctgtgtctgatcaggagggagcatcggaagatgatattcgccaaattccaagatacaaatttcggaggatggatgagcctgaaaagcaatctgtcaacatgactggatcttccggtggaataatgatagaatgtggcaccaaccaacctattgaaaaagtacttgcagctgaagatgcggagtgctgcatttgcctgtcagcgtatgatgatggtgcagagctgcgtgagctcccttgtgggcaccatttccactgtgtctgcattgataaatggctgcacatcaatgcgacttgtcccctatgcaagttcaatgttcgaaaaaacagtagcagcagtggtagtgaagaagtataaatctccacgagagaatccaagcataatcggtatttagcttctcgtcccacgcgacttctgtcacaactgtggtacttttcatgtcatatcccctagagt

SEQ ID NO: 22584 - DNA, 1113 bp, Oryza sativa
  Clone ID: TF_OsC7412_3
agtaaaagaatggctagcaatatataatataataatataaccattgtacatttatggatcatacaacagccatgaggcccccacagggaatgcagagcatagcggcacgggcaaacagagtacagtggagctaagccaggagaggactgaagaacgcaaaagatcatagtgctggtccctcgcatgtgtccgaaagttttatctgccttctccccaacattacaagatgcgaccatatgatgcccgctatttgctcccatcaagccccataatggcagcaaagattggtcatgcctggttgctgtccgatgtggaaacttccgcgctgcacatcgggcaaaccttatttatttgaagccattggtttatgcactcaggatggtatgaatgcttgcaggggagtgcaatcaaagattcaccatcctcaaattccacacgacaaataacacattgctctgtgttgccatcttggacaccttctgccttgtaagttactgaaggtagagaagcaagtgtagcagcagagaggcctctgtgtcctgtaccaaccgcttctcccaatgcaactaattcctcataagaatactcatctgggtcaacctcttgccacgcatcctgtggatcattcgcatgctcctctacaggctccacaggtctccaatcgctgatccccgcgagagccataagtcgcgcggctacttcgcgctcctcggcatcctgcagagctcgtgcataagcctcatcgtcctcgtactccgcggggtctagctctggctcgacttcctcctcatcatactcctcgtcgaacccctcctcctcgaactcgcttccctcagccccctccccatctcgctctccctcgccacgaccctccccaacggcgtgctcgtggtggtggacgcggaggtggtgctccagctcctcctcgtagtcctcctcggcctcgtcctcctctcgtagctcccggcatccgagctcccgtaatcgctgccctcgccgacgcctccgcccatgcgaagcatcatgtacgcccgctcctgctcctggagcacgcgggccagggcgaggtcggcgtcgacctggctgagcgccgtgaacggccgccgcgcctcc

SEQ ID NO: 22585 - DNA, 2687 bp, Oryza sativa
  Clone ID: TF_OsC76986_1
ttttttttttttttttcagagacgttaagctcatctggggctggaattttttttctctttacaaaatagtcctagtaaaaaaaatgtggaaggaaattgacaaaaaaaacctcgtgaggtcctgtaattacagggggctacgcccctacgatccaccggtacagcaccatgaacgccgtctcctcctcctccgcccccggcggcgacatcctcaccgcctccgcgtcccacagccatggctcctcctggctgtggctatggtggctctggtagctctggctccaccgggagctccaccgcccggagaaggacgatagggatgacgcggaggtggccagccgttccacgtactcgcgcagccagccgcgcgtcgcgcccgccgcctcggccaccgcctcgccgggaggcggtggagactgctcggctgctggcttgtcttccttgactgcggcggcgctcctggttgtcatgggcgcggcgcgggagacgacggcctcgacctcctcgtcgatgtggtagtcgaacgtgccgagcgagtaggtggggcgggcgttgccgccggtggccgtcgacgcgctgcggttgctgacgctgcccatctcgacgcggaagctcctggaacggtccctgctcctcggctccggcggcggcggctgctcggcggcgaggatggcggagatcgaggggtgcgggagcgtgacggtggcgcggcagagcgggcaggacggggtggtgcggagccacgcgtcgacgcaggcggcgtggaacgcgtggcggcacgccgggagcagccgcagctcggcgtccagcgtgaacggcgacaggcagacggcgcagtccggtgagctcttggggagcgccgccagcgacgacgccatcgtgaacagcggcagcgactcgatcagccgctgcttctcgtcgcccaccacctccttcttcccctcacaaaccccattacgccgcaccggagaagcgtccgccgcctcgacgttgtgcacctcacggcgcgtccgtgggagcggcggcggcggcggcggcggcggcgacgacccctgtaccgcagtgttcatgctgtattatttttggaccgggtcataaagggcggagccttttgttgggccaagaagcccatcagccggtttctccgccgcggccttcctctgcctcctgcgaacagcccacgcgacggcgaaggcaaccaacaccgcaaggaagcaaccggcggccacaccgccgacggcggcgcagacgacgctcttcttcctggactccgatctgcttccgtccaccgtgctgaatacctgcttcagcgggatcggcgggtttggcccggcaaggctgtgggttccgtacttgtggagcttgaacacctcgaggccgttgagtatggcgtcgaagtactccggcctggagctgaggtccgggtgcagcgccaccagcagatccatctggccggagcccgccgtgacgacgaggtaatccgtgtacaccgccctcccgatccctccgctccacactatcacgtccatctgagactgcgccgtctggttgttgatgtagatgaagaatgatctctggttcaccttcgttatcgggtactggatctcgcagaagtggaacctgaggaggtagtagaagccggcgtcgacggggaggatccaggtgaggttgtagttgaggttgatctgcgcgttcgggcccatcgacctcgccgtcgcgtacacgtcctccggtgcggcgtacttcggcaccgacggcgggttgtaccggacgctgacgttgctgtccttcgcgaaggtcacaccgaaggccgcgccgaagatgtagggcgcgtcgttgtcccacgtgcggtagaaaccgccggcgtcgtcccgtggggtgatggcctcgccgccgacgttgaggcggtacatcgtctggaacgccgtgtcggcgcggaggggcatcgggttcgggcgcccgccgttggcgaaggcgggcaccggcgtcgtgaacatgtccggcgtgggcacgacctcgatgccgttgacgaacgcgtagtggtgggacccgtggccgggggcgccacgcggcgagggggcgaaggtgacgttgaggctcgtggcgccggagctgacgttcagcgagaactcgcggacgatgtacgcgtagccgaccgcgagcgcggtctgcgacgcgttgaagtcgcggaggagcgtgatgccgcccgcggtgacgccgaacagcgcgtccgcggcggcggcggcggcgccgaggttgccgtaggcggacgggtagaagtagagacggaggaacacgcggccgggcttgacggggaaggagtaggtgtagctggagctgaacacgcgcgccgtcatgtacggcacgggggaaggcagcgaggggtcctggtacgacgcgtcggccgcgacgccggtcaccgacggcgcgaacgtggacacggcgtcaccgtcccacgcccggccgtccccgtcggtggcggaggcagacgcgccgcagctcaggcgaatttgtccggggacggtggtctctgcttcgccgctgccgctatccgccgcggcaagcgacacgatggccagcagtaagaagagccatcggaacagagtcgatcctgccatgggcgggacgagtagatgctgttcttgctggacttgcgccaattgggtaggccggcgtaaagctcaaat

SEQ ID NO: 22586 - DNA, 392 bp, Oryza sativa
  Clone ID: TF_uC-osrocyp036f12b1
tttatctgaggccgttggcttggaaatgagaggaatgggccaagatactgcatatcatcctggtctttatttaacagctgctcaaagagaggcagttgaggcactgattcaagaactcccgaagttcagactgaaagctgttcctacagactgcagtgagtgtccaatctgccttgaagaattccatgttggcaacgaggtccgtgggctcccgtgcgcgcacaatttccatgtggagtgcatcgaccagtggctccggctgaacgtcaagtgcccccgttgccggtgctccgtcttccccaacctcgacctgagcgcgctcaacaacctccggccatcctccgagccggaccggtcgtcggccagcgaggtgacagcggcgacgatggcgc

SEQ ID NO: 22587 - DNA, 1507 bp, Oryza sativa
  Clone ID: TF_OsC20421_1
tcgagacctaatttcccaaagaaaaaaaaaagaaaaacaaaatcccatctcccaccgccgccgcagcccaccaccagccgccgcctcggccgcgagatcgccggccgccgccatgtcgaatccggccgcctactacgccgccgtcgcgcggaagcagtacttctgctaccaatgcaaccgcaccgtcctcctcccggcctccgccgccgccgccggggcgctctcctgcccggagtgccgcggggatttcatcgaggaggtcaacgtccccgcccccgccatcatccccttccccttcgccttccccccgatgatgcccaccgccacctccgcctccgccgccgccgccgccgcggcctcgccgacccagtcctcctcctcgtccgccgccacgtcgccatccagcgacctctccgccttcctcaacagcatgctcggcccgctcaacctccgcaccgacgagcggatgccgggaaccacctccgccgcgggcacggcgacccccgaggacgagcccgacgggttcgacgcggtcacgttcttccagaactacctccagaatctcatggacggcggcgccaacatccaggtcctcctcgacgacgccagcgtcggcctcgcccccggcatcggccgcgtcggcggcgccagcttcggggactacttcgtcggcccgggcctggagcagctcatcgagcagctcaccgagaacgacccgaaccgctacggcacgccgccggcggccaagtcggctctctccacgctccccgatgtcgtcgtgaccgacgccatggtcgccgcggcggatggcgccgagtgcgccgtctgcaaggaggatttctcgcctggggaaggggccaagcagatgccctgcaagcacatttaccacgccgactgcatcatgccatggctggatctccacaattcatgccccatatgccgctttgagctgcctactgatgaccctgattacgaggggcgtaagaaatcaaacccacagccaactgctggcgttgatgccggagctgcatctgggagttctactgctgctgaggagcgagaggagagtggggagagtgcgaggttggtcgaacggcggtttaacgtgtcgctgccatggccttttagtggattgggatcgcaaacgccgcagcaggatgggagcaatgggggcgctggtgccagtggctcgaaggatggaggcgcatccagtgacaaaaaataagcataaatgtgcgattgattggaggttttcctcttggatctggcgttcaaaggtctacaatatttatgtgtcgctgccacttatatactatagacatcaaaagaccaaagaaatttacagtctttttatccgctggaacaattgttcattcttgttctcgctgcccgttaggtcatgtacacaaggcacggaaactgccgaggcaggaaacgtgcgttgggagtttgagacttttatgtgtagatttgttaattaaattcatcaaagtaccaaacttggagc

SEQ ID NO: 22588 - DNA, 663 bp, Oryza sativa
  Clone ID: TF_OsC409067_1
atggatccgccggctcgcagattgatggattctcgggcggcgcagttggcggcgccacttcctgatccatactcggcagaaacatttgaagacctactccgagaattgggagtcgaccctagtatccacaccatagtccgtagcgccgggagatggatggatccggcagcggcagcagcacgagttccagtgagattccaccgcacgctccaacgcctaggaatcgaccccaatagcgatgcccggagcatccgcgacatgctacaagagttctatcgagtggtgtaccatggagaggtgtactgggctggccgagtcatcaggcctcgtccttcgtccatgccaacgcccgtgataggacgacgtcgccgcgccgccgacggggatgccccgatgcagccgccgagcaagtacgctcgagtacacgccgtgtcgcgcgatgtcctcctgggcctcgcgctgacgaaggcgtgcgacgcgaggcaggaggagtgcgccgtgtgcctcagcgacttcgaggagaaagacaggctgaggacgatgccgtgtaaccactccttccacgagatctgcctcttccgttggctcagcgatagctgcctctgccctctctgccgctacgcgctgcccaagcagcagcaggtccgtttgtaaagctgctga

SEQ ID NO: 22589 - DNA, 513 bp, Oryza sativa; identical to SEQ ID NO: 13451
  Clone ID: TF_OsC343295_1

SEQ ID NO: 22590 - DNA, 801 bp, Oryza sativa
  Clone ID: TF_OsC17119_2
aaagaaagaagcacctcgacattccttctatttactttatacttaaacaaagggaaagcattgcatacttacatttgcatgcgagtatatacatagatagcacggcaaaatcctagttaatccagatcaccctttcttaaatttgagaggagttattaattaatccacatcatctatgagcacacgcggaagaggaggaatcggatccgtgccgcgttgctccgggccctcgccgtcatcgtgggcccggcccatgaccagcacgctcagcaccacgcgcctccccctcatcaccaccctctccccatgcaccatcgccaccaccacctcctcctcctccgcctccgccgccgtcgccggcggcatctcgtgccggcacagcgggcagctgccgtggatccccagccaccgctccacgcactcgccgtggaaccggtgcccgcacggcatctccttcctcctcccgctcccgcacgtctccctggactcctccccgtcgtcgaggcagatcgcgcagtcggacgcctcctcgccgtcgtcatcctcctcctcgacctccctcagcgccgcgatcgatgccctggacgccggggccacgccgccgccaccgtcggcgctggcgctgccgtcctcgtagaagacgtggtgcaccaggtacgcccgcccccgcagctccggcgccgacgagacggacgccccgacgagcaccggcggcacgcccgccaccgtccgcccgctgtccctgtccgtcaccggcgtcacgatcgacaccatcgacgagggagcattggtgagcgacat

SEQ ID NO: 22591 - DNA, 1226 bp, Oryza sativa
  Clone ID: TF_OsC206824_1
gctgcaggaatcggcacgaggatcgacgacgactgattcggttcatgatccatcagaaggaatgaatgggagtcggcagatggagctgcactacataaatactggatttccatacacccgcgccgcgggcttcggcgcgtgccttgagggcctcacatatgctcatgctgattttgctattgcagatgctttccatgatcaggctaatccatactgggcaatgatgcatacaaactcgtacaagtatggatattccggtgcaggaaattattacagttatgggcatgtttatgatatgaatgattacatgcatagggcagatggtggacgcagaatctgggataatgctacacctgtaaacaacactgaatccccaaatgtagtcttgcagggtggagaaactcctcatgcaaatacaagctctactactgaggaatgtatccaacaacaagtacaccagaattcaagcagtccacaggtcatttggcaagacaacattgatcctgacaatatgacatatgaggaattgttggatttgggtgaggcagttggaacccaaagccgtggtctctcccaagaacgcatttcattacttccagtcaccaagtacaaatgtggtttcttttcaaggaagaaaacacgccgtgaaaggtgtgtaatttgccaaatggagtacaggagagggaatctgcagatgacgcttccctgcaagcatgtgtaccatgccagctgtgtaacaagatggcttagcataaacaaggtttgccctgtttgctttgctgaggttcctggtgacgaacccaagaggcaatgagtcaaggccgccaaaatgttcttgcgcccagactcagcccacactgtaccccaacggatgcatggtttctcctgcttggcagcgctcccctttcccccttgtcttgcgtcttggattctgttcgcaaatataggttataaccagatgtagttggatcttggaacctgttctgagaggtttgccgtacactggagagttcgaatgtgaactgtaaccctgtgctagatgaagcatgctggatcacgcgcgcttgcgaggtgtttttgtccactgcaaagagcattgcactagcctgtgttatttgaattcaattaagattttgtggacagaaaaaattcgtgtgttacatcccctgcttttagcctgtcaaaaaaaaaaaaaaaaaaaaaaaaaaaaaaaaaaaaaaaaaaaa

SEQ ID NO: 22592 - DNA, 414 bp, Oryza sativa; identical to SEQ ID NO: 13452
  Clone ID: TF_OsC350539_1

SEQ ID NO: 22593 - DNA, 1042 bp, Oryza sativa
  Clone ID: TF_OsC3972_1
ggagtgtgtgttttctttggaatagcgtggggagattggattaaacggcttgccaaattagcaagcaccaaactgtggcactgctctgcttcaacaaatttaatatactactagtaatctgcaaaaaaaaaaggattcacaacttcgcaggcttggaaggtggaatcgacctatatagcagcaaactattcctacttgtgtttttttggggggagttctccttggcgcctatgtacaaatcaggacgcctatgtgcccgtgtgccgtagttgaggcagctctgtcatgccggttgcaacgaaattgaccggggcggtggattggcgggctcactggaaaccgcccaagccgttgagcagcagctcgtgtggtcgcagcagcgtcggggtgggcgccagcggcagcggggatgggtagtacgagaggtcgtagtcggaggggtcaggcaggccggaggcggcgggcaagagctcgtcggggatgagcggcgcgcggcagagcgggcaggtgcgctgctcgtgggccatccagcggtcgaggcagccgcggtggaagacgtggcggcagttggacagccgccgcacctcgtcgcgcccgcagatgccgctgaggcagaccgcgcagtcgccgccaccgcacaccgccgccggggcggacgccaccagctcgtcgaaccgcaccacggggagggcctcctcgatggccatcggcggaatcgccctgaactcgggccggcggtgctggagcgccgacgacgacgcccaaccctccgccatcccgccgccgcgcccctgcagcatcatgtcctgctccgtggccgccaggccgggcgggttgtcgatgaggtcgccgaggccgactgcgtggaaggcccagaggagaaagcgatggaggtggccgaggaggaggagcacctggagcagcagcctcgggaggagcagctccgagtagcccaccgggaagcccatggcgatcttggatacagccgaattgtgagctgagctgaggtgagcttgcgtctgtgccgcgtgcgccctcgtgc

SEQ ID NO: 22594 - DNA, 1324 bp, Oryza sativa
  Clone ID: TF_OsC12910_1
ggacttcaaattgctgtatagaatgggttgtctgttaataacaaaaaatttttctaccttgatttatttcctgctacttttctttgcccacgctgcattgtgtggagtgagagcaagaacagttctggacatttgagcaacaagttgaatctaaacaaagaatataatgaaaatctatgtaaacaaaatgaatctgcatcttgttcaattctctcaagtacactaatgtttcgtagcagaaccgacggatttgcagatggggcaccaattcttttgccgaagccattgttggatgcaagcaagatgatagtaatgcttgcacgccatctcggccacctcctcggcaggtaaatattcctcctggcatattatgcatttgatatcaccatcttcatgacttgttgaagctgagggcacatagtggattctcttcagacaatttgacagttcatcctctggaaggccagtgctcacggtaccaattgtttcccctagagcaagcaattcctcataagacatgtcgtcgatgtccattctcattcctctatgcctatcactggaagcatcctcatcactttcatccacaccgaagcgccagtaaatcagcgagtctatcaaactgtgctccaaatgagatactgctatcaccacgatttctggcattgcttccatttgtgcctccatccttccttgtcttggaactgatcgatgcaatgtcttgaaattgatctactactactactcaaggaacctgcactagatgtgtttgatgatgatgggctactccctccactcaatgagcgcttcctcgacgaatttactctttctttcaaatggtccagaagatcctgtccagcagtttctcttctaggtctgttgccggtttcgctacaggtgccggctgcattcctcctgctgccataagccattcttccttgaggtaacagcctgttggatccactgacaagtagtgatctctgaggaatcactgcttctttggttggcctgcgcattttcttctctttgtcacggaaaagcttactgctacagccagtgcgcgtacagcaagcggtcgctttgtggcgcgggctatcttccctatatacaaggattgagccccctttggtcaatagaaggccaccaactgttctcctccccatggtttcgtccatattcaacctcccaatcttcttcttcctcttcctctgctgcgtgctccagctagaagggtagagagagagagagagagagccgaacaactcaactcgatgagagaggaggtctcaaaccctcaacaatgtctcgtgcgcttgcggacgcgtgg

SEQ ID NO: 22595 - DNA, 1566 bp, Oryza sativa
  Clone ID: TF_OsC29912_1
cacgcgtccggaagacagaaacgcctgccccgatccccatggcggggctcgccggcgacgactcctcattcttcggggacgacggcgacggcgatgagttctgctacgggccgttcgacgtcgaggatctctgctacggcgcctccgatgtcgacgacgattgggaggagttctgcgacggccccttcggcggcggcggcgtggaggagttctgcgtctccggtttctccgtccgcgacctctccgacgcgtcatcctccggcgcccgcgagacgggcgacccccacgacgacgatcccctcccccaaaccctagcccgctccctcgactccgacggcgacctctccgccaccctccaccagatcgtgtccgcgatgcgcctctccgaggacgaagaggaggaggaggaggaggagctactggtcctcggccacggccacggcgtcggcatcggcggcggcggcgacgtagatgggttcatggtgagcgccttcgatctcgacacagcgatggccattgggggcatcctcgaggacatccacgaggtgatgggcgccgatgaggtacgggaagaggtggtggtggaggaggaggaggccggcaatggcggggggatcatgccgaatggattcgagttcgggccgccgccgcgggccatcagtggcaccgccgcgggattccggatgatggtggacgccgatgacactgactccgatgacttccagtttgtcgaggtactcggaggaggacaggtcagggaggccggtgccggcatgagcatgcggccctcgcgtgcgtcccaattggtggtggagagcttgccggaggcgacgctcagtgaagaggaggcctctcgtggctgcgccgtgtgcaaggactcttttgcgtcggggcagatcgtcgccttgctcccgtgcaagcattacttccatggggactgtatctggccatggttaactatcaggaccacttgccctgtctgccggcaccaagttcgcactgaagatgacgattatgaacaacgtatggctcggcgcgtgattgttctagcagcagtggagcatcagggtgcaccggcacagggctgtggagacagcgcaaccatgggtgctgaaggcgcaagtgaatgtgtggtagaaaatggacctgagaaaacttcattttgatgcggtcccagtatttggtatgatgatcaggcagctaagacaagaaactgaactgacgtaggtagagggaccccccaactcccttggaatgttggcaggaaaactgtaccggcatccaacattttggctaacactcagcatattgttgtcctatgatatgctgtaaatgtacaaaactaagtagttcgatccactcattttctcgtttttcggctggtatgaatgatgagttgtcggttatcttcaaggctcttgccctaatctgattagctacagttcctttttcttgtttttgaagctgaaaacagaattccccttcgaatgcatgatttgtaatggttgggatttgttgaatcttttatcagatcgcccaggagattgcttttgacatgtgatagct

SEQ ID NO: 22596 - DNA, 1273 bp, Oryza sativa
  Clone ID: TF_OsC185398_1
atgaacaaaagatttaacccacagtaccgggcatggcgcccacccacagggccacagggccacagggccgggccagaaagcggaatcgtcccaccaacaagagactacgtggtcgaggaggaggacgaggagcgccacccccacccccaccaccgcctcctcctcgacgacgacgcggcggggttcgaccacgacgaaaccctagccgcccccgcgcccgccccgggctccccgttctccttcgcctccgaccccgaccccgaccccgacatcgacctcgagctccgcctctcctcccgctcccctcccttctgggactgcctcgaggacgacctcgccgacgaggagatggtcgggggcggattcgagtgggaggagatcgccgacgccgctgtccctgcccccggagccgtcgctgctggtggtggtggtggtggtggaggaggagatgggggccttgttggggacggcgacgtgttcgggttcctcgacgagagggagatcctcggcgcgatggaggggctcgacagcggcgacgacgaatcggggttctccgacgagccgttcgacttcggcgacgagggggacgacataggggacatcttccggagcgtggggtgggaggtgctcccggtgccgctggacgaggacgacttcgaggtgctgccggggcacgtcgcggacgccgcggcgggaggggcgccccccgcggcgcgcgcggcggtggagcggctccaggtggtgccggtcggcggcggcggggaggaggcggcggcggcgtcgcggggttgcgctgtgtgcaaggacgggatcgcgcagggggagctcgccacgcagctgccgtgcgcgcacttgtaccacggggcgtgcatcgaaccgtggctcgccatccggaactcgtgtccggtgtgccgttacgagctgcccaccgatgaccccgagtacgagaagcggcgggtgaagcggcgttcttctggtgactccgtggcgcaattgggtactcctatgcaaatttgagctaggattgcttggtgatatgtgttggttgccattctgtggaattgagaaacttcactctctaactgctcattgggatgcttcgagagtgtcatacctctttgatctcaaactttttagtgcgtagctgtcatgattggtaattgaacggtaagaaccattgctagaatttagaactgctgtaaatacgttgtgctgctccaataatacagaaaattgtttcaatgtttccccaaaaaaaaaaaaaaaaaaaaaa

SEQ ID NO: 22597 - DNA, 1523 bp, Oryza sativa
  unsure (1)..(1523): unsure at all n locations
  Clone ID: TF_OsC12034_1
aggagaaagtattattttgttaaccattattaaaaaaaatcagtctcccaaagctgccacctttgctggttttcttggtttgttcagtttgttgcttgtgtgtcccccagttgcatataaacatgggcatgtcacacctcacaacccccctttgctttggccattttctcaagcacctaatttgcttggatccttcttgcacttgcaacttgcaaaacaaccaaaggaaatactagtagcatcatcaagcgaagaaggtcagctcaaaagggcgttgtgtgcttcgcctcgcgaaatgagagtcgcattgctccggagatgatggtcgccggagtaatcaggagcaaccaggatggcggcggcggcggcgggacggtgtccggtgcggcgaggattagcccggcggtggtgttcgtcctggtgatattggctgtggtgctgttcgtgtccgggttgctgcatcttcttgtcagattcttgctcaggcgcggccgtgggcgagatggcggcggcggcggcgacgcggaggcggcggagggtgtggaggagtcggcgttgcaacggcagctgcagcagctgttccacctgcacgacgccgggctggaccaggacgtcatcgacgcgctcccggtgttcatgtaccgggaggtggtggtcggcgtcggcggcggcggcggcgcgggcggcggagccaaggagccgttcgactgcgcggtctgcctgtgcgagttcgccggcgacgaccggctccggctgctgccggtgtgcggccacgcgttccacatcgactgcatcgacacgtggctgctctccaactccacgtgcccgctctgccgcgccgcgctcggcgccgacgccgccgctctgttcgacgccgcgttcgacgagatggccgacgaggaggaccggaagcagcaggaggacgccgtgttccccgtccgcctcggcaagttcaagaacctctccagggcggtcggccccgtccacgaccgcgacgacgccgccgccgccgccgccggcgtcggcgtcggcggtggcattatcacgcgagaggaaggcgagtcgagcagcagcagcttggacgccaggcggtgcttctccatgggctcctaccagtacgtcctcgccgaggcgagcttgcaggtgtccgtacaccggaggcacggcgacggcaatggcagggcgaggctgagagggctcgccggcgccaacccggccggcaacgacgccgccgccgccgccgacgggaagaagatcggcgccggcagcaagggcgacagcttctcggtgtccaagatttggcagtggccgcggcaaggcaaggggaagctgccggtgctcgcctccgacgactcgccggcggtggacggccggctgccgtggccgaggagaagccccggggcttcctgatgctgatttcncatggtgtgtttgcaatttgcaaaactttttctagagctaattctgctcatctttttaacaccgtattaatcaatctgttcatagccaattcgttccattct

SEQ ID NO: 22598 - DNA, 1938 bp, Oryza sativa; identical to SEQ ID NO: 13524
  Clone ID: TF_OsC5703_1

SEQ ID NO: 22599 - DNA, 2037 bp, Oryza sativa
  Clone ID: TF_OsC1528_2358
acagaaaggggtatggtatgcatggactgcgctgaatggagaaatttcttcaggtagcagaggattaactggggatctacatatatgtacaagctggctgaaatacagaggagcgaggcaggctcactcgacgactacaaaaggtatatacatgtctcggtatagtatcgttcaggtcgttaaattaaatgcaaggaatcgaccgcgtggagcaggcagaaacagaatcgtatggctctcttcttcggcttcggcaagggcaaggcaatcggcgattgcctggatgaacacagctgcttcgcgcgtgccgtgggcccgtggagcagagacgaagacaatgcttgctgttgaaaggtcttcaggcggcaccttcgcacacgtccccacggcacaacgggcagaccctgtgtacttctttgagccacttgtcaacacacagcaagtgaaactcgtgtttgcacgggaggcttcttatctgatctccatcctcatattcagttaagcagatgtgacactgttccatgtcatcactgcattgggctgtctgctttttgtagctcttacatggtaatgaattaaccacagattctggagcctgggcagagaccatggaaagcgaaagtgatgcaggttgccggtgaatttcatccaatacctcaaataatgcctcggttaacatgacaattcttgatatacttgcacgggcactagattcttcagcaatcaagaaggaatcacaggtgcatctgccaatttggtggatccccaaaggacaagcaacggtactttggtcagtaccgctatcaaaaacagcacgccgatgctccctaatccgagatcttgaatactggcttactctgattgaaccatggcgtctccgatgaaagaaccgtgcctcctcaatctcatccgcaaaaagttcatcaccaaggtctagccatctgctgtaaaatcccagatcatcggtatcagaatctaaatatcctcttgaactacgtctggaaaatgtgtcccacagaacccttctatggctcctcctcatttcattgctgcttgaatctctaacacgcgctggaccatcgtttgagaaaatgctcatcatgtcatcatgtaatgtatttccaccaatctcaccttgtgtcccactaaatatggggacatcttctctgctagggactgtatctggaagtgattctccaattgtagatggtgcagttgaagtagcaggcaacacagatgttaagctagattgagaagtatctgatctttcacttgacataatagttgtggatgaagtcccatgagcaatctctccagcctccaagtcagccatgatcctttcagatgccctctgtgaggaggagaaaccagattcagaaacggggccaccaacttctggaatgcaaactgtgtcagtctcagcattgtttgctgcaggttctaaaatatctcgtccaatatgactgattccttctctagacgttatctcagcataagcaacttcattactgaaatttcccctaggcatgacttcctttcctgatgaactctgacgaacacttgtttcagcgatttctgttcccagggcatcttccttgttttcgtgactgtttaagtgattgaacctgagatgatgacttattgtgcttgaagatggatgcactcttggatctgactcacttgatatgcggatatccttagcagcgacagaagcccgaaagtccatctcagcaaccgctcgagctgcttgccaagattccacctcgtgagctcgcgaggaggacgcggcggtcgcgccgccgccgccgccgcctccggtggccgccccagaggatccgccgccgaagcaccccgcgagcccgagcccgaggccgcgcgccgccgcccgccgccgcggcggcgcatcggcgcggctgctgcaggagaccatttggctcgcgcttttctggggttttttttctctctctcccagtttttatccattctactcttgtcggagaacgagagagagaaaaatgagtagcgcggaaagcgtgg

SEQ ID NO: 22600 - DNA, 1231 bp, Oryza sativa
  Clone ID: TF_OsC1867_1
gtcgattattatggtgcggggtgtcgagcagggcggccccgccatggacgagtcttcgtcgtcgtcgtcgccgtcgccggtgtccgcgcctgcagggcaggcagccatgacggccggcggcatcgccaccgtggcggccgtgctcatcgtcttcgcggcgctcacgctcgccttcgtcctgctccagtgctactgcgacgagcggcgccgcgccgtgacgacgacgtcgacgagcgggcgcgggcggcggccgcggccgcggcggcgctctgggagcggcggggacggtggaacgggaggaggggtcgacccggaggtgctccggtcgctgccggtcacggtgtacagccgcagcacggcggcggcggcggcgaaggaggaggaggaggaggacgacgacggcgtcgagtgcgcggtgtgcctcgcggagctcgaggacggcgaggaggccaggttcctcccccggtgcggccacggcttccacgccgagtgcgtcgacatgtggctcggctcccactccacctgcccgctctgccgcctcaccgtcgtcgtgccgccgccgcctcttcctcccgtcccgccggagccgccggcgagctacaccgtgagcctcccggcgagcgtcctgctcggcctgtccgaccatggcgccggcgcggtgaccatgacagcggagggccgcagcacgctggtgatcgagatccccgaatccgcggcttcgacgaccccgcgcgacgcggcggcgaggtcgtcgccgagcttggcgcggctgaggtcactgagaaggctctggagcttcgggcggcaaggggcggcggggtcgacgtcgtcatgctcctgcgccaccggaggagacaacgacgacggcgacgtcgagcacggtgtcagcgtcaccgtcgccatccgcgccgtggaggcggcaacgccggcacggccaccggaggccgaggccggtgcaagaaccgccgccgcgcatgtccggaattgacggcggcgaggtcgtcaagtattataaggcgatctccctgtacatatcggtagaaccgaactggaatcgccattaattcctacgattttagaaaatatcaatttcatttttaagattagaaacatttaagtagaaattatttgttcatcagtcaagtagcaaagagaaatgtatggatggcagtgagaagcatccctctccgtatgttccaaaaaaaaaaaaaaaaaatctctccctcgtgcc

SEQ ID NO: 22601 - DNA, 1245 bp, Oryza sativa
  Clone ID: TF_OsC4209_1
aatacaccggccatccgaggagagaaaggcaggcgagagcagcagcgagaatcaataaacggagacaaagaagaaatacaaaccgactgatacggggactaaactaccataacaataagagaataactaacacacaaccatcgagtagaccatcagccacaccatatcaccccgcgcactgggcgctacgcccaactcaacggacgtggagggcacctatagcgcggcgcgcccgggagtgcgcagtggacgacgggggtgggtggcggtcttccctgttggctggtctcgtttgtttttttttttcaaactaaagaaaaagcaatcggtctcattaaatccaccatgtgaatatcaccaaacaaggcatagcatagcgaaatagaatacacagggggagagaaactactgccgccatcattcgtaccatcaatcatcatcgactttagctagcaatctcttccagcacaaatgaaatatctcttgtctcagaacgtcagccagggacgcaagtactccatctgccatcacgtaatgtgcagcagcaattcagtggcctccgtggcggtagagcagcagagaacggtagacagcagcaaggtggaggaacacgatcagcagcacgaggaagtcatcgaagaatccaaacagccccagcacgttttcaggaagaatgtcgatggggctcaggacataaattgcactcagggctaccatcatgaccatcctcgccctgaagacaagtgggagggtcctctggggatccagtagttccctgaacagtcttctgatgaaaaagggtaggtcttgcaacctctgagtcaggttgcggggtgttccaccaaatatgcggttgtaatgctgaacctctcctagaacatgctgaatttgcggatcatcatcattatctattgatacatttgctggtaccagaagattaataaggcgacggcaaatgggacacttgcaaggctgtacagaaggtccatgattccaaacacggataatgcactctccgcagaaccaatgggagcagttggcctggcaggggatccggaagcggtcgtggcagaccgagcagacgtcgtcctccggcggcacagccgacgccgacgaggagctcatccccttccctccgtcgagcggacgcggtgtccgcggtttttttccgagtcgccgacaggaggagagaaatttgggagggcagctggttgagttgctttcttcagccacggccacgatccg

SEQ ID NO: 22602 - DNA, 594 bp, Oryza sativa; identical to SEQ ID NO: 13472
  Clone ID: TF_OsC387972_1

SEQ ID NO: 22603 - DNA, 723 bp, Oryza sativa
  Clone ID: TF_jC-osroLIB3475P014f09a1
cccccacaaaatctaaacctttaatagcatggatcatttccacaggacatacaatcgtattcttttaacggatccaacaacagtacaacacctgttaaaactgctccagcaaaacggtatgctagcaagcctgtcaaacattttcagatacaatcatcaaaacgccaatgtggcgagagtcagggtgggaggagggacgctgatttccagaatggtggaaaccggcttactccgcaaaagggagatacacgcggtggaagttgttcatggtcagcttcctccggcaggtagggcacttcttctgagcctggattgaggccttgatacactgcttgcaaaaaatgtgaccgcagatggtcgatgacggttcgaccagctcgttcatgcagacagggcaattgaaagttggttccttcggaacggccttctcgggttcagggagtgcattgctaggtgtgtcaattatatgtatcacagggctggtgctgatgttggaggatctctgatgaccatgcctaggatacctgcccagagtcagagatagtagtatatccacatgctcatcaactgcatcccctgcttgtccaggggtagtttcagaatcatcttctatggtcacaacaggttctgtccttggagcctgctgcctcacttgagggaacgagcttgcagaataaatcacaacatcatcattgatatcatccacgataatgggacaactac

SEQ ID NO: 22604 - DNA, 673 bp, Oryza sativa
  unsure (1)..(673): unsure at all n locations
  Clone ID: TF_LIB4309-041-R1-N1-C4
aacatccaatcgaaatgtgatatgtggattgacacaagctaccaattttttctgaaaaatgagaaaagaattatatgctctacagaaacaaaaaaataataaaaaatctttgcgccgctggaagtttcagcaaacaatctagcgactttgattttcgtcaagctatgtacacaaatctaggtgatccagtccccgtgagtctccactctccaacatcacagaaacgttgcagcattatgatcatgaatcctcatggaacagcattacctttgagcagactgggcaagcttgacttctctccatccactcataaatacaacaaagatggaaattgtggttgcattgtaatgtcatctttggattctcataatcatactcttctaggcatattggacagtcgtcctcaaagtcgaaaagatcatgtacttgctctttgccaatgtgcagaccatctgaatggtgttttactgatgatccatcatccttcacagctgtggaaggcccatcatccttgacagctttggaattagatatgctatcagcattcttgctttctccaaggctaccagatttgtggaacgttgntgaagcttgtcatgtcctactactagtgggtgatgctctgtatgatggctgaaatcgagatcatcccaagggcagggccttggcgggc

SEQ ID NO: 22605 - DNA, 646 bp, Oryza sativa
  Clone ID: TF_LIB4506-014-R1-N1-H7
ggcagtaatacggtgtatatactcatctctatttatgtaaaattcgtgtagggtcaaggtgagttctcttatataaagagatttgctcaagcatacatacctcgcaagagcctatacatggggataatatatgcacactcagtacacacacgcacgcactcacacactcatgtactcttcttcgctttcagttgatggggaagacgtggagattgattcagcaccacatagggctgctctgctcgcaaacgcgagcaacacagacgcacgcacctaaaacacctgcctgcttgcttgcctgccttcttgtctgcacagagttgaggcatcagcatcggctgcctagaatagctggaaaaagaggctcgttgagccatcaccgaacgaccggaggtctgctggtttcaccaacgctctgcatagcgggcatgtccgctccctctcgaaccattcagagacacaatcctcgcaaaagatatgcttacagcgcaaaagaatgggagtatgcatcttttcctggcatatagcacacatatctccagtagcactaacctgttcactagttgcgtatgaaccgtaatggaagtctttatgagataacgctctcaatgctgtcaaaaatgattgaaccttttccaccactgat

SEQ ID NO: 22606 - DNA, 1141 bp, Oryza sativa
  Clone ID: TF_OsC8285_1
gttgcgtgcgagctccgatctcctaaacctcctccaattccctcaacgaaatctctctctcgatccgactctgctctctatccggcctcgatcacccccaccaacatcctcctccgattccctcgccttctccttctcctcctccaacttctcgatgacttccactatactaagctagctagcccccgccgatccccgcggggttttagtttagctccgcgccacccaatcgccgcaggtgatctttcccggtcaagaactcgcgattcgggggcggatacggaggaaggaaatctgtggtggattcggatcgagctcttcgttttcttgctctttgtataaattgcgatcaggggcggcggaaacaagggttcttctctgtctctcttcattagcgccggcgacaaggtgaggtgaggtggtggtggaggcgatcgaaatggggtcggtgctgtgctgcttggccgacgacggccgccccgtctgctgcttccgcctcccatggccgatcttcaacgccgctcacaaccacaaccacaactcgggttccattgctcgtccaagagcggatacacgagttgcgcctgatcaaggaagaattagtctcactgctccatcacagcatgattcgatggatactttccgctgcccgccaaggcccttgccttgggatgatcctcgattcagccatcatacagagcatcacccactagtaggaggacatgacaaagcttcaacaacgttccacaaatctggtagccttggagaaagcaagaatgctgatagcatatctaattccaaagctgtcaaggatgatgggccttccacagctgtgaaggatgatggatcatcagtaaaacaccattcagatggtctgcacattggcaaagagcaagtacatgatcttttcgactttgaggacgactgtccaatatgcctagaagagtatgattatgagaatccaaagatgacattacaatgcaaccacaatttccatctttgttgtatttatgagtggatggagagaagtcaagcttgcccagtctgctcaaagaaaaaattggtagcttgtgtcaatccacatatcacatttcgattggatgttacagatgcgcgtttgagtgattgcatttgcttctga

SEQ ID NO: 22607 - DNA, 1319 bp, Oryza sativa
  unsure (1)..(1319): unsure at all n locations
  Clone ID: TF_OsC99441_1
atgggtgcggtgtccatgtcgacaacgacacgcctccccctcgtcgccgccctcctctccgccgctgcttgcgtcgcagcagcgcagccggccaccgccgaggccgccccggagacgcccggcgtaggcatcaaggtgtcgttccgccccagnnnnnnnnnnnnnnnnnnnntcttcaccatgatcttctcgctcaccttccttctcctcatgtacgccaaattctgccatccatcctcccccgtcgccgcccccgcccccacggtcgtcccggcggcggcggcggacgacggcgtcgccaagccggtgatcgagtctctgcctttcttccgattcgcggctctccgcggggccaggcaggggctggagtgcgcggtgtgcctggcgcgcttcgacgacgcggacctgctccgcctcctcccgcgctgccgccacgccttccacctcgactgcgtcgaccgctggctcgagtccaaggccagctgccctctctgccgcgcgcgcgtcgacgccgaagatgccgcgctcggcctcaagtacgcctccagcgcacgcttcgtcccggccgggggggcgtccgagtccgagcgctttgacggcgaccaagacctcctgggcatcttcgtcgagcgcgttccgtcgtcgcggatggagccagcggcagcggcacactgccctgatctggaccgctacaagcaccgcatcgtggtgtcggacgcggtgttcaagagccgatggagcgagatcaactcctccgacctcatcgcgctcgacacggagctgcttcggtccatggagacgatggaggtggagatggagatggagctgtacaaggagacggaggaggaggagacagatcatgatcatcagcggaagacactgctggcggcaagcggcggcaggtcatcagtcgacgcggcggcgagggcgaggatgatatcatcgtcgtcgtcgtcgggatcagtgcggtccatgtcggagatggtgagcctgccgaggctgcgggcggcgatgagggagcgcctggcgcacgaggaccgctgggtccccatcgctcgtcgtacagcgcgctggttcgccggccgcgagagccgccacgacgaggctgccccggtggttgactcgccgccggcgtcccattccaattcccttgtctagtcgtctatctcatctattctaacttcaaatcaaacaaaaagtcaaaacccgcgctgtgggtcccattggtcagtgtctttgttttgttttgttttgttttgttgtaccattattccctgtctgtccaatactattatcatgctggcctggtggggtgggtc

SEQ ID NO: 22608 - DNA, 1063 bp, Oryza sativa
  Clone ID: TF_OsC326943_1
cggcacgaggcagtaagaaagcaaaggcaaattaagcagctagctggttagctgctgctgcagggagaaagaggaattgggtttggaagaagctgcatgcatggcggcgggggcgacgctgtcggtgctcctcctcgtcgccggcgtggtgctcatgctcgtgctgcacgtcgtcgtcgtcttctgggcgctgcgccggggcgtgttcctgcgcggcgcgttccgggtggaggagcgccgggaccagcgggccgccggcctgacgcccgacgagatcgccgtgcttccctgccacgagcgcaaggaagacggcggtggcggcggcggcggcgagtgcgcggtgtgcctggaggcgttccaggcgggcgaccggtgccgcgtgctgccgaggtgcgagcacgggttccacgcccggtgcgtcgactcgtggctgcgccagagccgcgtgtgccccatctgccgcgccgaggtggaagtgtccggctacgccggcaagccggccgcggcggtggccgaggcaagtcaggcgaccacgctggagatcgttactgaaagattgggaggcacagaacgcctcgaggtctcaaatgtgtgtgaagtccatccgcttgattcggttgatcgcatgaaaggagacaactccaacgtcttcctcgtcgccggcctctcgctggtggtcgtcgtccatgtcctcgtgctcctatgggcgctgtggtggggatacggccgctcgcgcctcgccctcgcccgcgcccgcgtcgtcgggcagcacgacgtggcgcgcggcggcctctcggcggaacaggtcggcgagctgccgtgccacgtggtcaaggagggtgccggcgagtgcgcggtgtgcctggaggcgttccgggcgggcgaccggcgccgggtgctgccgaggtgcgagcgcggcttccacgcgcagtgcgtcgactcgtggctgcgcgtgagccgcctgtgccccatctgccgcgccgaggtggccgccagccgcggcaaggaaggtgacgcgccggtggccgaggccgcctccttggagatcgtcgccgaacgatag

SEQ ID NO: 22609 - DNA, 1214 bp, Oryza sativa
  Clone ID: TF_OsC18246_1
tttttttttttttttttttttttgttctctcttgaacttgtaaccctgaaagtgaaactactcgtatgatcgttattgctctcgccaataaacaaactcgaatcatcctactaagctacgtttgtccacagctagcaaaattgagctaaacacctactaagtaccctattacagctgatgagtactcgtagcaaaatcaaatcgcaggaagcacgcgggactcgccggcgacggacaggaagccaatgtcgccgccgccgccgccgtgcctctcgacgctctcgccgtcgccgcagtaatcctccttggcgtcgtcgtccgggccctcgacgcgcgcgacgacgggtgcgcggcagacggggcaggtgggcgcgcgcgtgagcagccaccggtcgacgcactccctgtggaactcgtgcccgcacgacggcagcacgcgcacctcgtccccggcggcgtactccgccggccaggcacaccgcgcacacaccgccctcctcgtccgtcgacgacgtctcctcgtcggcgacggcgccgtcgcggggcatctggaccacgtgcgccgggatcccgtcgagcgcgcgcttggtctccttggacggctctggccgcatcatcgatgaccctccgacgccgtctcgccgtcacagaagcaggcgtagggctcggtgagcattgtcgcccccttcaagcgctgccatccccttcgagcgtctccgccgcggcttgctccaagcgctgccttcgctgcctccacacgctctgagcggagccgttgccgctccttctacctcggctgtggcaacagctccctctgcacggccgcccccttcgagcgtcgtcgctgccgccgccatcgctcattctgctccctccatggaaagtggaaaccattgcgccagatgaagttggggataagatgcttttctgggcaacgctcggctccggatctaggaacatcttcaaaagtgtgaagagaacatggcattcttatattctgcatatcgaagcttagaagttacggtcatatagatttttatcaactacggatggagattcacatatagacttcaataattgttttctcgttgtgtgttggctttattatttctgttcttattattgtgtgagcatttgctctctttaagagaattttgtaataagtggatgtagattctttgaagtaaaggccggaatttttattccaccatatt

SEQ ID NO: 22610 - DNA, 1327 bp, Oryza sativa
  unsure (1)..(1327): unsure at all n locations
  Clone ID: TF_OsC104843_1
aaaagcttctcgaacaccacacggttgggaagagagaggtgagcccacgggaccgggcggactcgccggagccggaggttgccggaggcggcggcggcggcggcatcgcgctcttctccttcgctgcttctccggggaaagaggcaaggttcatcaatggcaactccaaatacctattcagtccatatctcctcagaaacccacaggattgaggcctggttggcatctgatgaagctttagctaggcagttgcaagaggaggagaatgcacatgatgctattgctacaagagaatttgctggtaacgcatccttggaaccatcgtcaccagctgttgagtacagacctcccaataatgcagctcaggttgcaacggaagacaatgttgaccctgataatatgtcttacgagcaactacaagcattaggggaagcagtaggaaatcaatccagaggattatctgatgacctgatatgctatttggtgccttttaagaacaaatgcagcttcttctccaggaagaagaatgatgaggaatgtgtgatctgtaaatcgacttataaaagccgacagaaattgataagattgccctgcagccactgttaccatgcagattgcataactcgctggcttaagatcaataaggcatgcccagtctgcaatgaggaggtatttgggtgaatcacagcgcttgtggcaacgctggtgatgtttgcgttgtgttcagacacgttatgctcctacaccctatgctatacaccggtgctcaaggaaaatgcgttttggtatactcgtactactaactgaaccatgccatggcccatggctgtgatgtgtccatccaactgagttttatcacaaatagataaatctgtgtgtgtactagtactatggttgccatttttctggtaatgcaacctagcagaagcagctaaatagatactctatgtattgcgccatcttttacatgatctctgctgtggaaagaagcacaattgtgaatgttctacacccctactctgccatcttcagttaattcagcaatactgcatttgctctacagcttgtgtgtgtacagtgaacatggttctttcagccaaaacttttgttagcatatagtgatgttcttttcttttcctttcttattttgtaaggtagatgaagcagacatatcataaaccacagtcagaaactttccagcaaaaaggaaaaggcttatgttagtagacttgcttgctttttcctaatgtgtgttatttctttttctttagggtaatgtgtgttactacctccatttcngnttncaaaaaaaaaaaaaaaaaaaaaa

SEQ ID NO: 22611 - DNA, 692 bp, Oryza sativa
  Clone ID: TF_OsC85903_1
actgggaaaaacaagatcaatgattgcacacaagggaatgcccacaaaggtactaactaattaggctttcctttcccatacacatgcagatatacacccccgaagtgaactttgtgctctttatttacaatcttgacatcaaatgttacatcagaatatacttatgtttctactgtactgcagaaacttgtcactgcaagcatcaggtctccacttttctgtcatcactttggtgaactcaagggtgatgaaagcagattatcgctttcattgcaaatcaacaaactacaatccatgagcacgtcttttatgtgcatatgagcagatgaaacaagcaaacatgctagagaagaagacgtgttctatacagtgaatctcgagctagctatacctcttcctgccatcctatcaacacgtcggcgaccaaagggcaagccaaaaaatgatcgaaccacacccccaatctcggtcttgcagagtgggcacactgcatttatcttgagccatttatcgacacattgcacatgaaagaagtgggtgcaaggaagctcacggagctcatcatcatctccgtacttagtaagacagatgcagcacacagcatcttcagctgaaacaatcctttcctttttagttcctgggcccaggatgccaccctcgctaagattctctgagcttgaagcatggtcaac

SEQ ID NO: 22612 - DNA, 636 bp, Oryza sativa; identical to SEQ ID NO: 13482
  Clone ID: TF_OsC394643_1

SEQ ID NO: 22613 - DNA, 642 bp, Oryza sativa
  Clone ID: TF_jC-osflLIB3477P007c06b1
caggctttttcccaaggaaggcataccatgataactgtcctatatgtctatccgctttcagacgccgagaaacactcattacattggcttgcaagcatagttaccatgaaggttgtattgctagatggctcaagattgacaaggcctgcccagtttgcaaatatgaagtgtttggaccttcctagcgtgtgaggaggcgatcaacaaggctgaccaactatgactcgatgagacggcatatagtggttgcagcatctgctctgcagtattaattaaaaagggaaaccttaactcccaaaaaaaacagagaagggaagaaaaagaaagcaaaaaggaaaaaggaaaaagaaaaagaaaagacaaggagaaaagaaatttgaaaacagagatgcttcgtcaagattgtgcatttttttcatgtttttttttggctgtgtacaagcgtaattttgacctgatcgactcaaggcagtcgctcgaggcctttaatttcgtaaagcttcatatgcatgagtgtgcaattgtgtgcctatagtagtatagtacatgttttctgtttgaaacggagtcaaagatctctctcctgccgaccacccatctaaaaaaaaggccatgtgtacatcaatacatgtactgatatat

SEQ ID NO: 22614 - DNA, 633 bp, Oryza sativa; identical to SEQ ID NO: 13486
  Clone ID: TF_OsC105234_1

SEQ ID NO: 22615 - DNA, 1583 bp, Oryza sativa
  Clone ID: TF_OsC157607_1
atggcttcttcctccccttcctcctcctcctcccccccttccgccgccggtgcctcctcctactggtgctacagctgcgaccgcttcgtgcgcgcccccgccccccacgacgactccgccgtcgcctgcccggactgcggcggcggcttcctcgaggagatgagcgcgcccccgccgcgcgccgcctacctccgccgcccgcgcgcgcaccacgccaacgacctgcgcctgcgccgcacgcgccgcgccgcggcggcggcggcggccggcgaccgctcgccgttcaaccccgtcatcgtgcttcgccgctcccccgccgccgccggcgacgacgactccctcgccgccgccaccagcttcgagctcttctacgacgacggcgcgggctccggcctccgcccgctcccggagaccatgtcggacttcctcatgggctccggcttcgagcgcctcctcgaccagctcacccagatcgaggccggcggcctcgcccgcgccagggagaacccaccggcctccaaggcctccgtcgagtccatgcccaccgtcaccatcgccgcctcccacgtcggcgcagactcccactgcgccgtctgcaaggagcccttcgagctcggcgacgaggccagggagatgccctgcagccacatctaccaccaggactgcatcctcccatggctcgcgctccgcaactcctgcccggtctgccgccacgagatgcccaccgacgccgcccgcccgcggcccagcaatgccggcacagaggaggagacggtcggcctcaccatctggaggctgcccggaggcggcttcgccgtcggtaggttcgccggagggaggaggcccgaggagagggagcttccagttgtgtacaccgagatggatggagggttcaacaacggcggcgcgccgaggaggatctcctggggttcgaggcagagccgatcgacggagaggagtgccattaggcgcatcttccgcaatgtgttctcgtgctttggtcgcagccattcatcgaattctcaggcctcgtcttcgcattcgaggccggagttgaacgatgcgtctgaccggagcgccgtgttcagccatggctcaagaagccggagcacgagctggaggctcgaagatggccatgccgacgccatggtgcaaagataggcctcaactgaagtaaggaaggtcgtcgattgtttccatttcgcgcatatgtatttagaggaaaagaaatttgtagtagaacagaattgagaattggtgttgtacataggagcagcatcacatctactagtagatgataacttgcagggaagaagatgcccacgatggtgattctgaaatgagcatttgttgtttagagtgatgaatttgctcttgctggtagcaaatgtcgcttggaattctatgattcattcaaattcattgtggcgatgattctttgcatctgtgagaacggaatgaatgaaaccattttgatgtttgcagtcttgccggactccaataaaaatcttgctctccagaaaaaaaaaaaaaaaaaaaaaaaaaaaaaaaaaaaaaactcgagactagcctcgtccgaattc

SEQ ID NO: 22616 - DNA, 1534 bp, Oryza sativa
  Clone ID: TF_OsC253211_1
ctacaatgttccagtgctgctgctgctgctgtcactgatatccctgtggaagtgggtgctcctctgcagaatattctgaatctgcaaatgcacctctccagcaccacccagtgagtccatggagaaggacctcctcaatggaagaacatttctgtccctcctcactgcaatgcactcatctcccttactgatgctgacatgccatgcattctggttcttcgtcttcttactactgacctgttgatttgtactagtagcatctactgcaggatcagaagctgccgtattggcctcctgctgtggtgcttgtgcaccttcttcttccgcgccagtgatcacctgaatgactaccacctcaggtctcacgaactgatccaatggaagctggctgtcgttggtggctatggctgccctgcagagtggacagttggcgttgccctggagccaagtgtcgatgcagtcaacatggaagacatggaggcagctgggcaggagcctgaccctctcctcttcttggaactcactgatacacactgcacactcgctggaatcagcagtagtgtccttgatggccttcctgtacctgaacgccggcaatgattggatggccgcctcctccagcccacgcggctcggccactgccgggaggctgctggaggcggcaccgcgtcgacggcgggagatgaggccagccgtccgcgtgtcggaggagctgctgctgttccagttgaggcagcagcggatgacaaagatgtagtaggtgagcaggaggacggaggtggtgaggatgcccaggacggtgagcaccagtattgggaagctcgtgatggatggatggtgaggcacaaaagaagaagatgctgaagaagtggagtcgagtgccaatggccgtggcggcggtggcgggaacagcagtgatggcatctgttgcaccgggaagatggggtccctgtctgcatccatggtttgctgcaaacacgagcttaagcacacaagcaggtgagctactgagctagatagaccaggtttgatgatgctgctgatgcaacatatatactggttttcaggtatgaatggtgagaccaaatggtgatgctcaatgtagtggccaacgaggtaggagggaagaatgaaaaggcagcacccgatcaggttggaaaatgcagtggagttgtgaaagaaattgaggaaggaaagaaacccaacctgcttgctgtcggtggagtagagcgccagcaagagcaggacagcagcagtaggagcaatagttgcttgcacaacagcacaacacaaggaaaatgaactagatggagatgctgtgtatgatgatcacggcactggtggtgatggcggcttgatgttttggatgcgattgaagtgtggccgagtgacaggaacgcggctttggagctccaagaatgggaagcaggagagcttgagggcactacgtctctccagtactagagaactgaagcttctcttgtcttgctcgtggaaccttcttgctgtcggtggagtagagcgccatggttga

SEQ ID NO: 22617 - DNA, 1397 bp, Oryza sativa
  unsure (1)..(1397): unsure at all n locations
  Clone ID: TF_OsC29884_1
ccacgcgtccgaatcatttgagcttgtgggtctcctcaaccatattcgattcgtgagggaggggatcgagctctgttgcggtgttgtagatcattatcactcttggtttgtgattctcggaagtcggaagtgttcttcgcaagctcgattttcttttttttgcgatatttttttgtatcgttaaatctcgaatcccgacgggggaggtggttgagtccgagttcgatgctccgggggcctcaagatccagtctcgacgccgttnttgagctctccgtgttgatgtcgtcgcagccggtggcgcgtgtcctcccccgcggcggcggcggcgggttccgcgccttcccggagtccgccccggcttccctccgcttctccgtcggccgccgccgcgccgctcgcctaggggcgcgggcgcgggggtgcccccccgagggggagttcccgccgtcggcgcacccgcaacactacccggggtggcctgggtctctgggcgcgccgcacccttgcggattgcagccggccatgctgacgccgtacgtcgagcaccagaaggctatcacaatccgcaacgacgtcaacctcaagaaggagactcttcggattgagcctgatgaggagtgcccgggccgcttcctcgtcgccttcacctttgacgccacccttgctggaagcatgactgtttacttctttgcaaaagaagagctcaactgcaatctaacggcggtgaaagaagacctgattaagcctgttactgtaagcttcaaagagggtcttggtcagaagttcagacagccttctggcactggaatcaacttctccgtgtttgaggattccgagttattgaagcagggggacatggatgtatatccacttgcagttaaagctgaaacaaccatgcctgttgatcaaaagttggaaggagaagatcaaaagatgaaaactccaaactcacagatcacacaggctctgtttgaaaagaaagaaagcggtgattatcaagttcgagttgctagccagatcctttgggtcaatggaactaggtatgagttgcaggaaatatatggaataggaaactcggtggaaggcgatgctgatgccaatgatcctgggaaagaatgtgttatttgcctctcggagccaagggatactaccgttctcccatgtaggcatatgtgtatgtgcagcgagtgtgccaaggtcctgaggtaccagacgacccggtgcccgatctgccgacagcccgttgagcggctacttgagatcaaagtcaacaacaaagctgaagagcagcagcagccgtcacccgattcaccgatcaaagtcaacagcaaagccgaagagcatcagcagcagccatcccaatcgctgccaatcccacacagggaagaggtgtag

SEQ ID NO: 22618 - DNA, 828 bp, Oryza sativa
  Clone ID: TF_OsC35881_1
ccgcgaggtggcgctccgagttccggcggtggggctccggcggggggggtgcgctcgggcggcaggcaagaaacaaaaggcaatctgtatagaaagatatagaagacgagatgaagatcagaaaatggtgatttcagagattgatgataacatcgaggaggaatgtggcatatgtatggagataaatggcaaagtagttcttccaacttgtagccatgctatgtgcattaaatgctaccgtgactggagatcaagatcccagtcttgtccattctgccgcgatagtctcaagagagtgaactcggccgacctatggatatatacagataacagggacatagtggacatagcgacggtccgaaaggaaaatcttaggcggctcttcatgtacatagacaagttgcccacggtcatccctgaaactgtttttgacgtttacgattcccacgtaaaatgaccttgcactcatgcacaaattctttactggtgtgttactactagtgctgtagaaattgtggagcccttggtgttcatgctgccccgcttgtagaagctgtaagcagctaagctcgccgaggaggctcgctatacaaaggtatatatgtaaattgtcttggctgtatggtgtgtacctttgtgaggagttaggagaatctgatgccagtcagtctgtaagtaaggaagaaccagcaaccattgactttgtttcttttaattgtaagcatttcactttcacccaaaaaaaaaaaaacaccccccgaaaaaaaaaaaaaaaaaaaaaaaaaaaaaaaaaaaaaaggggggggggcctcgtgccgattcctgcag

SEQ ID NO: 22619 - DNA, 447 bp, Oryza sativa
  Clone ID: TF_OsC428898_1
atgctgttcttgaaagagctgcccatctggcaggcgttcgggttctccttgctcacaggggccctcgccggcagcaccctgtacgccgtgtgcgtcctcctcctctgctgcgtcgatcgccgacgtcgacatgccggtgcgccgccgcccgatccgaagatctggctgccggaccacgcgcaccatcgccggcggcgggatgagtcgtcggagatggagtgcagcatatgcctgggggagctggaggagggggagaggtgctgcacgctggcggcgtgcaggcacgagttccacaaggaatgcatctaccgctggctcgccaaccgcaacacctgccctctctgccgccacatccccctcccccctgcttcatcaccaccacctgcgccgccgcctcaccatgcttctcctcctccttccaatgtaccgcctgctgctcatgtttag

SEQ ID NO: 22620 - DNA, 2126 bp, Oryza sativa
  Clone ID: TF_OsC49150_1
tccccgggctgcaggaattcggcacgagcgggctcccccgtacgtctcgcctcgcctgcgccgatccccatctcgcgagcagagcagggaagagggaagaggcgccgtcgtcgcgctgcatcctgtttgcaggataggtgatgataaagcataatagttgaccaaactcgctgtacttctccttaatcaattatgttacaaagaaatatggtgtggacacatcaagttgccagtcctgaaaaccaagttcaacctgaaaatttctatcatggaggtgctgggagcaacttatctaacctgagtgtgcaagttgctgttggagttccaggaaatactgatttccggagtcactatgagagcattaatcttcagcaccagcatgttcagaatccatacccacatgtgggtgttgcttcaagttctgtgttcccatctactatgtacaacccctgcatatcaacaacagcagtggacagatatgttcctcctattcaaagttttggattgggcaatccactactactgcctttatatcatcaacttgctcaaggatccatggatgagaacggcagcagtggcaatttttgtgacagcgtcagggaatttatcaagaggaaaaatgcattacttgtgggtggccatcattttgttaatagttttgcaagctcaagctcatctgcttatgtgcctccaaatcctttacataggtcatggaacgcttcatttgaagcaaatatcctacccagcactggagtttccaatccaccagagtactcttctgcagattcactgaacaattccaattcgatggcttcacatccagaattggtgcatcatggcaattatgtatttccagctggtcacatgagccaatacaatgcatggattgcacaggcaagcagaactggtggagtaccacagtgggaacatggcaatgcagcggctaatcctccaggtggatttgttcattctggaaccatagacatgccaaatggaggtcttcagggataccaagctggcccttttgccaattattatgggcctctgccccatttccaccaaaatcctctgaatagcatgcagcatcctgctctatttaatcatatccaaatgcaagtacctcatcaacattgcctcagtaacaatttattgcatcacccttctggcaatggcctccccttggatccaagaattctggcaatttcatccaattctgggcatacctttgggcctacagctcagccatctttagcaaaccaagttaatgctgggagttcgagaattcagccatatgagttcctgtttttcaaactggacaatactaaatttaaaggatatcagaatttagttgaaaaatatcacctgatattgttcctgaatgctccgttcgtggatctttcgagattgtatgaagcaggagttattgatgaacatagagatatgcggcttgatgtagacagcatgacttatgaggagcttgtagcgttggaggagcggattggaaatgttaatagtggttttacagaaagctacattgaggaaaatttgaagtcaagttcttatgtcccggacgctgattgcatgcctgatcagtcttctgtggagaaggatgcttgcataatctgccaggaggaatatgaggctaaagaactcgttggaacccttggttgtggtcacaagtaccatgcgatgtgcataaaagggtggctgatggtgaagaacctgtgccccatctgcaaaacaacagctttgccagctgatagaagaaacggatgatggatgccaataacatttattggtcatttgcagcaacaaacattcagctcagttttgtacataagacatgctggataatggttgtgcctgtatttccgttgttgtgatacctaaagctgtacagtgagaatcgctcatcttgtagattgttttagaccctaaatgttccatgatgcgcgaacagctatcatcatggcatagctattagatcgctcaatttttccctttttattgtacatgatatttatctttattcttttcccaaaaagaaaaaagagaacttgtagttcttctgtactttgtgaaacttccaagaactaaaggagtttctcaaaaaaaaaaaaaaaaaa

SEQ ID NO: 22621 - DNA, 1056 bp, Oryza sativa
  Clone ID: TF_OsC60245_1
gcggcggggatggcaggtgcgcccatggcgtcgcccccgccgtacgacaacccgacggctgggttccccatcgcgatcgtgatcgccatcgggttcatggtcacctcgctcatcctcgccagctactacttcctcgtcgtccgctgctggctccgtggcacgggcggcggaggcgccgccggggccgggctgctgcaccgctcgcgccgcgagagcgcggcggagcgcgtcgccgcggtgttcttcaccgactacgaggccgaggttggaggcgggctcgacccggacgtcgtggcggcgctccccgtcgtcaagtaccgccgcgccgcctccgggaagtcggcgtcgccgcaggagtgcgccgtgtgcctgtcggagttcgtccgggacgagcggctcaagctgctgccgagctgctcccacgcgttccacatcgactgcatcgacacgtggctccaccacaacgtcagctgcccgctctgccgcacggtggtcaccggcggcgcgatcggcctcctcgtccgcgacgaccagtatgacgcgtccagccgggaactggccgccggcgagaggcgcatcgacgccgccgcgaggatgggccacgggatcagctcgtgcaggttccccaagaccggggccgagcaggagccgatccggcgatccttctccatggattgcttcctaggcgatctcggccggaagccaccgccgccgccgccgaaggatcccgcaggctcggaggccgggccgagccaccccgacgcggccggtagcagcagtatcgtcggcaccgccggcgccggcgagaccagcggccggtttcggcggttgctgtcgtcgttcgggctcggccggagctcgcggagcacggtgttgcccatccacctcgacccatgaaccacctcgggttcgtgcaacctaattaactcgctcttaccgcttaattaattgagagttactagccatttgtgccacttgtgtgcgtgcaatgtgtacagcagatagcagaattggggttggaattttgccgttccattgattaaaaaaaaaaaaaaa

SEQ ID NO: 22622 - DNA, 757 bp, Oryza sativa
  Clone ID: TF_OsC200433_1
ttccatctccgcagcttgctccggccgccaattacaagcgccccacacccagctgcttcgccttcacgtccacttcaccggagttgccatttccaatcccaaaccaaaggacttcattggattgcgaggggagtggagttgctgtgctgctgctgccgctgccgtcttcgacggtgagaagccaagaaagaggcggaccatgaacacgcccaactcgtggctgttcgcagacaactccaagtacagcacgcgggcgcggctgctgttcatggggctctccttctccatcggcatcctctccttcctcgtctacctcgccatctggtacacctgcacccgccgccgccggagccgtcagctccgcggcggcggctcggcgtccgcggatcaggaggcgcccgaggcgaacagccacggcatgagcgccgccgcgatcgccgcgctcccgacgttcgggtacgaggcctcggcggcggcggcggcggcgctggattgcgccgtgtgcctcgggcaggtggacgccggcgagaaggtgcggcagctgcccaagtgcgggcacctgttccacgccgagtgcgtcgacgcctggctgcgcgcgcactccacgtgccccatgtgccgcgccgccgtcgaaggccccgccacggccgccatcgccaagaaggccagctccggcggcggcgccaccgacacgccccccgtcgtggcaccagccccaccggcggcggcagaggcactgccactgccacctgtctag

SEQ ID NO: 22623 - DNA, 3219 bp, Oryza sativa
  Clone ID: TF_OsC1713_5244
ccgcccccgccgccctcagccaccgcctccgcgtcaccgtccgacgtcgccgcgctcgattgtgcaccgtcgtttccccttttgctctgcttcaccgccgccgcgctcgattgtgcgccgccgtggtccgcacgcacctcctctcccctttcgccgcgtgccttcttccgccgccgcacgtgtgtcgccggtgaccatctaggctgagcggcgacgcggcggcagcaccaccgccggcggcgcctccgccgccctcagccgcctcccccgctgcctccgcgccgaggctgcagccctcagcaactgcccccgcctgtctggactgtcacatgtacgccacgtagaccaaaaccaccgcagattgggttgaggggggtaatttgttcggtttgtatagggtaatttgtccggtttgtatagttgagggtgaagaatgtccggttttgtggttcaggggggtaattcggacgaccgcgatagttcggggggtaattcgtactttttccttgcatggcgccagcctctttggcgccgtccccctgccgacgtggcggggcgatgctgagggaccgcgcgttcgacgccgggtacaaggacgacgtcttcgtctgctcgtcgctgctccacctctacgcgagatggggcgccatgggcgacgcggtcaaggtgttcgtccgaatgccgaggagggaccgcgtcacctggagcaccatggttgctggtttcgtgagtgctggacagccactggatgcgattcagatgtacaggaggatgagggaggatggtgtgaagggagatgaggtggtcatgattggggttatacaagcgtgcacagcagccagaaatgtccgaatgggagcttcagttcatgggcatctcttacggcatggaatgaggatggatgttgttactgcaacaagcctcgtggatatgtatgcaaagaatggactacttgatgtggcgtgccgagtttttggtctgatggtgcaccggaatgatgtctcatggagcgcgatgatctcaggttttgcacagaatgggcaatcggatgaggcacttcggttgttcagaaatatgcaggcttctggtattcagcctgactcaggagcacttgttagtgctctgctagcttgctcaaatattggattcttgaagctagggaggtcagtacatggtttcatcgtgaggaggtttgattttaattgtatcctcggtacagcagccattgatatgtactcaaaatgcggctccctagcaagtgcacagatgcttttcaacatgatcagtgatagagacttgatcttgtggaatgccatgattgcgtgttgtggtgctcatggacgaggccaggatgcgctcactttgttccaagaaatgaacgaaactggaatgagaccagatcatgccacatttgcttctcttttgtctgctctaagccattctggtcttgtggaggaagggaaactatggtttggtcgcatggttaatcacttcaagatcacacctgctgagaaacactatgtctgtctagttgatcttttagcacgttccggtcttgtggaagaagccagtgacctgctcacatcaatgaaagctgagccaaccgttgccatttgggttgctctactttcaggctgtctgaataacaagaagctggagcttggagaaagtatagcagacaatatccttgaattgcaacctgacgatgttggcgttcttgcgttggtctcaaatctctatgctgctacaaagaaatgggacaaagtcagacaagttagaaagctaatgaaagattctggaagcaagaagatgcctggctgtagctcaatagagatacgcggaacacgccacgtgttcgtgatggaagaccagagccatcctcagcgtgaagagatcgtaagtaaggtggcaaagcttgatttagagatgaggaagatgggctacattccgagaacagagtttgtgtaccacgatctggaggaggaagtgaaggaacagcagctcagctaccacagcgagaggctggccatcgccttcggtttgctgaacacaggcccaggaacaaggcttgtgatcataaagaacctcagggtctgtggtgattgccatgatgccatcaagtacatctcgaagatcgcggaccgggagatcgtagtgcgagacgccaaacgcttccaccatttcaaagacggagtctgctcctgcagagattactggctaccgagaaccagcatggcaagaggatgcgtgttgctgtatgtatacccaactgatccccctaggcggggaccatcagaagaagttcagccacgcaaggcggccacgtccgtccgtccgtcacgggggacccggcggcgtggtagtggtgcggtgcccgtcgccttcgccattcccggccgcgggcgtcatctgtcgcggcgaaaacgacccgggaggtggcggcaaaggcttttgcttcctacccgctggggcgcgcgcgtcgccgatgatcacccaagaccgctgcactgcacctgccccatgtgggagcagcatccagcatggccagttcgcaacgctacaccgctccgatgtcgtcgtcatcctcgccgcctcctctgcgccctcatctgcgtcgtcggcctcgccgccgtcgcccgctgcgcccgtaaccgccgcaacagcggcggagccggcgccggcgccggctccgcctccccgtcgcacagcccggcccacgcggggcacttcggcggaggagggagcggaggtggcggcgtaacgacgacgacggcggcgacgaccgccgccaaggggctgaagaagaaggcgctgaaggcgctgccgaagctggcgtacgcggacgcggtggcggcggcggcggcggcgaggggcacggtggtgggggaggaggaggaggggaaggtggaggtgctcgccgagtgcgccatctgcctttccgagttcggcgagcgggaggaggtccgcgtgatgccgcagtgcggccatggcttccacgtcgcctgcgtcgacacctggctccgatccaactcctcctgcccctcctgccgccgccccatcgtcctcgacgacccctcgccgcccaagcgctgccgcaagtgcgaggccatagtcctcgaggccgtcgtcgccgcctcctcctcctcctcctcctccgccgccaccgccaccggcagcggcggaggcggcggcggtggcggtggccgattcttgccgtag

SEQ ID NO: 22624 - DNA, 1050 bp, Oryza sativa; identical to SEQ ID NO: 13501
  Clone ID: TF_OsC342884_1

SEQ ID NO: 22625 - DNA, 630 bp, Oryza sativa
  Clone ID: TF_OsC355497_1
atgccgccgccgacgcggacgcggcgaggcgtcacgctcgccgagcagatggccgcgtcgtccaacctccgcgacctcctcaagctccgcgacaacgacgacgacgacgacgacggcggcgggcaaggtggtcgccgccagccgcggccgctgcccgacgcggtggtggtggcggcggggcggcgacgcacgctgctcgacgtcatccgcggcgtcgacgacgacgatggccacgaccacccgcccaccggcgtccttgagggacaccgccccgcgacgtcgacgaggacggcggcggcggggggagcgcggggcgggagggtgtcgctgatggcgctgctggagcaggcggagcggcagtggacgacggccgccgccggggacgccagccggaggcgcgtcgcggacgaccacgcggcggcggcggaggcgggcacgaacaagggcttcgccggcgccgccgccggcgtgggagggcggtgctgcgtgtgcatggcgcgcggcaaggccgcggcgttcatcccctgcggccacaccttctgccgcgcctgcgcccgcgagctccgagtcggccgcggccgctgcccgctctgcaacgccgccatccacgacgtcctcaacctcttctga

SEQ ID NO: 22626 - DNA, 895 bp, Oryza sativa
  Clone ID: TF_OsC32419_1
cacgagccggccggggctgcccggccgcctgcccctcaacctcatcgcgcaatctccatcaccgtccggcgtccgcgagcagcggtgcagagggcgtccttactcgttccgcgcgccccgcccaggtcaatctccccgtaccctcagcctcgactctctgagtctccacgcgatcgacttcgcccgcagcctgcgccgaccctctcgatctccatccatcccacgaggggagcaccggtgggtgccgtcgtcctccgaatttagggggttcatgtccctgttggtacacgatgaaccctgcaagccgaagacattatgattctctcgtcgcgcgatatggtgaccaagatgcactcgccgaccgtttcggcggccaaaacgacggccctgacgcctggtggtccaacctgcgtgtgcggatgtctcaggatcatctactgaggcacgaggcgcggaggcgagccgccaccttggaggttttcgaggatagagaaaactcgcatgatggtgcctttggttgcggtgaccgggcctctgctaaggccatggtaactctgcatcagcccaatttgggcgagaccagggagcaggattgcgccgtgtgccttgagcctttcgaggaaggcaacacgcttagaatgatgccatgtttccattccttccatcagcgctgcatcttcagttggctccgcattagccgcatctgcccggtgtgccgtttcacgctgccctcccaggctgattttgagtcggagaaggctgagaaagaacgagttagtgcttcacctgaagatggcaataactgattgatgtagatcaatctgcttagtgagttactttgcttgtgtcctgtctcacaattgagttgatcttatttatgcttcatggttgatat

SEQ ID NO: 22627 - DNA, 1202 bp, Oryza sativa
  Clone ID: TF_OsC91373_1
gcacgaggcctttgccgaggagggaaagcgggagtccacgccgccgagctggaggccgggccatctcatcaaaccaagcgagaagcttagctccgccaactagctcgcgctcgcgtgtagcggataagcggagtatcgatcgatggatcggacgtcagccgtgccggggagagtgagcgacccggggtccgcgtggttcggcggcggcgagaggagctcgtcggccgggccggggcgcaacgtgcggctcatcgccaccgccgtcgccgcgttcgtgtccgtgctcgggctggccctgttcctccacctctacgtctgccacgtacgccgccggaaccgcaggcgcgcggcggaagcggccgcgctggcgaccgcgaacgcgggggcgccgcccaagcaggtcgggctggacccgtcggccatcgcggcgctgccgaccgcggcgtacgggaaggtggcgggcggcgacgcggcgggcggcaccaccgagtgcgccatctgcctcggcgccatgcaggaggcggacgcggtgcgcgtgctgccggcctgccgccacgtgttccacgtcgcctgcatcgacaagtggctcgcgtccagctcgtcgtgcccggtctgccgcgccggggtggagccgccgccgccgcctccgtcaacggcggcggcgaggtgcgtgcacgagaagcaggacgcggagaaggaggaggcggccgccggtagctcggcgccggtgcgggtgctcggcgcgtcgctaatgaagatgctgagcagggagagaccgtcgccgaggaggcagccgggagtccacgccgtggaaatggaagacttggaaagccagctgccgcggccgcaacagcagtagcatatgcggcgaataatcagcggccatttttaagccattttttgtttcatttttcgcttcgtttatacatcaagcgttccatgttggttcagtatgaactacataagtgtgtaagtgtttttctttattaggagaacgaaagttctccattaggtgtttggtgcttgtagctgtcaaaggaaaggagcagacccgtctcttgtatttgtacaaagaagggaaagtggataaagctctgatggaatttctctaggcaaagtgggagttgcggttgagacccataaaaaaaaaaaaaaaaaaaaaaaaaaaaaaaaaagggcgccgctcgcgatctagaactagt

SEQ ID NO: 22628 - DNA, 3955 bp, Oryza sativa
  Clone ID: TF_OsC4340_1
ctaaggcatcctcgacagaggttgcactttttagctgaaagtaacattccatgggtttcattatcatatctttatcaaacccctcaaagggcaaccaagtttatttcaaattggaaatgcgaacgtaggtacatctaagaattttacaatcccgcataaacgaatgccgtgggattgtggagaattattgttgaagtctcggtgttttaaaagatgtaacaggacacaaactgaatttttctagatgcttgagagctaaacagaagaaccagagtggagagagcttcttgcgatctctaaggcatcctcgacagaggttgcacttttgagcttagctttgtctacaacgggctgagacatagcgaggtgaggaagaagcgtaaattcctctgagcaaccactctcaaggtaaccacccttgatgcctccaccaacgacaacacactcgcgagtaacctttgctacccccgtacccaccgccgctgagacgcagacactcccacggggaagctccgggacagcccgcgcaccaccaccaccaagcccacgctcccgcagcgcccacgagatgcacccctgcgacgacgccgccgcggccgtggaagccatctccgccgccttccgccggagagctaaggacacttcccttactgtggtcggctgcggcgatgctggctgatagggggaatagttcaaaggggacgggtttgagtgcgatttggctatggcccccacccataacaacagttttctttgcttttcccaatgaagatactagagaatccgcatcagcaacatcacgtatatagtgaactccaggcaaatttcctccaatcttagcaggtaaccttgaagcttcacagccagtagaaataataagtgacccatacttcagaattttccctgatgaagtttttaaggtatgtgttttgccatcaaacgctacaactggatcctcatacaatacctctatgccgttctccttgtaccattcagcagtctgcctctgcccacctgatccaacacaggtatgaaagccaggtagacgagcaggcttcttgtctggagggaaaagatagccctttgtcagtgctggtcgctcatatggcggatacgcctccttggagacgatgcaaaggcggccatcagccatgccgtgctcgacgaacgtcctcgccgcgtaaccggccgcgttgcctccacccacgatcacatactcgcgattctcgttgtcgaaccccgcacccgccgccgcggagacgcagaatctccggcggggaagcaccgggacagcccgcgcaccaccaccaccaagcccacgctgccgcagcgcccacgagatgcacccctgcgacgacgccgccgcggccgtggaagccatctccgccgccttccgccggagagctacggccacctctccaagggagggaacaatcgctctgcttccaaccttctgtgccttaggccatagtgcttgagtcttgctatcctttcccccacgtccgtctggccctacggcgatcagattccttttatttgcatttgtgttgagagatccaggggtagctacgcccttgcaccatttgccgacgctttttcctgttccctctccaccaagatttctaattggtatttggaagtcatctgaaagagaattgaaattgtgaacctgctggggtccagtgccaggagccattctagtagcatcgttcccaaatggtttggcagaaagtcctttcttgtgttcatgttggaagacagaatcatcagcatctaagtcaatcacatccgcatgcttgtcgtccattttgtcttttatattcaggtcatttttagcttcaggtgatggcccaggcttgtcgcatggatcctgcaccacttcatcgagcttcatcggataatctccacatccagcagcaagacccgagaaaccattattaactgtggtatttcctgaatttgtctggtcagctttaaatttctttgcagacctcaggtccctaatcacaccattttctttttcttcttgttccttctcaaggtcttgtactcttgcctttaacttcttaatgagttcttttgccttctcaaacctctgctgggaacgagattctgatcttcccagaacattgcattggatcatcaattctttgtagctcttgttccgaagagcaagagatctcgtcaaaacatcaaccgcattcgcagcatttccatggttaccaagtgatgccaacttaaggatctcttcctcctgaaggttcatatctgtcgacagcttcaatgctgcaagttccttcgccaatgagaggcccttctcctgcaacctgccacattctgatgacttccttgacaattcctctgttttcgcattgagcagatgctgaacacattctttctccctcctgaccgattccttcatcacctccgcctcggccgccttctccctccacatagcaacacaagatccacccaaattcggggggccagcagcagcgctcgcctcggcgttgagcttctggatcccgtcgcgctgctcgtcgagcaccctgccgagggaggcggccttttgctccagccgcgcgacctcggcggcgagctcatcccggtcggcgccgccatcggtgggctcgtgccgcgagggggaggaggaggcggtctgcgtggggcacgcgccggtggattggaagaagaggcgggtcggtgggtgggcggcgccgcatggctgcttgcagatggggcaggtgagcttcttcttcccgcccgggcagtactccagccattgctccaaacagagggcgtggaagacgtggccgcaggcggggaggcagtggaggtgctggtcggagagcgggcggaggtcctcgtagcagatggtgcagaccggccatgcggcggcgccggtcatggcggcgtcgtcgtcgtcggcggcggtggcatccggcggatgcgaacggtggcctcctcctcctcttcttgtggttggatttgggagaggaggggaaaagaagccgctcgcgccaacacccacacaaactcccaggccaatcccaacaccaactctaacaccagcattgaaccatgtgagttgcccgtcatcatcgtcggagtaccaaccttctggatgctgtatacttccattgacatcttcatcaccagcagcgttcgaagtcggcgatcggcggcggaccaacccgccggcagctttctgttcttcgggggtggctagccgaagagcgcacgtgaggacggcgggctcgccggcgcagcatccggcgacgtagacctcgaacgcggaggtctccgcctccgcccccgcggcggggatgcagtcgattgcccaggcgggggaggaatcgggcttggcatcagggcaccgccgaagagagccgcggagcagcgcggcgccgcggtggtcggcgacctcgaaggccgcggagggtggggggaggcgggcggacgcggtggacacgtaggtggcctcgccggaggccgggtcccggcgatcgaggcggagcgggagggaaaggggcgtcggggcctcctcctcgtcgccgccgcggctgctgcgcagcgcgagcgcgaggcggggcggtggggtgggcccccgcggcgagaggcggacgtagaagaggcgcacctcgaggctgccgccggagtcccgcggcggcgacggcggcggcgggtggtggtccatcatagtcattccataaggcactgatctttggttcaaagcttcccacttgaatagcttcgccaacattatcaccgtagaattgccaccaaattttccttgaacttccttcgtactcaaaaactcttgaatataaatatggcaatgtagtcatacggctttgcgtgtgatgttaggagtgcttcaacacagtggtgagcacacttccgagcatgatccacatgctcacctcgaggcattctatcatacatgttgagggga

SEQ ID NO: 22629 - DNA, 1130 bp, Oryza sativa
  Clone ID: TF_OsC339987_2
atgtgctgtcattcccatcccgatctgaccgggctcctcctcctcgtctcctgctctcttcaccgccgcagaccaggtcagcagttgagcaccatggcaagaaagttgagaggtcaggcggccagcagcggcacccaaaattccaatggactctcaaattccagtctcgagctcccctctgaacaccatttcttggcagcgcgcacaggcatgaacggctttgctccgaccggctaccagcagccgccgccgccgcctgcggccagcgcttcgccgggcggatggatcgcgtcgacggccatcttcatgtccatcttcttctccaccttcctcctcgccatggcggtctccgtctactgctgcctcctgtgcagagaccgcgtccgctcggaccgcgacgacaccggcgccgccgccgagcgcgcgcgtggcggcggtaccgtcgccccgctccccgtcgaggccctccccccggcctacccttatgtagttggaagctccgaggatggtggcgcgacggcggcgagcgggggcggcgggcgggagtgcgcggtgtgcctgggcgcggtgcgggagggggagatggtgcggcggctgccggcgtgcgagcacgtgtaccacgccgactgcatcgaccggtggctcgccgcgcaccggacgtgcccgctgtgccggcgtgagcttgacccgggcaagaatccgcctgatcagttgccgcgtgcccatcctccatcgccggcgacaaggagggcagaggtcgacgaggaggtgggtcgccgccatcgagcccggccaccgaaagtcctcgtcactgagccgcccctcctccttgtcactgagccgcgccgctgccgctcgtcttcctcggcaacgagccatccaccggccccacaagacccaccgtctcgcgagtccgccctccgcgtgcctagccggcggatccgccgtctgcaggccttgccgttgtcggttccgccgtcagcacgcctcgttgccaccggatccgccgcctcgcgagtcaccgaagctccgcccgtcgaccaagccaccgcgcgccacgagcttcatcgtcgtagctcccgaggcccggcaggcggccggatggagagatggagaaaggaaggagaatg

SEQ ID NO: 22630 - DNA, 573 bp, Oryza sativa; identical to SEQ ID NO: 13559
  Clone ID: TF_OsC339987_5

SEQ ID NO: 22631 - DNA, 742 bp, Oryza sativa
  Clone ID: TF_OsC99948_1
gcacgagggcctcatctcctcttcgtccctctctatctttctttctgatttctcattaatttcgcatcaagctagcttgtgatcagcaatggacggcgagatggattggatcgcggcgcgcttcgtcctgtcggcgataatgggggtgcacccgctggtggccgtcgacgacgccggggccgatgacgagcacttcccggtggacgacgccgcagccgtccacggccacgcgtcgccgcctcctgtcgcgctgccggcggcggtgctggcgccggaggaggtggccggcgcggtggtgtgcgcggtgtgcacggaggaggttgcggcgcggcaggccgtggtgcggctgccctgcgcgcactggtaccacgccggttgcatcgggccgtggctgcggatcaggaccaactgcccgacctgccgcgccgagctgccgcgggagcccgccgccgccgactggcgtgtcccgcggcgcccggcggtggcggagacagccggcagccgcctgcggcgggaggcgtcgtatacgatgctcgcaggcacgttgcccagctaatcaatcatcatcgatcaatagattaatttattatactatgtacatgtgtaaattaatcggcatgtatatacaacgaaggtgaagtgaaaattgtacagaggcaaactcacgtaaacccagcgcccgctggatagaacggaacgatctatgaaagataacatttttaacttaaaaaaaaaaaaaaaa

SEQ ID NO: 22632 - DNA, 2571 bp, Oryza sativa
  Clone ID: TF_OsC1548_1
atggcagagcacttagcttcaatatttggtacagagaaagataaggtcaactgcccattttacttcaagattggggcttgccgtcatggggatcggtgctcttgtcttcataacaggcccaccatatcaccaactgttgtgtttgcgaacatgtatcagcgccctgatatgatcacgcccggggttgatgctcaaggccagccgatagatccccgccagatgcaggagcattttgaggatttctatgaggacatctttgaggaactaagcaagtttggtgagattgagaacctcaacgtctgcgataaccttgcggatcacatgataggcaatgtttatgtccagttcagggaggaagatcaggcagctgcagctcatactgctctccagggccgcttctactctgggcgcccgataattgttgacttttctcctgtgaccgacttccgtgaagcgacctgcaggcagtatgaggagaatagctgcaaccgtgaaagccacaacgaggcaggagccgcagcccaagcccaagcccacgccataggagggagcgacatgatcgtgatgactatcgaggacgtgacgattactctggtggtggtggaaggaggggtggaagcagcagacatgaaaggcatgatgatggaggaaggcgtaggcacggtggtagccctccaaggcgtgcgaggagtccagtcagggagagcagcgaggagcgcagggccaagatcgaacagtggaatcgtgaaagggacgaaaagcaggggtgaccggctttgtccctcgctcgcgcgcgcgtgcgatcgaacggccatgcgacgactgacgaagcgtcttttgccatcattccgtggcgctggtcgagcatgccaccggcggatggcgcgctaccgtcaagccgggacggggacccccgggggggggggggggttccttttaatctgcagcaccggggatgcactttttgatgagaccgaatttacttttggaaaagtcgaaatattcaatactatgcatagttgctttaaatttagtaatgatctgggaaaccaattaaaaacaatatttttcaagaaagaaaataaaggtgggatgcaaggaaaatccaaaagtatgtacaacccctgcatgtcgacaacatctatgaaccaatatgtttctcacactcagagcttcggattgccatcaaaccaagttgttctaggaagcatggatgaagaatcagcacagcatggtaattatgcatttccaactagtcacatcagccagtgctttcaacctactagcaatacatggatttcccagtctgcaaatggtattgctgatggaataccacagtgggaatatgtcaatggaatgaataatgctccaggtatgacagaaacagtgaatggaagcttccgtgaatatcagaatggcccttcaaccttatgtcgagggcctttaccctattttcatcagcatgctggcatgcatgctcataatctgcttgatcatacacaagtgcaagctccttaccaacaatgccacaataatcctgtcttacatggtgtaaatcattctggcaaccggttccatttgggtccaaggattccagttcttttctctaattctgaacgtacttttgggcctccacatcatccactcttggcaaatccagtgaaccacagaaatatacgaatcctgccacctgagcatgctacaataatggatttttcaagattgtatgaagtgtcaaatgttgtagatgagcatagagatatgcggctagatatagacagcatgacatatgaggagcttttagcattagaagagcagattggagatgtaaatactggtctggcaaaaagctacattgtagagaaattgaagactagcttatttgtgccaggatcatcctgcatgtctaataagtcttctgaatcttccatggagaatgatgcttgcataatatgccaggaagagtatcaggttaaagaatgcattggaacccttgactgtggccacaggtaccacgaagattgcataaaacaatggttgatggtaaagaatttatgccccatctgcaagacgacagctttgtcaaccggaagaagaagtggataacgaacaggaataatcttattagttatttacttccgacaaatattcagctcaattttgtatataagaaacggtagaccattctgctacctgtatttgttgctcactttgttgtgatccgggagtaactcagcttcctaaactgtacagccataacattgatcattttcttcggtgtagaatattttaaattactcagttcgcccccatctgtatcataaggcggaccgacaaaaaaactcacaatgtcatttctaggcaaacattgtatctaccatcagattaaaaatcagaacagaacatgtgctcttctgtacaaaaaaaaaaaaactaattccgtaactcgggaggaccaaaaagattcttatggtcgtcggagcgtgattgcatcgattcgccttttgtttgtttatgcattgttcgccccaaattatctgtcgcacgtccatttgattgccttgattcgtc

SEQ ID NO: 22633 - DNA, 2096 bp, Oryza sativa
  Clone ID: TF_OsC12376_1
ttttttttttttttttttggatcaatttaactttgtattagcgctggtttcggggtttttttttttttttttttatcaacaaatgagattcaggtgtcaatgtattatttgacctcaagatcatttccatctaatacatttgcataggcaatttacaatccagtaaattcacctgatgacaatccctcactttccttagtatacatgcctcgtggaaaagcatataaattaaacaggtcgggactccgaaggaatacatttgcaatgaactcagcagcacctaataaacaagtagaagagagaattttatatcacaaccagaagatacgtccccgaagagagaaaagggctaactgagaacagcaaaccaagaaaattagacgagcagttgcagcccgagagcctcagttcagccgccttctcttgttccggtgtagtcccacaccatccacatccaaagaacctaaggcatcatttcttcctctcctcctcagggatctcgaagaccctgcattacttggttcccctgtgctttcagtaaaagcagcatcctcctgaattacagccatggtgcttgaattggaagcttgatctgcagctagtgcaacggcaacatgattcccatcaactggcagcagctcggtatttggtggatttggtggatttgatgaagttgatgctccataagggctcggcctaaccattcttctaaggtcactcacagcgcttgccaatctttccgtgcttgcaaggtcaacaaagtgttgcaataaatcaattctttccgaggaaaatggacttgagctacgcctaggcagatccgatgtgctgtttgctggcagcccactctccgcagcagaagaagcaacaaatgtagagttttcggcttccctctgcaacctccttgccctcattctagtagtaattcgacctaaacggctagcatgatgagcatgatcaatcatttcctggacagttgattcaggaggcccctcaaacctactcacactattcataatctgctgatcaagtatgcgcctccaagaagacaatatcccatgtgcctcgccaagccttctagaaatcgggcgcaaatggtggaatttctgccggaagctctcgagccgattgccatgtggccttggtgggattgtagggcctgatacatttccctcctccgcaaccttcttttccgcgtccgaagtcgaattccctctcccgtaaattggagtgatgttcccttcagtgacctcgcctttgcagacagggcactccttgtgagttgagtggacatgcagccattggtacaaacaaggccagcagaagagatgtccacacgaagttaccacaggctcggaagccatctcgaagcagatgttgcactcaaacatcgcaacgctcttgccacgttcggctggctcctcctctgaggcacccacgatagcgccatcggcgaccaccttgttctcttcaaccgtatcttgcataggctcttgcggtggcggttgtgctgcagcgtcgttctccagggcaggggcctccgagccgagaggcggaaggtccgacctgaaccgtcttggacggaggcagcgactctggcggctattcaggcagatcacggggggacggtagcggtcgacacgctccgggcggaaggaagaggaggccgtcgacgacgatggccggtctacccacccaagcagctcgctgggccgcagcagaagcggcgggtgggagaagccgaactcaaggtcgtcagcgagctcaggtatcgcctccgggggcggcacgggaggcggcacgtagggcgggtgcgcctcgggagccgacgggtcgtacggctcgggcagaggtgtcggggggcgcacaagctcggcggggggcggtgagtacggcgggtggagcggctccgtctccagcggcggcgcgtcggccgaggccgccgaggaggaaggcgaggaggagagcatcggggtgccgagcgcgaggtcggagccgagatcggggcggcgcaggcgcggggcgcgggggaggccgaggtagaggttcagatccatccttctgctgctccgcgcggcatcgtccgcggccattgc

SEQ ID NO: 22634 - DNA, 858 bp, Oryza sativa; identical to SEQ ID NO: 13531
  Clone ID: TF_OsC50914_1

SEQ ID NO: 22635 - DNA, 5337 bp, Oryza sativa
  Clone ID: TF_OsC389823_1
cgttgttgacatgcagattattgatgctcttacttgaccccaagtcagggcagctgggaacctttgcctgagattagcttcatcttcccaggtcgcttcatctttcttatggagcctagtatccagaacttggactggaaactgaatactggaagttggaccaggtagctgactctgaacaggatgcttgaacccacaagagcctttcaattgagagacatgaaagacaggatgaacagcacagtccaatggcaactgtaacttgtatgccacttgaccaaccttggcaatgatttggtatggcccataatacttaaaagatagtttgtgattagctctcttggcaactgaagattgcacataaggctgcaacttaaggaaaacccaatcacctacctaaaactcctgaaaactcctttttttatcagcttgatatttcataacctgtcgggctctattcagatgttgcttaagcagttgagccatcaacttcctttcagataaccattgagctaaatcaggtatactgcaagcatcttctctgatgccgaaatgagtaggaggatagccatacaaaacctcaaaaaggtgacttatacagtgaagaatgataagagcagttataccaaaactcagcaagatgtagccattcagaccatttagagggagtagcatggacaaaacagcgaaggaagatttccagacactagttaaccctctcggtctgtccatctgtttgaggatggtaggctgaactgagatgtaacttagtgcctgacctgatgaacaattgctcccacaatgtactggtaaaaattttatctctgtctgaaattatagcttgtggcaacccatgcagcttataaacattaagcatgaagactttggcaacatccatggcttcaataaaatccatggatataatctgccaagctccatcaggaacgggtaaaggttgcagcagtcctggatatttagctctgtctggcttggattgcaaacagattgaacaagcattcaactgttgttggatggtatccttcatatgaggccaagagaaaagagatttgattctgtggtaggtaacaggaaatcctaagtgtccccccatgggactgtcatgcaaggcagagatgatttgctgttgcattgaagaattattgccaacccacactcttcccttgtgtttcaagagccccttgtgcagcttatactgagggtgagaagcaggattaacggccaattctgtcagaagcttaactgaaacaggatcttggtcatatccctagattatgtcttgcaaccacacaggagaacattcagatagagccaagaattctgacacttcggcaggaacattccttgaaagggcatcagcagctacattgtgcttgccctttctatagacaattttatattgcaacccaagcaatttagtgaaagccttatgttgccagggagtgttaagcctttgttcagcaaggtgcatgagactatggtggtctgtcaagatcaggaactcttggaattgtaagtaagggcgccaatgatcaactaccatcataatagccaaacattctttttcataggtggaaaggccttgtgttcttggtcctagaggcttgctcacataagctattgggtgctgattttgggaaaggactgctccaatgcctaggtcactggcatcggtttccaaagtgaaaggttgctggaaatcagggagagctaacacaggagcagaaaccaaagattgtttgagcaattggaatgcttgttctacttctgcagtccaattgaaaggagcatccttctttagcaattgtgtaagaggtttgctaatagcaccaaaattcttaataaatttcctataatagcctgccaatcccaggaatcctctcagctttttaatagtagtaggtctgacccaatcgacaatactctggattttagaaggatcttttgcaactccagccccactgataatatggcccaaataggatatatgttcctgggcaaatgcacatttactgagtttaaccttccactgatgattagataacagctgcaggacttgtctcaaatgagtaagatgagtaggcagatcaggactgtatatgaggatgtcatcaaaaaacactagggcacatttcctcaacactggactcaaggtgtcattcatagcaccttggaaagtgccaggggctcctgtaaggccaaaagacatcaccttatattcatagtgtccactgtgggtttgaaaagctgttttgtgctcctccccttcagccattctgatttgatgataaccagctcgaagatctaacttggaaaaatatctagcaccagccaactcatctaagagctcatcaataactggcatggggtaagttcctttctgagtgatattgttaagctgtctgtaatcaatacagactctccaagaaccaaccttctttttaaccaagagtgcaggtgaagaaaatgcactgctgctgtgctgaatgactccattttggagcatttcttgaacctgtctctctatttcatccttatgtccaggtgtatgcctataaggtctgataaacactggtttggagtttgggaataagggtatcctgtaacctgaccattgagtcattcaactgaaattctagccacttgtgtacccaatccaccctcattgggctaaaccgttcaagccaatccatttcaagtatcacatcgtaggcacccaatgctaaaagtctaaagttgctcttgaaatgtattccttgagttaaccaatcacagtcaattatgtgcagtgagcaagtgaggaacccaccatcagcaaccttaactctagctagtactggcatagccttaacccctgataatttgagaccaatctgttgatacacaaacgagtgagtactgccagaatctatcagcataagaacttcaatgccctgaacccatcctcttaacctgattgagtgattggagtcagtaccattaatagcttgctatgatatagccattaaggtgtcagattcaggtggttctgaaacagcctgctcagactgagatgaaccttgtaagacgtccagcaactcttggaccacatgtaactgaatggaggaagcacatttgtgatctctgccccacttctccccatagacaaaacaaagtcccttggatctcctataagacttgagagctgacaatctatcatattcccttgaatgattgcttaattcagttcctctcctatcatttgaaatgattggaggccctcctttagtggttggtggcagaggcaatggcatagcacctttgactgactgtttctggtatccatcagattttttagattcttttggcttatcaccctccaatgcttcttcctgtaaaagagcaagagtacaagcaacattcaaatctccaagtctttgaagcagaatagcagacctaatcgcatgccttagcccctcaacaaatttagtgacaaagtagactggtttcaaagatgggtcataagccatcatttgatgcatgatgcaatcaaactgctctacataatcagctactgatcctgtttgacaaattttaatccattgtctaataagggcttgctgcctatctttgttaaacctagtacaaattttttcacatagttcagaccaagtaaccccttctagttgagacctaactgcttgcagccaaaaggcagcattaccagtgaaattgagtgttgctaccttaacccaattacccggatgtatgccatagacatcaaaataagcctcacaattagacttccacatgattgggttatctccatcaaattttgggcaagtcatgggggctaccccaccagtcataccaactgacaaagcagactgaaacgaattcatggcagaagcatccaaatggaaaggaattggagagacattgtgagacgcatacgtaccattggccgggattggctttggggtaaaaccctcagcctcctcacgattcaaaatttgaacgcggtggccatctagaccggttgagccatttggtcgaacacctggtgagtccagggttcccgctggagttgtttgctctgttttgttggctgaagagctctccagttgatttacttgcatttgcagcagatccacggtggattggagtacatccaccttcttctccacagctgggatccaagattccaccgcctccttgaacaaccgcatctcctacgcctgcctcttctccccttcctccctcttgcgctcagttttctccatcttctttagaaggagatcaagttttgcttcgttctccatgattttagcggtctacttcgtcacaaaacgtggtttcttctctatagcttgggcaaagtgtagttaccagtagtagaagtcctctctgtcccgaaaaccggagtcaaaaccgccgagggaaatgaaggagaagacgttagcgatggtttcgggcttgcctagcgcgaggatgatgcggcaaagtagggcttcgtgggtttaccagctgtcaccaatgacttgtgctgttgccggcactagcacgttggtgagcatggaggtgatgcatgataccactgggaagaaggaagtggttgtctgttatatgaacgcccctctaccgtacatgattgaagagaattacgggggatgcttctttgaagacgacgttgatcttgcacaggttctccaggaccaggaaatagtctatcaattaatacaaggaaattatggtactggttcatccaaaactcattcaaatcctagttctagttatagccatggatgtgaattgggtgaacggaaaccatcaggagttgcaagttatgaagcgcaactagttgttgatgaagctttagctcgagagctgcaacagatggaggaccaactagcaagtgcatcaattgatgaccataacataatagaacatggaagaaagccaatagcttcttcaacatctagcggtggtaatgcttctgcaagcagacctcctcaggtagtgatggaggatggcattgatccagataacatgacttacgaggaactgcaacaattaggggaagctataggtactgaaagcaaagggttgccggaagatgtgatagcgctcttgcctacttcaacatacaaaattaggatattctcaagaaaggaaaagcatgacgaatgtgtgatatgctgtatgacttacaagaaccgagataggctgactaaattgccctgtgagcatcagtaccatcaaacttgtgtcaccaaatggttgaagatcaacaaggtatgccctgtttgcaacaaggaggtttatgggtcgggcaagtga

SEQ ID NO: 22636 - DNA, 348 bp, Oryza sativa
  Clone ID: TF_OsC388462_1
atggggcgggaatcggcagagcgggcagagatggctgacccggagccagtccgagatacagctcccatggaagcaatgggagcagggcatcctcgccagcatctctccttcctcgaaatcctcgaagcacacggcgcactcgcgctccctcgcctcactcgataccgcctcctgcaacgcggcggccacggccgtgctcgacgcggggacaacgccggcaacccaccgccgtcgtcgctgtacatgttgtcagtggtgccagtgccacggctctgttgctccatgtatatatatgatgctgaagctgccggaagaaatccctgtccagtgttatcctcccctctctga

SEQ ID NO: 22637 - DNA, 2213 bp, Oryza sativa
  Clone ID: TF_OsC82536_1
agggcatccgccctcctctcctcgccaaatccatgctcaatcacctcaggctaccgcagctgccatccacgcccacgagcccagacgcattcacccttccgcgccgccgacccacacttctaccaaggacacgctaccgccgccgccgccgcaaatcctagcgcctcccgaggctgctatcgccgcggcttcgctcgccgggtgccgtggtgtatggtgcagccgcggcgaccgtggatacgtaaccaacgacatcgaatatcagaaattcgtccaaatcttagaaaccagcctccgcaaagggaagaactcccacggggtcaccatgaccagcccctataagctcgtgatagcgctccagctagcccgcctcggcctctacatgatctagaccgagttccctgcatcctctcctgacgacatcgacgctgtgagccccaacgccgtcgagatcgggagcaggcccttcgggggggacggggcaatttcggtcatctgtgcactctcgagaggtgataaggagatacaatagatcccactggttggttcgagaatacagcatgacatcggtcacagaaggcattgatgcaattgcaactactagagtggttgtcactggaagatgttagcgactctaaacatgctttgactggtcactccttcagccgggcattcagtgggagtggtgccgcactggatattgttgtttccagtgtgcgagcttacctgagtgccctgaacaagatgtccagttttgttggggctatcaaggctagtagtgaagtatctgaaagccaaagagttcaaaccacagaatgagtcttgacttccttttgggttttcatatccgatggttctatgtttcacattcccagcaaggagtatgtgcttgttgaaacatggtttttccgtccagaaaaaacatggttccgtttagtgcatctggaggatgttctgggtttcttggtggagcctgacttaaggttgaacatccaggacgttttgggatatgcagtgtataattcatatttgaaaaccgtatttacaataagacaataataaataattgtttgacaaaaaaaaaaaaagagacagctaaaaaagctgatgatgatttagaacacatccccacggaacttcaagaatatagcatgacctcggtcacagaaggcattgatgcaattgcaactactagagtggttgtcactggagatgtcagcgactctaaacatgctttgactggtcactccttcaaccgggcattcagtgggagtggtggcgcactggatattgttgtttccagtgtgcgagcttacctgagtgcccatgaacaagatgtccagttttgttggggctatcaaggctagtagtgaagtatctgaaagccaaagagttcaaaccacagaatgagtcttgaccctccttggttttcatatcggatggttctatgtttcacattcccagcaaggagtatgtgcttgttgaaacatggtttttccgtttagtgcatctggaggatgttctgggtttctttggtggagcctgacttaaggttgaacatccaggaagttttggggtatgtagtgtataattcatatttgaaaaatgtatttccaataagacaataactaaataattgtttgaccctgacgttgatggccgtaatgtacggccacacccggcagccagccgacgccgagctgctgcgaaggccgcaacgccgccgtgctgctgctgctgctgatccgccgccgcacatccgcaacgcaagtgtggtcgaaaacaccgagcctgatgtcctgttcgcgtatactccacacgatggtttgtcaccggagttcgacgatgacagcggcggcgttgctgattattttgcagccgatgatgacgaagcttacagcaacggtggcttcggcgcggtgccggcgttgtccgaggccatcgttagcatgccggagttgtccgtcggcgaggcgagggagaagcagtgtggggtgtgtctagaggggttcgaggagggtgacaagctcaggaagatgccatgcgagcactacttccatgagagctgcgttttcaaatggcttcaggtcagccgtctttgtccctactgtctcttcgccatgcctgcggctgaggaggaggaacataacaatgatgatgaagaagaagaagacgaagcaatgatgtgcatccgtttcttgttcccagagtag

SEQ ID NO: 22638 - DNA, 1313 bp, Oryza sativa
  Clone ID: TF_OsC200748_1
tgcaggaatcggcacgaggctcacacttcgcccgaagcaaacgagaacaagacgaccgcctctatccaatccaatatcccagtccaatcgaaagatttgcgttttgatcgtggtgccgtcaaccgaaggatttgcaagatggcagaagctgcaatcacaaggtactggtgccatgaatgcgagcaggccattgaggaggccatggtggatgagatcaagtgcccatcctgtggtggcgggttcgttgaagagatgaccgatgaggagattgagagactgaccaacaggcagccagagccgggtttctcgcaatggaaccctattgagcatccaggagaaacgatggacagcgacgatgaagataatgatttaggtcgtgagtttgagggttttatcaggaggcatcgacgggcatcaactctacgacgcgtgcttgacagcatccatgatgaccttgcagatgaccaagaaagggacagttccattctgatcaacgccttcaaccaagccctcgctctgcaaggctcagtgcttgatcctgatgagggccaaggtgaccaaggcggttcaacaaatgatgatggcttactggaggagtatgtcctcggagcaggtctgagcctgctgcttcaacatttggctgagagcgacccaagtcggaatggtacccctcctgcaaagaaagaggcggttgaagcgctgcccactgtgaaaatcgaagaggttgtcagctgttcagtctgccttgatgatcttgaggtggggtcccaggctaaacaaatgccatgtgaacataagtttcattcttcttgtatcctgccatggcttgaattacatagttcctgcccggtttgccggtttgagctgccttctgaggagacaaaagacttgaacgagcctagcaacattggtagagtggaggacagccatgaggaagtcagagctgatggccctggaaacgtcagcgagagcagtaacagaccctgggctattgttccttggttgaatgagctattctcaactcgtgaggcacagaatgctggaggtgtttctacggatcaacaatcaccgcacacttctggaaccaacccaaatgcagggcacagttgatttctgctgctgttgcgatttgtgaataatgatagtacatctgagaatagcgaagtgacccagattggtgaactgttgttttccatacctatcatctcccttggatggatcacagcatagaaagcttgccaggcattgtcatatcatctgtgctcatttgctttgcttcagtttactgcagctaaagtcggttctgcatgttg

SEQ ID NO: 22639 - DNA, 1836 bp, Oryza sativa
  Clone ID: TF_OsC72063_1
ccgcgcgggggggtcgcctcgccccagctcggggggtgtcctccgcttcggctccgcccggccggccggcgcccggttccctcttgcttccggccgtgccttatggaagtggctttcctccggatcgaaggggggggtgctggttccttccctccggatcacgcttggcgtcttgcgctcaccccgcccggttccgttttccccgcccgcttgcggtggtgcccgtctcggtggttgtggtgtgtttcctacccttgccctgatgcgcttctatggtaatcgaccgaaacaaaaatggaaatggtaaaaaatatggatttgaaaacggcaatggctttgctgttagaccgatctgttccgtatttattgtattcttgctgtaagtaccgtttcatatatttaggtgcttttctgggaggtgtaaccaactaaattcctatgctaccttctggttgatggccgtccctcctgttgaatcagaaacaagaagtgaagaaacagataatttccctttacttgcagaccacatggaaaatactggacatcatgcacatgcagttgatatcccatgggattcttcaccatcgacatctcgccgagataatcataatggatttgatcaattacctcgtatcttagaaggttctcctgggacatctactccatctaactctcagaatggtcctctagcaagaagagatgataatcgtggtcgtcgtcagcctagtcccttgaattctggttgctggatctcagttgagctagttgtaaatgttagccagatcatagcagctatttgtgttctgtcagtatcaaggaatgagcatccacactctccgttatttgagtgggtcattggttatacagtaggttgtactgccacgctgcctcatctttactggcgctatctccatcgcaacctcccaaccactgggcaagagccaacagttcagaatatccctccaaacaacacccctgaagctaattcatatggagtaaccggcacaaatggagtctcaagaaacaatgaggcaacagtaaatccaaggttccaagcttttgctgatcacttcaaaatggctctggactgtttctttgctgtgtggttcgttgtgggaaatgtatgggtatttggtggacattcttctgctcacgacgcgcccaacttgtacaggttgtgtattgccttcctcacattcagctgcatcggctatgctatgcctttcatcctctgcgcattgatatgttgctgcctaccctgcataatctctatcttgggatttcgggaagatctaaaccaaaacagaggagctagtgcggaaacaatcaatgccttgggaacatgcaagttcaagtcaaagaaaactcgtgatggagatggaaacgaagttggtgtcggtgttgtggctgctggaacaaacaaggagcgagtcatttctgcagaagatgctgtctgctgcatctgcttggccagatatgtcgataacgatgatctccgagagctcccttgtgcgcacttcttccacaaggattgtgtggacaaatggctcaagataaacgcgctgtgccccctttgcaaggctgagatagatggtgtctccacaagtgctccagccattggctttgggcgtcgccacagcgacaacagggtaggaaacgacattgaatcacaactataactctcttcccacttcgttggcagcgtggatcacgcctttgatgaggccttccacacatcaacctgtaaattatagaggtagacatcaagatgtaaagggtcctcttacgatccaacaaagttcttttctgaatgactactgcctccactgtcagtat

SEQ ID NO: 22640 - DNA, 1199 bp, Oryza sativa
  unsure (1)..(1199): unsure at all n locations
  Clone ID: TF_OsC38650_1
cccgggctgcaggaattcgcacgagggcgagtgacaccccaccccacgacgccaccgagcccgggagggagaggccgacgcgacgcgacaagtccacacccacacacgcaccagcaccagcccaactcactcctcctcccccagattccgccgctccctccccctcgccgcgcggcgccgccgccgccgcggtggccaccagcaacgtcgagctcgccgtcgcccaggccggcggatgagagccagtgaaccatgggaggattttgctgttgcctctgcactgacgatttcgaggagtacgctcatccaaataaccctatctataggcaaggtgtatgcctaaggaattttttccacaacttttttggcgggtatactgccacattccagaggctcgaatctagacctagcaacccagctcaaggggctgctccattggcatccactaatccaagtaccaatataactgacaattcattatccgaaacttatcaccttgtgtccagacctccaccgtatgatactgatcctagatatgcccgtgttcaaagagagggtttggtatctaggcgtgaaaagtctataaatctaacacaagaagagtcactggctcttaggcgaaatggcagcagctctggcattgaacatttagctgctcagaagaaatggagcagcactgaacctgagggtgaatataaagtccatcgctctgaatccaccaagagtttatccgcaaaatcgtataacagcagttttgcagttgtcacttcagaagatgaagatgtctgccctacttgtctagaagaatacactccagacaatccgaagattatagctaaatgctcccatcattatcatcttagttgtatctacgaatggatggaaagaagtgatacttgtccgatttgtgggaaggaaatggagttttgtgaaaccccatgagagatttctcgctggttgtatcagtggaaggcaaaagatctacagtgtgatatgctggagagtctgtaaataatactagttgtccagatagatctcttttttgagatcaaattcttatgtgtactgaaatcatggcctacaaaaaagaaaatgcgctagaatttgatatatgaatatatttttgaatgcattaacccccccccccccccannnnaaaaaaaaaaaaaaaaaaaaaaaaaaaaaaaaaaaaaaaaaaa

SEQ ID NO: 22641 - DNA, 696 bp, Oryza sativa; identical to SEQ ID NO: 13437
  Clone ID: TF_OsC341901_1

SEQ ID NO: 22642 - DNA, 1187 bp, Oryza sativa
  Clone ID: TF_OsC8961_1
aataaagaggaggctggtggagaacccctcccgcattgggttttgacccctccccctctcacttgccctgcccaagcccaagagaggaatccaagctgctgcattgacggcggcggcggcggcggcggcgaggagatcgggagcaatggcggaggaggcggcggcaggcgggctgtactactgccacatgtgcgcttcgacggtgagcgccgtggcggcggcggagggggaggtggagatcaagtgcccgtactgccacagcggcttcgtcgaggagatcgagtccgcgcgcggcgtcgccaccggcggcggcggcgcgatctcctccgtctgggcccccatcatcgacggcatggttggcggcggcggcggcgacgccgtccgccgccaccgccgcagccgtcgcctcgcggacgccgccggcgcggacgacggctactaccgcgacctggccctcctcgacttctccgagagccggcggcgcaccgccgcgctgctgctgctcatgcaggagtttcgggagcgccagctccagcgcctcgagtccgccaccgccacgatctccgccgccgcggccgaggccggcgccgtcgtcgggacctcgagagacgcggagggcgtggcgctggccgactacttcctcggccccggcctggacgccctgatgcagcgggtgggcgacggcgacgcggggcggcagggcacgctcccggccaagaaggaggccgtggagtccatgccgacggtggaggtggccgccgggggcgactgcgactccgcctgcgccgtctgcctcgaggactacgccgccggcgagcgcgccacggaaatgccgtgccggcacaggttccacgccaagtgcatcgtgccgtggctcaagatgcacagctcctgccccgtctgccgcttccagctccccaccgacgacgacgacgactcctccaagtccgcacgcggcggcgccgcccactccggcggcggccggcggttgtcccagccgtcgccggcgtcgacgggggaggcctgggcaggttgccggccgtgaaacgttatatttgtagtggtttttatcatgctgaaattctacaacacttctacttgaaccgagtctctaattttactttgtatttgacggcagtttccttcgcgcaatatatatgaatagattgttgtatccactattgccg

SEQ ID NO: 22643 - DNA, 1352 bp, Oryza sativa
  Clone ID: TF_OsC101000_1
cccgccgttgccaaccacccccttcccctcccccctcgccctcgccgccggcggccgtctcgtcgtcggtgagacctagagagccaaacagcgcgttggttgttgagctcggagagggagagagagagagagagaggatggaattggagtcggagcagcacggctgcgagcattacacgaggggatgcaggatcagggcgccgtgctgcggcgaggtgttcggctgcaggcattgccacaacgaggccaagaattcgctcgagatccatctcaatgaccgtcacgagatcccccgccacgaaatcaagaaggttatctgctctctctgcgacaaagaacaggatgtacaacagtactgttctggttgtggggcatgcatggggaaatacttctgcgaaaaatgcaacttctttgatgatgatgtctcaaagaaccagtatcactgcgatggatgcggcatatgcagaactggtggtgtggataagttctttcactgcgacaaatgcgggtgttgctacagtaatgtcttgagggattctcatcactgtgtagaaggagcaatgcatcacaactgtcctgtctgcttcgagtacctatttgactcgacgaaggacatcagcgtcttgcactgcgggcacacgatccatctggaatgcctgaacgtgatgagagcgcatcatcacttcgcttgcccggtgtgctcacggtcggcctgcgacatgtcggacgcgtggaagaagctcgacgaggaggtggccgcgacgccgatgccggagttctaccagaagaagatgatatggatcctctgcaacgactgcggcgcgacgtcgaacgtgaacttccacgtcctggcgcagaagtgccccggatgcagctcctacaacacccgggagaccagaggctgcggccgccctgcagccgcgcgctccacggtttgatttcagcagcaggagcagcagcagcagagacgagttggcatccatctcacaaactaaggatgaaatcgagagcgacaaacaagatgcagagacggcttcctctgaacttagccgtcgagcaaaagctgcaaaatcgatcggcgtcgagtttggtagacacactttgcgccaagaggagtatggtgattttggcgcagtatgcagcgagttgaatagcccatatatgttgtgttttctctctctctcttttttgtgaggatatatgttatgttttgaaactccaactattattattactaaatgatactcctaataaaagagagacaaaaaaaaaaaaaaaaaaaaaaaaaaaaaaaacaaaaaacaaaaaaaaaaaagaaaaaaaaaaaaaaaaaaaaaaaaacctcgaggggg

SEQ ID NO: 22644 - DNA, 1185 bp, Oryza sativa
  Clone ID: TF_OsC49416_1
cggacgcgtggattagagttggactcggcaacgcgacgagcaccaaaagcgagggaagaaaaccaatccgaatccggagagagaagcgcaggaggcaaaatccactccaattcaacccaatcacccgcggcgagccgagcgggcggcggagccggcgacggcggaggttggggcgggggtcctggtgtggtcggcgtaccgggcgggggcgcaggacctggtgcaggggatcgactgcaagcgcggctgcgcgaactccctcctgaccatcatgatctacaaggtctcgcccacagccctgcggcagcggttcttcggggctgacgtcggaccggctgggtaaataagtaagtaactaactaactaactaatctccgggttcttgctggtaaatcgaatgcaggtgtacgccgatggcaccacggctctgccggagtgggagagggaggccagcatcaggcaattctacggtgtcatcttcccgtcgctgctccagctgccgagtgggataactgaattggacgacaggaagcagaggaggctgtgccttcagaagttcaggaaggtggaggagagggtctcggaggtggatttggagagggagctcgagtgcggcatctgcctcgaggtgaatgccaagattgtgctgcccgattgcgcgcactcgctgtgcatgagatgcttcgaggattggaacaccaaatcaaagtcgtgccccttctgccgcgcctgcctcaagaaggtgaatccgagcagcctgtggttgtacaccgacgaccgcgatgttgtggatatggatacgttgactagggagaacattaggcgcctgttcatgttcataagtaagcttccacttgtagtgctccatgtggttgaccttgacatttacgagtaccgtatcaagtgaaactgtactcttttgttcataccggtgggtctctgtacatatcaaattcatcggtgctgatctgtgatagctcaacctgaggctgcaaattagcagagttgtttgtagctcaacgagttgataatatttttgtgaaaagaagatgctgaagtgtactccaaaattgcatatgcacttgtctgtcagtttaaaattatgtggggggtaccaaatggaacgctcctaaccagttattttggtcagtgttaaaaatatgtcagggaattaatctcttccac

SEQ ID NO: 22645 - DNA, 616 bp, Oryza sativa
  Clone ID: TF_OsC2447_2
agtacacagccataattcagagactgttagtttagttctttttttcagaatgtatattagtacataacttgttattgctgtaacaaaaaaacgtgcggctggaacatagctccacacaaagactgggaagaaaaaaaggcctcctatgtgtacaagactatacttatgatacggaccgcgggcacgggtattcgcctgaaaatacaccaggtgcgctgcgagttctattttacatatgtatatggtctatatgcacaccagccctgcatagcgggcatgatgcgtgcctgaaaagccagttgtcgatgcatcgtgcgtggaacgtgtgctggcaatgaggcaggacccgaacaaattgcgatgctccaaaatcctgaaggcaaactgcacaacagttatcagtttcctgatcaggattggttgcagcgctgaatgtggtctttgggattctgttaattagatctcttgacatgcctcctgtatttccggtttcaaaaaggtcattggtgtcaatgaatggtgtactcagtagactcatctgactctgcaccgcgcgctgcagtgctgggctgaccttctcccacacaatccttccactgaagaggctagagatgat

SEQ ID NO: 22646 - DNA, 1122 bp, Oryza sativa
  Clone ID: TF_OsC76986_2
ctatacgcctacgatccaacggtacagcgtgacgaagcccggctcgtcgtcgtccaccccgcgcggcgccgacatcaccgccgcctccgggtcccaccgccacgagtcctcctgccggttgctgtggtggctctggctccaccgcgcgctccaccgcccgctccaccggccggagagggacgaggcggaggaggcgaggcggtccacgtactcgcgcagccatccccgcgaccccgccgcctccgccagcgcctcgccgggggccggcgtcacggaaccggtcgttgacttggccgccgcggggcgcgcgatgcgggacacgacggcctccacctcctcgtccacgcggtagtcgaaggacccgagcgagtaggtgcgccggtcgtcggccgcggcggaggagcggcggttgctgatgctgccgatctcgacgcggaagctcctcgagttgttgctgctccgcgagtcgaggggatcctgttgcgccgcgttggaggcggcggcggcggcggcggtggggagtggcgggtgcgggagcgagacggtggcgcggcagagcgggcaggacggggtggtgcggagccaggcgtcgacgcaggaggcgtggaacgcgtggcggcacgccgggagcagccgcagctcggcctcgggcgcgaacggcgagaggcagacggcgcagtcgggggagctcttgggcagcgccgccagcgccgacgccatggtgaacaccggcagcgacgcgaccagccgctccttctcgtcgtcgcccccccccccccccccccccccccccccccccccttggctcctccccaccgccgacgcggcggtagcctccccagcctcgacggcggacgccgtcgtcgcgcgttgggccgccgccgacgccctgggcagcgggctcggagccgggtgcgacggccgcgcgaggcagcggaggaggaagtggatcgacacggaggcgaagaagacgaaggcgaggagcgcggtgatgatgagaagcgacggggagaggttgagcgaagacgacgacggcgccggcgacggcaatgagggcggaatggtggcggcgagcgggtcgccgccgatggccggcggcgcgggcggcggcagggaggccat

SEQ ID NO: 22647 - DNA, 669 bp, Oryza sativa
  unsure (1)..(669): unsure at all n locations
  Clone ID: TF_OsC64502_1
nnggnnnnnnntttgtttttttttttgcgtgttttgtggtttccccataatcatcgaacttcatatgattatatcaacacaggccatcatcaatttacagctttcaggtggcactatcaccggacaatcaaaggcgcctccgaaacatagcaacgcaggcacacaaagaaaccatggggaagcaaacttcccctactgactatttcaaagaaatagaaaagaatgtttttgtgcgcccttccaacatttcaagaatatcagaggcgatgaggatcacactactgattcaatacttacaaggtgtatgtacagagtattgggtggcctagaccgccgtgtactttcagattgccatgagggttgttaatccaagaaatacaggccagtctgacaattatgttgtctcgtcaaactccattttctttccacaaacagggcatgcttcacttctttccatccactcataaatacagccaaggtggaaatgatgtgagcactgcattactatcctaggattctcagaagtataatcttcaagacaagttgggcagacatcttcatcttcagcggatggggaaaagtatgtgaaataatttccaggttccttcgcttggcagcttctctccatgagtagagctgcttcttttcatttttgtgtcatagtttccc

SEQ ID NO: 22648 - DNA, 1547 bp, Oryza sativa
  Clone ID: TF_OsC2127_2
atgcgcggcggcggcggcggggatgcgggcaccagctcgaggggcggcggttccggcggggcccccgcgcgtccgcggcggttccctgaggcggcgcagccggagatcatgcgggcggcggagaaggacgacggctacgccgcgcacgtcaccgaggcctgccgcgacgccttccgccacctcttcggtaccagggtcgccgttgcttatcagaacgagataaaattgcttggtcagtctctttattacttgctaacaactggttcaggccagcaaacacttggagaagaatactgtgatatatctcaggttgcaacctcgcacggacttccgcctacacctgctagacggattctattcattttgtaccaaactaccgttccctatcttgctgaacgcatcagctctagaattgttgcacgtggtattgccctcgaggactctcagcttgatgaccattctgaaagtgatagttctagtataggcactgcagcacaaccatccccaattaggaacagtccttcaagaagcttgagtttttctcatttgtcaaggttgagaggcagagtccataccttgtgggaatgggttcttcggaaatggccttcgatgctaccatttgctcaagattttatacagttaactatccggacaaaccttatgttcttctattttgaaggattgtattatcatttaccaaagcgagcagctggcattcgttatgtattcattgggaagccattgaatcagaggcccaggtatcaaatcttgggtatttttctgttaattcagttatgtattcttggtgctgaaagacttcgaagaagtcgaggtgtccctgttctaaatgaagatggaaatataatcagcgacatccgccatgggaaaactgcagatttggctactagttcagagcttttaagattatcggtatcaagcacttcatgttatgcaacagaattctatttaaaaaagaaagcaacaaagcatccagtggtaagagcaaatgcaccctttgtctcagtacccgtcagaatcccactgccacaacctgtggccatgtcttctgctggagttgcattatggagtggtgtaatgagaagcctgaatgccccctatgcagaactccgattacacattcgagtttgatttgtataaatcattcagatttctagcaaatgattactagcaaggggtcatatcattctccagtggattcattaaaatgatactgaatccccacattttggcgagaactcttcttctgaagtgttttagtgtaccaaaagaggagagtagaacccatccaatgaggctgaagatcaatgctgccattcaactgtattgtagagctcaaataacaaaacaatcaaacagaacaaaattttcattagagctcaaacggatacccatgtatatgtacattgtagacacaacttgattttgtagggtagaacagtggctgactggaatcattagagcaaaatgtatcgacctgaaattctgccgggaaatttaactatttgccaatattagattcgacaatt

SEQ ID NO: 22649 - DNA, 618 bp, Oryza sativa
  Clone ID: TF_OsC2127_9
attgggaagccattgaatcagaggcccattatcaaatcttgggtatttttctgtgtagttcaggtatgtattcttggtgctgaaagacttccaagaagtaatttatcaacaatagctagttcgattaaccaaatctcatctggaggctatccttcatccacgcgtccgggtgtccctgttctaaatgaagatggaaatataatcagcgacatccgccatgggaaaactgcagatttggctactagttcagaggcatccagtggtaagagcaaatgcaccctttgtctcagtacccgtcagaatcccactgccacaacctgtggccatgtcttctgctggagttgcattatggagtggtgtaatgagaagcctgaatgccccctatgcagaactccgattacacattcgagtttgatttgtatatatcattcagatttctagcaaatgattactagcaaggggtcatatcattctccagtggattcattaaaatgatactgaatccccacattttggcgagaactcttcttctgaagtgttttagtgtaccaaaagaggagagtagaaaccatccaatgaggctgaagatcaatgctgccattcaactgtattgtagag

SEQ ID NO: 22650 - DNA, 713 bp, Oryza sativa
  Clone ID: TF_OsC392272_1
tcaatcttcaaattctcgatcggctagctgctcattggtgccgatcgagcgtcgcgcgcattcttgtcctagtcgccggagcatggcgaccaccggacgattgctgctgccccacgacatgtacaggaggctgcaggctcccacggcagcggccgcggcctcgctctttattttggcgccccacctgcacttccagaggccgaccgcaggacgattgccgctgccccaccggaagggtacagcaacggtcgcttcggctccgtcccggcgtgcagcgaggccatcgccgccttggaggagacgtcggccggcgaggcgaaggagaaggactgctccgtgtgcctggaggccttcgaggaggagagcgacaagccgatgaggaagatgccgtgctgccatgccttccatgagagctgcatcttcgagtggctgcaggtcagccgcctctgcccgctctgccgcttcgcgctgcccacccaggcggaggcggaggcgggactgtggccattgcccacgcctggttctggttcggggacatgatcagcaccagcttcgcgcgtgcctcccattcccatcccatccatcgcatcgcgctcggccgctcggcgctcgtgcgccgcctccgccttccacctccatcgcgccgacgccatcttcgcccgtccgtcctcggcctccatcacgccggcgccgcctccgccctccgcctccat

SEQ ID NO: 22651 - DNA, 1420 bp, Oryza sativa
  Clone ID: TF_OsC48373_1
cgagcaatacactacgaagtgtatctcgaaattaattaaccacaagattaacaggatcatccgtagtaagctagttagcttgaaaaatcaaaacgggctgcagttacaaactgggtaataaggggatcttgcggtagtgctcttcactcctttcttacatgcattcaactacgagtaattaacctttattacaaagtacatactaattctatccgatatgcatgcatgcagcagatcgatcgatttctatacacaaaactcttatactatatagcagcacacagctccaatcatatacacacacagatgaggacacacaatataatcacacacaatataagcagctagggtaggtaacaacaaattaaagaacaagctggagagaagaagaaaacaaaaacggccgtacgagtggaagcaaaacctcgcgtcttctcaactcataagtcatcaccgacaccaacctttcttgatttcctccatcttggacagcgatgcacgccgaaagatgcttgtcgcgttctcgatcaccccggccggcgtacgatcgattgcgcgctcgaccctccgtctatagctgtgttctcgtctctcccggcgacggcgacggcgaggcgtcacaccgggcagtcgtcatccttgggctgatcgttcttggccggctcggcggcggcggggtggagcagcacggcggcgcggcagagcgggcaggtggagtggagctggagccacgcgccgatgcagtcggcgtggaaccggtggccgcaccgggggaggaggcgcgcccggtcgccgtcgcggaactccacgatgcacaccgcgcactccgccgccgccgccgccttcccgttccccccggcgtcgccgacgtcgggggcggcggcggaggaggagtacacgaacacgggcagggacgacgcgatgtcctcccgatcctggtggtggcgccctggcgacgtgtcggccgacgacgacgacgacgacgccccctcctcctcgtcgtcgtcgccgccgctggccatcgttgacgttgacgacgtcggcgggccacgcttcccggagaagaaccgccagaagtagaagaacacgaggaggaccatgagcaggttgatcccgacgaggcacgccgtcagcaccggcccgtgccgcgtccagtgcttgctcgggtcctccaccaccgccgccgccggcgccaccatctgcaccgtcggcgtcgacatggcgccgatgatgaccgaaacaataaggtagcttctgacaacacaagcagcaaacagtagcagctgccaatggtgtgcataaaccacaaaaagccactgcttcagaacagaagaagctggagattgcagatgttctttagaagaaaagataggggaagaagaagagatagaagataaggaggagcacaagagggaagaaa

SEQ ID NO: 22652 - DNA, 2644 bp, Oryza sativa
  Clone ID: TF_OsC91370_1
aagatcaaggaaattgcaaatcctttttttgagacaaaggcaaaagctttgccttattacattgatacccaaggaagagtacacatccgagtaccaacccaacagataacaccttacgaacactccaaactcaaaccaggctacaaagcacctgaaacactggacaccaaatcagtaattgcaaatctaatatgtggttgggggccaaagtgaatgaatttttactaacactccaatcgagcagaattttaattattgtaaccataagtccaatcaagcaggaatttttcccaagggtcctctggtctcattatctgatggcaggtgatgtgtaatttggaccggataccgaaacaaaaatgtacaggagtttccaagaagaaagcaatctatcatattcacaaatttgagtgaattgagtcagtgtctagcatgtctaacactgtttcattataaatttataatatttacgagcttgaacaacctatattcatgtgccccccttgtccatctctgaaggtattgctgaagttttgcatattggacaccagttcttctgtctaagccattcatgaatgcaggacacatggtattgatgctcacactgcatcctaccaacttcttcgccctcaatgtattcctcctgacatatgctgcacttggcgtcatctagtacagctctgttcgcttcaagatctgaatttggtaacttatacacatttcgcttgagacacttcacaagctgctcatcagatagggcagtgctgacagaaccgattcgctcctctagtgctaatagttcctcataagacatgttgtcaatatccattctcatatctctgtgctggtcatgcaggccaaggccgctaagaaacaagttagtttctagcaccagcaattgctcataagtcaattcatcatcttgttcaatcctgtccaatgctagcaacacctcagcgatgccttccatgtttatacgcctgtagttctctctctccaccagcaaaccatgaaacatttgtggagggctttcgtcagggcggtaacttgatctgctccttgctgtctgattacttgagccttgacgactagatgagtatatctcatgtggtaattccatagaaaaaggcctcatcgatctccgtggggcagcttcacccaaggagaaatgagcccattctggttggcgatcccttgcaagagtttcacgaagagcaaacacgctatcctccctttcatttggcacccttactctggcatgctgagtagaaggtcgcctaatccttgaagaatctgcagactcctgaatacttctgctactagtccgtgtttgctgagaagctgattgttcagcagttctgactctaggaccagtgataccagaatacatggcaggtgaatggcctaaactagagtgtccatttaagccccttggtctagaagaactctctccgtcaaatgccctgtttctcataacctcagccctcttattatgaatagaattagctgaagaacagccagaaggcaaaacatcagatattgatgtgcagccaaggttttttagagtacgtctctgtaccccagggccagcagcatttgatgatttcacaccattggtagaatttcgaggtatagtggaccgattaacaaaagcagaagcagtttgaggtctaatctgacacaattcttctttacccttctgctgacgtgatttagatctcaaagcagcatttctgactacagaaccaattgcatgtgcagacacccctgaagaaacagaagaatctaatagttcaggatcaagttctgcaggctgatcttcagtagttgatgtggacaacaaatcttctggctcatcctgctgaccatatggatgcacatcctcctcaacaacagctttcttgctacactgcagacggttggcctcagttcttctgctactactttctgcattatctgcctctcctaaaaatgtccgtccttgtttttcctcgaaatattttctgacgggagcttttgaagagcttggacatgcagccttagtgcctgatgaacgaaatggctcacgtaaatatcttggcttctccttactgtcagcccacctggcattcattgggttgagttttgtcttgtttggcctctcctcattgccttgatcttttaaggagacactagagcctcttctaagaaaaccagttgttgatattgatctaccagaatcttccaccttacgaagcccggtctccgcacatggcgcgctgatcccccgcacgtgtccacccccacgaaggcagatccggccgttggcgccgcgtcgagattcgtgcgcggcgtgggactcgtccacgtcggcgccacgtgttaaacgccccccgccgccgtggaaggttcggcgcagctgccgctttctcacgccgcgggtttccatttctttttcttcctttcgccatgattgcttctcaaggacaacaatggaacaaccagctttagcatttggacccccagcttccttcactgccatgaaaagttttgtggaacagttgcaaccatttgacaaggtctgtctgagaacatgaggcccttctattgcccggctttctctcatcgtgttgccttgtatccccttctctctcccaaacgccat

SEQ ID NO: 22653 - DNA, 1998 bp, Oryza sativa
  Clone ID: TF_OsC4561_1
ctgcaaacaatagtagttaaattctttaccgtgtagtattcacttcacagatcgttcaacacaaatttctcgtgaatttcttcgattccactccacactctccgcgtgaatgaatgaatcaatctaatggcgggaatgcacaagaagaacgaagagctatgatgcttccatggatggatcatttcacaggtgtcctcggatccacagcagcgtccgccgcgcgaacgacggcgcctcgtcggccctcgagctgagcccgttgccggcgcctgcgccggggacggccgccgtggcggcggcggactcgaggtcccagtccgcgacgctgccgctcgcgctcttctcgctcttgtcccacgccgacacgttgtactccgactccgtgacggggctcacgacgtccgggcgcagcggcttcggcgccgccgttgccccgacgtcgctcgccgcgcgctgcagcacggaggagagccggaacgacgacgcgcgccgggaggacgcgccgtccttcctgatccgcggcgcgccgcgcatccatatcttggagaaggagaagctctccttcttccccaccttggccggcggcttcggcggctgcgcctgcgcgagcttgccgccgggcagcgcgtcgaggccgcggaagctctcccgcttggagtggcagtcgcactccgacatggcgacccggtggcccggcatctgcgtcgtggggcgcttcttggccggcggcttcacggcgacgcggagcagagacctctcgtccatgacgtactcgtacgtccccatggagtagcaacgccgcacgtcctgctcggggttggcgctgctgctgccgccgcagccgccgccggcggcgacttcggtggcctgactccgaaacttgccaagcttgacggagacgaccacctcgtccgccttctccgccgcctctgcatgcttctgttccggctctgcttcttcctcctgctccatgacgaggctgagatgagccgacgacgccgcgtcgaggcgatcggagatggagccctccgagccggactcgagcacgaacagcagcgggctgcagccaccgccgtagggggagaagtcggcgaggaggctgcggcggcagagcgggcaggtggagtgcgacagcagccacgtgtcgatgcagtcgacgtggaaggcgtggctgcacttggggaggagccggaggcggtcgtcgtcggcgaactcgcagaggcagaccgcgcagtcgaacgggtccttcctgccggcgccgacgacggcgccgtagaggaacaccggcagcgtgtcgatgaaggactggtccacgccggcgtcgtggaggtggaacagctgctggagctgcccctggaaggcggtcacgttcgcgtcgccgctgtcggcgtcgccggcgtcacgcggcgccgggcggaggatgaaccggacgagcagatgcaggagcccggagacgaagaaaataacagccaagatcaagattatcagcaggatgctagggctgatcctgctctggaacgccgtgtcaaatgacaccggcgacgacggcggcggcggcggctggagctgcagcaatggcggctgcggcggcggaggaggcggcgggaggtacggaagcgggagctgcagcggcgacgtcggcggcagggcggtgtagttgatgtgcgcatgcattgtgtagtggctcatggcggcggcggcgtgcaagcgagggaagaacaacggggaggaggtacgacggcgacgacgacgacgagctcaccagtcaacaccaacaatggcggcgtggccttaattaggctctcgtcgcagcgcatctcctcttcctccgcgaaatggaggcgacgacgcaagtgaagagagaactcatcatcatcatcatcctcgtacgtcaactccggtggagcttgatctttgcagatgagggaaaggaacgaggtggtggtttaattggcgtactgcaagaacagggtgtgtagtgtatgtcgagatcgagag

SEQ ID NO: 22654 - DNA, 1811 bp, Oryza sativa
  Clone ID: TF_OsC49241_2
gaatcttagctgattggtgctttggactgcagttaggagctgcaaatgtagtgctgatggggacaaatctgactttgtcgtttgatgatgttgaggcaagttttgctccaggagtgaaaggttcaggttttgaaggcgttgtttatactgctgaacctttggacgcctgcagtccgttaacaagtaaagcagaaaagggtccaccatctccatttgcactgatcataagaggcgggtgcacatttgatgaaaaagtaaaaaatgcacaggatgctggattcaaagctgcaatagtatacgacaatgaaaatagcggggttctgatttcaattcatttagcattgtttagactttgggggcatatggttctgcattatctaactttgaagtttacagtggctggaagctcaggtggtattcacatttatgcggtgttcatctcgaaggcctcaggggaggtgttgaagaaattttcaggccatactgatgtagaggtgtggatactacctgcgtttgagaactcagcctggtcaatcatggcaatttcattcatatctctgcttgccatgtctgcggttctagctacttgtttctttgtgagaagacatcatataaggcgggaccggcctagaattccagaagcccgagaattccatggaatgagcagtcaattagtcaaggcaatgccaagccttatcttcacgaaggtgcaagaggacaactgcacatcatcaatgtgtgccatttgcttggaagactacaatgtcggagaaaaattaagagtgttgccttgccgtcacaagttccatgcagcttgtgtggacctttggctcacaacttggagaactttttgccctgtatgcaaacgtgatgcaagtactggaataccagatcctccagcctcagagactacaccattgctttcttctgcagttcgtttgccttctcagtcatcttcgttccggtcaagcgtggcagcatcgcctccaagaccaataagtcgacgaccttcatcacagtccatatctcggatttatgctgcttctggtacccccaactctcctaaccccataaggtctttcacaaactcaactgccatgagcataagtagaagcaatgtggacttatcaaacatgtcttcccgccctcgcgcctcacacctcgcctccgcacattctttggttggcagtcacttgtctccaccaatcaatataaggtacgcatcgccgcatatgtcccactctggctatgcatcacctagtccacatgttagctcatcctatgtctccaactctgggtatggatcttcaagctactatctcggttcatccagccagcatcggtcatacctaaggcgctgtggggaatcagggcctagcttgtctaccatggcccctcagtcgccgcaacagtcccagttaggtcatagtggggcatacggtcttagtctaagcaggagcatcctcaggccagttgtccggcgatccagcctgagactctgtgctgattaagatgcaagcttatctgccatggcatcagctcaatccttgccaggatgctaatttctctgggatcagatcagcttctgtctgtactaagacctggcgtgacttgtgtatacatttgaggcatgtactataggctattggttgagagaaaatggtcgtatttgtttgtgtttctcctgctgccctgcccttttggttgtagtgattgttagcgctctatttgtttcaccctagagtgtatagtacaattgtacagcaactttcttttaaactaagcaatatcatccgcgcgttgcccatacc

SEQ ID NO: 22655 - DNA, 662 bp, Oryza sativa
  Clone ID: TF_OsC280106_1
cctcgtgccgaattcggcacgaggcctcgtgcggcacgagggtggatcgagtagcttagctagctgtgatggagatcttggtgagtgcactgctcctgctcctcgtgccacccttgtccgccctcctcgccgtcgccgcgccgagcctcgcgtggccgtcggggtcgtcgtcggtgaggaagctgatcgccaagaaggtggcgccggagcaggcggcgcgcgacgagctgctgcgcgtggcgcggtacagcagcgctagcgccgccgctgccgctagtgctgtccaacaaccaggcggcggcgagagtagtcgtccggcggcggcggcggcggatgatggtgggcggccggatcagtgcgcggtgtgcctgagcgacatcgaggagggcgacgaggtgagggagctccggtgccggcacctgttccaccgtggctgcctcgaccggtggtggttgtcggcgcggccgcccgccacgtgcccgctctgccgctgccggctcctgcagagcccgtcggcggcggcggacgacggcgacggcgacggcgaggaggattcggactcggacatggtgatgttcatggcgtacctgcgaagcagtagcacctggctctagccattaagggcatgtttagttccaaaaacttttcccaaaaacatcaca

SEQ ID NO: 22656 - DNA, 1130 bp, Oryza sativa
  Clone ID: TF_OsC180148_1
gattttttcctccccctctctatctctcgcgtccatggcgtcctcgtctctcctcgtccggctcgcctccgacgagatgccccaaaccctagatgcgtcgtcgtcgtcttcgtgctacgacgccttcgtgccggtgttccacccggatccgtcgtcggggttctcggcggcgtcggtggtggcggccgccgaccgcctccgcagccagttcctctccgtggagcccgacctcttccacgacgcgctcgtcgcgccaagccccgaccacctcggcttccccgatgaggaggaggaggaggagatccggtgggattgcctccaattggatgacgacgacgaggaggaggagggggtggcggatctgcggcttgaggcctccaacgcggcggaggaattcgattgggaggaggtggcatcgccctccggcggcgccgggatggatcagccggagcccgagtgggaggtcctcgccgacgtgccgccgccgccgccgccgcccgccgacgagggcttcgtgtacacctccgaccgtgacgtgtacgaggtgctcgtcggggagggtttgttcctgaagagcaagccgcccgcggcgaggtcggccgtcgaggcgctaccgtccgccgtcgtcgccgccggcgaggacggcgaaggggaggagtgcgcggtgtgcagggacggcgtcgccgccggggagcgcgtgaagaggctgccctgctcgcacggttaccacgaggagtgcatcatgccgtggctcgacgtgcgcaactcgtgcccgctctgccgcttcgagctgcccaccgacgacccccagtacgagagctggaaggcctcgcgagctgcggctgcctgaattgctgcgcggtaaaaaaaaaaggcaagcctttcttttcttgcacagactttatagagttgtatgtcttgggtttcaaactggtactatgatgaaagaaccccactggtatgatgaaagaaagcgtagaggtagtcgcacgagatggttttgcacctttcgatttgtgtactttttttcttataaagagggatttgtgttgtgacttaaggttgcgaggatattacataagtttatcctatatatatactgttgtatttaaaaaaaaaaaaaaaaaaaa

SEQ ID NO: 22657 - DNA, 539 bp, Oryza sativa
  Clone ID: TF_LIB3599-059-Q6-K1-A9
cccacgcgtccgcccacgcgtccgcccgccgcgcggacgctagcgcgtcacggccacacccctcgccggtggacttcgacgcggacttcccctcggatttcgatcgcccgatagagcattcccgcagtgggttggaaccattggctgttgctgcaattcctacaatgaagtataactgtgaagctttccattcggaagatgacacccagatgttttgttgtaacaggtgctccatatgtttaagtgaatacaaggagaaggacattctaagaattgtacctatttgtcatcataactttcacctttactgcttagatgcatggttgctgaagcagactacttgcccaatatgccggatctcattgaaagaactgcctgatggaaaatcgaccgtatcctctgctcctaccatgtctcaaccccccaccctccctgagagttctgttaatccaacatctcatttcctcccagttcatcaagaacacagaagccaccaggatggcccagatatgccagaatctgtagaggtggttattgaa

SEQ ID NO: 22658 - DNA, 1283 bp, Oryza sativa
  Clone ID: TF_OsC120717_1
tgcgggaattcagcacgaggagcggtgaaaaaatggcgaccaaagtgcacgcccgccgcctctagcgccgaccgcctcgcgttccccttccccactccgtcccggcagctacctccgctttccaccacgccggccgatccgcctccccaaccctatcgccggcaggcgcgccacgccaggttccgggctcggagacaccgcacgctccgcccgatgggcacccccgggccggagctcgccgctctcgcgattcgccgcagcggcggccgcctgttcgagcggtagggagggactcgtctccccgcctctccttgtcgtggactcgtggtagcgggggtgggaggagccagagaggctgggggcagggagggaggatgctggggtcgggcctgaatctcgtcagcgcggcgctcggcttcggcatgaccgccgcctttgtcgcgttcgtctgcgcgcggttcgtctgctgccgcgcccgccgcgcggacgctagcgcgtcacggccacacccctcgccggtggacttcgacgcggacttcccctcggatttcgatcgcccgatagagcattcccgcagtgggttggaaccattggctgttgctgcaattcctacaatgaagtataactgtgaagctttccattcggaagatgacacccagtgctccatatgtttaagtgaatacaaggagaaggacattctaagaattgtacctatttgtcatcataactttcacctttactgcttagatgcatggttgctgaagcagactacttgcccaatatgccggatctcattgaaagaactgcctgatggaaaatcgaccgtatcctctgctcctaccatgtctcaaccccccaccctccctgagagttctgttaatccaacatctcatttcctcccagttcatcaagaacacagaagccaccaggatggcccagatatgccagaatctgtagaggtggttattgaaatccgacagtgactacggcggaatagtgcaagacaagaatttgcagtttaaattctttgtacgcccttcattgcattgtttgtcgcagtttcaaaatgtttgaagtcaaaattatatgtggtccctttgcaagttgtagactagagaagtcagtcatacaatccacattatcatatgttctttttaatatatgttgtatattgcaagctaagtaaaaataccgataagatctactgatataggagtagagcttatttactgttgagtccctaatttttttatgagtgaatttcagcagggacacctcttacc

SEQ ID NO: 22659 - DNA, 537 bp, Oryza sativa; identical to SEQ ID NO: 13573
  Clone ID: TF_OsC344717_1

SEQ ID NO: 22660 - DNA, 637 bp, Oryza sativa
  Clone ID: TF_OsC4737_1
gcccagcccaccggctcggtgccacgccttggctgaatgagctacctcctctcctacatctccaagatgctgtgcatcaagattccgtcggaggcgaggcaagccagcgaggacggcggcagcggtggcctgacggagtgctccgtctgtctctccaggatccgtgtcggcgaggcgacgaggcgtctgccctgccggcatgcgttccaccgggactgcgtcgaccggtggctcctctcatgcaggcggacgtgcccgctttgccgggtttacgtcgtcgtcgacggtaacaagccaggggtggcagcgaagcacaccggcgagccgccgctcgctgaagacatggtgatctggttctctgccatgctcgtccctggattctgacatgtatatctctgatgtctaagcgcaatgctttttatttgtttgtttcctgcctggaaaccggtttgttttttttttcttatattatgcaaattaacatgacgatttcacgcttgtagcgtttgtatgtacgcttacgctcacatcgtcagcattttttttcttttgcaagttttctattgggcgttgattacctattcaagagaactgaaaaaaaaataagtaggtatatataataaaaacggtttctttt

SEQ ID NO: 22661 - DNA, 1395 bp, Oryza sativa
  Clone ID: TF_OsC359_7750
gcacgaggattccacccctcgcccgcggattcttggaacgctttgctgctgctcgcgcatggtggaggggtggggctagtgctagcgatcgcgaggaggaggaggacggcaagattggcggccatgctgagggcggtgcggcctgcgccgtcggcggcggcggggcccgccgcaccgccgggcgacggcgaggcgcgcgcctgctacggcatcgtggtggcgtgcgtgtcgctgctgctgctgtgcgcgctcgtctccgccgtcggcgtcgccagggccttcgccgccaccggggtgctcgtcctgctgctcggcctcgccggctggctcgcgcccacggacgccttcgccgtcgcgctggcccccgagctctacgcggggaacgccggcggcggcggcggtagcgcccgcgcggcgccggcggtgcggctgcaggtgcgccggtgcgcgtcgtgcgggctcgccgcccaggccatcgacgcgctgcccgcgttcgcgtacgagccccccgccgccgacgtcgaggacggcggcgagggcaagccgcgcggcggcggcgcgctgtgtgcggtgtgcctggaggacgtcgtggccggcgagacggtgcggcggctgccgtcgtgcgggcacctcttccacgtggactgcatcgacatgtggctgcacgcgcaccggacttgcccgctctgccgccgcgacctctcgccggagaaggtcaccgcgaaatcctccgccgccgccgcgacggtctcctccaccgacgtgctgccgccgcatttcgtaggaatttggcacgaaataaatcagttcaaatcatcggagaaatcgctggtcgggatgcccgaggcggcggcggcggaggaggaaggcggtgatggctgctcgacgaggctagggtgctacggcttcatggcggtgaacgtcctgatggggctgtactgctccatcgcctacgccgtgagcgccaccgtggcgggcgccgtcgccgtcgcggtcgcgctcctcctgctggcgctcgccggcaggctggcgcagacgacgggaggaggctccgccgcggcggcggcgtcggggcggcggcggcggctgctgagctgcccgtgcgcgtgcgggctgatggcgcccggcgcgggggggatcggcgtgctgccggcgttcgcgtacgagcccggcggcggcggcggcggcgtgctgtgcgcggtgtgcctggaggacttgcgcggcggcgagatggtgcggcggctgccggcgtgcgggcacctgttccacgaggactgcgtcgacgtgtggctgcgcgtccgccggacttgcccgctctgccgccgcgtgctcccgccgcgcaagtccgtggcggccgcggcggcggcgtcggccgctgtgctgccgcctgtctga

SEQ ID NO: 22662 - DNA, 783 bp, Oryza sativa
  Clone ID: TF_OsC335815_1
atgccatcgtcatcgtcatcctcggtcgccgctgccccttctggcagcaatggcacccgccgcgacggtgggagcgggagcgtcacgggctgcctcccggctgaccaggcatgcttcgcgctttcgtcgtcggccagctcgccaggctacctgcacgcctcggccacaacgacgcgtcgcgatgcttctgccaccgtggcgcgcgcgtgctgcaccaccgcgtcgtacgtcgtcgtcctcgggatcagcttcggctccctcctcgccatcctgctcatcctctgcatcatccggtggtacctcgtgtggaggtcggcgcgaccacggcgggacgacggcgccgcggatgaggcggttgggtcagccaagaagcggtcggctgggctggatgacgacgccatcgcggcgctgccggtgttcgcgtacaagcaaagggaggagggcggcggcggcgcggtgggggcagcagaggaggaggaagaggaacgggagtgcgcggtgtgcctccccgtgatggccgacggggaggcggcgcggcggctgcccagatgcatgcatgtcttccaccggggctgcgtcgatgtgtggctcagggagcactcgacgtgccccgtctgccgcgccgaggtggttgttaggccggccggtgcggcgcgcgttgagaagttgccggagagcagcgcgtcgcgggcattgacatcgccggtgccggcaccggcgccgaggccgacggggacagtggtggacgacggcagggagagggacctcgaggcgcagcagtag

SEQ ID NO: 22663 - DNA, 1425 bp, Oryza sativa; identical to SEQ ID NO: 13574
  Clone ID: TF_OsC164176_1

SEQ ID NO: 22664 - DNA, 567 bp, Oryza sativa
  Clone ID: TF_OsC18246_2
tcaaatcgcaggaagcacgcgggactcgccggcgacggacaggaagccaatgtcgccgccgccgccgccgtgcctctcgacgctctcgccgtcgccgcagtaatcctccttggcgtcgtcgtccgggccctcgacgcgcgcgacgacgggtgcgcggcagacggggcaggtgggcgcgcgcgtgagcagccaccggtcgacgcactccctgtggaacccatgcccgcacgccggcagcacgcgcacctcgtccccggcggcgtactccgccaggcacaccgcgcagtcgccgctgccgccctcctcgtcggcgccgccgccgccgccgtcgcggggcggcatctggaccacgtgcaccgggatcccgtcgagcgcgcgcttggtctcctcggacggctcggggcgcaccgacgacgacccgccgtcttctcgccgtcgccgcccgccgccgtcgcagaagcaggcgtagagcgcggtgagcgcgatgtaggagacgctggcgacgaagagcaccgtggtggtcacccccagcgcccgcaccatgtgcgcccgctgcgcgcggtccat

SEQ ID NO: 22665 - DNA, 882 bp, Oryza sativa
  Clone ID: TF_OsC394647_2
atggcggcgactcatccaggcagcagcagggagcatgcttcagcggcggcaatgactctctgcttggcaaggtggcagggaggaggcaacgatcacagtggttcgacgtggagaggaggcaatggcgaggaggagacatcagcagcggctcgatgtggggcggaggcggtagcggtggctactatgctaggcggtggggatgaagccatgacggtggcggctcagcgccaagaggaggtgacggcgttagcggcggtggcgagctggaggtcgcagcgccacgaggtgaaggccgatggtgagcaggcggcaggggaggagaaccaagctgcgggggtcctggagcacatcccgggaccgggggagcctggaaactctatagttcaggaacgtgtcatcatttctaacccaatgaacaccctattgtttttacatatctacaccggtggcaaggcgtcatcagccggcggtgatgtctccgccgccgtggtctcttccatggccacgtcccggggcggcgagaggtcgcaccggcacatcgggcaagtccggtgcgagtgcagccacatgtcgatgcactccacatggaacaggtgcttgcacgacggcatctcccgcaccatctcgccggcgtgcagctcctccaggcacatcgagcatggctcgccgttcccggcctcaaggtcgccgccgccgctgtcgccctacgccaccagacgcgccatgggagcctacatggtgacccatggtaagaacctgtggtcacaacatgctttccaggttactgcggatctggagtctgggctatatgaatgcgagtgcaaaacatggatcacacaagccgcccacatgttgcgagggtgctctgccatctccaggtag

SEQ ID NO: 22666 - DNA, 1082 bp, Oryza sativa
  Clone ID: TF_OsC147962_1
cagatccaagcccccgcgacgaggcgaggtgggagagggggcagaggcagagcgagatgagcgtggggcgtaaaaattcaccacgccaccatacgcatttactccgcttgcagccctacccccacgcggcgtcacgagggcccaatgccattccgccgcttccccgctgagagatcgatccccaccgcgccgccgccgccgcagccgcagccgcagccgtcgccatgtcctcctcatcctcttcgctgctctcctcgctcgccacgctcggcctcgggtactcgatcgccatcgcgctgggattcctcgtcctgctcgcgtcgctcctcctcgcgtcatacttctgcttccgccgcgggggcggcggcgggcacttctccggcgtgctcaccccgagctccagctccagccacctctccatcaccgtcccgcgcgtgctcttcgtcgcggaggggtccgagtcccccgacgcctactcctcgggcgtcgcggccgcgtcgtcccccgtggggctcgaccccgcggccatcgcgtcgtacccgaaggtccccttctacagcggcgccggcgcggacgccgacgccatgtgctcgatctgcctcagcgagtacgcggacggggagatgctgcgcgtgatgcccgactgcaggcacaggttccacgtctgctgcctcgacgcctggctgcgccggaacgcgtcgtgccccgtgtgcaggtcctcgcccatccccacgccggtggccacgccgctggcgacgccgctgtcggagctcgtcccgctctcgcagtacgccgccgatcggaggcgcagcagggggttgtgcttaggttatttagagaagttcgggaggtgcaaaaccactactcgggaccacgcattgggggagaaccgtagcctcgtgacgtgcttagggaaaaggagaggtcaaggagaacttgctgtggtgatcgtcgccgccaccgaggtcgcgttgccgctccatgtcgccgatgaggtcgtgtcgccgctccaagtcgccaccgctaagatccgccgctgccagtggcccctcgactgtcgcgagaagggggcgggagggtag

SEQ ID NO: 22667 - DNA, 594 bp, Oryza sativa; identical to SEQ ID NO: 13578
  Clone ID: TF_OsC401067_1

SEQ ID NO: 22668 - DNA, 1716 bp, Oryza sativa; identical to SEQ ID NO: 13581
  Clone ID: TF_OsC337609_1

SEQ ID NO: 22669 - DNA, 1338 bp, Oryza sativa
  Clone ID: TF_OsC4182_1
tctgtgatatctctatagcgcgcgcgctcttttttttttttttttttttttttgctactaaatcgacagttggtgcaggtcaataaacacccagcacctgtcccttttctgaatcatttggcaatttgccagagcagaagtgccaaacaagtagttaaacatgagaaaaccatcttccccaatatctctttttaattctgtatatacacttattacaacaaacaatgcgattacgcagagcccagccctaataaggagcaatggtgtcgtcgtcttcgccattgacggcatggcatttcgctagccagactcaatctgcagaggatggtcggctgcccggaacacgtactgaactctgaatctcaatatctttcagaagaggagagctgagcttcgtcagactaggtagtcgtagtacaccagcaagaggttgtcagggactatgaggggcaggctgtcgatgaagctgtggaagtgcctcacattctccttctccagcgtcacggtgtcgatcacgtcgtcgtctccggtgagcacccagaggtcccttgatcggactctcttcaggctcccgcggcagaacgggcatgactgagatcttgtgtaccagtctcgataacagttgatgcacatggcatggttgcaatttggaaggaccatcttggtgcaagtctccaagcaaatgccgcactcatcttccctctcgtcgtccttatcgtcggcgtaaagcttccggccgccgccaccggaggccgcctccttgcaccatcctttctcgttgcagtctttctccatcaaattcccctcgagttgttgcaagaatggatatattacagcatagaattccttgaggcttgctctcctttcaatgttggtggatatagaggcatcctcatcaacatataccttgtacacaagaacctcaaggagacctaggtaactagggagggtatatgaaagggagcagctgcaatccatccactggatgaggttaaggatgattggagccatggagctgtaagacagcctcatctgcacacaggcacccccataggccctgtgtatagcatgcgccagggtgttggcatggtggatatcagcttcaagcgccttgagagagcccctgagggacaaaggcctgccaccatgaaacatgacttctgtcaagaacccaaaaccagaccctatgctttgcttcacccttatgctgaagtctgccacaaaaacacagacttgggcaaggaggagaggggctcaagaagcaacaaacaatcaagcaagcaagcaagctgctttggtttggggtctctgggaaaggagctttgggggaaactggga

SEQ ID NO: 22670 - DNA, 667 bp, Oryza sativa
  Clone ID: TF_OsC42947_1
ggccgcggcggcggggggcccgagcctggcggacaggttccggagcaggttcaggccggcgaggttcgggcggcggcgaggcgggggcgcgggcgcggccgactgccgcgtctgcctcgcgcggttcgagccggagtcggtggtgaaccgcctcccctgcggccacctcttccaccgcgcctgcctcgagaagtggctcgactacgaccacgccacctgcccgctctgccgccaccgcctcctccccgccaccaccgagtccccctcgccgtcgccggcgacggcgaccccccatttcgcccggatttagagagatctccccccttcaatccgccactgggccgtgtgcgcgtaggaaaattgagaggatcatttagctctagtgctagctccatttagtgctcctttttccccccactttcttaatttttttttcacctctttgcagtgtttttttttaccatcttcgagtggccttttcttttcttttctttctttttttacttctttgtgttgctgctgtaccattgtaaatatttgcagagtgctccgatcgatggagaggtgtagcacttgtgtacagggcttttggaaagcgaagagatgagaaggagagaaaaaaaaatcattgcccaaaaaaaaaaaaaaaaaaaaaaaaaaaaaaaaa

SEQ ID NO: 22671 - DNA, 1929 bp, Oryza sativa
  Clone ID: TF_OsC60386_1
gcgcctgggcgccttcagaactccactggttcttcttatctccctctctcttcccgttctcttccttctcaccgatcctggaatggtctcggagggttcttagctggcttttcgattggattagcagcagccgggtcagacggagcggaggccgtgccggagaagggagaaggaaagtttcaggtgaacatctaacatggatgatcacatgggaagacggacagttggtggccttctcttcaccaaggggggctcaattcttctcttcagagaagacagtgcgcgtcacaaggccaccaattgctgcacgcgacacggttgcagcagcaagcatttggccggcaaagacaagcaaacacacagggcagcaacagcagccaaggaagcatcagaaacccctcggagatcacagattttcaggaaacccagcacgaggactcctcagggaagtactgctactgataacatcagcaggaatgcagcaagctcctatagcgaaaacgacaataggccaagagaaactccagggcgtgatttaatcgctcgtctcaaagagagggtcaatgcatcaagaaaacgatcattgaacagagaaaacagtccatcatcaccaaatggattaagtgctacttcctcaagtagtagccgcacagtctcaagaccgtcgcatcgggcagcttcccgaataacggaaggcagatgaaggtgcaaatgcaggagctgtaaatgtacgcagagacagcagtggagataccaggaggaattcagatagggatgtcgatgatttcttgctagttgagcaggcagcaagagatagcactgaaggattcatatctggattcttggcaagatacagaagtaatcatcagggactactttcatctttggacgacagcatagaggatgcaaatgggtactggcgcttcaatatggaaggaagtgaagagcttgagaactacttcatattcaatgatcggtacagagggatgagaatggacattgacggcatgtcttatgaggaattgctagcattgggagatagaattggcaccgtaagcactggcctttcagaagacgcgctgtccaagtgtctagacagaagcatgtacatggccactacttcaggaactcatgaagattgtgagagaaaatgcagcatatgccaggaggaatattcagatggtgaggaggtgggcaagatggtctgcaaacattactaccacttctcctgcataaagaactggctccggcagaagaactggtgtcccatttgtaaatccgtcgctctgaataccaactagcactagcagggtgcttcttcagaaaccaaatgtacagattctccatgaatgttctacccagacacaatttgcattctttttttgatactcttttagatcgaaccattcgttcgcatcctccagaccttttgcattattggtctccttcagttcacaatttgcacttgtgcagtacgaacatggaaaggaacaggaaataactcctgaaaaatgaaaaaaaaaatatagttcctcaaaaaaaaaaaaaaaaatcccgcggtggccgttcagtagcccccccgcgcgcgccggtgacttggcggggggctcgtcgatggcggaaggaggcggtattgtgcggtggatctgctgcgcccgccatcggatgcttccgccgcggttttgggagacggttgtcgagctcggcggcgaaggagaacgtgggatcttgcagacgaggtgggatgcgacggatctgacgcaggagatgagtaccggcggggcggcgaccaagagaggcgccgccaccggaggcgacggggggaggaggggacggcgagggcgaggcgccgttgattttttgcaaaatgcccccttgttaactttggatcgtggtactggtttttgcaaaaatgcccctgcgaactag

SEQ ID NO: 22672 - DNA, 1493 bp, Oryza sativa
  unsure (1)..(1493): unsure at all n locations
  Clone ID: TF_OsC240623_1
cgggctgcaggttccgcacgagggtgagtttgcccttgcccaccggccaccaccgccgatccccatccatcccgcgagcgattgcggcttcgtcgctcgtcctgccgcttccgccgcatcctggtgagcacatcctccgccaccgctgcctgctccgatccccattcatcgcgcgagcgagtacggcttcgtcgctcgtcctgccgcttccgccgcatcctggtgagcacatcctccgccaccgccgcctgctccgatccccatccatcgcgcgagcgagcgagggtcgccgtcgctcatcctgctgcttccgccgcatcgacaagatgccaaatagagccacgcattggtgttatgcctgccgacgtccaattcgtgttagtggacaagatattacatgccccaactgcaatgatggttttatacaagaaatcagtgagataggtggttcattgaacacttatggtatctttgacccgagctttgatgagcgtcgagatagaagttttggaatggtggaggctatgtctgaccttatgcgacaacggatggcagaaatgggcagaaatcgtgtgttggatttccatggtacgagaggggcaagttcccatcaaggaaggcagccaactgttagaccaatgctcatatttggcagcaatgcacctgatcgtgtaagcagcagtagtgaagaagcagatatactcctcaggcaaggccgcagaattggcgcggaccgtccaaatttcagtcgtttcctagtcggtcccagtcttgaagctctattcgaacagctgctcctgcataataaccgtcaaggaccaccaccagctccacagtctgcaattgactccatgcctgtggtaaagataaacctcaggcaccttagagatgatcctcactgtccagtttgcacagacaaatttgaggttggaacagaggcacgggagatgccatgcaagcatctgtaccatgctgaatgcatcattccctggctggttcagcacaattcttgtccagtttgccgccatccactgccgtcatcttcccaccgttcaggcagcacccgttcatcgtcaacccactctaacgaagctattagccatggggttgccagatctgatgctgatcctgttcctgttgcaagaagcgacgacagcagaaaccatgaaatgcacggttctttctcgtttctctggccatttgattcacctactcctgattccagttcctacacgcacgaaggaggtgttggtgagcctacagttcatgacgatgctggccagatgacctattctgagtggcattacgactactgaacttcctgcagcaagaccccccacatatcagtgtccactcctcttggcttcnacctcttaaagaagaagtggatatttatgggtttctgttnggtgtntnaagctttcnctaaaacnaaccttgtgttgcatgtgccttctatccctntgctggggctgtgtatactgtactcaact

SEQ ID NO: 22673 - DNA, 962 bp, Oryza sativa
  Clone ID: TF_OsC47412_1
ggggcgaattcttacatattcacttctgcaagcagctagctttacaaataatctcaagcacatttgagaatgagataatctaaacaatggctacgttacaagtagaatccaaaaatcttaataagggtcaagcttgactatctgttgaaatctgcaaagcttctatactactccatctagctgttgagagagagagccttcaggctcgggcaatcttcgacgcacggcgtggatggcatgatgcacccagggcacgacatcacgccgctctcccatggcgcggcggcgaggccggtgaggtcgtcgcggcagatcgggcaggtggtccccttgaacagccacctggtgatgcacggcgggtggaacgcgtgcccgcacggcaggttcgccggcggcgtcttgcacctctcgctggccgtcaggccgtccaggcagatcccgcaggtgtcgccggcgcgcgtctccagccagaccagcccgcggacgagcgacacgggctcgctgaacaccagctccaccgccaccttcacgcgcgcggcgaagcggtagtggccgccggcgaggccgtcgtcgtggttccgcctcaccgcgcggtggatccacgcggcggcgtcgtcgtcgggcatgggcgtcgcccagttgctgcgggagaggtcgacgcagcggagctcccgcatcccggtgaacacggcccacgccatccgccgcgtctcctcgtagtcgaggaagacgtcgccgccggcgccgtccagcacgtgcttgcgctccgtctccagcgtgaacttgatgccgtcgtggcgcacgggctcgcctccgccgccgagccgccgcgaccagcaccgcaccttgacgtcgcagacgaagcgcacgtacgaggggccctcctccagcggcgccgtcccgtggtggccctccagctgcttgctgctgctccgtaagcgtattatcgtttccatcgccat

SEQ ID NO: 22674 - DNA, 772 bp, Oryza sativa
  Clone ID: TF_OsC2423_4
gaacagggtgcttgtttatgaaagttggaagtgccaaattgatcaattgcccaaaccaaaaacgatcagagcttatgttcaatcaatttcctaacaacacacaacttaggatgggattctgaaattttgtatgaaccatcaccattatttctgtctgaatacagagattagaccatttacccatctataacctgacatctttatacgctcttaatgagcatctaaaatacagatcgccacgacatggtacatcagcagaagccttatttcttcgttttacaaggccggcaggttgtgcttggagacccctcggcctctacttggggctcagtggttactctgactgatgtctcttcgttttcttcagcttgatgcgttggaccctcactaccttgttgcaatgtctgatcctcctgtcgcgtgttctcgtcaatgcggccctcctgatactgtacatccaaagagctgttctcttcaacggtctgtgcttccaaatccactggatcaatgctggcggttttgggggatggaaggagggatactcgacaaagagggcaagtggtgtttgtcgagagccagtggtcgatgcaatcgatgtggaaggtatggccacaaggaggtattctctggagccgctcatccggttgatagtctgctaagcagacagagacccgggtttccctggcacgcgtgggcggacgctagaccaaaacaggcaagacttggagcatctccttctttatgccgcactccatcctgggggtatctcccc

SEQ ID NO: 22675 - DNA, 741 bp, Oryza sativa
  Clone ID: TF_OsC355955_4
tcaaaatttgtggcatttgctgtgagacatccaaagaacgtgaatcttctcgtggatatctcttgttctttctcccatcctcttcttcctctttctttcgttgccgctgaaggcatcgtcggtgagctcccacagcgaagatggagtcgacgcacggggtgtgcgtgcgcaccgctctagcgtctcctgctctgcctgcctcggcgttggcatgttgttctccttctccggctcggacgcgccaccgacattgtccgcgatgccgccgaagcccaccgcccgcttgatgcggtcgcgggcgtggtgaccatgctcaccgacctgcggagcagcttggtcagcggcaaggacatggccggctgcagcaacggcccggtccgcgaggtcagcacgacagacggggcaggtgacatgcgcggcgagccacacgtcgatgcaggcggtgtggaacacatggcagcacccggggaggaggcagagcttctcgccgtcgtccacaaactcggcgaggcagaccgcgcactcgagcgccccatgcccggccttcaccgccctcgctgtcgcgtacgtcgagccccacgtgcctcctccgatgttccccaccgacgacgcgaacggccgcgctggcgtgcacagcaccgcccccacggcaacgatgcgcggcagtggtggcctcggagcagcgtgggcaatggagaggaggaggatgacgtgggcgacgaatgcgtagtgacgccccat

SEQ ID NO: 22676 - DNA, 2427 bp, Oryza sativa
  Clone ID: TF_OsC7776_1
agaagagctatgacgtcgcatgccgcgtacgtaagcttggatcctctagagcggccgcctttttttcggtttgtttacaaacgatatactttcttcaggttatcaagttatctagtgcagaatacatgcaacatcgtccaaaatgcagttcacgcaatgcagcgcaatccagttcatcaaaggcacgtaccacttttgatagcaatatccacctctaatttcagttattgccatttctgcaagcgtagtacaataggaaagcttgctgaagtcatccagatatattggcctggtcgacttcttttccactagaaagtagcagtactctagtgcaaactccacagaacacagggtactactctgatggaacgagtagatattgtatatttcctcgtgtatgttgacagtgagaactgtcttctccaaaataacagcaacaaaaataaccccatgcatcattacaatccacatatcaaagcttgaactttatacaagcacacggtcaccacaagtaactgtattctgccgtattacctcagaaagcagatcaccctaatgcatttcaatctcctgcacaggaatatctgtgtggtcagagcgacgagtatcagatgttccagatgagctcgctatctcagatttgcacaatgggcaaagtgcattaatcttcagccatttatcaacacattccttgtggaaacaatgtgtgcagggaagttcacgaagctcatcattgtgtgcatactttgcaagacagatgcaacaaacagcatcctcagcagatagtgaccgctccttgtcagtccctgcagctactatcccaccatcttggccttcagcttcatttcctgaactatgacggcgtttcttggttttgaatttgtatgttggaagagaattgatggattctgaggtagcccctcttgtattgtttgtatcttctctaaatcccataacagatatgatgcagggcaggcagcagcatatcattgcacagaggatgaaaggcatggcatacccaatacaactaaaggtaaggaacacaatacataacctgtacaagtttggagcatcggcagcagaagaacgcccgccaaatatccacacatttcctacgacaaaccacacagcaaagaaacaatccaaggccatcttgaagtggtcaaaaagagcattaatccttggattagcgagcactgcatttcgtgcagcattccttcgacgctctgatgcactagcagaaggctcagttgaattgttctgagaggagccttgaagtgtatgtgctggctcattttcaccattgacaatattgcggtgtatatagcgccaataaagatggggtagtgtagcaaaacaaccaactgtataacctatgacccactcaaataatggagcttgcggatgttcctttcttgaaagagaaagcacaacaatagcagctacaatttggctcacattgacaagaacttctattgaaatccagagtccagaattcaaagggcttctgtgccggcgaacatagttatcacttcttctagcacctgaagtatgtcctgcactaggtgcaccaactgctgatggtgcctgcaaagcaggtactagcgctctggttgcagatctatcaacaggatttggttctccatggttttctctagcaacactatgggaagtcgaagtagatggaccactgtcccttggaatatcaattatgtgctcatggccactaacacctgtagtttgttccatcctcgaagcatgcatatcggtatgaccgtgaatttcaagtaacgttgaaggctgaggtcatcaattcttagatgcaacaaagaaagaagcaagctgctaaatttctgagacctccagttttctcaaaactgagtgcaggaattatctacgattctacgcttcagcagagacttccagcttcaagtgaacacttagatttatatcacaaagagagctattcacggacttagagcaacaccgtggagggtagatcggtggcccgacagctgagattccccctaggcacgactcccaactccgccggatgggagggtacccgcgcccgtggcagaggacacggcgagcgggaggcagtggcgacgagggagccgcgcgcatgggcggcgcacaaccctaaccttaccgagtcgtcgccagatgcacagagaggagggtagctcgcgctcgcgcgcgcgcgcgaggcgcgacgcgggagcggcgcccgcacggtagacgacggcgcggccgaggcgcgccgagctccgctgcctgcgccgcggcggcgacggcggcggcggcggcgaggtgaggtgggcggagaagcggagaggccgagagggagagagagggttggggggtggggttggttggtgacgaggtgagcaacgaaggggtcttcaccccccacgcgtccacaga

SEQ ID NO: 22677 - DNA, 1689 bp, Oryza sativa
  unsure (1)..(1689): unsure at all n locations
  Clone ID: TF_OsC62963_1
cccggggcggccgtctccggtgccgatttggtgggatccgggccggagaagcactggttggtgaggagggtgaggggggatgggtgcgagggaggaggtgagggaggaggagggggaggagggggagggggtgggcgggaaggaggaggagaaggcggcggccgcggccgcggcggtgtcgtgctcgatctgcctcgacgcggttgtcgccgccggcggggagaggtccacggcgaggctgcagtgtggccacgagttccacctcgattgcattggatcagcatttaatgccaaaggcgttatgcaatgccccaactgccgcaaaattgaaaaggggaactggctctatgcaaatggttcccgacccacacaagatgttaatatggatgagtgggctcatgatgaagacctttatgatgttagttactcggagatgccctttcggtttcactggtgcccatttggtcgtttggctcaacttccatccttctttgaggaaggagaatcatcacccccagttacttttcatgacttcatgggacaacatatgtttacggagcatgtagctgctgtatcttctgcacctggggcagctcatccatgcccatatgtggcatacttgcatcctcttccatcattggcgtcatcatcaagctctcatgttcctgagagaactatggatggtcctgcatatcatgatccctggcaccccttggctgggccttcagatggtaggcccttgcaatcagtgcaacctgctgattttcatcataaccattgggcgcatgttcccaattcctatcctcaacccaacaacaataatggggtggccgagcagcaaggagtcccttttggaacaacgagggctgcaagagttgatggtgatacccaacgtcgaggatcatctatttctccatcatacttcagtaatggatctggttctagatctagagctcctaatgttcctcctatggtacctcaattcatgagggcgcacggcagcattagtgaacagtaccagcagagttcatcatccagcttatttgctggggctcatagatcaggaggcatgcgaactgcaccgccgccccctctaccagagaacccggcattttgccttttcccaccaggttcatctggccataactcgatggagactgatgatgcaggaggaaaccgattctatgcctgggaacgggatcgcttcgcaccatacccactaatgccagtggactgtgagacaaactggtggagttcacaacaatctcatggtacatcagaacccgcgcctgctccaaggagactatttgggcaatggattggtgttggaagatcatctccggaaaatcgatcacccgagggctcatcgtatcggcaaatgcacaccccaaggatgtagaccctcatgaagggaatttaagttaatacttaacatttgaaatctgaagttgcttgtaagaagatggaaaacccattgtatgaaattaagcccgggtcgtgccgtaagcctcgaagcaaatctgagaagaagaaacagaaaataacccggggtggacattttgatttggtttattgagttccatcacgtacatatttgaaatcaagttgggatattcggagtttcacctgtgatacagtttcgtattatgcaatttgtttaattcaaaaaaaaaaaaaaaannnnnnnnn

SEQ ID NO: 22678 - DNA, 400 bp, Oryza sativa
  Clone ID: TF_uC-osflcyp016a05b1
actgatgtcacttggtcattactcaatgagggtgtgttttagtggcatggcgttttatctgcgcgacgctgttctcctattgaacttgcgcgctcttatagcttcattttggaagcggataaaaacttatgccaagttacgaaaggcacttagttcactcgacggagcacttccagatgctacatatgatgaaatctgtgcatacgacgatgagtgtgccatctgtaggggaccaatggctcgagctaaaaagttatcctgcaaccatctatttcatctagcttgcttgcgatcatggctggaccaaggattaatggatggttactcatgtccaacttgtcgaagacccttctttctgtcatctcaagggcacacaagatctacagcagaggtaggaaac

SEQ ID NO: 22679 - DNA, 1973 bp, Oryza sativa
  Clone ID: TF_OsC260574_1
gccccccctcgagtttttttttttttttttttagcatgaaaaatctattgattgcttcagcatgacaacacaattttgaaagttgtcgttggctgatgcatctaaaaagacagtcatcgtctcaacaagttcaaacaacactcaaagaaaacgtataatgaaatcctaatatcaacaaacttcccttgccatacaagaattccaaattcacatggcagttcatcgattttataacagggatgactgcgatgcaaatttgccaccacatgaaggagcactctgagttgtccagatcgaaggagggaaagaatatgtgaaattacacctgaaacacgtgtattacaaattctgttgggattggatcagaaacaatgtcagaagctccatttttctcacagaagagaagatcatgtggtttttccaatgcctgatgcattggatctgcagacatcaccacgacaaagtggacaaaccctgtgtatctctttcaaccatttatctacgcatgttagatgaaattcatgattgcatggaagaatacggacacagtctccctcggcatattcaacaaggcaaatgtagcattgtgcagcctcctcagtttggtgttttaatgatctcctgtatacttttacaggaagacgctcgacaacctcctttggagcaggaacggacccaattgaagaaaacgatggccttgaggataaggcagcagactgttggtggatctcatccagaacctcaaaaagtgcttctgctaacataacgattcttgatatgctagctcttgtgtttgtttcttcatcagaatttcctggtcgactgctcgttctgctgcccaatctttggagagctcggacctgagatcgtatcctcctcctctcaagaaaagctgatctgcgctccagtagatcccgattattggcctctcttagagttgcagagtcggttgaagaatccaattgcagttcagaatttctctctgaattagtcctttgcatgattgctgaattttgcctggcactagcatttcctgatggccatattgccctatcgtaaagaagtgaaggggtgaataacccatctgagaatggagtcctcctaagaactctgtcacgaagacgtccaacactcaacgttcggctgaatcgaacactgccttcaaaaggttcctgaggtcccatccttctgttggaatatctcaagttagcattgtcggattctagcaaatttctcctagcctgatgggctgctctagcttgtgcggttacactatctctaagcatatccagagtcgaatcaatcccagcagttgatgcaccaccttgctgggagatgtttgcatcagaagaattgtccacatttccatggcctccatcaggattagctgaagtggagaggtccgatgagagaatggagcaggctaccgatgatcccaagctgacagctctactcaacccgaagttgacaccaaaacgtggccgtgaactgtcagaatgatttggtgactggttgacctccaccctgttgttgacggcagtggcattctgcaatacatcaacatcctgatccctgtttatatgtgatgaaggcaatgttgccccttcacctggatgagatttagggattgtgggagcatcctcttctgatttgtccatttgagcgattgaaggcaggcttccattctcctctcccttgctagactcgaacggccgccgcggcggccgtggcggtggcggtggcgaagacgccgaggaagcgtcgtcgcgcgacggcgtgccgtggccgcggaagcaggaggaggaggagctcggcagccgctgcagcaggcctctccccctccccctccccctccgctgccccttcccattccccttactcgcctcgtcgccgccggacgccgacgccgacgccgacgccgacgacgaagatgacgccgacgaggcgccggccttgctgcttccagatcccat

SEQ ID NO: 22680 - DNA, 1287 bp, Oryza sativa
  unsure (1)..(1287): unsure at all n locations
  Clone ID: TF_OsC32442_1
agggaggggaaatcacacaaaactatcggcctcctctctgtctcctccactcccccacgccaccgctcgccgccgccgccggctcagcttctcctcctcctccgccgccgccgccgccgtcctcgggtgaagcagcgcagttcggaggagggaggcggagggggtttgttcgccaacctagctcgctcgctcagctgccgagctcttcttcgctggtctttgagagatgaaattttagtgatatcagctgctagaggatagactgaagtaactttcaacaattatagaatgggtggttgctgttgttcatcgacaagatctgcatccgtcggagcaccagtttatatctatcatcaacaaaatccggcctctacaattgttgcaatagacaaaaatctggatacatccactcctgacacttaccgagcaccacctacacctttgccttatgatgttggtctagtgttgaaagataaccctgatttggagaagacaggcatcaagaggaaaattcatgaacataaggagtccttaatgatggatgataatgagtcattgcaaaaatgtgtctctgaagataagcctgatgaggaggatgtttgcccaatctgtcttgaagaatatgatgaagaaaatccccgctctatgactaaatgtgagcatcattttcatctttgctgcatacttgagtggatggagcggagtgaaacttgcccagtttgtgaccagataaccatgataaatgcgatgtatgaatagccttggtggccctggtggatcctctcttgaagctcatgcttattcagtcggtttggcagaagtcatttgatggggaagcacaatgagcaactgctctgctctcgacattggtttggtcttttttggtggaaggagtgaaattaaggagacaaatgacatgaaatgttctggccaacactgttttgtacctttgttgccaatctttggctaatttatagcaagtagcaacaggaggattaggaaaatgcttggatgcgatatacataccggtcacatgatcattcagtcattcggttcaaagtccaaacattaaaaatcagctctttttttgtttaaacttaggacgaatgttacttcacttctaatccagttagtgtctgtgtatatcatacataacataggtgaaaaagaaaaattggtcgtagtctctcagtctaggcttcatttgtataatacttctagttggacaagctcctgaatacatcccttcctatttcctataaaaaaaaaaaaaaaaagancgnccgc

SEQ ID NO: 22681 - DNA, 594 bp, Oryza sativa
  Clone ID: TF_OsC30400_3
ctagtaagattggtcttgggttggcatcgggaatctgcagagcgggcagcgatggctgaggcggagccaatccaagatgcaggtcgcatggaagcaatgcgagcagggcatcctcgtcagcttctctcccgcctcgaaatcctccaggcacacagcgcacccgcgttccctggcgtcgcttgccatcgcctcctgcagctcggccatggccttgctcgacgcggggacagcgccgaacccaccgttcctgtacgcatcctccacctccactactccatccatggcaatggcagtggcagtgccacggcgctgacgctgaagaatatgatcgcgaacctgatcaacaagctgctgcaagaagtcggcgtccagttctatgcggccccgacgaatgtcagacctcaagcgctcgcgaatgatctcatgagcttcttcctgcgttaatagcgtccgactacctgggcggtacatcaagttggtgcagtggatccggttgccgatcttgaaagtataacgggggatgccttcgaagctcaagttctcgatgggagggaaatctcttggtagtgctcttgcgaccgcggaggcatccac

SEQ ID NO: 22682 - DNA, 1198 bp, Oryza sativa; identical to SEQ ID NO: 13589
  Clone ID: TF_OsC863_1

SEQ ID NO: 22683 - DNA, 1190 bp, Oryza sativa
  Clone ID: TF_OsC863_3
atggctcaccgccggatcgcgctcgccgtcctcgtgacgctgctcttgtcggcgttccgcccttgcctggcgcaacagagcaacgacgacacgagcaaacaccaccggagcgccacggccggcgggttcacgccgaccaccgtcgtcgtgctcgtggctctcatcaccgccttcgtcctcctcaccgtgttctccgtcctcatcaaccgctgcgcccaggcgcgcgctcccccgcgccgggcgttccgcagcacggcgtcccatcagcccgtcggcggcgccgccgccgcgtcccgcgcctcgcgtggcctcgacaaggaggtcgtggaggcgttccccacggcggtctacggcgacgtgaaggcgcgcatggcggcgaagtcggggccgctcgagtgcgccgtgtgcctcgccgagttcgcggacagcgacgagctacgggtgctcccggcgtgctgtcacgtgttccacccggactgcatcgacccctggctcgccgccgccgtcacgtgcccgctctgccgcgccaacctcacggcgccaccggtgtcgctcgccgccgccgagagctccgacctgacggcgccggaggaggcggtgcaggaggaagagtcggaggagctcgacgaggcgtccctgatggccaccttcacgccggaatccgtcatcgacttcggcgcgacgcacgaccatgaattcgacagagcagggtaccctcactaccggaggacgcagtcggccatggacgccgcgccggaccggcacacgctgaggctaccggagcacgtcatgaaggagctcgccgccgaccgcaggcaccggcgcgccgcgagcctcgccgggtacccggacagcgtggagaggacgccgaggtggctgacgtcgctctggcgatcggtgtcgtggcagaggcagagccgggcggactgggacgccggagaggagcacggcggcagcaaaagggttcacccggtcgccggagctcaggacgagacacccagcgggtccggctccgatgggagcaaggagaactccgattctgacgcgttaaaccgagtttgaattttgttttctcctcttcttttttttttcttgtgcttcgttctaattgtgcagcggtgtagtaatacaaattaacgataaactaccttgcacaattttctattagcaaacaagtactctactactct

SEQ ID NO: 22684 - DNA, 1225 bp, Oryza sativa
  Clone ID: TF_OsC47750_1
tttttttttttttttttagagacaaaatctggatctctctattatgttaatcacaagggctccatgtccaagtatataaatctacaatacatacaagggggggggtatatactagtataatgcaagtatccgctacacatatgtactacgccaaaacgaatcaaggtatcaaaagaaggggagggagtaggtacacacacccacgtcagtcgggatcctcacgccgtcgccggcggcgtgccgtgcactgcacgcccttctcactaatcttttagcttaagcctaattaaccacgaacgagccaaccagatgcgagcttgggccagctcagccgacgacgacgtcgtcgacggcgacggcggcggcgaccaccgtgcgccggcacagggggcacgacgcgtgcctgagcagccagctgtcgatgcagcggaggtggaacgtgtggccgcactccggcagcctccgcgcccgctcgccgtcctccaagtcctggaggcacacggagcagccggcgcggtcgtcgccgccggcggcggcggcgaacgtggtgaccgggagcgcggcgatggcgtccgccggcatgcccgtggcggcggcggcgacgccggggatgccggtgtcgaacatctccgccagcgtcggcgcgctctccctgaagggcgcgtcggcggcgttcatctggctgtccaccgcgttctgcaccgccggatccaccttctcccgcaccagccgccccgtcaggaggctccagatcacgtcaaggacgtagagaacgctccagatcccggagtcgtgggagcaccacatggcgacggaggagtcgacgacctccatggcgaccaccgcgccggagatggccccgatcccggtgccccgcaccatgccgctctccgtcgccagcccgatcagcccgccggtgatcgcccccaggatcgtgcccactgtggcgaagacgaaggtgacgatgccgcgagctacggcgccggcgacgcgagccggcaggcgggacatgctcctgctgctgccggcgtcgtcgcggccgccggcgaccaccggaggggagtaggacgagaagctggcgtgcactgctacggcctccatggatattgttggtttgtgctggatttggataaggggaaatatcactgatcgatcgatcgagcttgctctagcagagtgcagagaagaggaggatctagctagctagctttctggtgcctcgtgc

SEQ ID NO: 22685 - DNA, 477 bp, Oryza sativa; identical to SEQ ID NO: 13595
  Clone ID: TF_OsC400246_1

SEQ ID NO: 22686 - DNA, 1909 bp, Oryza sativa
  Clone ID: TF_OsC50873_1
atggcggaagaagccgacgagacaaccgtcgccgcacgaggcatgcatgcccgtactcgctgcttctgttcgccgccgccgtgctccagcgcctagggttttcttcgccgccggcgagtgctccagctcctagggtttcttcaccgccggcgagtgctccagctcccagccctgcgcgtcctcctcgccggacgctgccggtgacgtctgggccaagctaggtctgtagtgccctccgattccgtgttcccggaggtggagctggccgaggacgacgccgtggtgtgctcccgggtcaccccggatggcggcggggaggtggtcgcgtggtgcaagattaggcgcggcggcgacgtgtcggcggcgacgatttggaatctgagcttggatgcaattattgtcgatggaagagttatccagcaagaagcagttgacatcaaaccggggagtgaaattgttccagggccccagaaagatgggtatctgttgtacacctttgatataactggcctgaatgactaggacaaaaataatatcaagattgtgctaggtattgagaatgcaaagtgcagcatatgcttaaatttgtggcatgatgttgttactgttgcttcatgcctccacaacttctgcaatggctgcttctttgagtggttaagaaggtcttcagctaattcgcgtgataaaagtcagagtgctgcctgtccacaatgtaggacggcagtgcaatcagttggtgggaatcacttcctacataatattgaagaggctatactgcaagttttttcatcgctacagcggtctgatgaggagattgcattgttggagtcatatgccccggtcaagacaaatattgtaaggcatgcattcatcccttttccatggtcttatgctggtgcgatgattcttagatccaccatggggataaacatctctcgtggttgaaagttacatttgtcatgaatttggattatcattctattttgaagatatccttgattgataaatgcactgccatgtttcagataacattttattctcttatttcccccaattttccttccatttggcaatactcgtggtgttggtttgtctgtactgcactttgacacattatatttaatttacaagacttgccaggtgcctaggaatgtctttagtattcaactttttgacaagataatagtacatggaatgaaaatctgtttacaattagtactggcctcttaataaactaattagtaaaacaataatttccccaaatggtgggctcattccgttagtcgggtacttataattgtagaatttcctttcagtgcaggttgatctagaatcatggttctctctctaagtcctattttgcttatcgaatacttgcctcttaatcagctgaaccatgttgatgcaattacttctaggacatacgtctgcaaccaatgctacagcaagatcatcgatttcctgctctactggttccgtgtatcaatgccaagaaattctataggtcctattttgcttgtcgatgatattgttaaatgttgccatggaatgttagcatctgatacatgggcttctcatctatagacatgttgtgcttgtcattacctctaaccatatcatgttatttaatttatatcacatgattgaaaatgcattttagcatgaatgactcataacgatttagaattttctaacttacaattagcaaaccatggcagcacaatatggtatttcaaattttcatttagttgcactacttgagaatgagtttagtggtttggttggattgtctaagtgcaaatgttgctgtcatttgtgggaatcaggaaaatataaaatgccatatataatatcctctatattttagttcatagagagtatagttccattcactcccaaagaaaatatg

SEQ ID NO: 22687 - DNA, 1216 bp, Oryza sativa
  Clone ID: TF_OsC105470_1
cggcgctggcatgcggggggtcacgagcgtgtcgcccacgaagcgggcggcaccgcaccgcaccgaggaggaggaggaagcccggcgaagtttcggtgggatacctgcctcgcgtcgccatcgaggagcagctatggtggtggcgagctagctcaaggtacgcacgcgcggtggaggaggaggaggaggaggaggaaggagaagaggggaggaggaggaggaggaggcagtgatggtcctgtgctccatgcgcaaatcgttcaaggactcgctcaaggtgctcgaggctgacatccagcatgccaacaccctggcctcggatttctcgagggattatgacggggcttgcctccagatgcggatgtcgtacagccccgccgcgcagttcttcctcttcctggtgcagtggacggattgtagccttgccggtgctcttggcctcctcaggattctcatttataaggtttatgtagatggaacgaccaccttgtcaactcatgaaaggaaagcgagcattagggaattctatgctgttatatttccctcactcatgcaactccacaagggtatcagcgatgtcgatgaccggaggcagaaggcaatctgtactgagagatacagaagaagagatgaggatgagagcaagaggcatgtttctgagattgatgtcgagagagaggaagagtgcgggatttgcatggagatgaataacaaggttgtcttgcccaactgcagccatgctatgtgcatgaagtgttaccgtcaatggcgctcaagatcccagtcctgccccttctgccgtgacagcctcaaaagagtaaattctggtgatctgtggatgctcacagatgaccgagatgtcattgacatggcaacgattactagagagaaccttaggcgcctgtttatgtacattgagaagctgcctcttgttgctccggacaacatcttctatgcctatgattctcataggatgttccttgtcgtaggatgtggctaacccccggacccgactgaactttgaccagagaacttgtgaattctgactagatcccatgctgtggtcagatgttgtaaatgcttgtacagatttgtaatttcccagtgtaaaaaaattagtgaggaaaaacccttgtgttcccccttgaactcctagtgtgaaattcccagtacatatatgctccttaaaaaaaaaaaaaaaaaaaaaaaaaaaaaa

SEQ ID NO: 22688 - DNA, 2328 bp, Oryza sativa
  unsure (1)..(2328): unsure at all n locations
  Clone ID: TF_OsC3910_2
gagcgacttaaaccatattcacatttattaaattcagtattgaatgtctggacagtataaatccaactatagcgtacaaacaaaaatgccagaaaaaagagggagcatactgatggttcagattgaagaatcatgttgctttttcccagatgtgctaatctgattttagtcgtagttacaacactgcatctctactcaaatgaccacattaagcaaataaatatctgatgttgataggaggcctctaacatggacatacaaatgaacgagcctaccaaaatcgaaataaagcatggncatgggagtttctcctcgggtatttgccaagtcaccatctatatatcctttgtttgttcagccctcaccttccccttactaacccaatggctcataccaagcatgtaacttgagtgcagttaaagatgtgtttacaacagacatatccagaaatttgcatgcagcctgcataagcctctctatctggctctttatagcattttcatatgccttctgcagtgaactttcaagttccctggtagttgtcactgaactaacagcaccacgtgcataaaaagtaggcgctgaaggatcggcagttgcatggccttttggcgattgattggaagtacttgcttctcctgattgtggaccatttgatgtagactgtggaggagttgaatacctgttcaaattgttcgctggaggataagcaaaggatctcccatatagggaagcagccgaagcagctgcttcaagttttgcttggcgcctgcttatgttctcacctgctgctcgttctgaacctggtgtgccattaccaggctgaactccaggatgaactccatgcggacgtgctgcagtacgcccattatctgggggcagaattggagctctacatgtagggcaagtgtgttggcgttctaaccatgacctcaaacaatggacatggaacaggtgcccacaaagcagcttttttgctgtggtcatctcctcacggcaaataatacatgtagcatcactcgcattgagctcatctgctgtggcatctggaaatctttcattcatgttggaagttatctttctgtagcgtacataatccgcgatacggattctgaagttgcgaaatgtctcatacagctcacgtatcaagtgcagtgggacaccatagttcaggaagatagctatgaagaagagcatatacaaagacaagtgtacaaggtcactgatgagctccaagtaaaatgtatacactgcctttttctcccattgaccttccattagcatgtcaccaaacgaaaaagaagattgcaacagacgccttcccgcttgtgtatgagcgacctgagccgagttggacaggaagaggcagtcgacgacgagcaggaacagcatgaaggagacgatcctggcgtgcgacagcatgggcacggagggcgtggtctcgatgtactcgaccctcttctgcgcgagccagtgcagcgccttgacgagcagcagcgcggcgaccatggcgaggaaggagacggagaagtcctgcctgaagatggtgaccgcgaagaggatctccaccacctcccgccacgcctgctcgttgagccgctccacctcggcctcccggagcgtccccaggaagagccgcttgacgagctgccaggcgacgcacatggcgacgaggcccgtgttgaggagcagcacgaagcagatcttggaggtggagaggtacaccatcgccgggtagaactgctccctgctgctgaacgcgtagtacaccgccgtcgccgtcgccatcaggctgaacgccgcgtacgtctgcagccgaatcatctccgccgccgccgccggcgatcccgccacaggtgtggtgtacgcctggaagtgcttccatgctaccgcagcagcaacagctgcttgtgccagtatgaatggcaagcttgacttgccactcctccaaaccttaaggctaagcacaccaagggccaatattgcaaggccaggtgcaacaccgaaagtaagacttacggtactcctccaaaacagaaatccaacaaggcccatggaaaataaaattccacgccgaatcatctccgccgccgccgccggcgatcccgccacaggcgatgcgattgcgagcacgatggtgatggcgggtggattctccggctctaggaggaggaggaaagattgggcggagacattgtctgcggggatttttttttgattcgtggataaagccgccgcgattttggttcgagagggtttgcggaaaaaaaaaatcttgttgttgttgttttatttatcttttcttttcggtttttgtgtttttttcct

SEQ ID NO: 22689 - DNA, 2651 bp, Oryza sativa
  Clone ID: TF_OsC59119_1
gttagttgatgttgatgtcgcccctcgtgtctctgttccagtgctggtagcgcgtcccgttaatctctcatgctcatgctcatggcagccgacgtctccattcccacgccgcctctctgctctctgctctccctccacacctactgattcttcttccccttcccttctccgctttccctgccttgcaaatccgccaaagggctcatcttagtgttcctcttgcgtgattccgagctaaaggtgccgtctttccccccaaaccaccaccattcatttagtgttctggtggggatccagtgcaacaaactgggtagtaattttgtcgcttttcggagtctgctcatttttggggttcaatctgataagaggatggctttctcttcctccgaactccgtcaggggacttttagctgatcgatgaattgctgttcaagtgaagcggttttaagttccaaagtggcgcttctgaattcactcttctcgtactatagtattgccaaaggagaattgctctaataagatgaactgtacaaaaggagggggatttccccttttgttttgcgcagtcatttgtctcatggcccaacagggggcttgcaatgtggtgctaatagcgaataacactaccttgtcatttgatgatgtcgaggcaacttttactccagaagtgaaagattcaggtgtaaatggtgcaatttacgctgtggaacctctggatgcatgtagtccattgagaaagaaagcagccaatggtcctgtttcaccatttgcactggtcatacgaggtggttgccaatttgacgataaagttagaaatgcacagaatgccggatttaaggctgtgatagtatatgatgatgaagacagtggtgtcctggtttcaagtaattttacagtggctgggagctcgtccgggatctacatatatgcggtattcctctctaaggcttcaggagaggttttgaagaaatattcaggtcaaagtgatgtagaggtgtggatactaccagtatatgaaaactcagcttggtctatcatggcaatttctttcacatcactgcttgctatggctgctgttctagctacttgtttctttgtgaggagacaccagataaggcgggacaggggaaggattcctgtaacccgggaatttcatggaatgagcagtcaattggttaaagcaatgccaagtcttatttttacaaaagtgcaagaagacaatagtacatcatcatcttgtgccatttgcttggaagactacagttttggagaaaagctaagagtgttgccttgtcgtcacaagttccatgcgacttgtgtggacatgtggttgacctcgtggaagacattctgccctgtgtgcaagcgagatgcaagtgctggaacctcaaaaccccctgcatcggagtccacccctttgctttcttctgttattcatctgtctgctgaatcaacagctttgtcttcttttcggtcaacggtggcagtatctccccctaggccaataagacgtcatccttcatcacagtccacatcccgcgcttactccatttccagtgccccccgcaattataaccttcaaagatattacactaactcaccttatattagtacgagtagaagcaatgtagatcttgcaaatatgtcatcacaatggtctcacactccgcaccaagcatccatgcattctctaagaagtggccatttgtctctaccgatcaacatcaggtatacaataccacatgtttctcgttctgactatggatctgccagcctgggtttatcccatgattcctgttctcaccatggatctccgagttattatcatagctctttgggccagcaacgttcttacctgatgcaccgcaccgagtcagggccaagcctgtctactatggtgctccagtcgccacaatagagtcagtagcagtacaatggcgaatcaggagaagtctatcagctgcggtttaactcgatcattacgtcaggcctatgtacagcattgtcttgattctgatggaagcttgtctgctgtgacatcggatcagtcgctaccaagatgctgattgatcttacgaagttcactgtttcatgagcatttgtgcaagcccctgctagatttgttcctgggagatgcaaataaaacagaaaaatcctatgcgacacaaaactggcaggttcatgcaaagttcattcatggaactatttcgtgccagccaccattgtgattcaacaaggttacttacattgtctgtacggaggggaaattggtgatcttaaatcgaagaaagacttgctgagttttgctgaagaagcaaatatccatgagtctacaaggaatagtttgactttgcgtattgtttgaggcttgtattataggtgatgactttagagttggtgtaatggtgtgtttcttttacattagttattttgtcatgcgtataaatgttacagcttagcaataatctgttagtcggtgaatgttttgtagctctctaatatttattcttttttgcgaaactttctaatacttattctgatcttggatatttgtgcaagtgtgtggggggggccccgttcttcctttcaagatcaactgtacctgaaaattctagagcatgtttacgctatgttaaaaaaaaaaaaaaaaa

SEQ ID NO: 22690 - DNA, 391 bp, Oryza sativa
  Clone ID: TF_OsC273200_1
gctgcgcggtgtgcctcaccgagttccgcgacggcgagacgctgcgcctgctgccgcggtgccgccacgcgttccaccgcggctgcatcgacacctggctccgcgcccacgtcaactgcccgctctgccgcgcgcccgtccagatcagcgacaagtccgccgccgccgccgcggcggcggcggccaacgccgcgccgggcgccgccgcggccgttcccggcggcgcgcccgcgccgaacccgcgcaacgcagctgccgccgaagccgacagaggagagctccagggctcgccggagcgcggcgtcaggcgagccgcgtcgatggtgacgctgccgaggcggccatggccggaggtctcgctccggtcgccggcgtcgaacagtgggcgcat

SEQ ID NO: 22691 - DNA, 472 bp, Oryza sativa
  unsure (1)..(472): unsure at all n locations
  Clone ID: TF_OsC359_5960
cggcggggaggagacggcggagacccacgtgtgcgccatctgcctcggcgagttcgcggacggcgagaaggtgcgcgtgctgccncggtgccggcacgggttccacgtccggtgcgtcgacgcctggctggtctcgcacggctcctgcccgacgtgccgccgccaggtgatcggcggcggcgggagcacgccgccgccggacagcgacaccatcgccgtggtcgtagcatgatgtgagagacaaaagatatactactccagtagtcttcgtagctagctgggctcctgcctggcctctttggcgccaatcccttctaaaaaatatctcgctgatcgatctgatctctccggatattttccggcgaacggctagtgactagtgactcatcagcttgttgtggcgaatgtattgacgggtgcccaattggcccaaattggtcactgtatatacacgttcaacatcgccgtcccg

SEQ ID NO: 22692 - DNA, 508 bp, Oryza sativa
  Clone ID: TF_uC-osflcyp009g02b1
gcttttcgcgcgcggcggcgaaggccgtcgtggagagcctcccgaccgtggtcgtcgacgcggcccgcggcgacacgcagtgcgcggtgttgcaggacggcatggaggccggcgagcgggccaggaggctgccctgcgcgcacctgtaccacgacggctgcatcctgccgtggctcgccatccgcaacacgtgcccgctgtgccgccatgagctgcccaccgatgaccccgagtacgagaactggaaggcgaggcgagcagccgccggcggcaatggcgatggcgacaggtacggcatcattaggcaactttcaatgattgattgaatattaataattaaaagaggaagagagattaatttgatattcaggagttaggcggcccaaaaaaggatctttttgatcgagaggggaagggaggggatcgaatcaatgtgaaattgtggcattttttttttggtacagagtgatgataatacagtgcattttcaagtcgattatggtagagt

SEQ ID NO: 22693 - DNA, 546 bp, Oryza sativa
  Clone ID: TF_OsC270054_1
gcacgaggccgtgaatcaccacaccgaacaccgccgccgccgcccatgtcgtcccacgaccccagcagcgccaccgcggcggacgccgtcgccggcgggagctaccgcgtgtgcgacacggtggtgctcgtctgcctcgccttcgcctcctccatcatcgtcttcaccgtggccgtctgcttccgccgcgccgtcaccctgcagggctacgcggcctcggcgtcggcgtcgccgtccggccgtggcggcggcgccgccgccgcacccgccgctgtcggcggcctgcgcgggctggcgccgtccgcgctcgccgcgatccccaagttcgcgtaccggaggggcgccgcgggcggcggcggcgggtgggcgcagtgcgcgatctgcctcggcgtggtgcgcgacggcgaggccgtgcggcggctgccggagtgcaagcacctgttccacgtggagtgcgtcgacatgtggctgtactcgcacgccacgtgcccgctctgccggcgagacgtcggcgccgccgccgccgcggccggcgacaaagtctag

SEQ ID NO: 22694 - DNA, 1114 bp, Oryza sativa
  Clone ID: TF_OsC52635_1
cgtgattgttagatttaggtctcccccatatccccattcccatctctctctctcgagtctcgacggcggctgctgctgcggcgtcgcctgcggtgcgatgtcgtcgtctccggcgcatgctcagcgcttctactgccaccagtgcgaccgcaccgtccccatcccgccgcccacctcccccgacgccgacgtcctctgcccgttctgcggtggaggcttcgtcgaggagcttggggaggacatcaaccccaaccccaaccccaaccctagccccttcctgccacaccaccccttcttccccttcgcctccccatccttcgacctccgcaaccctagcgacctcgcggccttcttcgggcccccctccccctccccctccccctccccagccgccaggcacttcgacccctccaacttcctccatgatcacttcaccggcctcctctctggcggcgccaccatccagatcgtcctcgagggctcctccgcctccctccccctcgggggcgccgccgccgggcccggggggatcagcctcggcgactacttcgtcggctctggcctcgagcagctcatccagcagctcgccgagaacgaccccaaccgctacggcacccctcctgccgccaagtccgccgtcgccgcgctccctgacgtcgccgtctccgccgacatgatggccgccgatggaggggcccagtgcgccgtctgcatggacgacttccacctcggagctgccgccaagcagctcccctgcaaacacgtcttccacaaggattgcatcctcccctggctcgaccttcacagctcctgccccgtttgccgcttcgagcttcccaccgatgaccctcaccacgcccacccaacccttggatctcaccgccccgccgcacccgcctctgcctctgcctctccctctccagctccaccacctaggctggctgagagaaggttcaggatatcgctgccatggcctctccgtgctgcgtttggcggccaggcggagagcagcaatcctaccaatcaggatcctgttggtggttctactgatgcttccggttctggcaacaacaatgcaactggaggtcatcgtggctacgatgatcttgactga

SEQ ID NO: 22695 - DNA, 702 bp, Oryza sativa; identical to SEQ ID NO: 13608
  Clone ID: TF_OsC359_6976

SEQ ID NO: 22696 - DNA, 2656 bp, Oryza sativa
  Clone ID: TF_OsC15014_1
cttcgaggaggaagcaacagcgtcgctccacgaaaccatcgctgcggttgcgtgctcgcgcgaagaagaggagagagaggaccaaaccctcgtctcctcctcctccggtggtggggggagaggaggcggcggcggagaggacgagccgtctactggatcggccgcccacgaggagattaagccaagtttgatcagattgttcacgtgttatggctggacatcagtataataattcccagatgtcccggatggatcatatggacaggctaaaccatgagtccgcaccttttggccaaaagttatttatgcatcctaggagtgatccagctaacggagctggatcgtctggctatgtgggtaacacaatgagatcgaatgatcttccgtcttcaagttatgctggccaagcttatggtcagcagaatagagcccccatccatgcttcatattctggtcatgcacctgctggaagctctagtggtagctatgcaccatacaatactcaacatatgcctgcttcaagctatccacacggatctgaggataatttcattccaagttcccatgtggatggcagaagggttgcattgaagagaagaaatcccatcattcatcctacagatggattcggtgttggaaattattatgctgggagttcttccaatactcagttctctcggcccatgcctccaaatcctattccacctcctgaatcctgtgttcgaatgccctcacacttgggttcgaaccactggaatgatcaccgctatgttaatcatgaaggatctcaacgggggtaccggaacccttgaagcagcagttcagaactgactacactgagtattttccctgaagatatctacttgatcgaggtcgaaggaaagagaggctagtcaatagccaaaactcatctctgcctcctccggcggagggggctaacggagcggagtcggcgggttctgtgggtataccaatttgatcgaataagaggcgatcaaccagtaattcatgagaaggttaacgtctggtgaatggaacccgattcaataattcataatctgctcatacacctcctataatctcttgaaggaatgatgcgccatacattaccaaacagatatctttttaaagccggggctagggatctcaggatatttctatgcccagttccgccgtgaatgttataagcttggcttttcataaagctattagtttagcttgtcacatttatggaagttttattcgaccttattgttgtgcttgtttttctcttatttaatcttctggtatctctcctacaagtcatagcccaatatgtcaaaggtctttacccttttccacgtaaatatttgagatccagtcgaatgattatccctgttaccatctggaaggcggatggaggaatgtgaggggaagacatgatcatagtactatccatttggaacaaagtccagctgcagcttgcccgtcaagcagcatcaatgtgccaccataccatccaaatgcaaatggtccttttggaagtgcaccagtacaacgtgacagagctcctttatctgtgcatccaagaattcttcctccagggcctgatggtagtagcatagcattcagagagaggccatactatcctgctccacagagcaccaacataagtgcacctgtgccaacgcttcctatttcttgtgacagtgcaccatttgctcatggtgggtacgcccctagatcagctcatcgtaacaacttacgcacttatcctcctccagcttttgcatcttcttccaaccctggagcagtctcccatgagccagctattcctagctatccacctgctgcccctagctatccacctgcaacctctgcagcatcatcaagtgtccagccatttcatgctgaagctgctgcacatttgaggcatccaaggcatgtatctgtagggggcagtggtagtgcaaggagtagaaggatgagggattcctatcatggttttcatcatttgatgattgaagacaataacttgggaagatcagcagctgagcggtttatgatgctggatcagttagttatccatgaatcaagagaagcattcgatcctcactgggacatgagactggacattgatgacatgagctatgaggagctgctggctttggaagaacgcataggccatgtgaacactggcctcgctgatgagaaaatttctggctgtgtgatggaggtagcctgctgcagcagtagtcatttgcaggatgatcaggacaatgaaagatgtgtaatctgcctggaggaatacaagcatgaggacacacttgggaggctgaaatgcggccacgggtttcactgcaattgcatcaagaagtggctgcaggtgaagaacacctgcccagtttgcaaagctgctgccgcagatgaaggcagctgatgaggggaccaattgatcttcccctccatttatataatgatgcagttcaaggtcaggccaaattatgcctgtctccattgctccgcaatctgtgggctcttgtgaataagttatctcggtcgatatggaattattttgtgagctattagactattataaactcaagcaaaacctatgtgcaatgtaaatctcccaagttagttaatttcgctcaaagcatccaaaaaaaaaaaaaaa

SEQ ID NO: 22697 - DNA, 851 bp, Oryza sativa
  Clone ID: TF_OsC72920_1
atggaggtcgcggccgcggaggacgcgctggaggagagcggcgtggcggtgtacctccccaggcttctcgccggcgtcatctccggcgctctcaccggcctcttcgctctcgctggggccttgaccggagcggtgaccggcgcgctggccggaagggcttcagacagcggcgtgctccggggagctggattgggggcgttcgccggagctgtgctctccattgaggtcctcgaggcttctcgtgcttattggtgctcggaccggctgggctctcatggcacatcctccatggtcagcatttcagattttggtcatgatgatctgtatgatatttttggagattgttcatccaaagggctttcacgggagtcactgaataaattaccacactatgtggtcactgaccaaacacggaactcgtttggtgaagacctctcttgcactatctgcctgcaggatattgtaaccggtgaaacggcgaggagattgccgaattgctcccacactttccaccagccttgcgtggacaaatggctcgttggccatgggtcttgccctgtatgtaggcaatgtgtgtaacaacaggagggtaaaaaaagcccggcattctgcaggctctccaacttataagagaagactagttgtgcaaatgtttgctcttttgatcgcccaccacagagtgatttatacacagtagctctgtaatatactctactcttatataggcgtatcttttacccgcgcgaaaacaggcggtaaatcagaggagttgacactgttttttacgctcagtgtcactgtaaaatggaataaaggtttctctgtaaaaaaaaaaaaaaaaaaaaaaaaaa

SEQ ID NO: 22698 - DNA, 1756 bp, Oryza sativa
  unsure (1)..(1756): unsure at all n locations
  Clone ID: TF_OsC56795_1
ggggcgccgtgcagtgcaggaagcggtggagcaacctcgccggggactacaagaagatccaggagtgggagcgcgcggcggcggcggcggcgccgccgcgggagccgtcgttctgggccatgcggaacgacgcgcggcgggagcgccggctcccggggttcttcgaccgggaggtgtacgacatactcggtgactgctagaaagaatcagtctgtaaatgccaattatctgctgaatttccactatgatccaatttctcggccacagcctagaggccccagaacatatcctacaagaagacagaggaagatcagaccatacaacaaagatttgttcctacaagcaaattttaagtttgttgtgttggatactggaagctatgaaatagaattaatggatccagataagatgctccagtgggaagatattgtatgtgtaagatattatagcccttgtgaggtgcaatgccctatttgcttggagagcccattgtgcccacagattacatcatgtggtcatatatattgctttccatgcattttacgttatttacttatgggaaaagaagattacaaaggtgaaagctggaagaagtgcccactgtgtttcatgatgatctcaacaaaggagttgtatacaatctatattactcaagtccagcattttcatgttggtgacaatgtgacatttacacttttgagccgctcaaaaaattcactcactccttctattaagaacctcactgatgaatctactatagacgaagatccttgcagtgcattctccaagttcattttgacgtctgatgtggaactttctgttagagaggcaaaaacagatcttgttaattggttgcatatggcagatttaggccttgtggatgacttggagaaacttccatacgtttctaccgctttggagcagctagaagaacggatgaaatattggagtgagtataaacttttggaatatataaagattgatcaatccactacaaattctagtgggaatggtactcaggtgactgctagaaagaatcagtctgtaaatgccaattatctgctgaatttccactatgatccaatttctcggccacagcctagaggccccagaacatatcctacaagaagacagaggaagatcagaccatacaacaaagatttgttcctacaagcaaattttaagtttgttgtgttggatactggaagctatgaaataggcgtccgggatccagataagatgctccagtgggaagatattgtatgtgtaagatattatagcccttgtgaggtgcaatgccctatttgcttggagagcccattgtgcccacagattacatcatgtggtcatatatattgctttccatgcattttacgttatttacttatgggaaaagaagattacaaaggtgaaagctggaagaagtgcccactgtgtttcatgatgatctcaacaaaggagttgtatacaatctatattactcaagtccagcattttcatgttggtgacaatgtgacatttacacttttgagccgctcaaaaaattcactcactccttctattaagaacctcactgatgaatctactatagacgaagatccttgcagtgcattctccaagttcattttgacgtctgatgtggaactttctgttagagaggcaaaaacagatcttgttaattggttgcatatggcagatntaggccttgtggatgacttggagaaacttccatacgtntctaccgctttggagcagc

SEQ ID NO: 22699 - DNA, 1688 bp, Oryza sativa
  Clone ID: TF_OsC24423_1
ctcgaggaagcaacgcctcccttgggaaaggaagagagagattttctcttcctctcgccgccgccgccgccgccgccgcggcgccggccatggcgacctccggcggcgaggacccatccggctctgcctcgtcgtccgccagcgcgctcgactccctgcccttctcctccgggaacccacgcatcgaggagacccgcggcgtcgtcctcctccaccccgaaccacccgccgcctcgtcctcgtcccttctcccggtggggaggaagccgcgggtgtgcgtgcctggcgtgcccaaccacctgacctacgccgacttcggccgcttctgcgcatcctgggcctcccacatcctcgagacgcgcatcatcaggattgatggggtggaggatcagtacggcgttcttataaaattcgacactcagagcttcacggatagcttctacatgagctttaacgggaatcggttctcatcactggagggtaatgtttgccgtgttcgttttgtggaagacgttcactacactcaattgattgagcacgcacatagctcagttacaagctcagctgaacaacctacatgcccagtatgtcttgaacgacttgaccaagatcctggaggcattcttacaacaatatgcaaccattctttccactattcgtgcatgtcaaagtgggcagactcttcgtgcccagtttgcaggtattgtcaacaagaaccagagaaatccagctgtttcagtttgtggaacatcagaaaatctttggatttgtgtaatctgtggccatgttggatgtggaaggtacaaaggtggtcatgctattgaacactggaaagaaacgcaacattgttattcacttggtccctcgtgctgcggccaactatgtgcatcgtttgattcaattagaaacagatgggaatctggttgagtacaatttctatggtgatcattcagttgatggtatgtgttcaacatgcaatggtgatgcggggatcagtgaagctctgctcgacagtaaaatggaagctattgttgaggagtacaatgatctcgtcacgtctcagcttgaaaaacaaagaaattattacgaatcactcctgctagaagtcaaagaggataatgagaaagaaattgctgctgctaccgagaaagcagtgggcataaaagtacaaaagttacaagcaaagcttgataagtgcatggaagagaccgggtttcttaatgatattcatgaaaatcttgtaaaaaacatggagatgtggagggagagaattcaaaaagtaaaagaaagggaacaagctgccattagattgaaagatgaaaaaattgagaagctggaggaggagctaagggatttgatagcccattttgagcgccaaaataccgtggcagaagcttcagagtcaatgtcaagcgatataaacggtagcacaattctctcggtaccatctgaatcatctgcaagcagcaacagcagcatcagaaattaggattgagatttgttaccgtaagctgtatttcagcatcagaaattagtctgttactggccttaccgtacattctttgctcccttattatctaataatgacagttatgtgttaccatggttatatacttgttggcttctcaaatgcatagtacaaatcaagcctttgtacagtgtgtttttctggacaaaaaaaaaaaaaa

SEQ ID NO: 22700 - DNA, 1453 bp, Oryza sativa
  Clone ID: TF_OsC158099_1
ggggtactcacaccgatgcgcgccgccgtcgccgccgccgagctgccaccgccggatcgtcgctaggtgttccgcgccgcgccgcgccgccatgttgtacccggagcggccgagccgcgtcaacgggacggccaccgtcgactgctcggcctacccgctcgactgccacccggtctgcccaggcggcagctgctacgagatcgccgagcccccgccgccgtcgccggtggtcccgcgcgtcgacgtggccgtcgacgaccaccacctccccgtacgcctcctcctcaccgtctcactcctctccgccttcctgttcatctcgctctctgtctccacgatcctgctctaccgccgccgcgtcgtcctgcgccgccggcgccgggccgcgaccgcgccgctccccggcgacgacgggttcggcgacggggatgaggaggcggggggcggcggcggggatgtgcaccacgtgtggtacatccgcacggtggggctggacgaggccaccatcacgtccatagccaccgcggagtaccgcgccggagttgggtggggaggggactgcgcggtgtgcctcggcgagttccgcgacggggagttggtccgcctcctcccgcgctgctcgcatccgttccatgcgccttgcatcgacacctggctccgcgcacacgtcaactgcccgctctgcagatccccagtcgtcgttccctccgatctccccgccacggctaccgaaggtgaggcggagggtggtgggcaagcggaagagcaccaggtgtttgatgaaatctcgctatcggaatcacgtgccgatgtctccgaggattctgacacctcttcggacactcaaagtgaggacacagcagcttcaccagaggatggtgggagggtgatgcccaagccaatacggcgctcggcgtccatggactcaccgttattcctggtggttgtgcctgaagcgcaggacgatgccatgcggggtgatcgaaaatttccgaatggtcaagagatgaagttattcagcgtgaaagagaaggatgcaacagggacgtcttcttcctcttgtcaggcagggcggtttgggattggcagatcgatgtcgagcagtgggcaggggttcttcttctcacggaatgggcgctccagtagtgctgtgttaccactatttaggaaggattcaccagatcaaggtacctcatatcagctcttccactttcctcgcttctttataagtatcagttttggagcccaaagcaagatatgggatcactatatcaacattctgatgtgtcttctcttaaagctctattccaccttccaaattctgttgtccactgactactttggttgattgagttgatgagctcgtgtaaatttgtacctcccaggttgcctgtatcatagttttgagcttgggatctagtgaatttgaaggaacaaaaaaaaaaaaaaaaaa

SEQ ID NO: 22701 - DNA, 1595 bp, Oryza sativa
  Clone ID: TF_OsC359_8020
gcgcggatggcgtcttctccggtgtcgtactggtgctaccactgcagccgcttcgtgagggtgtcgccgtccacggtcgtctgcccggagtgcgacggcggcttcctggagcagttcccgcagccgccgccgcgcggcggcggcgggagcggccggcgcggggcgatgaacccggtgatcgtgctccggggagggtccctgtccgggttcgagctctactacgacgacggctccggcgacgggctgcggccgctgcccggcgacgtgtcgcacctcctcatggggtcgggcttccaccgcctgctcgaccagttctcccggctcgaggcggcggcgccgcggccgccggcgtcgaaggcggcggtggagtcgatgccgtcggtgacggttgccgggagcggggcgcactgcgcggtgtgccaggaggcgttcgagccgggcgcctccgcgcgggagatgccgtgcaagcacgtctaccaccaggactgcatcctgccctggctctccctccgcaactcatgccccgtctgccgccgcgagctaccggcggccgcggcccccgagtcggaggcagatgcgggactaaccatctggcgactcccacgcggtggattcgccgtcgggaggttcgccggtgggccaagggagcagcttccggttgtctacactgaactggatgggggcttcagtaacggcgtcgggccgaggcgggtaacgtggccggagggcgacggccatgtcgatggcggcgaagtcgacaacagggtagttttcctcctcgagttcgtgcccgatgagatcaaagatagcgctttcgtctctcctgacagtatccggagacaccgcaggggactagccgtgcctatctccgaagtcgatatccggcgtcttgtcttgacgtatgttgtggcttctgttgttccctgtatgttgactgtggtgggatccgacaaggccttatcggctctgggcatccccagccgaagtttccttaggttcctcggagtcctgatatcaacttgttgaggtagaggtagtgggagaatcgctgcaccgctggtcgaggaccaagtagtagtcgtaactcgaccactagaagtggaaatagtgggagaatcgctgcaccgctggtcgaggaccaggtagtagtcgtaactcgaccacttttcttgagtagtccagccatggccggtgctatgagataggtcgccggtcttcgttggtaggttgggcgcgacgactctgcatttgtcgaggtcgttctcgataatgcggtgtacttgaccacaacctactcgagtgctcaattgttcctttgtagatacatgccggatgtatctctgatgatgtagatggataatctgattagatttttggcggcgacgtggtttcaaagtaatcaatcgggccaaggcctcacgatcgacaacattgaactgttgttctccgcggcggtgacgtcttgaagcttgatcgatctcgtcggatcgaatagttgatgacgatggttccgatctcgtcggaaggcaaactccggtcgggttagacctccccacagccgaagtcgtcgagtagcttgttgtcggagaatccat

SEQ ID NO: 22702 - DNA, 1378 bp, Oryza sativa
  Clone ID: TF_OsC299188_1
atggattgaacatatacacggccgtcacacatctgtctccttccctcgtctcctcagcaatgattcggtccagaaacttgcagagatcctctgctagtacttgcacagagcctcagaccgagcactgaggaagcttaacatctgcctatcttctttctagttcttcccttctttctctctgttgttgcagtcttgcagctgcgccgatttcgtgttctacgaggcaatggcatcctctgctcctgcttgggtcccctacgagccaacgagagattgctctcaagggctgtgcagcatgtactgcccccagtggtgctacttcatcttccctccgccgccgcccttcgacgtcgccggcaccagcgccgacgactcctccggccctgtcttctcccctctcgtcattgcaatcatcggcgttctggccagcgccttcctcctcgtcagctattacaccttcatctccaagtactgtggcaccgttagctccctcagggggagggtcttcggctcgagctccggtggcgctgcttatggcggcggtgccggtagcggcggccgccacggccacgggcagtcgaggagccacgagtcatggaacgtctcgccgccgagcgggctggacgagaccctgatcaacaagatcacggtgtgcaagtaccggcgcggtgatgggttcgtccacaccaccgactgctcggtctgcctcggcgagttcagtgacggggagagcctccggctgctacccaggtgcagccatgccttccaccagcaatgcatcgacacttggctcaagtcacactccaattgccccctctgccgcgccaacatcaccttcgtcaccgtcgggttggcgtcgccggagccggagggctgtgctccaggcgagactggaggtgacaatacacacgaggtggttgtggtgatggatggcttggaaaatctttgtgaagagcagcaggaggcagtgagcagggccagcactgccgatgatgatcacgatgcgaaggacgtcgcagaggggatggaggaggccaatggcgcagccgagatcagagaagaaggctcgccgccaaagaggggcgcgtcgtcgtttgatcttcaccgtgacaaccgcatgtgcatcgccgacgttctgcaggaatccatggaagacgagctgacggcagccagggagagtggcctcctcgcaggcggcgctggcacgtcaagacggtgccatggcgagaacagcaagggaaggggaggccgcagccgacgtgcattgcagctgcaggacgccatggaggctctgccggggaagagattgccctccggtgggagatcctgcttcagcagcaagagcggcaggggaaaagattcagatcatccaatgtga

SEQ ID NO: 22703 - DNA, 2628 bp, Oryza sativa
  Clone ID: TF_OsC84313_1
ccgcgtcgttttcccccgtttctctcgcattttttccccgtctggggcccgcccatcgatcccctgaccccggctcgctccgcgccttttcctcgttctggcctccccaacctttcccaacgaacccgctcgagcgcgagccttctgcttcccccagatccgaaacctcgaccgacctcgggacacaagaagagagcaccttcgctcagtcgttgcttagtgcgccatctctctgtcgcgggaacggcagggggctagtaatgccacaatccttttctctatcagcaatggggaggaggacatggcagtggcacgccattgcggcgctcggcgtcgcgtgcgcggccgccgccgccgtggccgccgataggagagccttctcggtgacctcggccgccggcggcggcgccgcggcggcggcggcggtggtggcggcgacgccggaggaagtgggcatccttcggaaggtggccaatttcttgtggcagactgatggcaactcgtaccaccacgtttggccggaaatggaattaggatggcaaatagtgctgggatcactgatcggattcttcggcgcggcattcgggagtgtgggcggcgttggaggtggtgggatctttgtgccaatgctgactttgatcattgggtttgatccaaagtcatctactgcaatatcaaaatgtatgatcatgggtgcagctgtctcaactgtctactacaatctcaagcttaaacatcctacgttggacatgccagtgattgactatgacctagccctgctgatccagcctatgctaatgcttgggatcagcattggtgttattttcaatgttttattccctgactggctggtcacagttctccttattatccttttcctaggcacatcaactaaagcttttctgaagggtgttgagacatggaagaaagagacaataatcaaaagggaggctgcaaaacgattggagcaaaccagtgaagaaccagaatatgcaccacttcctactggaccaggcgctgtagctgatgcaaaaaggccatcagatgaagcggcatcacttatgaagaacatttactggaaggagtttggccttcttgcatttgtgtggatggcattccttgttcttcaggtcacaaagaactacacagctacttgctccagttggtactggatcttaaaccttctccagctcatgttcttattcatccctaaaaaatggaaaccactcaaaattacatattcaaaatctttcacattgtatggtattaagatcccagtatcagttggagtgactatgtatgaagcgctgggcctgatgagcgggaagagagttctatcgtcaaagggaaatgaacagactacactgaaatttcaccagctctgcatatactgcttcttcggtatcactgcgggggtcgttggtggtctgctaggtctcggaggtggctttatcatgggtccactgttcttggaacttggcatcccaccccaggtttcaagtgcaacagccacctttgcaatgatgttctcatcttcaatgtctgttgttgagtactacctgttgaaccggttcccagtgccctatgctttgtactttgtcattgtggcattcatcgctgccattattggccagcatgtggtcaggaggttgatcaattggttaggacgggcatcgctcatcatcttcattttggctttcatgatctttgtcagcgcaatttctctaggattatccttggagatcactggagcaaagggtgagaagagaaccttttgtgttttcctccagggagccatggaaccatcatctctgtcacttcggctcaaagcagccatatatgatctgttcaacagtaactcattgcaaacatatgtgccattcagaatccgccatatcaacggtggcggtaacccgaggccgagacaagaggaccccggactcaccgatgccgagttcaagaaggcgatggagcagctcaacaagcaggcatataggtccttagaccctcataagatggttgaatcaaacagaggaggcagaaaccatgcaaagagtgcaagatccaagccagctccaaacaacacggaagaggagaaagcatgtaccatatgtttggagacattcctggctggggagcaggtggtggccacaccctgcaaccacatatttcaccaagagtgtatcaccccctgggtgaaggggcatggcaactgcccggtgtgccggttcgcgctatgcgagaggaacaccgtctccgacaacagccagagtggcgttggagaggttgaggtagatctggacctgctggagatgatgagggccatggaggagatcttcagccgggtcacattctcaaacttcatgccatacaactagatgaatcagcatcaggtcatgaagacatgaactgatgaacaaatggtattccagtcttaatatcatggtgtgctactcacttgcatgatattccactacgaatttcatcaagattttctacctggcaatcttgtccaactgctttgtgaaaccaggtaatgcattgcaacagtacaaacaacaggatggatgaacaactgcatatgcattagaggtcaggcagcaaaactaattgtgcgagatgtgccat

SEQ ID NO: 22704 - DNA, 1486 bp, Oryza sativa
  unsure (1)..(1486): unsure at all n locations
  Clone ID: TF_OsC170841_1
atggccggcgaccgccgcggcggcggcggcgtcgtctcggccgacggggagcgacggcgggggatccggcgcctgctgctgccccgcggcgaggggtcgtcgtcgtcctcgccgccgcagccgccgccgctgcaggcggaggaggggaggcggaaggggttcgcgtcggcggcgctgcgcgggctgggttgcacgtcggccgcggcctcgcaggcgtacgcgcccggggccggggcggccgcggcggcggccgtgcggtcgtcggcggactggcacgggcggaggcggaggagggggaaggagaagaggaaggagaggggaggaggaggagggggcggtggaggcggccacctcgtgggtggagggatcggcgccgacgtgtggtgcgcgcctgggataccgttcgccgcggaggcgtcgtccgtggactgcgtggtggcgcggcaccagatggtggggagaggccgtggcggcgacgcggagaggccgcacagagagagaccgtgcctgtccaggagggtgaccgtgcaggagcagatatcgtcgtcgttcatggactcgccgccgccgccgcacctcgacgctcgtcgcgccctacgggcgccgacctcctcccatccggccgcctccgccggatgcgcgggtaccgccactcccccgtcggcctcgaggaagagatcatgatgtttcagacaagagttctgttgggaggaatgagcatgtatgatcggtaccaggattggcgccttgatgttgataacatgacatacgaggagttgcttgagcttggagataaaataggttatgtcaacactggattgcgtgaggatgagatagttcgcaaccttaggaaggtcaaacacccagcctttgactcctcgttccggtattcaacagaaatggaaaagaaatgcagtatttgtcaagaagagtttgaagccaatgaagagatggggaggctggattgcggtcacagctaccatgtttactgcattaagcaatggctttctcagaagaacgtttgcccagtttgcaagactgccgttaccaagacttgaagtccggactccgggcaacgacgattgtatacctgggtcaaactttcaaaacatgtttgtttgtgctctgtacagtcaattacatatgttattgtataaacacatcatccattcttttgcatttgcagatagaaatgccatattgaggcatcctttatcaaatatatgttactcttaaaaaaaaaaaaaaaagcggcgccgtccgcgtcggcggctagtgtctcgggctgcctcagtcgatccttctcgggtttgttgcttgntttttanannttantannnggatgtntannnttntctttnanggtnnnnaagnantaattnatannnagnaatttantgtttnatnntntnttgtnntatattgntnttnngnnngantanttatntttttnannnttnnatntttttttttnattnntntgttg

SEQ ID NO: 22705 - DNA, 1406 bp, Oryza sativa
  Clone ID: TF_OsC16293_1
acgccgccaccgccacgggggttgggagtttctttcccctcctccaagccaagccggacgcggacgccaccgccctcgccttcacctccatttatacctccggcgagcgccgcggcggcggcgacgcacgcatccttccttcctcctcccgcaccaccggcgaccggtaaaacggagagacccgtgggcgagcttgttcgaggcggggcaccaccaccatgtcggcccccgcggcggtggagcagcggctgcaggcgctgcggcagaagctggggaggaagcagcacttcgaggaggccgtcgccgacctcgccgccgcggtccgggaccaccacgccgccgcctcccccgccctccgcgatctgatgtattctacagtttgccgtgtggcaactgtccttcagactagatatacagcacctggattctggcgtgctggtctgaacctcttcttaggtacagagaagctggtaactaatccttcagaaaaggagcaactgaagactttcattctgagggcccgggagcatcttgatgagaaagagaacgaggaatccatgccaaacaacagggaaacagatacaagatttctttttgaagggcatcttacagtgggacctgaacctccacctcctgcctggcttgttgcccagaatttagcacgagaacttagcattttagctgaaccttctggagatcaaggtgcgaacaacaacggagagtccagggctgaggagatggcacctgctgctgctataatgaatttcttaaacaccatgacagtggatggagacctagaagccgctttggaagaatctctgcagaatgtgatggcgaatcctaaggtgcctccagcttcaaaggaagtcgttgcgaatctaccagttgtaaccgtgacagaagaaatcatagctagattgggcaaagagactcagtgtgctgtttgccgggagagcttgctggtggacgacaagatgcaggagctaccgtgcaagcatcttttccaccctccatgcctcaagccatggctggacgagaacaactcctgcccgatctgccggcacgagctgaggacggacgaccatgtgtacgagagccggaaggagcgggagcgagaagaggaggaagacaggaagggcgccgcgaatgctgtcaggggtggggagttcatgtatgtctgaacatctgaatttcaaccgaacgtgattatctctctgtaacgatttcctgaaattcagagtgcactggagttgaaaattcatgtacaaacaacgtttgcttcggttcaccaccgtatcttcgttgaatgatactaccactatacagccagcttattacagcatcattgttcgttgatgtgcatgtgatgaagtacttgagttgagacatcgctaaaaaaaaaaaaa

SEQ ID NO: 22706 - DNA, 504 bp, Oryza sativa; identical to SEQ ID NO: 13621
  Clone ID: TF_OsC32442_2

SEQ ID NO: 22707 - DNA, 1460 bp, Oryza sativa
  unsure (1)..(1460): unsure at all n locations
  Clone ID: TF_OsC87299_1
ntgcccccgctccccacctcgacccgctccacctagggtttcagcccacgcgtccgtgcccgcgtccgcccacgcgtccgcccgccgcgagcccgttctcggcagcggcttcccgttgcgcgcgcgtcccatcctcgccggcgcttaggcggcatcccgactcgcccccttgaaggaggagcccttagaacttgggcacctcgatggccgacggcggcggcggcggggaggccgggtccggtggctcggcgccggtctgcagcttcgtgaggaagccgccgaagaacatccggaagcgcccgaccgcgcccgcgggctccgacgacgacgacgaagacgggtccggcgccatcgccgccgcgcgcgccaagaaggcgccgtcgtccaccagcaagctcttcttctcctccgcggacggctcgtcggagccccgccggttccagtacgagtcgtcgcggacgatccaggcctccaccgacagccgcgccaccgccacgctcgagacggagacggagttcgaccgcgacgcgcgcgccatccgcgagcggcagctcaagcaggccgaggagtccctgaagaagaacccctccgctcctgcctccagctccggctctggctccggggaggtgtacaaggggatccacggctacacggattacaaggccgggttccgccgggagcacacggtgtcgtcggagaaggccggcgggtcgcacgggccgctccgcgcgtcggcgcacatccggctctccgctcggttcgactaccagccggacatttgcaaggactacaaggagacagggtactgtggctatggcgattcctgcaagttcatgcatgacagaggggactacaagtctggatggcagatagagaaggagtgggaggaggcggagaaggcccgcaagcgccgcatcgctatgggtggggatggtagtgattacgaagcaggggaggaggatgacgatgatgatgaagaagcgttgccctttgcctgctacatttgcagggagccttttgttgatccagtggtcacgaaatgcaagcactatttctgcgagcactgtgcattaaagcatcactcgaagaataagaagtgctttgtctgcaacaaaccaacactcggcatcttcaacgcggcacaggagatccgcaagaagatggcacaagacaagaagcaatagtgcccactgacagttgaagaatgtgacttgtacgttagagagttgaagaatctaaatgatgtggaattttagatgacaaagaaaactaccaattagttttgcattctgtttatgtaacaatatctgctagcctactctcacttgctcggttcagctcagccttttgtatggcaaatgtattgcttctgtgaggatgtgaattgtgcagagcccaaatagatgaggcaaacataaaaggttcttgatttccttatcaaaaaaaaaaaaaaaaaaaaa

SEQ ID NO: 22708 - DNA, 1454 bp, Oryza sativa
  Clone ID: TF_OsC45498_1
gcgagaggaaacgacgatatataattaagttgatggaatcaatcaaaattaaaggatgcgggtagtagtgaccagtgacagttagcagcggcgaactggcgatccgtttaataagctgtctagttgggattaggaagtcaaaggaacatgtgactgacatatagatcccatcgttcacgggtccacatccgccgccgcccttctttcctcgtgttctcctccctctgcggcgccgccgttgttgccgttgtctgctcgccgccgtctcgccgcggccctcccgcctgccctttgttatgccgcctggcggcgacgacggcggcttccctccggctccccggcttctggtcccccccctcctccgcccctctcatcagtaaccgcgtcaggagaaagtttacgttggaggatccgcttccgtctagctagttgtagttgttgctggccgccggcgccggtgaggtgaggtagacggcggcgcgacagacggggcagcgggaggcggtctggacccatggcacggcgcagccccagtggaagcggtgcgtgcaggggaggtgcgccaccgcctccccggcacgcagctcctctagacacaccgcgcactcctcctcctcctccggcgtcggcctccgccccaacctcctgaaccacatccgccgccgcccttctttcctcgtgtacacctcccactgcggcgccgccgtagttgccgttgactgctcgccgccgtcactgctcgttcctgccacctgcgctttgttatgcctcttgacgacgacgacggcggattccctctggctccgcagcttctggtccagcctctccttcgcctcccgcacgttgctgtccagcgtccaccacccgggctgctgctcctcgcacgcgctcctctgctgctgcaacataattgctattccaaggagggcgattgcaaattcaatatctgatcgacgattgtcaggcacaatgacggccgccgcgtcccgcacggcgcctccccgccgccctgccggagacgtcgccgccgcgcgcactccactccgggaagcatcccggccatcagtaccatctaccgagcgatcaacctctaaccttatctacgtatgcgagcgatcacagcagaagcaacaacacaccatctgcctgactgcctctctcaatcgcttttgatcctccattatgtgtttgtgtgctgtttctatcaacagagctttcctccaatgcatttcatgttcatggcgaacaagacagggaccagccactttggagcatcctggttgtggctgccattctgcattatttgtggcacccacccacaccaactggctgccttgctgtattagacgacgaacaatccaattctgagttgtcgcagaaaccaggatagagggggaggaaaatcttgggttcataccacggaccgaatttaagatggagaaaggacacctcat

SEQ ID NO: 22709 - DNA, 1098 bp, Oryza sativa
  Clone ID: TF_OsC186358_1
atgagcttcgtgttccgggggagcagaggtgacatcgaggccggaggcttcccggggttcgccccggagcgccgcgccatgcggattcatgcgggtggtcggccggtgaacagcaacctggcttttcttgtcactgttcttatgttgttcatggtactgaactcacaccagatgtctccgaactttttggtttggctggttttgggtgtgttcctaatggccaccagcctaaggatgtacgccacatgccagcagctccaagcgcaggcgcaagctcacgctgcagctgccaacggcttccttggacacactgagctgcgggtgcatgtcccgccgaccatagctctcgccacacgaggccgtttgcagagccttaggctccaacttgcgctacttgaccgcgagttcgatgatttagattatgatgcccttagggccttggatgcagacaatagccctcatgctccttcgatgagtgaagaagaaataaatgctcttcctgtattcaaatacaaggttcaggcacatcagggaagtgcctctttccgaaaaagtgatggaccatctcaaccatctgtttcttctactgaatctggcaatgagaaaaagcaggatcgtttcaaggctgatgcaactgacaacaccctggaggatgagttgacatgcagtgtttgcttagaacaagtcgttgtgggtgatctattgagaagcctaccatgcctgcaccagtttcatgcaaactgcatcgatccatggttgcgccaacagggaacatgcccagtttgcaagcaccgtgtaagcgatgggtggcatggtgaagcagatgcttctaacatggttgtgatatttttggttgacctgtaccctgttcagtatgaactcacatacaatcctttttactctgtttccgtggggaaattggcgtattatgggtgtttaaggctgaagatcagtagaggatttaagatccaagagtagtggtctggtctctatttagtcttaagtaaaaatgatcttaactgttagtatatcacaagtaaaaaggagaaactgatttatgagttctaccatcattaaaaaaaaaaaaaaaaaaaaaaa

SEQ ID NO: 22710 - DNA, 1579 bp, Oryza sativa
  Clone ID: TF_OsC31425_1
cggcacgaggcctccggcccgaggattgatcagaaagagagacaagagaagagctagggtttcatctcatctccagccatggcgtccgccgcctccccgccgcgctccggcgacgcctccccgtcctcccctctcctcccttccccgacgtcccccgaccgccgcagcggcggcggcggaggcggaggacgcctgcttccggggctgcgcggcgcggcgcggttcctgggccgcacggggagccgccgcctgatgcgggagccgtcggtggcggtgcgggagacggcggcggagcacctcgaggagcgccagaccgactgggcctactccaagcccgtcgtcgtgctcgacgtgctctggaacctcgccttcgtcgccgtcgccgccgccgtcctcgccgcctcgctcccggagtccccctcggtgccgctccgcgtctggctcgccgggtacgtgctccagtgcctcttccacgtcctctgcgtcaccgtcgagtacaggcggcgccgggaggcgcgcggcggcggctttggggcggaccagggggctgcggctgatggggatttcaagctcagtattgtgaagcacctggagtccgcaaacacgatgttttctttcatatggtggatcattgggttctactggatatctgcaggtggccaagctttgtcccatgatgctcctcaactttactggctctccattgtgtttctggcatttgatgttttctttgtagtcttctgtgttgccttggcctgtgtgattggcattgctgtctgttgctgcctgccttgcattattgctatcttatatgctgtaactgatcaggaaggagcatctgaagaggacatcaacaacctgtccaaattcaaatttcggacaatgggtgatgcagacaagctggttgctggaattgcagcacctgtgggtggagtaatgactgagtgtggcaccaatcctcctgttgaacacttcctttctgctgaggatgctgagtgctgcatctgcttgtgtccctatgaagacggtgcggaacttcgagaactcccctgcaatcatcatttccactgtacctgcatagacaagtggcttcacataaatgcaacatgtcccctgtgcaagttcaacatcatcaagagcaaccttggtccagaagacgtctaggtttcacaggacgagcaatctgttgaaggattgatatgctccagttgcgttctttagctatgggttccttcaggtgtaagtatggggtataggtgatgcacagctggttgatcagtattcgctcctgaatgaaatgttttagcagtttcttgatgccggtagagatgtacattccttctctctaagtcaattgtgtcgcagattctcattttagccttgtaggaagtatttgaattgaggattctcatgtacgttgtgttagcaagtgttgaataaatacatggaaatgcagaggtttgtaagaagaaaaatggttgtggaattggagctttgttaacagcacatgctgtctccttaatatcagtagacgcacattctaaaaaaaaaaaaaaattaaaaaaaaaaaaaaaaaaaa

SEQ ID NO: 22711 - DNA, 693 bp, Oryza sativa
  unsure (1)..(693): unsure at all n locations
  Clone ID: TF_OsC108211_1
cggtnccggcccattcccgggttcgnacccacgccgtccgnnttctcgtctctcaatctcaccaccggtgaggcgcgcctccagnaatctcccagtagcctcaactgcctctctcggtttcntcggtntctctctcccccccagctgcagacaccacggtggncgtgccggggcgagacgtgtttgtcgtaatggcgacggtgggcgccgtggacggcgttgaagttgtgagcgcactgatcggccagtactacgacgggctggcgctggagctcgtggtgttctccctcgccatcgtcgtcctgcggtacgccgcggtgctctacgcgaaccacctggtcgacagcctgagcgagctccaggcggcggtcggcgccgggatcggcggctcgtcgtcgggaggcggcctcgactccgccgccattgcgcggctgccctgcttcgtgctccctccccgccgcggaggtagtgcggcggcggcggcggcggagtgcgcggtgtgcctgggcgccgtggaggaaggggagacggtgcgcgcgctcccctgctgcccgcacgccttccacgcccgctgcgtcgacgcctggctgcgcctgcggccgacgtgccccctgtgccgcgccgacgtgccggtgccggcgaggccgacagctccacgacgcaggcacgtgcctcgtggcacagtggagtgac

SEQ ID NO: 22712 - DNA, 733 bp, Oryza sativa
  Clone ID: TF_OsC108278_1
cggtgtaaaattaagggaccttagatgaacttattccctcaagaaatagactagtagtcacatatgggcttgtttgttagagccttttgggccttgagtgtaaaacacaactagttctatttttttaacggaacaggcccaacagtccaagataaatgaaatgaaattaacaaacaatggctgaatgagttgcgactctctttctgttgaccgataaaattacaccagcgagaaaacgctttctgtacgtactacgaatgagaaagagaaagaaaaatcgaactagaattagaatgaacaatagagatcgtcgaggtgagatttctcacccgctctcgcgtgaattcgcgtgggatcaatttgcgagcaaacgtcactccactgtgccacgaggcacgtgcctgcgtcgtggagctgtcggcctcgccggcaccggcacgtcggcgcggcacagggggcacgtcggccgcaggcgcagccaggcgtcgacgcagcgggcgtggaaggcgtgcgggcagcaggggagcgcgcgcaccgtctccccttcctccacggcgcccaggcacaccgcgcactccgccgccgccgccgccgcactaccttcgcggcggggagggagcacgaagcagggcagccgcgcaatggcggcggagtcgaggccgcctcccgacgacgagccgccgatcccggcgccgaccgccgcctggagctcgctcaggctgtcgaccaggtg

SEQ ID NO: 22713 - DNA, 2253 bp, Oryza sativa; identical to SEQ ID NO: 13628
  Clone ID: TF_OsC384049_1

SEQ ID NO: 22714 - DNA, 1789 bp, Oryza sativa
  Clone ID: TF_OsC5813_1
ggaggccaggacagcaagaccaggcctgggctgtagctagctagctagcttgtagagaaagagagagaaacactggagctttagagagagtgcgggagtccgcgcggggctgaagaggaggaggaagagctagctatcctatggtgctagctgtagctagctccgacgactgaggtgaggagacgcaatggcggggagatgcgccggcggcggcgacggcggcggcgagggcatgctggcgcggctgcggagggcggcagccaggcggatcgggctctcctgcgcctccttcttctcccacgccgccacctccccttccccgcctcccaagaccatctcatgctcagcactgaatgcgcctgcagacagcactgatgaagaccaggaaaagctggaggagcccactagcacaagaatggctgacaagaatctctgtgcaatatgtctggagcccctcagcaccggcagcgttgatattgacaatggtgacaggccagcaatcttcacatcacaatgctcccactccttccacttcctatgcatcgcctccaacattcggcacggcaatgttacatgtcccatctgccgtgcacagtggtctcagctgccgcgtgacttgaaggtgccaccattgctgcagaacaaccagtctgacccaatcctccgcatccttgatgacaacatcgcgacatctcgtttcaacagaaggtcatccatccgtgctgcccggtacaacgacgatgatccggttgagccttacaccttgaccgagcatgtggatccatgccttcgcttcgctctgatcccatccccagtggcggctcaccatcatgctctcggacattacccttgtggccgtgtgatgccactgcagcagcattgccagtacagcagctcctccatgctctcaccgccacagattgcttcaccaagtgggcagaggcgcgcttacctctccgtcagtctcgcgccacagccagccatggacctagttctggttgccagccctaatgggccacatctcaggctcctgaagcaggcaatggcgctggctgtcttctccatgcgcgcaattgaccggttagccattgtcacaaatgccaccactgcaacccgcgccttccccttgcgccgaatgtcatcccatggaaagcgaatggcattgcaggtcattgaacacctctgctgtgttggtggtactgatcctgtaggggcattgcagaagggcctgaagatactagaggaccgggcgcaccagaacccaagcagttgcattcttcacctgtcagaccatccaatccgaagctgtttcggggtcgacatgaaccgtttcaacatcccggttcaccagttccatgtcggcctcggtttcggggtgcagaatggctttgtgatgcacgagtttgaggagctcttagcgcggttgcttggcggtgtcataagcgacacccagctcaggattggcgagcacggtggagtggtgaggctaggtgagctgaggggtggcgaagagaggaggatcccgcttgacctggtgtcggactgcggcttcatacttgttggctatagctatctggaaggtggaagggaggatcagttcaggacaggcgaagtcgctgtcggtttcgaagagaaaggcgataaccggtactgcggggtcagggatgccggtggtctgagtatcggcggtgagaggaggagcagctgctgcgccgagagatgggactaccttgatccgttcatggcgcggcgatgggcgaagcatttcaatgtgtatagggcctgagtt

SEQ ID NO: 22715 - DNA, 1076 bp, Oryza sativa
  Clone ID: TF_OsC158582_1
aggcgatgggcgcggtggattcctcgaggtgaggaggaggtgatgtgctcggcggcgacggcggcggcggcgcggcggcgatggaactcccgtggctggatctgcccttcacgctgctgacgctgctgctggcgacgcggctcgcctacgactactacggcgtcgtcgcggccaccttcacggggagcttctcgctccagatcttcctcttctactgcttcgcgcgctggtaccgccacaccatcgccgcccgcgccgccgcagacgccgacggggatggcggcggcggcgcggtggcggatgaggaggcggcgccgcccgtgctgatcccgctgctggagggccggggcggtggaggcgggggcgcgggcgcggcgtcgtcgctggcgaaccggtgcttcgccgtggtgttcatggtgttcgtgccgctggtcatcgtggtgttcgagcggagccaggccgacgtcgtggcgtacgcgctctgcctcgccaacatcctcgtcatggtcgtctggctctcgcccgacgccgccgcggaccccgcgtcggcggccaagtcgttcctccgcctcagcgacgacgaggacgaaggcagctgcagcggcagcggccacggcgccgccgaggacaagtgctgcgtctgcctcgccgggatgcgggaggcgcaggcgctccgcgacctcccccggtgcggtcaccgcttccacgccaagtgcatcggcaagtggctcacggcgcacccgacgtgccccgtctgccgcaccacggccgtgccgccgccggcgccgctgcccgccagcggcgaccatgccgacgacgccatcacccctgtctagctctgcacatagtctgacagacaaactcaggtaaattaatttcttgtgctattaatctgtaaaattgttgggaaatttttttcttgaagatgttgtatatagatatatagctgtatgaatgaattgcctccaatttttcatgcatcaattggaaagaatggtaagtagtagtaatctgtaaattcttttgtaacattgctctatgaagattcaagattgtgataaaaaaaaaaaaaaaaa

SEQ ID NO: 22716 - DNA, 2171 bp, Oryza sativa
  Clone ID: TF_OsC11064_1
gttctccctctcctcctcccacctcagccgccgcttaccggcggcgccgcctgctaatctgccggcgtgagcaccggcggagatgtgttactgctacccaacctataacgcagctctcccgcgcagtgcctctgtctctagctagggttttcctcttgggggagacgacctactatggtaaggtggggagctgaagccggcgacctggtgctgtccggaggaagctggagctcgtcgccgtcggatggacgccgatgaggccgcggggagtagcaggaggatggatctgaacctctaccttggcctcccacgcgccccgcgcccgcgccgctccgacctcggctccgacctcgccctcagcaccccgatgccctcctccccgtccttctccgcagcctccgtcgacgcgccgccgccaccgcccgagctgtcgcatcccccgtactccccctctcacgccgacctttcccctccgctgcaggaggtctactccctgtacaaccccgacgacccgcctgcttccgagacgcacctgccgccgtatgcgccgcctccggctccggtggtctcggagctccctgacgacctcgagtttggcctccaccccccgccgccgctggtgcgtgccagcgaactgctaggttgggaggaccggccgtcttcgtcgacggcatcgtcctctttcctccctgacaccgcagcccgttactggcggcttctcgagcagactggaagcagatggctccgtgcgaggcggtttaggtcggaccttccgccactcagttctgaagcttacccagctgggcgtgatgctgccgcagtcccagtgctgcagcatgaaccgatgaatgatactgttgaacataataaggtagctgccgatggcgcggaagtaggcgcctccgaggaatcggaggagcagggcaggagcgctgccacatttgagtgtaatatatgcttcgatatggccagcgagccggtggtcacctcttgtggccatctcttctgctggccttgcttgtaccaatggctcaatgtttattccaatcacaaggaatgcccagtctgcaaaggcgaggtgactgaggcgaatattactccgatctatgggagagggaattcatgtttggatgccgagaaggctgtggaaggtgggaaacaaacaggtcctactatcccaccaagaccacatggaaatcggctcgaaagcttcaggcagcagtttcaccatttgcgaccgatctcaagaaggcttggtgaggctcatgggttattgtcatcatggaggcgccttctggaccaacagattatgaatactgcgagtaggtttgaaggtccgcctgaatcagctgtgcaggaaatggttgacactgctcacgctcagcacaccagtcgcctaagtagattggcgtcaaggatgagagcaagacggttgctgagagaagcagacaaccctaaccctcccgatggcggatccacttcccctgacagtggtttgatcagaaacaatgcatcggatccatccagaaatggtccgagctcattattaccagatggaattgactggttgcgtggacttacccttcttgggtatgaagacacggaaagatttgcatctgccatgagtgattttagaaggataactggaccaagccaatatggtgcatcggcttcatcatcgaatcctccaaatctcgagtcaacatttgacagaactcatgttgttgcagcaccttctgcagaccaagcatctaactcaagcactgctgcagtgatacagggggatgctggtatctctgagagtgcaggagaaccaagtaacgcggggtcatcaagatccctgaggaggagagggaggagcagtgccctgggttctttggatgctgatggcgggggcctccaacggaacaagaggcgaaggataaactgaacattctgtgttgtggtgttgatctaaactctgcatgccatgctcgctgattttcaactattgcatttcatttcttcgggtgatgtctcctgtgttgtagtgtaacattttttcttctcttttcattttcccccgtaggttgcactgaaatgtttatctgtttagttctcatgtagcctgtacctgtttaatttatggaaagttagttgatcaagaaacctcgtgccgatcctgcagcccg

SEQ ID NO: 22717 - DNA, 954 bp, Oryza sativa
  Clone ID: TF_OsC137168_1
atgtcgtcgacggcggcgggcggcgcgccggggccggcggcgcagcgtcatggcggcggcggcggtggaggggggtgctgcagctcaggcgtgacgctggagctcgtcggcgcgttcacggcggtgtgcctggtgctgtacggggtgatactctacttcaactacctgtacgtgcggtggagcggccgcgacggcgtgcaccggacttcgggcggcggcggcggcggagggcgtggagcggcggcgaggaagaggggcggcggcggcggcctcgacaaggcggcgctggcggccattccggtgttcaggttcaaggcgtcggcgtcggcggcggcgctcggcggcggcgaggcggagtgcgcggtgtgcctgagcggcatgcaggacggcgacgcggtgcgcgcgctgcccgggtgcggccacgccttccacgccggctgcgtcgacgcctggctccgcgcccacggcacctgccccgtttgccgcgcgcgccccgccgtgccgcctcctccgccggcgaaaccaccctgcctgaaggcgccggagcccgccgccgccgccgccggccggcagccggtcgacctggagagccatgtatagcactaagctaatcaagacggttagttaattttagccatgtataaaatctagttagctcctactcctactactacatgttccttaattagttttttttttttttttttgcgttcttgaaatccaacgccattttcgtcaataatccagcaacgccattgttcccattgagatgaacaatgcctatgtccaatgtcttggcactctgtaaatcactttttgttattttgctgtaatttttttcccctggtttttgccaactttgaagcacaacgactgtgcaaaaaaaaaaaaaaaaaaaaaaaaaaaaaaaaaaaaaaaagggggggggcctcgtccgaattcctgcagcccggg

SEQ ID NO: 22718 - DNA, 2632 bp, Oryza sativa
  Clone ID: TF_OsC25552_1
atggatgccgcagctcttcagtatgagacgttctcgtcgtctcctccgctccgctcgttgcgccgccgccaagacgagcaggggagggccgggcggcgatctccatccggcgagcagcggaggggaggggatcctgtttgtttgaataactcttcagtatgagaaccagaagctggtgcagcaattggaggcacagaagtccgaaatgcgtgcagtgtaagaccagttcaaggtgaagagatatgagaaaagttcttacgatcatgtatttattagtttgaattaaacgtgaaatcagctgattgatgatttattgctacttaggagtacgagatgctggggatattaattgatgtggctctgcgcttggatcattcagcgatgtcagaagtaattctttgcgtcaaagactccttaggtgtacagttggctagaagtgaatttttatcataagctttaaatggacagaactccagtgaagacgttattgtggcccttgaaaaccataatgattacttgaaagaagtggttgacaatttacgtcaagctgtgtctatcatcaacaggaagcacgaaaagtatctggatgagattgaggctttcaaaaacaatcaatcaagagaactacatgaagtaaagtgtctttcaggtgagctagaggaaagcatggcagagcttgaggaaagccgtcgaaagttggctgttctccagttgcaaacgggtggaggctcactgatgaacacatctgctcctaacggtgtgaacggtagtgtttcaactgataaatcttcagacaagggtatgggctggcgagatctgaaagatgctgttgaggaggctaagactcttgctgcaaaccgcctatttgaactccatgagactcaagaggataatctgatactatccaagcagttggaagatattcaggatcaattaaaagatgagaactatattgttacatcaaaaccatatacgattctcagtgaccagttacaccatctgaatgctgagatagagcgatacagggggttagttgaagtgctacaggccaaaattgaggacctggaacatgaaatccagaaacttatggctgaaaagaatgatcttgagatcaaggctgaggaagccttgcaagattcagggaaaaaagacttcaaggacgagattcatgttatggctgcatcgtgctacagaatgaaaggaaccagctcctgccaaaggaagaaaaaatgcttgcaaaggcagaatcagtggacgctgttcaacaatccattaccacttacaaggccaaaattgaggacctggaacatgaaatccagaaacttatggctgaaaagaatgaatcttgagatcaaggggctgaggaagcctgggcaagattcagggtcaaaaagacaacaaggagaagatccatcttgtgagcgagccactcactaaagagaaggaattgtaggacattctattgaatagatccaagaatgcggctactgaaccacttgtgcttcgtgagaaagctgactatttaagaaattagcaatctaagaagaaaggggcacaatggatgcaatctgataagaacttatgaaacttaacgagtcaaaaagaattaaaaacgctgaattagatggccgtctatctgaaattgagactataggtcaaacataataagatatgcaaacactaaatcagcaccatcttaaacaggttgctgatagagatgattttaacataaagctagtatcagatagtgtaaagatgaagcaagcctatggttcccttcttgctgaaaagaatatgctacagaagcaacttcagcatgtcaacagttcactggagtcatctaaactaaaaatcaccagtggtgaagagcagatgaagacctatgtagcacaagctatgaaatcttcttcagagaataggcatcttgcaattagccttgaaaggactatgctggaggtatcagatgcagagaaggagctcaagtggcttcggtccgctactggatctgctgagaaagaatatgagataaatcagaaaaaaatagctgagctaaaaatggagctagagcgtgagagaaatgagaggataaagcttgaggaagaatacgaagaggtgaaaaacgaagtcagtgagctaacctcagaaactgaagagactactatacagaagctccaagatgaaataaaagaatgcaaggctattctcaagtgtggggtgtgcttcgaccggccgaaagaggtcgtgatcaccaaatgcttccacttattctgctcgccatgtatccagaggaaccttgagatccgccaccgcaaatgcccaggttgtggcaccccctttggacagagtgacgttcgggaggtgaagatctgaagcgtcagcaaaacagcttgaatgactgacttggtagcgagcatgtaaatatatagtagtagtgctagtttctgttttcttggaggacagatattagatcgaattgtcttggtgtgcctctgccaagactgccatgtagaaactattattattatcacctaaaaatagtgcaattgcggggatctgatactgactgtgtctgttttgcgtgttgtatcattaatttatctgttaattgaggtaccggctaaagttgttttac

SEQ ID NO: 22719 - DNA, 1380 bp, Oryza sativa; identical to SEQ ID NO: 13640
  Clone ID: TF_OsC25552_2

SEQ ID NO: 22720 - DNA, 1469 bp, Oryza sativa
  Clone ID: TF_OsC29049_1
atggcctcatggccgacatcatgtaccaaggtgtacgagatcattcagttttcgcgctgcaaggaggaggcgagcgcaacatcaagcatcatcgaccacaggacggccaaagtcggcagacgagatgacggcccgaacatgtcaaaggtgctaagagctacaatacctgagaattcagttagtggatcatcagttcgaggaaagctgcgagaaatggagatggacttggcagtcgagcagtacggcagtataggtgcgtcctccatattaagtactctctccgtcccagaatatagcaacctagcatgggatgagacctatcctaagaccatgttatctgctctctctgcaacaaagaacaggatgtacaacaggattgctccaattgtggggcatgcttgggtaaatatttctgcgcaaaatgcaacttttatgatgacgatgcaagttgtgctaaatatgcattcctgtgacggagtaatgaaatatgagccctttttgataaatctcaccatcacattttacagaactggtggtgcagagaacttctttcactgtgacaaatgcggatgctgctacagctatgtgctgaaggattcccatcattgtgtggaaagagcaatgcaccataactgccctgtatgcttcgagtatctatttgactcaacaaaagacatcagtgcactgcactgcggacacacgatccatctggaatgcctatacgagatgagatcccatcaacaattctcttgcccggtctgcctgaggtctgcttgtgacatgtcccatgcatggcaaaagcttgatcaagagaacaccatccaaataactcttcactcaggttgcagcatcgccgatgccagtgatctatcagaagaaaatgatatggatcctatgcaacgactgtgggacgacatcgaacgtgcaattccacatattgggacacaagtgccccggatgcagctcttacaacacccggcagacaagagccgcccctgctgccgcgtgctccagagtctgaattctgaagaacagtgagatgagagctagtctgaactccgaagaacagcgagagatttgcactgctctctgcagtctgaaatgcccaataaaaagatttgcagcctgtgattagtctcaaagcccatcaaaacgcaaacaaccgtttgttctgaaatttgggctcgtccatggtttgttccccctagtaggccggtctggtgctaatctggcccagcgttgtgctttaggcggatttcgactttgcttgcctgctgggccttggccgcaagcgccagtcaggactctgcatcgagatgatttttatcattaccgtgatttttatcgcgttgtgctttcgccggtgaggtatttctcgcaaagaaaaaggaactaacgaaatgtgctcgtcgttcattggcatgccggtgcttacgagattgaaataaagaagtagcggtatgatcatc

SEQ ID NO: 22721 - DNA, 297 bp, Oryza sativa
  Clone ID: TF_LIB3433-011-Q6-K1-F4
gcgtccacgcgtccggccgccgccgcgttcatcggcgcgctgcccacggtcgatgtgtcctagcccgccacggcctgcgccatctgcaaggacgacctccccctcgctgcccccgcccggaggctcccctgcggccacctctaccactccgaatgcatcgtgcagtggctggagatgcgcaactcctgccccgtctgccgctcccgcctcccgtccgacgagccccaggacgcggcggcgccgtctgacccgggccccgcgcccatgcggatcacgatcaggctcagcaccaaccga

SEQ ID NO: 22722 - DNA, 1974 bp, Oryza sativa
  Clone ID: TF_OsC13046_1
gcacgaggctttatatgtattaactattaaaatgccagggtgtgatccagtctcgcgtttttttggttttttttttttttttttttttttttttgtttattaaaaatgtaaaccacttcatatgattaaatgaattaaaaattggcattttaatagttaatacatataaaaggatatcagctatggtaacacacaaaataatttaatgttagcaaacttacttatttacatggctgaggcgcacaaagaatgaaacaacttaattgggtctaaatactaacaaatttgaggaccatattgttgtttgtcctcgcgtgtcctatgcagcagccgacttgcaaattgggcatgagttcttctccttcaaccacttcttgacgcagtcggtgtggaagtcgtgattgcatttcagtattcccagcaaactgttgtctttgtattcctccagacaaattgcacatttcccatcatcttgatcattttgctgttcatcagaactgcaatagatcacttctctcacacaacctgagattttctcgtccaccaagcctgtgcagacattaccaatagattctcccaaagccagcaggtcctcataactcatattgtcaatgtccagtctcatggccctgtgggggtcttgtgcttctcttgattcgcggagagcaaattgttgcatcattatcaattgctgtgcatcaatcatcaaaggctgaataccatagtatgagcttctcgcccttctgttccttccgctgttagcatgccctatgagtacattccttgcatgtctagaagatgcaacagctctgacaggtaatggctgactggccctcatgggtgttgaggtagttgcagaggtagcaggttggtagctcggaatgatcacctcatggggaatcgctgtagagctagaggatgctacagaaggcagatgaatgtagctaggaacagtgtcaccatgaacatgcctaggtgcaaagacaccactggcaaatattgcactgcttgaagagccttgtaaagttgggacaggaacagatgagttgctgcttcccatagtgtaaggcatttctccagagtgcattccagaggcacctacataatcatttaaatacatgtgcaagctctggtcattccaattaattgggccaacacttggaggcatttgacgatgcaaggactcagaaaatggagctggctgtggataattagagaactgggtacttgatgagctaccggcacaataaccatcaccattgatgctatactctggataaatgacaggattttttcgtttcactgcagcagttctgttgtcgatttgggaactccctcgagcaaattctccctcagatctatgtggataagttataacaggttcagtttgaggattgtaggatacatggccaccagagcttccagcaggatagtgaacataggagttatgtaaggttcctgtgtttttaactctatgacctgaatattgtgccactcgacttgaagatggaagatcattcgatctaattgccacattcccatggtatgaagggccaattttaagggctgcatcatttccagcatgcacaaataacttctgacctaaaggcagaggttggttgagttgctcattattgggttgaaccatctctggcagtagggaatggtttccatggtgtctagccataaaacagtcagtccagtatgcctgtccttaacctgctcacaagtcgtcgttcgctcgctcgatcgatcgatcgatccaccgatccaaaccccacgcgaccgaataaatttccaagggagtagatagatagagggggaaaggaaggaggcgcccgcgatacggaagcttcggggagaagataggaggagacgcgacgcacgcggccacagttttctcctaaaattaaaattctctctctctctctctctcgtagagtatttgtctgtgcggtgtggagcggacgcggg

SEQ ID NO: 22723 - DNA, 1248 bp, Oryza sativa; identical to SEQ ID NO: 13644
  Clone ID: TF_OsC159094_1

SEQ ID NO: 22724 - DNA, 906 bp, Oryza sativa; identical to SEQ ID NO: 13648
  Clone ID: TF_OsC336525_1

SEQ ID NO: 22725 - DNA, 459 bp, Oryza sativa
  Clone ID: TF_OsC336525_2
ttacttcatctcctccgatcctgacacgccgccgcacgccggtggtccaccgacgtcttccatccacgactcctccttcgtgtcaggcccatcgtcgtctcgaccggcgctggccacggtgatcactgtcaccgtctccgacgacgcggcggcggcggcggcctgcgccgtctgcaccgacgccctccagctcgcgtcgccggcgtccaggctcccgtgcggccacctgtaccacgcccactgcatcgcgcagtggctgtcgctgcgaaacacctgcccggtctgccgccgcagcgtcccgatgcgtactgaggagaccgcgccgccatggtcgccgccgacggagaccgaccaagaggccgtgccatcgccgccgccgacgacgacgaggcggttgatctgattgttgttgaatgttgcgtaatgttgttgttgctgctgctgctggactctggccat

SEQ ID NO: 22726 - DNA, 1345 bp, Oryza sativa
  Clone ID: TF_OsC62541_1
gcacgaggccccgcttacttcccgcttaccccccagtgctccctgagcttgctcacacacgttccgaaaaacaccggaggaatattccccacctcgcctctctccagccaccgacatggccgccgccgccgccgccgccgcttccgcctcctcctcgtcgtcgtcctcctcctcggccgaatccgtccccctccccaccacgactctccccatcgacaaggcggcggctgtaggcggcggtggcgaccgggcggtggattgcggggtgtgcgcgatttgcctggataagatcgccctgcaggagacggccctcgtcaagggatgcgaccacgcctactgtgtgacgtgcattctgaggtgggcgtcctacaaacagacgcctcaatgcccacagtgcaaacatccgtttgatttcctcagcgtgcaccgctctctcgatggctgtattcatgactacatgttcgaggaaagcgtttgccttctcctgagggccacttggtttgaacctctgatcgtagaggctcacgaagaggctctggatgaagaagagttataccacatctatcaatatgatgatggcgttgaagatgaccttgacgaggaagcttattacatgagcaggtctccgagcattcgaattggcaacaggaggtggggtgacaatggatatgtcagaggaggcaggaaagaggcaaggccagtgagtcgccagtccttgaatgacactgatgctggtccatccaggactcccaagaagaaagatgtatcagcatcgggatcaggttctgtgtctaaggaagttgcaggaagacgagcaaaacgagctctgaagcgtgaagctgctgataaggcagctgcagaaaagcacttgaagcacctccagaggttgggcctcaggaaggcacccgaagcaacagctgaagcaactccagaggttgaacctcagctgaacgagtgattttcaccaacttctgtagataatggtgctgtgaagaaaactgcagcccttgggtcacccgaataatcttccattgtgaaggactggagcgtggccttgtatcgttggcaaacttgccgatttgtacagtactttagtttcacaaattactcgtagcattgaactgcacatcagtctgcaccagatgcggcgatgcaatgcggtttacctcaatctgataatactttcagttaccgggattcctttgcatgatgcagaggaccctgaactaggagaatgtcagttgctagctttgctagtattttgtgctgcaatgtatcagtttagatagaatgttgcatgtgactatcctccgataaatgaaatgaggaaactggtttttttgcc

SEQ ID NO: 22727 - DNA, 1146 bp, Oryza sativa
  Clone ID: TF_OsC271396_1
agcccggctgcacgccctgggcgccaggcgcaaggaaacgaagcgcggtttccgtagcgccgccgccgccttcgccgccgcgggcaccactcccattaagaccggatcagctctctctctctctctctctctctctctctctctgtccgttgcgctcgtctcctcctctcgccgcgccgccgccccccgcccccacgatcgacgactcgccgcgccgccgccgccgccgccgccaacgcatgcaggcaagatgaagttcggtgcaatatatgaagagtatcttcgggaacagcaagacaaatacctaacaaagtgctcacatgtggagtacaaacgtctcaaaaaggtactgaagaaatgtcgagttggtcgctcattgcaagaagactgccccaatggtgaccagcaggaggggaacaacgaatctccagatatttgcaaatgcaattcatgcacattgtgtgatcaaatgttctttacagaacttactaaggaggcttcagaaatagctggctgtttcagctctagagtacaacgtctcctaaatcttcatgtcccttcaggatttctacgctatatttggcgtgtaaggcaatgtttcatagatgatcaacaaatcatggttcaagaaggcagaatgttacttaattatgtaaccatgaatgctaatcgctatccgtaaaattctgaagaagtatgacaaaatacatggttctgtcagtggtagagatttcaagagcaagatgcaaactgatcatattgaactgttgcagtccccttggctgatagaactgggtgctttccatctaaactgcaatagttcagatattgatgaaactgtggggttccttaagaatgagttcttcaagaatttttcctgtgatttgaccgaagcacgaccactaatgactatggctatttctgaaactatgaagtatgagtacagcctaacttgtccaatttgcttggatactttgttcaacccatatgcacttagctgtggccatctcttttgcaaaggctgtgcttgtggagctgcttctgtgtacatctttcaaggtgtcaagtctgcacctcctgaggcgaagtgtcctgtatgccgatcggatggtgtctttgctcatgctgtgcatatgactgaacttg

SEQ ID NO: 22728 - DNA, 1946 bp, Oryza sativa
  Clone ID: TF_OsC23902_1
cttcttcccaagtaaaaccccaagaagcggctattacttctctcccctgttcttcttcctccacattcccatttcctaaaaaaaaaatccccaaatctccacatgattcctccgtaattcggcgcgccctctcatggcgtccctcgccgaattccccctcccggtgatctctccgacttgctggagctatcggtagcgggaggaatcaatcaatcaatcccccacgctgggtggttcttgagcaagaacggctcgtcgccgtgccgatcgatcacgtcggccgccggggaaatcctctggggatttgtgggtggttttgggctaaagattccgtttctttcgagcccttttggtctcgggtggatccgcttagctttggttcttttgctggttggggggcatggcggcggagtcgtcggctgctgctgctgcgggcgggggcgagaggaggggcccgatggatctgaacctgtatctcggcctccctccgctgccgccgcctccgggaaggctggatgtcgccgccgattacccgtcgctgctgctgaactccgccgccacggtggcgaacgagcaaaggggctcggtggtggtggcggcaccgcctccggcggcggcggcgtactcgccgtcgaacgcgctgtcagcgccggagcaggtgctggtagatcctgttgcagcgtggcttgttgatcccggtgagcagcagccggtgccgccgctcgagacgccatcgtacatggccagggcctcgtcgacgctgccacagatttttgcttgtgcagcgttggaaatgcttgtgcagaccggtggagcaatcccacctactggtcttataaggggagcagagattgctgctgcaagccgccctatgacgccggagaatcggctgcggaggttgatccaggtgagcgatcaacacggcgtcgggaatgggagggcggggactgggccagtgagccgcagccgacgggcgaatagcccggaagccgataatctggcgcgggccatccagaggtctcataattctcttgaggcatcaaggaggcagatgcttgatggtgatggcagtgatgccaccaagaaggatgacggttgcggatgcaacggcagcttcgaatgcaatatctgctttgaatcagctaaagatcctgtggttaccccttgtggccacctcttctgctggccttgcatataccagtggcttcatggacattcagagcactctgattgccctgtctgcaagggcgaggtgctcgaagtaaacgtcacaccgatttatggaagaggaggtggcgaggagaactcctccagaaatgatatccaaatccctcccaggccgagtgcgcagaggaccgagagcttgaggcagcagctgcaaaggccagacacaagaggaggcattgcaaacatggtgaggcggttgatgcaaaaccaagatatagtggtaggccaggcggcttcatctgcaccccggccaaggggtaggggtcgaaggcaggcaaaacaagatgcgccttctgcaccagcaacacagcagcaggtggtcaatgctgatgctgggagtggcaatcaggctcctttgccacctcctgatgctaatggtgctgcaccggctgctgctgtcgctccccaacagtcatcatctgtggagcaagcgtcgacttctagcaccgtgggtgttatagcgggagggccagcacaaggtaggaggtcaagagtttctgaatccacccctgcaaggaggacaaggaggaggcatcagtaggtaacttagagttgttactgtaatagaacatatacaccatgtttccttgtaaccttgatcatatttaggctcatcccaaaattatgtagaattgtggatgaaatcttttcttttatttaccttgtatccaccattttaccttaggcaaaggaataaagatttcgatttcaatatattt

SEQ ID NO: 22729 - DNA, 3311 bp, Oryza sativa
  Clone ID: TF_OsC138281_1
tttttttttttttttttttttttttactgaaaattctcccattataaaacccttaattgggttcaacgagcttagagagtgcttaacaacttcatctcaaaacaggagcttaattaacaagcattgctgtctgtggccatggccatacacccagaataggggagctgagatgaatcgattgggtcagtaacagagctaactcatggcagctttgtcaccatgagtggcaagccgaacccgggttcaatggtcagcctgaacgccggcgagtgacggtacctcggcgacggcgagaaggcgaactttgtcagcagcctggccaacaccaccttcagctccgccattgccaggttctgcccgatgcacgtcctgggcccgtgcccgaacggcacgtacatgtgcgccgccctgcacgccgccgccacgccgttcgcgaaccggtccggccggaactcgtcggcgtcggcgccccaggcttccttgtccaggtgcagcatcagcctgggcacctgcacgatggtgccgcgaggcacctcgatgttgccaagcttcacgtccgtcagggcctcctgcatcatcaccgacgccggcgggtacagccgaagcgtctcctggatcaccatcgtcacctccattgcctcagagtgcgtggcgagtagcatcaggcaccagatggcggtgaccgccgtgctctcgtgacctccgaagtagatggtcttacagtttccgacgataaagtcctcagcctctgcagcgctgcgaccatcctgcgcaccatcaatgatggcgttgacaagactgttgtgtgagtcttggtagtggtgttgttcctttgcgacatccaggatcagtaagcggacttgttcatccagcatctgtatttcttggttgctcttggttggcaggtatttccacagtgcagacagaccaacaaacgaatcttgctgagcaattactttttggagctgcctaagcttgcaaaatatttcttctccttttgtgaagctactcccaaagcaagccctggcaattacatctgctgacaagttccgcaagtaatcatcgacaactatttccctacaccctcccacatcgtcaatcatatcctcccatgcttctaacactgtaacagttgcatcctcaatcagctggatcatacccttaatcttatccatgaagaactctggtgcaattatcttcctctgataggcccattcatcaccattctctgtaaataaacctcctccaaagagggccttgcgagatttctttagataattaggcttaccaagctctgatggtgtccaccggcctatatccttcaccatatctgggtgagaaacttgtagtatctccagagctccagttgagtatagaaacactgggccataagtttcccgacagaggagaaagtgtgggaagagggtggagatgaagttgttggtgccttgcttctgtgaaaatttgagttcttgtcggattcttttgatctcctttgtgttgccgtacagaaaagtaggcttgggaccccttatgccttgcctcctcaacttcttccttatcttcacagccctcagccataggatgttgcacaagtagaacagagctaagctctccactggacactgggtagaattctgacagaagcaaactggagcagcagcaataaaaagccatccactgcgcctgcgtgcactgtttggttgctcatcaacacgaacattgtgttcacttgtattagtctcttcgatcacaccagcagccatctgacgagttacctggacctcttgttcatcagaaatttcttccacaacctgaatgtctcttacattggttgtggcttgcttggacctttcatactctgcatcatctgtaggaagctcatatcggcagacaggacatgtatttctagaactaagccatggcaagatgcacgatgaatgataaagatgcatgcatggtagctgttttgctctagctctggtaggaattgggtctttgcagactggacaaataacatcaccatttgtctgatggcttgcagagataatcacggaggggagattttcaataaaggatgtcgctgctggtggagctcctcttctggaatcgttgtcctcagcaaattgctcaaggagcatctcaaactgccttgcatcaacatagtcatctggattcccgacaaaagttgtcctcatttctggctcttccatgtcatctagcaagttggtcacatttgctctttgacgtacactcacactccaattccatacaccatcttcagattcgtcctcactcaatccacttagctgaatatcatgtgattgctgctggtgctgggtcatggtgttgactatttcatcaaaaccagactcttccacatcttcctggtcatctgaatcccactgatccagtctagcattcatgggatcaatatcagtatctgtgttcatgtagctgtcattgtcaagttgaatggaaatcctcctccttgtcatcacgctatgttcctctatggaggtatctgaatctccaccatagtcaccaagactgatggcagattcaatttcaccaaacacagaatcaacataattaaggccatcgctctcatcatctgaagcatgccatctttgagattggcttggtgttgaattaaacgatgcatgttgcggcgcgaccgacgaagaatcaatatccgtttcacgaccttgtcttcttgctaagtcgatcagctgagaaaactcctgcaagaatgcgtcctccaggaaatcaatgcttgcagtcctggatatctgcctcctccgtgtgttctgccgataagtgctggttatttcatctctttcatcatcattgagtactgtcatcttgcagtccctgcatatggctaaagcttcaaaggtatcggtcacctgagcatccaaagtaaacggccttgtgcaaactaggcactgcacatctggttggccggcaaattgatggtcagacatggatatcccgacactgaagttggtcagcagtgcaccattggattggatgtgatagccttgtcaagcgttgctgcagcagagtagaggaagcatccccctcaggatcccttaaaatcaagagaaatgggatactagtcggggatggcagtagatttgggggcggcctaaactagggctcgtggtcgttggcaggagaggagggaaccaactgcagtctgcagcgatcgattgatgaaggtgacgccaatcgaatcagtggagcaacgccaaatacgggaagcaatggaattttgagattttggggattgatcctgcagcccgggg

SEQ ID NO: 22730 - DNA, 2393 bp, Oryza sativa
  Clone ID: TF_OsC11987_1
ttcgaagaaattggttacaacttccaacttcccaaccccgggccaggacccttgccacctccaaagggggacaactttttttttttttttttttaggaaatgcccaattgcaattgaatgttattgaataaattttaaacttcaaatctaggtttaaacaaaagggaaaaagaaactccaggtctacaaccatcgcctttctggtaaagtaccatgtaccaccctatagtataaattccacctgtatgttggatcttggaaggtgtaacatgccttataaccaaccactcggtctaaagaggcttatccgctttcctcgcaggcggaagcacgcaaaattaagtgcccagtcctgtctttttacagatagggcacagattttttataaccagccattgtttgatgcatgcggtgtggaagtcatgcccacagtctagtctgcccatgtcctcaccttcggcatattcttcctggcaaatacagcatggttcaacaccagttagaggttcttcaatcggtatgctcacatatttccattgcttcaaaccagtcctaattttatcctcactaagtccagtgtttacatacccaatgcgttcaccaagtgccaacaattcctcatatgacatattatccacatcaagccgcatgtcacgatgtctgtcaattaaactggcacgccttgcaaaaagtgcacgttcaaaattaggatcctcaaaccttccacctcttccctgacgaatttgttcaacaacattgcgaagatgcacaagttgattggcagactctgagactgtcctaattccgtctcttgaagcagcaatgctttgcataaaagactgcaggtccaagtaattcgagttttgcctatctacagagtgaggaacagccctgacataatgctgctgattggcacgagagctggatccaggttgatggcttcgaatctcatgtgatgtggatgaatgcccacgttgctgctgtgatgtaatgcttgaacctctggactgaggaacgctagcagcctgcaaggatctcctaacaatatcaaccgaaccccttgagcttgaagtaggctgggatgcatttaacccagcaatctgttgagctcctatatttacagcagttcgaattgtggagctggaattttgttggttgcttctgcctcccggcatagatagcaattctgccgagtcagaaggaaacagagaagaacctaacagaaggggctcaggaaaattgcctctcaccgagctcctgttgggatcttgtgaagataactggtttgttgtatcagcagaactaggaaaaatccctattctcgaaccaaaattgccacttgatggagcacggtgcaaattttgtgagaattgagtgacagcaggcacataaggccgactaagagaacttgttgaagagctcgatgctctaggttgtactggaataaacaaagactgttgctgagtaggctgataaacagaacacctgagacttccttcaggcaagagattggacgatgattgatcatactcattagggcttgttctcatccgggtattcctcagaaatctctcacgctcatgatcaccatatagtgaataatgatcagacaacatagcatttgcagacatattggtattctggtttagctgttccacaggagagtatgaaaaaacatggtttgtaggggcaggtgcagttaaaccagaagtgctttcatgactggatggagaaggttccagtataatattatttcgctgattattacgtgaactaccattggcagaagactctgcaagactcccatcaatattctttctcttgcaagatgaacgatgcccaccaaacaggttaacttcttggcctgtcattccatcagaaaagcttgcaacctgtgaaggatttcctgtagcactggaagaatttgtatggcgcagaacatgctcaggaatggaaaggcccctgttgagaggaaaagcgtttatccctggttgtccattactctgaatcatatcaacatcctcagaatcaaactgatcagcctgattaagattaaggtctaagtttaagctctgtgaaggcaatgaactactgccttcatgtcttctccctccaataattaagggagctcggatagacaaagcaggagcaaaatgttcccttttggcctcaaaaagactatcatgatcagctacacagcccatcgagctagatccagctgaatcccataagttcaagcttgtattttgctgaccaatcacgcttccatttggcatttccacctcatgactaccaagtaaataatgtgggtaatcatcatcctctagagtatttggaagtaaattctgttcatctgcggtggggttgctgggcagtaaattctgctgatccat

SEQ ID NO: 22731 - DNA, 1271 bp, Oryza sativa
  unsure (1)..(1271): unsure at all n locations
  Clone ID: TF_OsC192138_1
atggctcgccgcgacggcgtcggcggcgacggcggcgcgtcggcggcggagcagcagcggagagtagcgctgcgtgtgctgctgtcccgtgcggaggcttcctcgccgccgccggcgacggtggaggaggaggcgcagcgggggaggagcggtggtggtaacaaggggctcgcgtcggcggcgctgcgcgggctcgggtgcacgtcgacggcggcgctgcgtgcccacgcgccggcttcggcggtggaggtggcgagtagctcggagcggtggcacgggaggcggcggcggaggaaggtgcaggagaggcggagcgcgaggggcggcggcggaggaggaggaggaggcgtggcgccgcccggccccgcgccggcggcggccggggacgtgtggtgcacgtgcgctcccgggataccgttcgccgccgaggcgtcgtcggtggactgcgtcgtggtggcgcgccaccaccacgcccaccacacggcggcggcgatgggctccggccgccgcggggaggcggagcggcgccacagagagaggccggccgctcctcgagctcgaagggtgaccatgcgtgagcacatatcctcgtcgctcatggactcgccgccgttccccgacatgccgctcctcaacgccgacctgctaccaccaccaccctccggccgccaccgccatggataccgccacccccacgtcggcgccgccgaggaagagatcatgatgttaagaacacggctattatggggaagattcggtatgcatgatcagcaccaggattggcgactcgacgttgacaacatgacatatgaggagctgctggatcttgaagacagaattgggtatgtaagcacagggttgcatgacgatgaaatcgctcgcagccttaggatggtcaagtattcagcattcaaccccaagcattttgcaacagaagtagaaaggaattgcagtatttgtcaggaagaatttgaagcaaatgaggaaacagggaggctgatctgtggccacagctatcatgtgcaatgcataaagcagtggctttctaggaagaacacctgccctgtctgcaaaactgttgtatcgaagacatgaaatccaatcagtccctaagcacacttgaactgaaaattgtgaaaaggacttactctttcacagtgtttgtttgtgattgtacagctctgtttgtacatgatgctttgtgtaagcacaagcctgaancaaaccatctcattggcatatagaaatttacatgttttcagtttacccca

SEQ ID NO: 22732 - DNA, 2354 bp, Oryza sativa
  Clone ID: TF_OsC260254_1
ctcgagttttttttttttttttttttttttttttttttttcttttttttttttttttttttttggaatagtagcatactattcgcatatgcattttttcctcgatatgtagattgaatttgaatttgatttttgggtgaatcgatagatatcaccgtacaactatttgtatcaaatttagaagaaaaatatacataagggatatccctcagtgattagaatccactcccgagttaacgtgcacacataataagatgcacgtattgtattgtccgttgcctgatgaaaacgaccccacgctagctttgcttgttccgcagacatcgtcctgatgatctgtgctatgaaaaatgtaatactccatctatcactaatcacttaccctaatctatttcccaaagcttccagtgtcagaaaagctatatggactctggagtagtactatgcgagtgagtgtattgaaatgtttggagtacatcaatcacgcttcgaatgaagcaaagaaaattcgagagagcaaaaattgtctacagagcagtaacatttgtgacatgtgaacctgtgtcatcgagcgtgcgcggcgaggggcacggcctccgcgagcggcgtggccatcggcgacggcagcggcgagtcgcggcacaccgggcaggtggcgctcacccgcagccaccgctccgcgcactccgcgtggaaccggtgcccgcagccgtgccctcgccggagcgcgtcgcctgctacgaactccccgaggcagatggcgcactgcgcccccgcgcacgcgtcgtcgtcgtcaccgacgccgacgtgtaggagcttggggtagagcgcgtcgatggccgggccgtcgaggcctagcaccacgacggcggacgctgccggggcgccgccgccgtcgtcgtcggcgaggagcacggcagctgctccagccttggcccgaacgcagatgtaggaggcgagcatgacggtggagatgaagacgaggacgccgacggcgatggcgatgccgtagccgaggcacacagcgccgccgacgtccgctgcggtgggcgcgaaggaggcggcgtcgggcgaagatgcgggcgcgagggcgaaggagatggacgcgtgcattcgtagcagcagcgtgggcaaatcaaatgggatagatggagactgcggctgcagtgaagtggagcttgcagctggatagtggcacgaacgagctgcgatgcgtgcggcgtatgagttgaaaatggcgtgacaaaatttaaggcggagcacggccgccaccctgttggttcctaggccagccatcgccacgcgcaccgccatgccgagccccaccgaccccctcggcatcggcggcgcctcgagcgccacccacccgccccagcctctgccgtcaccgccacggccggtggcgccggaccacctccagaaggagagctccaccgcgtggctggctactacgtacaggtggtcaccgacgccgcacgcccccacgacacagccgccgccggggagcgcacgggggcgcgcccaggtgccggacgcgacgtgcagcgcgtccaccgacccggcgcacacgtgcgcctcgagcgcccgcgcgccctcgccggacaccgcgacgcccccggcgacgtagaacacgcctcccgcactcgcgccggcgcacccctacctccgccgcggcgcctcgccgaccacgcgccacgcgtcgacctccgggtcgtactcctcgaccgccgcggtgcgcgcggacccgccggcgacgtagatccggtctcccacggcggccgcggcgaacttcttccgcgggaagagcgtcggcgcgcacgcgcgggccgcgccggtgagcgcgtcgacgcgcagcgtcgccccgcggccgatgaggaagacatcccggcccagcacgaccgcgcgggcgtgcgcgaacacggagccgccgcaatgcagcagggtcgggggcaacggcagcgcggcgacctcgagcacgggcacggaggcgtcgaaccggagcagcgcctgcgcggcgcagccgttgtcggagacggagagggcgaggagggaggggcggaggtgggcgtgggcgcggcggaggtggaggaaggcgtcggaggcgaggagcgtggcgaagcggcgggagacggcggggagcggagggagggaggcgcgggggacgcgggcgaggcactcgaggaggaggtcgtcggggagggcggagattgggggtgccggcggcgacgagggaggcggcggttgcggggtggggcaaagaacggggacggcgatgtggcgggcggggtcggcggggatgcaggacttgacgagccacgagaggctgcgggagtggcagctctcggcggcgggcat

SEQ ID NO: 22733 - DNA, 966 bp, Oryza sativa; identical to SEQ ID NO: 13657
  Clone ID: TF_OsC281408_1

SEQ ID NO: 22734 - DNA, 1051 bp, Oryza sativa
  Clone ID: TF_OsC9428_1
gcggcacgaggctccccctttgctttccacgactctctttcgccgcagtctctgcttccgtgcatccatcggcgttcggcgactcggtgtatagtagtattgccaactgtgcgtagcaagctcgatacagcggcgatcatggggttccctctggtgtgctactgcatggcgatccccaagccgctcatcgccttggccaagctcctcgccgccatcagggaggccctccagctgatgctcttcgtcgtcgggatctgccaccacccggagcgatcgggccgcccggctgccgtcgacgccccgctgcccgacgaggtgaaggaccgcctcccgcccctcgagttcgcccagctgctcgcggcctcggagcacggctgtcatggctgcgacgacgacgaggcggtggcggggtgcatcgtgtgcctggagaggctggaggcggatgacgtggtgcggcggctgggcaactgcgcgcacgcgttccaccgcggctgcatcgaccggtggatcgacctcggccggttgacgtgcccgctgtgccgctccaccctgctgccgcgcgcgcgccccgccgccggcccgcgcgggcgactgggccgcctcgccacccgcctcacgggcgtcgtttggtgaatcaatatttggcccgcgcgaccgcgacgcgacacgggatcggttgggtgggagggcagtcgcgccatttcacagcctaagctagcttactgctgctgttaatcaacggagacaaagctctctttccctttcgtttcctttttctttttctgccgaggattatccagctggaggagagtggtacgtgtcggaatgcggtggaatatatcgatgattagacggtaggaacaattaattagaagcaggcaagcagctggttggttggcccggcctggcacctggcatgatcattgggaggttcatgtaattactgcgatgattagatactgcatgtaagtaaatcatgtcatagagataatacacctgtgtacagtggtataatgataaacggttcatttggtaaaaaaaaaaaaaaaaa

SEQ ID NO: 22735 - DNA, 1778 bp, Oryza sativa
  Clone ID: TF_OsC20197_1
cggcgcccgggaggagaaggactccattggcgacaagctaagcttagctatagctatagctagctcagcttagcccctgccttccaaggagcgaagaaacgaggcatacatacacccatcccctcctcctcgacggctagctgctacctcgtctgatcgatcgatcgatctcctcgtcggccatggcgcagcagcagaagaagaacgcgcacgtgccgaaattcggcaactgggacaatggcggcaacgtgccgtacaccgtctacttcgagaacgcgcgcaagggcaaggtcgccgccgccggcaagatgttcaaccccaacgaccccgtcgacaacccggaggccttctcctcctccatcgccgcgccatcgccgagccgagcccctcctcctccgccgtcccaccacgagcgcgccccgagcgacgcgccgccgccgccgccgccggccccctacgccggcggctcgccgtaccaccgccacgccgctggtggtggcgagacgccgccggcaagaagaggaggcgggcggacaagcggcggcggcgggtcgtcgtacagcgtcgagcactcgccgtcgccgtcgccgctgcacccctactccgacagcgggagcggcagctacggcggcggcctcgtcgccaactcccgcgccaagggcggcggcggcggcgccccgcgcggcaacgagacaccgacgagggggtcggcggtgccgcggttcggcgactgggactcgaacccggcgtcggcggacggctacacgcacatcttcaacaaggtgagggaggagaagcagaccggccaggccgccgggaagccggcggcggggctcggcaagggcggcgccgccgccgccggccacggcaacgccgccaagcgataccacgacgacgacttcgcctccacggttattccaaatatcataagaatcatgagtactgcaagtactgcacgctctaggaagcgagcccatgatggatccagacaaaaagttgatgttataaacttggaaacaactgctccagtggtgaacactgggagccagcatgaggctctgatccttaggggtacacggacctcacccatcgatgttgaagctctagatgataaaaggaggagcagaaaaattatgaggcgctctgtggctgtagtggatccggagaaggatactggtccgggaggttatggcgttgctggagctatattttcccggggcagaaattttcagggtgctgtacatgttatatgcctttctccagatagggaagaagggaccagcaagccgaaaaatgtggcccaaaccagtacgacgcatgccaaggttgctccaaaggaaccaacctttacctgtcctgtgtgtctgaacaaactggacaagccatccacgacaaattgcggtcatatcttctgcgagaaatgcatccaggcatggctcaaggctcagaagaaatgccctacttgtaggaagagtctagggatcaagagcttccatcgtgtttacctccctactcctgctgattatgattaattagtttctgctggcctgaacctcactagtccactcctgcacattcatcttgtgtgcaaaagaacttgagcagtagttagagttagacatttagtctttgtttgttagccctgtaggctaacaatgtggtaagaagtgcacaacacgattcttagctcattgactacatctgatctgatttgtatgtaatggcgtgcatttttctcctgtgggttctgaaaaagggaaaatatctagttttccaag

SEQ ID NO: 22736 - DNA, 1755 bp, Oryza sativa
  Clone ID: TF_OsC50470_1
gcccacgcgtcctatcctctttccccttccaccgccactgcgccgcaattcgccttcgctgcgggcatctgcagcagcagaatcatgggctgaaatcgaaccactgcgcgacaagggtgccaaggataactttattgtgctgctgaaggaagacatcttattgacctgctagttctgtagatgatttttggagtgctataaatatcgaggcgcgagttcggactgcaagatacaacacaagagtgagaaaagaaaggctttagctgagttacaggatggaacaaggtcagggagatagatactggtgccaccactgcgaggaagtgatcgaacctgtggagcctgatatgaagtgtcctagctgtgacagcgggttcgtggaagagatggggtctgcaggctttgagccatcgaccaacttgaggtctgatcgtatctccctctgggcaccactgctgctcgggatgatgggaggctcatcgcggcgagcaaggcggctccgaaggcagatcatggaggatgatgacgacgacgatgacgatgaggatgatgaagatgattcagaccatgagcttgaagacttgtttaggaggcagaggaggggctcatctcttgtaaggctgctccagaccctccgggatgacttgaggggcttggatgacattggcagggatagtgacagagacagggaaagggagagaagggagagggagaggctgagggagcgggagagggagagggagaggatgagagagagggagagagaacggaggagagaaaggacagaaagcttgatactgatcaactccaacaatgaggccattattctccaaggaacatttggacctgatgacaaccaggatgactcgagcaatacaagttctggtgtttcacttggtgactactttcttggtcctggattagatatcctcttgcagcatttggcggaaagtgatcttaatcgttctggtacaccacctgccaagaaggaagctgtagaagcattgccaactgtgaacatccaggaagtgttaggctgttctgtctgtcttgaggatttcgaaatggggacagaagcgaaggagatgccttgtcaacataagttccactcccagtgcatacttccatggctggagctacacagttcttgcccaatctgtaggtttcagttgcctaccgaggagtcgaaaaacccatgtgaatcagccggtggaattgtgtcagtgaacgatgatggagatgatgctggtacaagtagtgacgtagatagtgctaaccaacctggtagtcctatattctctgctttgagtgcacttttctcaaatccatcatcctcatcctcatcctcatctgatgataatgcaccacactcttctgagagctgaagccagcgctgggcctgggcttgcaatatgtcaatggagttctgaaatgggactcctgagaggccggcatctttatatctcgtggtttctgtacatattttaaagtttaatccgctagacaagctattcgcgtttcctttatgaaacctgtgtggtttgtaatcagtttggtgcctgttatgtctaattatgtaaaataaaatttagcctcaagcatgtttacctactctcaaaaacttgatcggggccagagaactgctgatctggttagcagcttgaccaatgcaaggctacttcagtactatatatggggatatccaacattggcattttgcacggcgggggccctgcagcccgggaaaaaaaaaaa

SEQ ID NO: 22737 - DNA, 1542 bp, Oryza sativa
  Clone ID: TF_OsC29695_1
atggcgacgcctcgctccccgagcacccgcggcgacgcgctccttgactcggcgcccctgctcggcgggggcggcggcggcggcggcggccggcgccgagggggcgcgctccgccggccgtcgctccgcggcgcggcgcggctgctgcggcgcggggggcggcgggcgatgcgggagccgtcggtgctggtgcgggaggcggccgcggagcacctcgaggagcggcaggcggactgggcctactcccgccccgtcgtggcgctcgacctgctctggaacctcgctttcatcaccgtcgccgccgtcgtgctcgtgctcagccgtggcgaggactcgcccatgccgctccggacctgggtcgccggctacgccctgcagtgcgtcgtccacatggtctgcgtcgccatcgagtaccggatgcgccgggggcagcgtgacagggccccggcgtccgccgacgaggaaaggggaagtgacgggtcgtcttcatctagcgatgatgatgtcacggaggacgatcgccgtggtagctgcaccgattgcgtcagtattgcaaagcacctggagtcagctaatacaatgttctccttcatatggtggataattggattttattggatatctgctgggggtgaggatgttatccgtgatgcacctcagctttactggctttgcatagtctttctggcatttgacgtgttctttgttgtattctgtgttgctctggcttgcatcattggtattgctgtatgttgctgcctaccttgcattatagctattctctatgcggtttctgatcaggaaggagcgtcagaagatgatattcgccaaattccaagatacaaatttcggagaacagatgaacctgaaaaacaaactgctgatgagacaggaccttttggtggaataatgacagagtgtggcaccaatcaacctattgagaaagtactcgcacctgaagatgcggagtgttgcatttgcctttcggcatatgatgatggtgcagagctgcgtgaacttccttgtgggcaccatttccactgtgcctgcattgataaatggctgcatatcaacgcaacatgccccctgtgcaagttcaatatccggaaaagtggcagtagcagtggaagtgaagaagtatgattgtgtgaatatcctccggtcgagaacaccgatccatttcaacttcacacctgtctctgctaatgcaaccacaggacctgaccagtgtaaattttgtatccaaaatgtgtgattagcgtcatatatgtacttgaagtgactcaagactgctgttcatatccacatacatggttgtccaatgtgtcttttactgtccggaatatatgcttagttgccccgtgagttgtaattcttcgagtgatcctcacatttcctgcttgtgttagcatggtttgtgcttatgctcctgccttggtcattggttcagcacaaaaactgttgtaaatgggctatcggtcctgttgaattgtcaggtacaaacgaaatgcgtcctgcttatgattcaaaaaaaaaaaaaaa

SEQ ID NO: 22738 - DNA, 825 bp, Oryza sativa
  Clone ID: TF_OsC229931_1
gcacgaggggtagtagtagtagtagggctttgctctggtcttgcaagttaggttagtgattagtagcagcagaaagagtggaagatttagaggatatgttgacctgctcgtatgtcggatacagccttgtcgggcgcgccgccggcggcgaggtcggaggattcgtggagtcagcagcagagctacaacttcagcgggcgcgtgctgctcacggccgtcgtgatcctgttcgtgatcgccgtcgtcttcgccgtcacccgcgtcttgctgtactacctcgtggtgcggcccggcggtggcggcggaggccgtcgtcgtggcggcctggcaggggggatcttgcggtcgttgaactcgctcggcgtgagcggtcgccgcgggctggacgcgtccgcgctcgccgcgctgccggtcaccgcgtaccggaagaacggcggcgggggcggtggtggggagggctccaaccgcggcgggcctggcgccaccgccgccgactgcgccgtgtgtctgtcggagctcgccgacggcgagaaggtgcgggagctgcccaactgccggcacgtcttccacgtggagtgcgtcgacgcgtggctgcgctccaggaccacgtgcccgctctgccgggccgaggcggaagtacccaaggcgagggcttcggcggcggcgacggcgacggcgcagtcgtcgtcgtcgctcggtgacggaggaattaccgtggtcgtgaccatacacggcggctctgacgaagccggtggcaggtcaacggcgttgactggtcaaccgggatcctcgaactctcctagctgcgaggctgcaaggaattga

SEQ ID NO: 22739 - DNA, 1398 bp, Oryza sativa; identical to SEQ ID NO: 13664
  Clone ID: TF_OsC188649_1

SEQ ID NO: 22740 - DNA, 1571 bp, Oryza sativa
  Clone ID: TF_OsC30324_1
tcggtgacgaaggtgaaagggaagcgcgtggccgccgtcgatgttgccgacgacggttctgctcatgggactgcacagtaccctggttgcactgtggccagctcggcggcggcggcggctgtggacgtggagaaggcagctaccaggcaagttcgaacatagaaaacgaacagaagttttgagtgagaaacttgaacagttgaacttgacgtcatgcattttcccacatgaaagaaagaaatggtctttttttgtcggtgggactgtattctgtactcctatgttcgaacttgcctggtagctgccttctccacgtccacagccgccgccgccgccgagctggccacagtgcaaccagggtactgtgcagtcccatgagcagaaccgtcgtcggcaacatcgacggcggccacgcgcttccctttcaccttcgtcaccgacgacgacgaggatgatgacacttccacctgggtgctatccggcgttctcctcgacgacggggagaggaaagacagctttcctgacaaagaatttgagagaaaagatgaccatctgcccgaccgcgaaaaccgggggctgcaccgagcgcccatgccgaccccttccccgagtctcctcccgcggcgcacgctctgctcccccgccgcgaccatctccctgtgtacgtgctccggcagccgcagcgtgtaccgctctaggtcgccgtcgagccggacggcgagggagtggccagtggagtgcgaccggggaagcttcgccgccgacgtctttggccgcagccccgaccgtgaccgcatcgcgcggagctgggtgcctatcgcctgaagctctagctcctccttcctccgctcctcgtcgtcctcctcggtgaccacgtcgatcaccacggctgctgggtgcgccccgtcttcttgccgtatcacaactatttcactggaggtgctgttcggatcggcggcggcggcggccgggatgatcacctcttcggtggtgtccttgttagggtcgagattgcggcggcagacggggcaggtcacgtggctggcgagccactggccgatgcagtccgggtggaaggcgtggctgcacttgggcaggaacctgagcatctcgtcgtcctcgaactcgctgaggcacaccgcgcactccagcgcggcgccggcgaccttccccacccgcagcgccttcgcctcggcgtacttcatggtggggaacatccggaccaccgacgagtcgagcccgcgcggccgccgctgccgcctcgagacgaagctgttggcagggaggatcatggaacggctcccgccgacgccgccgccctccgtcgcggggtcgtaaccggtgcagtggcggaggtagatggtggagatcgcgatgaacaggaaaaccccgacgacggcggccagcagcacgatcatcgtcgtgctgacgtgcacctgctgcccggacacgtcgccgtaggcatacccctgctgccccgccggctgcgctccggccgtcgacgacgacgccgcgagcgcgcacgcgaggagcgccgcgagcagcgcgtgctggtgctggtgcgcgtgcat

SEQ ID NO: 22741 - DNA, 617 bp, Oryza sativa
  Clone ID: TF_OsC66084_2
gattataatagacgcaggaaataattaatagatagatgtgctgcgtatatatacactgttgatgggtggtaaaaacagcgatccgatgagaaagatggatcatgcatatacaaccaaatcggagtacgtagctagggaggtgtgttgtggtgggcggtggcggtggcggtggagaaatcgtgcagcgtgggcaggtcgacctccccgcacctccggcagcggccggggagagggaggaataatgtactagtcccgacggtggcgcggcaggaggggcaggtggcgtgggtccccagccacgtatcgatgcaggagacgtggaaggcgtggccgcagtgcggcagcaagcgtagctcctcccccccggcgaactcagccaggcagatggcgcactccgcctgctgctgctgctgcttgagtgcgaaggacacggtggggagcgcgtcgatggctttcttcttcaggcctttgggtgcaggggatgtagcagccggtgtagtagtagtggtggtggtggtggtagcggcgcctcggcggcggcaggcacagcgggccacgagggccaggccggcgacgcagatgagggcgcagaggagggaggccaggatgaccaccat

SEQ ID NO: 22742 - DNA, 618 bp, Oryza sativa; identical to SEQ ID NO: 13654
  Clone ID: TF_OsC344781_1

SEQ ID NO: 22743 - DNA, 947 bp, Oryza sativa
  Clone ID: TF_OsC306848_1
cccgggctgcaggaatcggcacgaggcccccccccctttttttttttttttttttttttttttttgggactgaaaatacacttaatgggctacttaaaataacccagccaatactactgaatactaagtataaatcaataatatgatgctgcggggctgacagcatctgcagctgaattttatatgaaatttactcaatttaattaagcagggagcaccggggcagccaccctgcaggtgttgtgagactggcaatggcagcacttgtgccctgccaccctcgcgtacacctgcgtcgtgtccctgcagtcgttgcacacgatccatccctttcccatgtaatctatgtgcagcatatttgcttcaatctcagcgtccaaagccctcaagaacttgtccatgtcaaagataggcatcgagcatatgggacaagagaacttgtcgtgcttcagcatctcgtggaagcattgcaggtgcatcgtgtgcccacatctgagcacggacgtctcccttagagagtcaaacagatactcgtaacagatggggcagttgttcttcatggagttctcgatgcagcagtgcttgtcgcgcaggctgaccgagtagcatgatcctgcagatgccgcaatcttggcagtggaagtgttccctgtcaaccagatccagcagaagcaaagcaagcagcatcggcatctcacgtcgtcgtcgaagaatttgcacgcgctgcagaagtactcgcccatgcaaacgccgcagttgtagcacacttgcgcaaccggctgttcggtgtcacagacgagacagataaccgtggactcgttgtggcaatggcggcagtggaagacgtcgttgcagcacggcgcccggatcctgcacctcctcctgtagtgcttgcatccaaatcccatcctgccgaatccgtggcgagacgcgtcgtcgagctccat

SEQ ID NO: 22744 - DNA, 1680 bp, Oryza sativa; identical to SEQ ID NO: 13655
  Clone ID: TF_OsC47408_1

SEQ ID NO: 22745 - DNA, 2638 bp, Oryza sativa
  Clone ID: TF_OsC21047_1
ttcagatggaggattgccaagatgtcgctggggctcaacctctgcgtctacgtgcccaggacgctggacgacggcgactcgccgtccaccgggtcgtccacggcggcgctggtgtcgccggtggcgtcctcgtcgtcggcggcgaccagcgccaacaccacgcccacggcggagcagagggtcaagggcgccggcgcgctcatgccgaccaccccgacgccgacctccgccggacttcgcctctccaaatccggcagcaaatccttcaagaaaacatgtgcgatatgtttgaccacaatgaagcctggtcagggccatgctctattcacagcagagtgctcacatacctttcacttccattgtatagctgcaaatgttaagcatggaagcaacaattgcccagtttgccgcaccaagtggaaggaactcccatttcgaggtcccttgcctggtgaatttcctcaaggaagtgcaaggattaatccagttaatgggcaccaaaatggcgggcagatgaccatactgcgaccacttccccgtgctcgttcttctggtcggctgcatcatatgacatcgttgttgcctgacactgaccgtagtatttttaacgatgatgaacccttggactcactgtctgaagcaaatgaaggctcgcagcaggggtgtttaagaacagtggaaataaagacatatcctgagttcactgaagttccagaaagtacttcagaaagaaattttacagtcctagttcatctaaaggcaccccttgctcagactttgcaaacaagcagcaaacttgaagatggcaatagcttgggcacaactcgagcccctgttgatctcatcacagtgcttgatgtcagtgggagcatggctggtaccaaacttgcattgctgaaaagagccatgggatttgtcattcagaaccttggctcctcagatcggctttctgtaattgccttctcatcatctgcacgtagactcttccccctccgtcggatgactgagactggtcgtcagcaaagcttgcaagctgtttattcactgacatcaaatggtgggaccaatattgctgagggcctgaggaaaggctccaaagtgattgaagatcgacaggccaagaatccagtgtgcagcatcatcctactatcagatgggcaagatacatatacagtctcaccaaccgctggtgtacacaaagcagcaccagagtactgctcactcctgccatatactagtaatggttgtcaacaggtaccagttcatgtctttggatttggtgctgaccatgattcagtctcgctgcattcaatctcacaaacctccgggggcaccttttcattcatagagacagaggctgccatccaagatgcatttgcccagtgtattggtggactcttgagtgttgttgcacaggatttgcatgtaaaggtggagagcctccaccctgatgtacactttggctcgatcagatcaggaagctattctagcagacttgcagatgacaagaggaatggctccatagatgttggtgacatgtatgccgaagaggagagggatttccttatgtcagtaaatgttcccccaggttacggtgaaacagcacttctcaaagttggctgtgtctacaaagatccactgatgaaggagactatcaatatggctgatgtgcaagtcaagatctctagaccagcattcgtctcagtacaaagcgtgtcaatcgaggtggaccgacaaaagaaccgtcttcatgcagctgaagtcatggctgaagcaaggttgtctgccgagcgtggtgacctgacacatgctgtttccttactcgaagactgccggaggatgatcatggggtcaacatcaggacaatccggtgatcggttgtgccaagcattggatgctgagctgaaggagatgcaagaaaggatggccaatcgccaaaggtacgaagcatcaggccgcgcctatgtcctctccggcttgagctcacactcatggcagagagcaactgcgcgaggtgactccacagacagcgagagcctaatccaggcctaccagacttcatccatggtcgacatgctgctgcgctcgcagacaatgagccgctcctcaacccctccacagatgaggcatgtgaagtcgtttccagcgcgcccgcagcctaggtaactgcaatttctagtgtttggcaacgccaataaggatgggttttgctaaagcctagatgtgaatttggtgaaagtagtagtgtcagttgaattcttggttttgtggcgggaggacgggacgggggtatagtttgtgtggtataagggggattttaacggtgtaaattaatttgggtgtggtgggggtaaaagggaaaaagaatctgtatttgggagaaggatggtataagagttggggaaatggggtaagatagggtggctattattttttttttccttcttgttggttacctggtatactcccagtattgtactagtagctctcctctctcctttgtgtggtgatgtacataaagagaagggtatacatttgtgaactggaatgtggttgaggatggggatggatacctaatccttttgcaaggcttggcttgcctcttcctggaaattgaaaattctgatcatggccactt

SEQ ID NO: 22746 - DNA, 834 bp, Oryza sativa
  Clone ID: TF_OsC77502_1
ggcgtcgtgcgtcgtgtgcctcggcgcgctcgaggcgcgtcaccgggtgcgcgagctcggcaactgcgcgcacgcgttccacaaggcgtgcatcgacaagtgggtcgacaagggccaggccacctgcccgctctgccgcgccgccctcctcccctccgccgacgacgccgacgccgccgccatcgccgccaccaccaggcaccacctcccctccttctgatccatgtcgccaagaacccatcttgcttagcacccaacacccccttccaccccaagagcaacaagggttccctcctcctttctccaccaatggatcaaatccaatcaaaatggaagaacacacaacacaagagaagagagatagagagagaaatcaatggaggaagaagatgagaggagagagagggggtgtgtgtggtggaggagtattattggtaggggaggcactaattatgaggaggacaaggatggctacctgcactgcattggatctggtgaatttcagccctagctagctatagatccaacatctcctcttttcccttctcttctcttctcttcacttcacttcacatcaactttttctttgcttttcttttttctactttactttcttcttttgttgccttcacctcctttttgaaattttgctttctttctctttaatttttctccctctttttccttcttttttttgagggtttcctctccccttgtcattaacttaatttgtaaggggggattaagagagagagatgtgtacatacctgcctccactttgacaaatattggaataataatttataatgatgatgatgatgatgataatatagt

SEQ ID NO: 22747 - DNA, 2192 bp, Oryza sativa
  Clone ID: TF_OsC1528_2298
atgacctcgccgggcgcctcctctttcgccgccgcgctcgtcgtcgaggacttcccgtgggtgaagagggaggaggagatggggatggacccggacaagtaccgcgaggtgttcgacctcgcgcagcgcggtgctcgcgccttccgcgacggccacttcgacgaggcagtttccttttactctaaagcacaaactttgagaccaggagatcccattatccttagcaaccgaagttctgctttctgtatgataagtcaagtgttgagggagagatcagcagctgactcagagtaccaaccattgaatggtcttgatcccacaacgcatgcggaggtagcgctcaaagatgcagagaaggtattagctatcggcagtaattctccaagaccatatcttctcaaggcatatgcgcttatcctgttaatgcttactgttggctgcttgttattgcctcctctaggtgctatgcatgacctgtacatgatattttctcccctcataagaaaactcatccttaagcagcacttcagaaaaccagaaaattgccccatctcgagtgccatcctcttctcaataagagtaaccattgaagttctaacagaagccatcacgcagcgccgccgtcgttgcatcgagctatctatggactggatgcggcggctggggatggggacgaatgatgaggacgaagtgatgggtgctagcctgctaggtttcactttcacctccctcaatgggctgcttagtattggtgacttgacttctcatgtctctctggctagtagttgtacttatgccaatgtccttcaggtgttggagcagtaccatgaggcacgggaggctattctttctgggcttcaagttgatcccctcagccatgtcctgcaaagctggctcagtgatctgcacagaaatacaagtattgcagctcgagcaagacgtccaacattagatagaccagatgattttgagtgcacattatgtttcaagctattgtttgaaccagtcaccactccatgtgggcactcattctgtcgctcttgtttacatcaatcaatggatcatggcaataaatgtcccatgtgtcggacagttctttttattggtccaaaaacatatcctataagtgtaacgctgagcaacataattcagaaaaattttccggaagaatatgctgagaggaagtcagaacatgagactatgacatatgcaggcgttgatttgatgcctctctttgttatggatgttgtactgccttgtcaaaagatggcactgaacatatttgaacctcgctacaggctcatggtaaggaggataatggaagggaatcatcgcatgggaatggttggtattgattctgctacgggtactgtagctgactgtggttgtgaggtggaaattctggagtgtgagccacttccggatggtcgtttttatctagaggtggaaggttcacggcggtttcgtatcttgcgatcatgggaccaagatgggtatagggttgctgaaattgagtggctccaagatatttcattaccagacggatcgcaggagagaaaagatctgatggaaagggctaatgcagcttcagaattggccaggacatatataaggcgagctagagaaatctcaaggcctgcgaggcgagcaagacagacagatcttgagagcatgcctggaccacaggatcctgaaaaatttagtttttggcttgtcaacttaataaatttgaggccgtcagacaggttggatctattgcgccttagtgatactcgagagagaatttctcgtagtcttagattgctgggtgatgcagaacaaatttgtcgtgtacagtaaaagatatatttgttgcacaagcataactattgtaacaagtgatttattcatcaagaggtacatactcctatgtacactgaatgatactgtagagtagagttgtcgtcatttttgatttattcaaaacaatgatttgtgcaaactcatttttgtaacttgaattgaatctgttgtattattcttgcaattgctgtgttcatgtggagcctggggacaggttgttagggatcattattgtatatatttttacattatttcatatatattcggtgcttgtacatatggcatcagttgcctagcgtatgtaattaactgatggctcttttgttttgtaaaaaaaaaaaaaaaaaaaa

SEQ ID NO: 22748 - DNA, 912 bp, Oryza sativa
  Clone ID: TF_OsC3651_2
gagacgaccaaccaaatccttgtcccgtccgttcggtcgccgcgtcgaggaggcagggagctcgcggcctcgcaccaccgccgccacccccccatgacgagcgcctccgagctcttcaccgcccgccgcgcccgcgccgcccgcctctccgaccccgatccggacccggatccgcctgcggacgcgctccatgacccgcacggcctcgccgatcgccgcggccggcgccggggctgccgcccgcgccgccagctcgacgccgccggggacgtccgccagcacctgcacaccggggccccgccctcccgccgccgcgcttcgtacaccgatcgtgtcttatcatacatagacaatagcaacattggggactctgcaactaggaggaaccgactggataggctgatgttcagaacaaatgagcggcttcctggtgctgtactgcaagcacaagcacgtgttctagagagactgagaggcatttctattggttcatctgtgtcaaggccatctatcacattggatgaattttcagctactgatgtgtttagaatcattgacttcgggaacagggatgctccatatgaagcaaataggtccagctcatcattggcccatccaagtagcgagtcagatgaagaaaggtcacccattgacaccagttccttaaaaagatcacgtgggctgagcaaggcggccttccttcggctacagatagagatttttgaggcaagcaaagatgacaacagggaggcatcaccagaatgctcgatttgccttgatggattctatgacggagatgagctcataaagctacgttgtgggcacaggtttcactcgaattgcctggagccatgggtacggaaatgtgctgattgcccatattgtcgaacaaacatacagtcacgatcctga

SEQ ID NO: 22749 - DNA, 680 bp, Oryza sativa
  Clone ID: TF_OsC264554_1
gcacgagggcgctgctcaatctcccacactgctcggcagcttagctagctcgcggctcgcttgatcacgccatttttcttcgattcgatcgatctcctggtgtgccagccatggcgagaatgctccttgaggcggccgcctccggctcggtggaggactcactcaactcggacctcgtcgtcatcctcgccgggctgctctgcgcgctcatctgcgtcctcggcctcggcctcgtcgcccggtgcgcgtgcacgcgccgctgggcgcgggccgccggcggcgggacagcggctggcggcggcggcggtggcgccgccgcggcgaacaagggcgtcaagaaggaggtgctgcggtcgctcccgaccgtgacgtacgtctccgacggcggcggcggcgaggcggaggagtgcgccatctgcctcgtggagttcgaggacgggcaggccgtgcgcgtgctgccgcagtgcgaccaccgcttccacgccgcctgcatcgacacgtggctgcgcgcgcactcgtcgtgcccgtcgtgccgccgcgtgctcgtcgccgccgagatgccccccggcgagcggtgcggccgctgcggcgcgcgctccggcggccgcggcatcggcgcgctgctcttgaattactggaaggcgccggcctgcgacgccgaggggccagagttggcgtag

SEQ ID NO: 22750 - DNA, 1321 bp, Oryza sativa
  Clone ID: TF_OsC12875_1
gtcctcaaggtaaaattaattaatgcagtatagttttaactttgtccatcgatctcaacctgtaactgtgacgacacactggctagacagaacagcaaacgtttttttttaagagtaaacatgtaatgcgttaacatcatcacgatttcaagctgattcaaggctacgtcaacaactatggagagaaggtaaggtacatggccaaacgcatggtaaatacaacagtacacaaactagataaatctaaccaatggggactatagttagttttgttgtgtatcctttggaggcagagaggccattcggtagcctaaaccagagttgtcacctgcagctgatgagctcctggtgatgcatctacatacaaacaacagtagccttggatgaacatgcgggtctaggtggtcattttgccgtgacacaattccacagcaaaatggtacacgttatgggagaactcctgttcctctgaatatattagattggaggatgctgctgctgctgccagaagttcctttggtacatccaatgagccttaactatcagagtttggaaggtaaatacggtggaaattgttcgccctcagactctttctgcaagtagggcatttcttctgaatctggatggcttgcttgatgcatgtcgtgcagaagatatggccgcaaattgttgtggagggctcctccaacttgttccaacacaccggacagttaaaaaccggttcctttgccttaggaggctcattgctagtcttcaagctggacccttctcccctttctggagagaggcagtgtataacaggtgcaaccctttgacgtttgttcccttcccggctagcatctacttccagatcaactactgccacaggctgcctcctagttctccggttccttctcggaggaggcacttgcgaagcggacaatgtctgcacttcatcatccagagcttccacatcaatgggggaggcgcgcgcaccagtggaggtcggcaccgcgcgacggcttccaaccactggggaggagatcgcgtccaggttcacaacgactttatcaccaggaccatcttgtgattgcctccttggggcacgccgagtgccgctgacagtactcatgctaactttggagctgaatcagtggcactcaactctgaaatcaacctgctcgaatcctcgatccagccgcgcggctcgatgaggaggagaccgcgatttttttcttctttttttttcttttttttttatcttgaccgcgatttatttcaatttcaacacgagtgaagagagaagaagaggagaggtcccggcccgttctcggacgcgtgg

SEQ ID NO: 22751 - DNA, 633 bp, Oryza sativa
  Clone ID: TF_OsC17688_2
ttgatgatgatgatgataaggatgatattgatgattatgataataaagatgaaaccgggggatattccccaggatgcatgggaagatgttgatcccagatgaatattcttatgaggagctggttgcattgggtgaagtagttggtacggaaagcaaaggcctctctcttgatacacttgcttcattaccttcaaaaacttatcgagcacaagataagcaagacggcaacatggaacaatgtgttatttgccgtgtggaatttgaggaaggtgaatcattggttgcacttccttgcaagcattcataccattctgaatgcataaaccaatggctgcaattaaataaggtatgccctatgtgcagtgctgaagttcctacttcacaggacacccgggcatgacatcactacatattgtagccattatgggcgtataatttaaaagaagtagcggcagcttgatactttctgtcatcggtgaaatggaagcatcaggagctggtggattgttcaggtctctgtacttgtgtgcttcctttgccatgccgctacattgggtcgtggttaagacgctcattgtcgcccatgtatgatttgattagatgtgaaatagttattacatggttgcatcattc

SEQ ID NO: 22752 - DNA, 1387 bp, Oryza sativa
  Clone ID: TF_OsC20575_1
ccgggctgcaggattcggcaatttcttcctagctcagctttcccctcttctccttctcctcctactacccaatacgactactactagttttctttcttggccatcatcatttgttcctcatcttactctagcttctccattccaaaattcaccaccgccggcgccgccatctccattccaaaatttgctctgcgtcgagtcgtgtgatcgatcgatcgatcgatcgaggtgtacgtgtgcgctgctggggaaaagggaaatggatccgtcgggcgccttcttccacgcggctccccggagcggctcgaatgtgtcgctggcgtcgctggcgaggacggccggagggaggaggatgatgcacagggtcttccgcggcgtcatcaccttcatcttcgccatagctggactgtttcttggagcggtgactggcgggctgatcgggctggccaccgagagcggcctcttccgcggcaccggcatcggcgccatcaccggcgccctcgtctccatcgaggtcgtcgactcctccatccgcgtctggcgatcccgccgatccgggatctccagcatctgctatgtgcttaatgtgatctacagcctcctgaccggcaggcttgtccgcgagaaggtcgatccggcggtgcagcgggtggtccggagccagatgaatgcagtggattcatcgcccttcagggagtcccctgacctgttcgagatcgagggcaccaacggcatgccacgggcatccatcgacaagctcccggaggtcaggatcactgaggagtacaggaggaacgccattggtgacctctcgggatgttcagtttgcctccaggatttccagacaggtgagaaggtgaggagcttgccggattgctggcacgtgttccatgtgccgtgcatcgacggctggttgatcaagcatggatcctgcccgttgtgccggaggaagctgtgagatcgacgacgacgacggccatggtgatcactgctatagttgtagcagaaggaggaggaggctgctctgctttcttgctgtgtgctgcgatcgagttgtccatcagtgttgctgttcttagagaagaagactgacatctctctctctctatatatatatagaaaacccttaatctatagagcattttgtttctgcttatattgctacatgctctatctttttggttgaactatctacatatatatctatatttctatctactcactcctttctccttatgtaacatacctctcaaaactctgaactggcttgtgctgatcatctgatgtataatatataatatataaatatatatcgccccttggacaccatcgcactagtgcccaatccctcccgcctcggccgaattcctgcagcccggggatccac

SEQ ID NO: 22753 - DNA, 708 bp, Oryza sativa; identical to SEQ ID NO: 13372
  Clone ID: TF_OsC55101_1

SEQ ID NO: 22754 - DNA, 1439 bp, Oryza sativa
  Clone ID: TF_OsC60330_1
tattttttcgccttttctgttcgtgtgttcgtggtggagttcatctcgccttcccctcttccggtcctcccaccgctcctcgccaccacaaaccgccgccgcctcctcctcacctatctgtgcggaggaggtataccacaccttgggattttggggaagcagtacgttgattggaagaaatgtcaggaggtaggcaatcatactggtgctaccaatgtagacagcgggtgaggccccgcggccaggatatggagtgtccctattgtgattccggttttgtgtctgaaatggatgatgttgatgctctcatgcgccactttgttgggatggatcctgatttccatcgtgatccaagattcggtatcatggaggcaatctctgctgtgatgaggcatggcatggcgggaacgaaccgggaagttgatgtgagaggaaggccaaacatattttctgacctggagatggagtttggctcagggccatggttgctcttccgtggccagcttcctggtcatctctcagaagacaatggttttgatgtattcatcaatggacgccgtggtgttggcatgcgcagagcaaacattgcagactactttgttggacctggactggatgatctgattgagcaattaactcagaatgatcgacgagggccgccacctgccactcaatcatcgattgatgctatgcctactgtgaagattacacagaggcatctcagtggagactcacattgccctgtctgcaaggacaagtttgagctgggatcagaagcaagggagatgccatgcaagcatttataccactctgattgcatagttccttggctggaacagcacaattcctgccctgtttgccgatatgagttgccaccacagagctctactggtgctagctgctcgcgcacaagatcaaccaaccaaagtcagagttcaagtagcaatgggagaaccaatggacgtcaaaggagaaggaatccgttctcgttcctatggcctttccgatcatcaagctctagctctcgttagattagcctggtaatctggttggagtcctcaagactgtttaatcgaagatgctcataaaatgggtgttatgcatggcatcttatcgtccaatctgtaatgtatggcttgttatgatcaccacggaatgcttttccttgcaagtatatccttccacagcttcatatcagatactaattttaaaaatctgtttacataaaaggttaacgatagtatgatacttgtttagatagctagagaaggttattttcttaatgttgtattacttaatgttctacagcagaatatacttctgtcaactgtcattaagacgtttttttagctgtaaatctcaagggatcaatggtagcaagcatgatgatataatatagaagcaagttgcctgaaatttcagttaaataagtactagtt

SEQ ID NO: 22755 - DNA, 768 bp, Oryza sativa
  Clone ID: TF_LIB4309-008-Q1-K1-B7
caatcctttgagagagagcgagagcgagagcgagaccgtgcggccgtgcagggatggagagcttcaggaggttcctgaacccgctggtgctcaacctgcagaagatggagctggagctcacctgccccgtctgcctgaagttgctcaacgcgcctaccatgctgccatgttaccacacttcctgcagcaagtgtgctactacacggaccatggacggttacagctgcgcgatttgcaaatcagcttatcgttctcaagacctaaggcctgcctctcacctcgaggcaatagtgaacatccacaggagcctaagctctacagtcagcagcatggtcactcagcaggaggctcaagctgatattcctgttgcaaagacatcatttcaaggaactccagaatcgggaaacagaaatggagcagagaaatctgatcaggtgaaatcatacaccccggttgcttctaaactggcatataaccagtcaactgggcttgcatatggaaatgtggacggcgtgaaagaaagaaatcctgcattggagactagaggtgcggctgatgtgactgctatgcccacaattcttgtgcagaagggaccctgccgatctcaatcttctgatggccctagggatctggattgcgacagcaatgaccttgaaggagagctgataacaagcagatcatctcctcaaagtgtcttgaaaagagaacccaatacagcgaatgatgataatagagaaataaaaaggcaaagtccactgatcaggatga

SEQ ID NO: 22756 - DNA, 562 bp, Oryza sativa
  Clone ID: TF_OsC2184_2
ggctgataagcaatcaatcgataatgaccttttatgccagttgatgaataaaacacatggatatacaaaatatcgggcctaaacccacaaaacagagaattagcaccgaaggcaattaaaacaaggctttacaagattgcgcaacctcccgccgataccactgtcgtctaaagatagaaacgcaaccactgttgcaggcgacttccttctgttttcttgagtctaagggcagaatattcatggaaccgaattgtcacctttatgtgatcccaaacttgcaaactggacatagtttcttcctttttagccattcgtctatgcattctttatggaacatgtgaaagcatggcaagcgggggatcgtatcaccaatagagggattatcaaggcaaactgcacacgggttttcaatatttgactggattactgactgaggcaaattattgatctggctttctgaagcaccagcatgctggggggtattttcatctaatgcaagcagggcatcataatcattttaatcaatattaggttgaatatgtgcagcagggtatctggaaag

SEQ ID NO: 22757 - DNA, 582 bp, Oryza sativa; identical to SEQ ID NO: 13381
  Clone ID: TF_OsC400245_1

SEQ ID NO: 22758 - DNA, 1509 bp, Oryza sativa
  Clone ID: TF_OsC46801_1
ccggactgcggcatcccgcgctcaccctctgtctccctgatacccacggatccacgccggcggcggtctccctctctctctacgcctctcttctccccgtcgtggcggcggcggcggcgaccggcgagggcgacgccaccgatcgggggcctctcacccgctcccctccctcactcaccggggcctcggtttcgccagctcggagggagttctttctctctctccgtagacgtctccgtgggttcttgcttgtctctgattcttcttgtggattggcggtggaggagcggggatcgatcgatctacccctggactcggattgactctcctctctcgctgggctatgagagacggaattttagttttaaacggcagctatttcatagcctggagtaagctttttcattcagattagcatggggggctgctgttgctgttcatcaagaggatctgagacagatagagcaccagttcatatctatcgtcagcaaaatcaagaggagcatgaaccattgtcttcagcctatgatggatcatctccagcttctgctatagttgctgttgacacaaatctggatacatccactcctgatacttaccgagcaccacctgcaccattgccttatgatgttagtttgccagtcccagaaaaccctgatttggagaagtcagacctgaagagcaaaaccgatgaccaacaggaggaatctttagaggtggatgagttcaaatcatgtgaaaaatgtgtcgctgaagataagcctgatgaggaggatgtttgcccaatctgtcttgaagaatatgatgcagaaaatcctcgctctttaactaaatgtgagcatcatttccatctttgttgcatacttgaatggatggagcgaagtgatacctgcccagtttgtgaccagattactttgatagatgatatgtatgaatagcattggagcatgggactattatgtttggtttgatgctagtttgttttaatgaggaagtacagtcagcaaagctcctgatctatcaacctggtcagacgggggtgctattggaatgaattttgagaaaactaagggaaaataattgaagacgggaatggcttgaaatttgttaaatatcatctcagctttttacattttgtttgaagcattaactgttcatgacaacaggaggatttgttagtatccatatctactgctggttcgattgcttcacagttgatgaaacccccagatgagctatctgtttctttgtagttttgaacttgggatgtcttccatttcatttctggttgcggttagcgtctgtataaatcatgacacgttagataggtgacagggaaaaaaaactttattctaatttatgttcaacgatcaaagctgtacaagcttcatgtatatccttcgccttttgattagtcagggactattaagtcccctgttgtgaaacaagttggctgatttatgtaaaatggtatacatttgcctgctttataaaaaaaaaaaaaaaaaa

SEQ ID NO: 22759 - DNA, 1016 bp, Oryza sativa
  Clone ID: TF_OsC82048_1
cccacgcgtccgcccacgcgtccgttcatgaataacatggaagctctgtctgaaaaagaaccacttgattcagactgggtcgtgtgtggaggcaaggtaatgcacaacatcagaaagcaactcgggaaatcattcctcttattacaagcacagcaatatgatggcacaatcctagaatgtgatgaggcttgcaatcacaagaaaaccaaccaggatgagaagcgccttcaggtacacatccgcctgctgttgttgcccaggcggtccatggcggggagcagcagcagcatgggcatgtccgccgtggaacgcgtgcccatgaccgtgaccgtggccgtgtccatatccgtagggaaaaccagcaggctgcccataggcggttgcatctgggaacccatggacttggaagctgagcagggggaacaaacccccaaatgccgccgagaaggtgtaattcccccaccgtgcattggctagtgggatgcctccacccatgaaccaagggttggggttggcattggggaagtgggtgttaggattggcctgcggagccgtggcaggcctctgtccagctgggcgattaggaatgtcagccccagggacgttctttgaccttgggtcaacacggtccttaccacggccatagagggggacaagcttatcctcctcgacaacagccttgcagaccgggcactcaggtgaatgcgagtggatgtgcagccacttgtagaggcatggccagcagaagaggtggccacagagcgtgacaataggctcctgcggaagctcaaagcatatgttgcactcgaagcttcccccagaatcggcaccaccgctgctgctgccacttgtggattccccaacattggctgccatagtgggatgagatgagcggcgggcggcggaggaggagtcgcgtcgacggaggaggattcgccgcctgcgtgcgccgcagaggaagacgaagaggaagaggaagaggaaggcggagaaggttcgaggcgggcgcctcgtgc

SEQ ID NO: 22760 - DNA, 627 bp, Oryza sativa; identical to SEQ ID NO: 13387
  Clone ID: TF_OsC356927_1

SEQ ID NO: 22761 - DNA, 794 bp, Oryza sativa
  Clone ID: TF_OsC392220_1
atgcccggcgactcggcgtcgtcgacgctgcagtacacgggcatcggcgcattcgtcgccatcgtcggcatcgtcgtcctggccgtcatcttctacacccgttcgtccgcccgtcacgccgcccccggcgcggcgcccgacgcggtcaccgcgctccaggggcagcagcagcagcgcggcctcggcctcggccccgacgacgtctccgtgctcccgacgttcacgtaccacgccgccgccaccgcctcgcccggccgatgcgggcctgatcggacgcggggacgcgaaggcggcggcggactgctgcgccgtctgcctcgacgagctcggcgagggcgccgtcgtgcgcatgctgccgtcgtgcaagcactacttccacgccacctgcgtcgacgtttggctgctgtcgcgggccacgtgcccggtgtgccgggggagcccagggcaggagaaggtccgccattttcggcctcgcgtccctctcaccgccgctgccgcagctgcgccggtgcgcgccgtcgccgcccaaggaggccgccgccgccgccgctgccgatacgtcgagagccaacgacgatgactcctccgcagccgcgtcgaggtcgccatccccgataagatcgagcacgcgtttcgacctcgcggccgccgccattgacgccgccgcccgtagtccggcaatgtcgccgtcgccgactcgcccgtggactccggagcgtgtggcgcgggtgtcaaggtcaccgtctcccgtgacgacgacggcgacgaccgatttgcacgtggtcgaagtgtag

SEQ ID NO: 22762 - DNA, 1586 bp, Oryza sativa
  Clone ID: TF_OsC1868_1
atgattaggtgacactatagaagagctatgacgtccccgtgcccgcgtcgccagccggccccctccaccgcggccgcgcaatagaaaaccgcctccctccctccattatccaatttatccactccctacaacacgacgacgacggcgacgacgagtactacgatgatgttctaggtagaccgatcgagctggttgacgacgccattttgtgttcttggatttattggatgagatcgagctgctgcattgtcatggcgggaaggtttcttctcggcggccgggagatcgtcaggacgggggatgatggcccgttggatgatggtcctgccgtggcgccggcggcggggtcgtcggcgccggcgacgtctgcggcggcggcgagggtgacgccggcggtgctgttcatcacggtggtgctggcggtggtgctgctggcgtcggggctgctgcacgtgctgcggcggctgttcctcaagagccaccgcgccaacgccagcgccgaggcggtggagcgccagctgcagcagctcttcagcctccacgaggacggcgccggcggcgcggggccggggctcgatcaggccgccatcgacgcgctgccggcgttcacctacgccgagctgctcgccggcgccgccgcgcccaatggcggcggcgggaacgggaagaggcagttcgactgcgccgtctgcctctgcgagttcgacggcggcgaccgcctccgcctcctcccgctctgcggccacgccttccacgccgcctgcatcgacacctggctccgctccagctccacctgcccgctctgccgcgccgcgctctccgcccgcgccctcgccgccctcgccgccgccgccgcggacacccccgccgccgcgcaacaccgccagcccgacgtcgaggaccagaagctggaccaccaccacccgccgccgccgtccgacgagcccgcgaccagcttcgtgctctccgtcaggctcggccggttcaagaacacgcagcgcagcgacggcgacgccgacgcgagcggcggcggcagccgctgcatcgacgcgcggcggtgctactccatgggctcgtaccagtacgtgctcgccgacgacaacctgctgatctccgtgcactggcgccccggcgatggcattagcgccgccaccgccgccgccgccgcgggcgccaatgtcgccacggcgcgcactggcattaagcagggcggcggcggcggaggcggcaagaaggtgttcggccgaggcgacagcttctcgatgtccaagatctggcagtggcgcggcggcgacaggaggctcccagtcctccactccgacgcctcgccgccggcggacgacggcttgccgtgggcgacggcggcggcggcgagcacgcgaacgaggcaagaaagcgacacctgatagatacagctaccaacacacacacacacacacacacacacacacacacacacacacacacacacacacacacacaaagatgtatgctttcttgtgccttttgttagtggttagcaataagcatttcttgataatagagttttgctgataattaattaatcaaatcacctatgtataatc

SEQ ID NO: 22763 - DNA, 1008 bp, Oryza sativa; identical to SEQ ID NO: 13389
  Clone ID: TF_OsC383872_2

SEQ ID NO: 22764 - DNA, 1909 bp, Oryza sativa
  Clone ID: TF_OsC54609_1
atgccgatcgcctccaagctcgtctacttccagcgccgccgcccatcgccggcgccgccggagccggagccggagcctcccgaccctcgccgcagcctgccgagccggagccggagcctccgccgcacgccgccgcaagccgctatttcccgttcattctcttttgatggttcctttgctgtggagcttggataccaagtgcgtcgttgtcaacacgttcgcatccttggaggccgcctatttggacttgaagtgtcctcccgtcgctcaaggtcgttagccatggccttcgtccagcgaccgtggctgaccggcggtgctaccgacagaggtgggtgcctggctggacgcctttcccgatggcgccgtcgtcgtcaccgccgcagcgctgccgaaagggttcgaggcggcgacaatggcgtggggacgggcctggtcatccgcgggtgggcgccgcaggtggcgatcccgcgccaccgcgccgtggggtggtccctgatgcactgcggcacgaacacgatgctggaggcgacgtcggcgggcgtcgcgatgctcacgtggcccatggtcgccgaccacttcgtgaacaagattttgctggtggaggccggcgtggcgatgcacctggcggagggcgcggacgccgtgcctgactctgggcagatggcgaaggcgatcgccgccgtggtcggcgacaaggggaagcccttcagggagcgtgcagtggcgcttgcccgcatggctgcagcggcggtagcagagggtgggacttcgtatagggacttggaaagagggaggaaatggggaataagggagaagagacgaagggcaaatgagtccaacgatatttttctccacttcgatctaacgccgttacctcataatgtgacggaagtgctacgggtcgaaggaaaaacgggtcaggaacatgttccaggaagcaaaagagatacctcaaagggtgtcgcatctgctggaaacataacaggacaagcaggcagcacgggctccagctcaaggctaaaccgcagcgtatcagatcatggccggcttcctgattccgttcagcaggctagggaacggctacttcagaggcttaacagcgtggacttatcaggaagaaggcaaaatacatcgttgtcatcagaaaccattcatggtggagtagccccgggcgtctccaccaccgcagatagcatattcagcagtctaaccagttgcttccacactgacgtatcgatcgctccctgcaaactccaagagagcacagctgaaaccttcaacaccgcagataagcatacgttcatcgcgcattgttctgaaccggctcctacacaagaagtagcaagctgcagagtaacagatgatgacgaactcgcgggaccttcaacggagtgctctatatgcctggagagatgtggggatgcagatgggctcctcgagctgcggtgcaagcacatcttccactcggcctgcctcgagcgatggctgcgctctcgcagcgactgcccctactgcagggccagcgtgctcctaacagcagaaggatgagaatttgaggatgaaactaaacccagctctgtagaacctctctttaagcccttaactttgtcactgctcacatgctcttcttccagtaccaagttttttcccccctttgctgatgaggctgtgaaatctgtgatacttttgtcactgtgtgaggcttcagaaagttagcatcttactgtaccatgaatgtgtctaaaacctgactgggttgtttgcaactggatcatgctctctccatgcatatagagtgagagctgagctgctacctgtttttccatggaagcttttgtttgctcttccatgttgtgcatctgaaagtgagtgattgcttttgctctcaaaaaaaaaaaaaaaaaaa

SEQ ID NO: 22765 - DNA, 1074 bp, Oryza sativa; identical to SEQ ID NO: 13382
  Clone ID: TF_OsC240119_1

SEQ ID NO: 22766 - DNA, 990 bp, Oryza sativa
  unsure (1)..(990): unsure at all n locations
  Clone ID: TF_OsC359_8274
gggggtgcacacgaagtcgatgagctggtacatggggacgccggcctcgccgtcgccggggagcgccggggaggcgcagcacgcactgagcagcggcgggggagggggcagcgacgccagcttcgacaccaacatggtgatcatcctcgcggcgctgctcttcgcgctgctgttcgcgctcgggctcaactcgctcgcgcggctcatcatccggtgggcgcggcgggcggcgacgggggaaggcgccggcggcggcgtggagggggcgggcgccggcggcgggctcaagaagcgcgcgctcaggagcatccccatcgaggtgtacggcggaggtggtggagggagccccgccgccgcggcggaggtctgcgccatctgcctcggcgagttcgcggacggcgagaaggtgcgcgtgctgccgcgctgcggccatggcttccacgtccgctgcgtcgacacgtggctcgtctcccacgactcctgccccacgtgccggggctccgtcctccacggcgccaccaccaagcacaaaccaaccgccgccgccgccgccgcgggcagccggcggccggggagcgaggtcgacgcccccgccgccgccgccgtgacggtggtcatcgcgtgaccggggcaggtgggcccccgcttcccccagccgctgtgggcccagtgtaacatacccatgtaaaaaatctcctttcttgttttggacctatgtaaaaaaatctctccttgggccaggccatggcccatggccgtgagatattttccgacgttggtgctgtgagaggatgacgggtgggcccgctcgtctgttcagtttgtaggttactcacagtagtccaccgtccattcgatttcgatcttggctagcaagggcagttgttgtggaggttaggaggtacaggacgcttacagttacgtacaggcttgtaatattaccgtataagtagtatcattttgcgaggaaataccgntatatttgttggt

SEQ ID NO: 22767 - DNA, 1065 bp, Oryza sativa
  Clone ID: TF_OsC388105_1
atggtggctgtgccggtggtggccgacgatggaggcggagggcatggggcgaagggggaggagagtgtgagcgggagcgtcgcgggcatttcgccgagcatcctcatcatcgccgtcatcgtcgtggtgatgctcctcgcctccgtctccatccactacttcatccgccacctgtgccgccgctcgtcggcgtcggcggccgcgtcgtcctccgcgccggtgctccccgtcgtggtgcgccccgcgtcgtcggcggccgtgggggagcaggtggtggggaaggcgtcggcggagcgcgcggcggagatggagcggctcatctcgcggctgccgctgttcacgctggcgtcgtcgctggcggcgctccccaagtcgtcgcgcgactgcgccgtgtgccagagcgcgttccgcgacgacgacgagctccgcctcctcccggcgtgccgccacgcgttccactcccgctgcgtcgacccgtggctccgcgccaacccctcctgcccgccctgccgcgccgccaccgcgctcccgcacccgcccctcccggacctcctccgcgtcgagctcggcagcgtcagcagccgccgctccaaccccaactccgccgccgccgtcgccagcgcgccgcccgagggcgccgccgtccgcgcctacccgctccccccccgcccccactccgagtacctcgtcgaggaggagctcgaggtcgtcatcaagcaacccgccgccgccgctgcgccaagaaccggcgagccaagccagcatccgctgccggcggcgcaggcggagcgtgggcagccgtcgtcggtgaccccgacggcgtcgttcagctcggcgaggtcgcaggagcggtggagcaacaggtggagcagcagatggagcagccggtggagcagcgggcggtggagcagccggtacgacgccggcacggtgacggcggccgccacggcggagtggtggtgggacatggacggcggcgcggcgcccgccgcgcggcggcgcgaggtggaggagcagggcaacgcgttccacggcttcatgcgctggctcacaggggcatactag

SEQ ID NO: 22768 - DNA, 963 bp, Oryza sativa
  Clone ID: TF_OsC31203_2
atggcggcggcgggggtgtcgaggagcatggtgctgacgctgctggggttctgcgtcagcgtcctcttcatcgtcttcgtctgctcccgcctcgcctgcgccctcctcaggcgacgccgcggccgcgcccgcctccgccgcgcctcccctctcgccgtatcgggggtcctctccatctacgtcgaccgccacggccaccaccagccctcgtcggccgccggggccgcttccgggaccgggggcctcgaccccgccgccgtcgccgccttccccacccgcgccttctcccccgccgcctcctcctccgcctccgcctctacccagtgtgtagtctgtcttgcagaatacgaagagaaagatgtgctccgtgttcttccctactgtggccacggctttcacgtggcctgcatagatatttggctaatgcaccattcaacatgcccagtttgtagaatttcgttgtgcgactaccctgatagcaagcacacgatgtctcctgtaccaagtgcagtgataataccattacctcaatgttctcctggagcagcaagatcagatcaatgcaattggctattggtgggaacagggcattcgccaagggcatcaactatttgtagtattggaaatatccgagagaaggtggatccgtggtttgctgtcataggttagtgttggaggtgttttgctgtaaaagatgcaaaaccttttatgttacttgttatgaaaaccgcggttgtttgtgatcatattcaagattctatttttgtccacgcatggatgtcggccggtccaatcatggctcatacaatagatctgaactttgtgtgctcaaagcatcagcagcagcaatggttcttcttccctgctgcaacagggaaaagtcgtgttgaaccaagagatgctgacgcagggcttcactcatgtcttctccccgaccttcgggaattagctctgaagatctga

SEQ ID NO: 22769 - DNA, 1169 bp, Oryza sativa
  Clone ID: TF_OsC246997_1
aatgcacagaatcggtattcttttttaagaaaaaaagcttgcctagctacaaaagaattgaattttcaccaccaactactgcatgctacgtactagctagcgagcaaatgtacaggccggcaccgtacgtacatacgtatacgtacggctgttgccctacgtaggatggttgacgaatcggtgtatcatcatcatcagaagagagagagagagaaaaaaaaataatgtgtacatttttttttgttacacttgcctctgttgggttaggaactcctgcacggacacgtagagctgcttgtggcaggagtcgtccatggacagcgacctcctcatcggctgcaccgcgaactcctcgtcgtacttcttcctcgtgtcgatggcctcgtcgcccacgctctccggcttccgccgccgctgcggcgtccgcttggtcgcaggcggcgcggcggcggcgccgccgcggtggctaacccagctctcgtgctcccctctcacctcgatcacgatgctgttgatgagctcgtcgtccggccggtggttgtggttgtggtggtggtggtgcgaatccccccttccctttcttcctcccattttttcccctctcccccagaaggggcagcgcgcgttgccctgcagccacgtgtcgatgcagtcgatgtggaaggcgtgggagcagttgggcagcagccggacgcgctcccgctccacgaactcgctgaggcacacggcgcactccgacacggatatcctcgcgcccacgccgccgccgccaccttcgccgccggcgccgccgcatgccgccgccgtgaacctcacgacggggagcatccgtataaacggcatgccgagcccccgctcctcggtcgccacggtgcggatcaccgacgcctcccgcgcggcccgccgccgcgcgccgccgccgccgtgcccgcgccacggcatcgcgccgcgggaccacagcccgcgcagcgcctggcacttggtcacgaacgcgtagtagctcgcgagcagcgcgaacgccgcgaggatgccgacgacggtgatgacaaccatcgggacgctcgcgttcgacgacgacggcgacgaggagcggaatgccggtggcgcgtccatttttgtagcgctccccgccgtgccgcctaacgagagaggcgatacagttgaagcct

SEQ ID NO: 22770 - DNA, 1809 bp, Oryza sativa
  Clone ID: TF_OsC17809_1
ctagcccggccaatttccatcgcagccatttttacccctagccccctccgcttcctcctttttacatccaaacccctcttccactcccctcgccgccgccgcctccgccgtcggggaggatgggaggggcgcacttccccggtgagggcgaggtggtggccggggagggcgacgccgtcgtccccctccgcgacgtgggcaagatggagcacgggtgcgagcattacaggaggagatgcaagatcgtggcgccctgctgcggcgaggtgttcgcttgccgccattgccacaacgatgccacggcttcaggtgatcggcataccatttgccgccaggatgttgaaaaagtagtatgtctactctgtgatactgaacagccggtgtcacaagtgtgcataaactgtggtgtcaatatgggagagtacttttgtgatgtatgcaagttttatgatgatgatacagagaaagggcagtttcattgctacgattgtggcatatgcagggttggtggcaaggaaaactacttccactgcgcaaagtgcgggtcttgttatgctgttgctctgcgtgataaccatcagtgtgtggagaactcaatgaggcagaattgcccaatttgttatgagtatctatttgattcattaaaaggaacacgagttctcgactgtggacacacgatgcacatggaatgcttttctgagatggtggaacataacaaatacacttgtccaatatgctccaagacagctcttgatatgacacatcactgggcattgttagatcaagagattgaagcaacaatcatgcctcccgtctaccgttacaagatttgtcttcgttttacacagccgagagagccggcgcattgggaggggattcaaggtgttcgacgatttgctcaagagggcatcgggtgcagggattttattccgttccacatgatttttgggctggccatgggagaatactgcagttcgtcatcgaatcaatccaaggtacccatcatcctcctcttttcagcatcaacgatcgtacaatctagtatagtgaattggttctctgtacacagctctagtggcaccatactgatgataatgacgtgcatgcatcctttcgtgtcagctatgcgtttgaagattgagaaatgcttgctatcctttgaacaaattgtggttctgaaataccatggctctttctccgaaaacattacgcgtcttggaagaacaaaagttaggtcttgtgttgcacatgttaaagaatcatgggtacagtgttggaatgcaatcacaagcacagtgctgaaatgcattctcacacagccgcaagcccgcaatactatggaagataatgaaaatacaaaggtgagagctgtcaatgcagatataaaggataaggatatcattctcttgtcctgctggatgtttgcgtcatgtaatgactgcaacaaggtctcagaagtggacttccatgtgattggccacaagtgcagccactgcaactcgtacaatactcgatcgacatcacggcctgcggatttatcaggaagcagttctccctcgacgtcagattcgtccgaaaacaatccgtagataacatgccatgttggtgcccaacaagatctacagtttagacaatcaagtcccagattcatacatatacaagtagtagaaggaacattgttttgcggctagcctatccaagtgcctacccaattcttcaagattcaattgattccttgaatcttcatgtgttggaactgctactagacaaaagctattgtgatgataccatatgttgtgttgaatcttt

SEQ ID NO: 22771 - DNA, 2945 bp, Oryza sativa
  Clone ID: TF_OsC43568_1
gctgcaggttttttttttttaagttttaacaaactgcatccaactgaaatttcgctattgccaatctcctgaaatgtacaatctggaaaacccgtaaaacctacattcttattgtctgctacaacaatggaactacaagctatatatggtacaatgtttcagtatggcgggaagcaccaccccttttgttggatgttttttccccaaaagaacagaatggatatagcaaaagtcagactaatctagcgacttaactactccaggagaatcccgaactatacaagggagcaggaataaacattagcatcacgaatgcctgacacctgcaattccatgtagccaaccaaattaggctactacattctgcttatatgtttggttgtacaagctagtacttgtcatatcttcaactcgcatggtcatctaaccatatgaccaagtaatgaccatcaaagtagcttgatctagatgcctgcgataccatcttgaaattaacaacctcatatgtagataggtttcacgtcattagccccaaaactcaagctacatgaaggacatctcctctgtcggttcccaagggacttctgtatgcactgattgcagaagagatggtagcacttggtaatcacaacctccttctgcctatcatggcagataccacacttcaatatccccctatactccttgacctcatgacgaagcttttccaggactgctgattcacgtgccttggctctaagagagctagctttccttgacataacctccaaatcatcctctattctcttcttactaaacctctctttctcaagttctataagcagatcagcgacttccaaacgactgcttccaacattcgcttgtattccatccaatgattgcataagcttttgagcatctctgtgcacatcaaccagctttctttggtaattactcaatgaaacagattgttgccatccatcctcttgaagtttcccaacccgatcagaccacattttaagctgatcttctaaggaaacaattttctggttgtacagatccatcaaagagctttcctgctgcaagtttctgcgcaaagaatatgtttccaaatgcaaagcatcttgtgtctgttttgctttaacaccctccataaaaatcaacttaacgcaagtaaacagcttttcaatgaagtactgagtctccggaacaatcaaattaacaatataaccaaatctaacatccttggtattatcatcatctctttcaataatctgctgtagcaattgttggttttgtgcctgtatgtcctcatatgcttgcccgatacactcgacctccactctgtaagcttcacattcttcctgtttagacttcagcatatgggataaactgatacactcgacctccactctgtaagcttcacattcttcctgtttagacttcagcatatgggataaactgactagatcctttctagaagtcccaagcttctgccctgattcagcaatctcagcttctgcagttgctagcctctgctgtgtgattgcttcagcttcattggcagccttaacacgctgctctagcttactttcatcaagagatgatttcagggcatgaacatgagcccattcaaggaattccctatctctggattccattatttccctggaatcagtggattcgcgcttatacatatccgcgaacaacttaagctccttattagtttgcttcagatcagaaatcactgattgaagttgtgttatatcagatcccgcacgggcagatctgcatgatgcttcttcattatcacgttcctttctggacagaatgcgagaaagtgaatggacttctgctcgcaaagaattcaactccaaggaagcctccttgtgtttggtcatttcactctgcatcgcgcccatttcccttggtatcgatgacactaaagctgctttagcaagacaagtttgaaagttactcttggtaaagtgaatagtaactaccgcaccaggttctcttgaagcctcttcaagtttgagaataagcatgtttttttcatcacatagtttctgaatatccttcttgagatcagcaatgctagactcacaatatgtagaaaccctctcaggaatctcagccagatcaactttcaaattaaattgcctttcttgccacacaaacttatccttatcaacctgtaatttctctaataatgtctggtagtgatccaattctgcttgtgacttctgaagtcgatcattaacaagctgaaaagcttttgaagaacgaatgctcttgaaatccatcaagatattctgaaaagttgctattttgttcaaaatttcaattctctcttcatgtaatctcttaatttccaccaaccgctttgaaatcaattccttatcttcaggcatatttgtgtttcctaatgtaggatatgggattcgagctccttgtgtattatctctttgagctttaagtgctgccagtttgtagttagtttcttccaactcagaagcagcactggccaactcctcttttagacgtctatgttcagctctttttcgggcactggaatctctttgattttgataatcctctgctaactgcttgtgcttcaactgaagattacttaatgcttgtacgacattattgaggctggacaacaggttgctactagtactctgtagttgcttactgcggtcattttctggtaatttagtgagagcagccaaagcacactcctcatttgcttgcaaaagatcacttgatggaaaaaagatatccccaagagcattagctgtggatagatgtaatggaggggcatcacttcccaagtggcaaccaggcaaacaacctgaactttcagttgcaccagattccacaagacttctaagagtgtccctctctatgggtgcacaagtaccatctgaaaagagaaggtttatagttaacctgataggcaa

SEQ ID NO: 22772 - DNA, 2165 bp, Oryza sativa
  Clone ID: TF_OsC31886_1
acgagggcaccaaatggcaaagaaggcccaattcccaaccaccgccacctccctcctcctcgtcaagcattcaggctctcctatcccaaaatgctttgctttccaagcaagcacactccctctctgctttggagattagctctcgtttctcttagtagcagcagctggtgtggcagcatctcatctcatgatctctgattcttcacggctgctgctctcttcccatctcatctcacatttcccagggccacgaaagaactgggttgtactgaagtccaagcagagccacctaccttctcttgcttctctcatctcttgccacaattattggaccggaaattcatgaagatcctctgccggtgctagaacatggcagtctgggtatggcctgagcagtaaagatttgttcatctttgtttattgggatttcttctttgtcaccttcatccctttagactctcccctttagacctctagtgttgctgctgtgcttgtgtatccatggcggcaatggcctcttctccccctacaacaccaaatctcggttcgcagcctacatgggtgccctatgagccaaccagggattgctcccagggcctctgcagcatgtactgcccgcagtggtgctacttcatcttcccgccaccgccgccggccttcgacatcaccggctccagctccgacgactcctccggcccaaccttctcgccgctcgtcatcgccatcatcggggtgctcgcgagcgccttcctcctcgtcagctactacaccatcatatccaagtactgcggcaccttcagctccctccggaacagactccttggctccagcgctcaccgcggcagcggcggcggcgccgacggcggagacaattccaggagccaggagccgtggagcgtcgcgctgtcggacgggatggacgagacgctgatcaacaagatcacagtgtgcaagtacaggcgcggcgacggcttcgtggacagcacggactgctccgtctgcctcggcgagttccgcgaaggcgagagcctccggctgctgcccaagtgcagccacgccttccacgtcccgtgcatcgacacctggctcaagtcccactccaactgcccgctctgccgctgcaacatcgcgttcgtcaccgtcgggatggtctcgccggagccggaggcccgcgttccacgggaggataggagagacaaccacgagctggtcctgacaattgacaacccggagcatgtgcgcgaggagccacagaacgtggtgaccggtgtcgccgtcggcaacggcggccgcaaccacgaggcgaaggatggtccggggaggtcggaagatgcaaatggcacagctgagatcagagaagacggcgccttgatgccgcccacaagggcgccgtcgtcgttgtcagacacgcaccgtgaaggccggatgtccattgccgatgtcctgcaggcgagcctggaagacgagctgatggtggccagggagagcggcctcctggcaggctcttcggggtcctcaagacggtgtcacggggagcacagcaaggacggcggcggccgcagtggccgggcattgccggacggcgcgaatatgaagagattggcgccggccgggagatcatgcttcagcagcaggagtggcagaggaaaggactccgttcttccaatgtgaggcaaccaaggtggttcttttgacagggaaacatgacaagaaacttttgtgtgttcttccgtgtggagatcaaatgatcaatgtgccggctgcatctgcgatgcgcgtatggggatttcatcctgttttgatcacttcccgtgatgcccacatgctgaagaaatccttctcctgcaatgcatggtgagtggtgagatctcctacatgtttctactagataactgtatagggtttgagaagttttcctttttctttctttcttccatgttgccacccctctctatacaattgggatctgctccagagcagcctctctggattagtgagttaggcattactagatcaaagactctccaagtgagaagtgtgacactttcagttctttttccacctccaaaaaaaaaaaaatttgcctctgccgccgcccccgccccggtgtcattgtggcacaatttggggattgaatgagaaccgtggccaattcagcttgatcc

SEQ ID NO: 22773 - DNA, 737 bp, Oryza sativa
  Clone ID: TF_OsC269066_1
cggcacgagggatcactttgcttactgctatagctctagctcttcagttgtcacctttgttttctccttgtctttctctgcgatgtcgtggttgctccactctcttctcctcttctccttgcctgtctgatcgatcgcctcgccaccgccgccgccaccgccgccgtcgtcgtcgtcgtcgtcgtatcggcatggaggtgtcccacatggccaactgcagcaacgtctcctcaccggagcagcagccgatgccgccgtcttcggcagcggcgtcgtcgccgtcgccgccgcagcttgactacgacgtggtggtgatcctggcggcgatgctgtgcgcgctggtgtgcgcgctggggctcaactcgatgctccagtgcgtggtgcggtgcacccggcgcgccgtggcggaccccgtcggctgggtggagcaccgccgcgccggcgcggggctcaagcgcgaggacgtcgtggcgctgcccgtcgccacgtacgtcgcctcgccggcgccctccgtcgccggctgcgccatctgcctgtcggacttcgccgacggggagagggtccggctgctcccggcgtgcggccaccggttccacgtcgtgtgcatcgacaggtggctcctggcgcactgctcctgcccgacgtgccgccgccgcccctcgccagaggccgacggccacggcgccgtcgtcggagaagaccaccaccatcgcctgcaagttttgactgctgcttaa

SEQ ID NO: 22774 - DNA, 1330 bp, Oryza sativa
  Clone ID: TF_OsC35328_1
gtggatcccccgggctgcaggaattcggcacgagggtgacgtcgacgcctcatctcccctccctctttttccccgcagcgatacggcattcgtgacctcccgattgttgccaacccccctcgccttccgattgctgccacccccgcgcctcgccgcttgcccgtctcctgttcgtccctcgggagcgggaggctagggccgacagcagcgttcgcgccggcgcgggattgggttctttgttcttgtcagtgctgtgtttgctcgcaagggtcatcgtgagaatggaccagatttacatggctgctgtcaataacaagacttcattgcctgatgatgagccaatgaagaaaattagtggagatatgcctgtgactgctggaaacgcttgctttgactgcaacatttgccttgattttgcagcagagccggtggttactctttgtggtcatctctactgctggccttgcatctatgagtggctatgtccaggggttggatcgactgccagtaacaacagcagtttggcaaggcgacagtgccctgtgtgtaaggctacactctccccagacatgctggtgccattgtatggtcgtggggggagtctgaagaaatcactgaatggtgtgcccattccacgacgaccaaccgtgcagcgggaggcggttgagcatcaaaacacacacaataacatcgatgatcggcaccatgagaacatggaacccagccctccaccacaaccgctgcggcattcgagccatcattccagtgcaactgaatttgattttatttacccgccatcaccaattgggcgtggcttgatccactcgacggctggtggtgtgcttggggggatggcagtggcggtgctaccatgggcattccgtggccaggtgccaccgagcatgttcatgagtccccactatgtcacggcacacaatatgagctctagagcgaggagacatcagatggaagttgagaggtcactgcatcagatctggttcttcctcttcgtttttgtggtgctgtgcctgctcttgttctgaagcaagatggtggtgtattccttttgtaaatacgggaaggcaagacactaatgggtggatgcatatggtaaaagagggtggttaacactgttggtctgtatcgataagcatgtgcctaaagcatgctgatatagagatgtaatgtgacaagacttaaggtgaaatgcacatttcattcttctcttgtcctaagatcaaaaaaaaaaaaaaaaaaaaaaaaaaaaaaaaaaaaaaaaaaaaaaaaaaaaaaaaaaaaaaaaaaaaaaaaaaaaaaaaaggggcggccg

SEQ ID NO: 22775 - DNA, 1899 bp, Oryza sativa
  Clone ID: TF_OsC22486_1
tttttttttttttttctccaataattgcatcagattgcattgcacagtcaaacatgttgcaggatgcagctccagcaccacaaaaatgaagtgcagaggaatagatcacctcgccacgtggcgcggccctggctcggcttctttcttttctttcgttttcctgcctccggtccgctgcgttttttttttttttttttgagagaaacacctgcatcaatggcatcacaactatgttcaatggcaacaatcgctgcttggtacagtttaagcttatgtttccaaatagtttctgcccattgcaacaaatgagataggataaagcacaacccttaatcaaacctagggctgccagctagaaaaccctaaattccgacaacagaagcagcatcatttagttccttggaaacaatagcatctgattcatcgttttctctcggagcaaataattccaactaattttgagatatacacaaacaacgaggaagataacctttacaagaatggcggcatcctctgaggatgcatggaatgatatccactatctgggtggctctgcggcattcgctccccggtgggtcttcgagtaaagcctccatgtgtatggttctgcatgggattgaaggtgccccaccagtgagattcaccgtcagctgggatccagggaaatggggtaaagccctcctggccccacccatatggccgatcaacaggtctagaaacagcctcaccatccgaggaattgctcctgttcacaggaggagcaaagccatggtgtcctccaatctcagctgaggatgatgctgcgatgaaagatgtaattgttaaagccctaggcctaacccttctagatgtaggggggaatgggctgctctgcaatgagtgcattgactgttgatacatgtgtcccctcgcaccatgaccatggcctctagtctcagccataacagctggcacagaccctaatggtgtaaccatattgcttccgttgcgaggtgtgggcctgtgaactaggggacggtgatgtgcatatggccttgttctctgttggctgctgctgtcatatctcggcaatcctataccaaatggagctacagaatgatcaggaatgcctgacacaggaagattgctcatatagcggtggtcattgtcatgatttcttgactctgttgcatggaaaacttgtgtattgctcaaatcgtgggctgcatggccttccaagctagttggatgccgatgaaatgaactgttttcggcaccagaactagaactagaagggacatgcacaggatggagaaaaccacgcagtgcaaggtaagggcaaacaagagaactgctagcagcatttgaatgatctccaactgtatgataagaagtttgttcagcttcaccctcctcaaatacagatgctagctgggtgaatccactaaaggggcaccattgaaaaccaaatggaatatctgaggtgatgtcataggtttcaccagtcacccagccacctatatcaatatcaggagatggatggtgcccacttgcgtaaagccagcggcctttctcaatcttccgacaattagggcattgcatggccccttttgcattaaatgccgatccaatgcagtctaggtggaactcgtgcccgcattgcagcctggcgacggacctgcccccggccaccaccggatccaggcagatggagcacgacgcgcctcctcctcctcctcctcctcctccctcgggcggcggcggcggcggcgacctctccagatccatcaccgcctgcctctctctcgctcgctcgcgggagaggagaggagaggagaggagaggtgagctcgtggaagaggagagagagggcggaagctggggaggtgtgtccaaaggaaggaaggaagggagatgaag

SEQ ID NO: 22776 - DNA, 1776 bp, Oryza sativa
  Clone ID: TF_OsC59284_1
cacgaggccaccaccacctccaccaccgccgcgccgtcgcgttcgccttttttcctccttcccggacctcgtgcgctcccaccaccaccaccccgcggcttcgctcgcgccaccgccactgattcgccggagagttgctgttcccttcgtgatttcgtcggcggtggcggcggcgggggtggtctcctgttgctgtacagaccagcatcgttggggggaatcggatgagatgagatgagatgagatgcgggggtggtggtgatggaggcgctctcccggaccgagcgtgtaggaggaggaggtggagccatggttgaagtggccttcgcttcgtccgccggatcctccgccgcggccccgcgccgccttcgtggggagctcgtcgtcagggacgctattccgtatgccggggtggctcctccgccgcccgcgctgccgctgccgcagccgcagctgcagccgcaggtgcaggctacgacgagtgggggcggcggcggggggaagattagccccgcggtgctgttcatcatcgtgattctcgcggtggtgttcttcatctccggcttgctccacctcctggtgcggctactcatgaagaagcagcatcgccgcggaggaggagggggtgcggcggccggggtgtcgcggtcggccgccggggatgacgcggggggaggaggggacgcggcgctgcagcggcagctgcagcagctgttccaccttcacgactccgggctggaccaggcgttcatcgacgcgctgccggtgttcgcctaccgggagatcgtcgtgggcggcggcggcgacggcgacaaggagcccttcgactgcgcggtgtgcctgtgcgagttcgacgccgaggaccgcctccggctgctgccgctgtgcgggcacgccttccacctgcattgcatcgacacatggctgctgtccaactccacctgcccgctctgtcgcggggtgctctttgtccctgggctcacggagaacaatccgatgtttgatttcgatgaggggttggaagaagggaggctgtctgaagattgcgataacggattcggatatcccgggcacaaggctacggaggggatgcagacgccagggactgagaagagggtgttccctgtgaggcttgggaagttcaagaatgtcgggacccagggcgctgtcgaaggcggtggcatcggcaatgccaatggtgctgtcttgaggagagaggaaggggagagcagcagcagcagcttggatgcaaggagatgcttctcaatggggacttaccagtatgttctagggacctcagagctcagggtgtctctccagccagaccgaattagaaatggcggcggcggtgtgacgagggcaaggccgacagggttaagctctgtcaatgctgagatcatggaggggaagaagatatgcgcacggaacaaaggggagagcttctctgtgtcgaagatttggcagtggtctaatctgaagggcaagctacctactggctcagatgaatgttcggaagcagggagccttccatggatgaagagaggtggcattggggatacatcaaatatgtgactgtagtctgtattatgatagtggctaatcttttctcttgttggtgctgctcacttaatctcttacctatagttatcttgacttttttcagtctgatagctttgtgctgagtttgattggaatgcattaatcccatggagcgataatttctcatagccgtgccactgagtattgcggtagcttaggatggttgatttctggtgc

SEQ ID NO: 22777 - DNA, 624 bp, Oryza sativa; identical to SEQ ID NO: 13414
  Clone ID: TF_OsC400404_1

SEQ ID NO: 22778 - DNA, 1005 bp, Oryza sativa; identical to SEQ ID NO: 13410
  Clone ID: TF_OsC270394_1

SEQ ID NO: 22779 - DNA, 1008 bp, Oryza sativa
  Clone ID: TF_OsC394647_1
tcatcctagtcggcggcggtgattcattctcctccgggctcgccaccgtcccttcttcccgttgccgccgtctctagccttcgggctggccgccaccccttctttccgctgccgccgcctccaaccttcgggctcgctgccccccttctttccgctgccgccaccacactcgcacccacttgccggcagccgagcttgcatcccactgcctccctcgcgtcgtcgttgttctcgcatggtgagaggggtgacgtgacccacctcgtcgctcgccccgctcgcccgagcgctcgggcggctgtatccgggcaaatcggccggattaatccatccatcatctagggggaatattcccctctgggctatcctatccggcggcaaggcgtcatcacccggcggcgccgccgtctccgccgccgtggcctctttcgcggccacttcccggggcggcgagaggtcgcaccggcacatcgggcaagtccggtgcgagtgcagccacatgtcgatgcactccacgtggaacaggtgcttgcacgccggcatctcccgcactatctcgccggcatgcagctcctccaggcacaccgagcacggctcgccgttcccggcctcgaggtcgccgccgccctgcgcggcgccagcgccaccggacgcgtacgcgaacgtcggcagcgcgtccaccgcggccttctcgagcccgaacgtgctggaggaagaagctcccggctgagcctcccgctccgcggcgcgggtgttcgtcccgccgcggcggcggcaccagctcgccggcgcgaggtagtcggcgacgccgaaggccagtagcaccatcccggcgagcacggacgccttccagacgctcccggcggcggcgcgcccgccgacccgcagcaccgccgcggccgtcgccgcgatgccgtagcatgcgcggcggccgcggccgccgccccgctcctcctcgccgccgccccgcagcgtcgccgccgatatcctcgcgaacacgttcgacat

SEQ ID NO: 22780 - DNA, 1472 bp, Oryza sativa
  Clone ID: TF_OsC181138_1
tcatgaacagctcccgactctgctgagctgcctgctgcctccgacgacccagagcagcgtcctcctcgcgaacgacgggcgctcctccgccgccaccgacgacacggcgctgttcccgccgcagctcccggcctcgacgtcccagtccttcgccgccggccaccggaacgacaccgcgcgcctctcggcggcggcgccgggctctttcttggacggcaccatccagatcttggacacggagaagctgtccttggcgagcttcgcgccggcggccgcggccgcgtcgtcgtcggggttcttgcgcggcgtcgcgcggaacggcggcaggcggagcgaggactcgccgcgcttggaggcgccgaactcgcactccgacatggcgccgcggcggcgcgacttggaggccgccgccgccggcttcttcctcggcggcttgatggacacgcggagggaggcgtgcgcgtccatgacgtactcgtaggatcccatggaatggcaccgtctttgcccgagaccaccagccttggcattggcgtcgccattgccgttgctgctcgtgccggctctatccccttcgccggcgatggcgttgacgttgaagaagacgttgccttcgacgcacatgaacttcccaagcttcacctcgaccacctcctccgctcccggcgcgtcttcgccaccgacgtcggctggctcatcgtcggcggcgtggaccatgtcgcgggagctctcggactcgagcaccatgacgacgggggtgcacgtcggcgagagctcggcgaggaggctcctccggcagagcgggcaggtggagtgggagaggagccaggtgtcgatgcactcgaggtggaacgcgtggctgcacttgggcagcagccggagctggtcgtcggcggcgaactcgcacaggcagacagcgcagtcgaacgggtccttgccatcctcgccgccgacgccgacgacgttccggtacaggaacaccgggagcgcgtcgatgaaggcctggtcgacgccggcgtcgtggaggtggaacagctgctgcagctgcccctcgaacgccgtcgcgctctcggcgtcctccctcgccctccgctgccggtgcagccgcagcaggtgccgcaccagcaggtgcagcagcccgcacacgaagaacacgatcgccaagacggccacgatgaacacgatgctcgggcttatcttgttctccacgccgtcaatccccgacgccgacgacgccgccgccgccggagtctgcggcggcgacggctgccacgtcgaattgctcattcttcaaatacgctctacgatcccaagatgatttttcttgggagaagagacgatttctagcttgttttgcgatgagctaggggtaggagaaggatcttggtgttggcatggcggccattggcgatgaagaaggacagaggacacacagcagcaggtgatggcgatggaagaaaaaaaaaaaaaaa

SEQ ID NO: 22781 - DNA, 1947 bp, Oryza sativa
  Clone ID: TF_OsC37456_1
cccgccgccccaacagcaagagtcgcaagcgtgatcgcatttgaacttcatacatattacataccctacttgatgtctggtttgctgcctccgtatatcctcgagctcgccttccaggaaagcgctccaggtcgtgaattccacccaaattcgttgcctcccccactacccaacccaaatccgtagaggaacatagcagaagtgaagccaagaaaccagtaaaaaagcaaagcttccttgcttcgatcgatttatgatcaatttttgaagatacttccggccaccgctggtcgattccggcgaccccgtttccaggagatggggaacatgggcagcagcggcggccaccgtcgccggaacaacggccacggccggcatcaccaccatggtcagcccaccgcgccgccgccgccgccgcagcagcagcaacaggaggtggcgccgaaccgctacgtgttcgcggcggcgagcccttacccgccgcagtacccgaatcccaacctgccgcagtactacccgcagtacgggaacttctacccgccgccgccgccatcgatgccagggccgctcccggcgccgtacgaccaccaccaccgtgggggtgggccagcacagccgccgccaccaccgccgccaccccagccgatccatgccgcaggggagttcccgcctgctatgctgcaacagcatccccactaccatggctggggtggaaacttctcgtatggtccacctacccagccgccggcgccggcgccgccgtatgttgagcaccagaaggctgtcaccatccgtaacgatgtgaatctcaagaaggagactctccgggttgagcctgatgacgagtgccctggacgattcctcatcaccttcacctttgatgccaccgtcgctggaagcatgactgtttacttctttgcaaaggaggagctgaactgtaatcttacagcaacgaaagaagatttactcaagccagtcactgtaacatttaaagagggtcttggtcaaaaatttaggcaaccttcagggacaggaattgacttttcgttgtttgaagatgctgaattatttaaggagggagagatggatgtatatccacttgcagtgaaggctgaaacaacattctcaattggtcaattctcagaaggggaagaacaaaagtcacaaactccaaattcacagatcacccaggctgtatttgagaggaaggagaatggggattaccatgttcgtgttgttaagcagatcctttgggtcaatggcacgagatatgagttgcaggagatttatggaattggaaactctgttgaaggtgacaccgaagggaatgatcctggcaaagagtgtgttatctgcctatcggagccaagggatacaactgtcctcccatgtagacatatgtgtatgtgcagcgagtgcgcaaaggttctgaggtaccagaccaaccgatgtcccatctgcaggcaacctgtggagcgtttgctcgagatcaaagtcaacaacaaaggtgaagagcaacagcagcagcagataccacaaccaccaccacctccttcaaccgcgcctccgcaccaacagcaagagtcgcaagcgtgatcgcatttgaacttcatacatataacatacactacttgatgtctggtttgctgcctccatatatacaggagctccccttgaataagtggaaaacagggagaagacatgtgcgtgtttttagtatatgtgagcaccaaagcttgctgcgcgcggtggcttgcaaacttgcacttcagtgctgggtgtgctgtactacaatcatgtaagggaggatgggttagttaataccctgcatccatgaaaacaaggtttgtacataagttctctctacttgtactactgcgacagaaattctcacgatttgtattactgcggctgatggaagtggagtgcgtgtgcggtattggctat

SEQ ID NO: 22782 - DNA, 574 bp, Oryza sativa
  Clone ID: TF_OsC250874_1
gcacgaggctcctccattttctctctctagttcgggggacctttgagtaggaaattcttggacatggacgacgacggcgactggatcacagcgaggtacctcctctcgtcgatcctcgggcggaacccgctcgtcgtcgattacgtggacgaggagtccttccccgtcgaggaccctcccccggtggccggtggcgcccgtggagggaggcaagcggtggtgtcgcagccgccggtggtgcgcgcgacggcgggcgtggccgggacggtgtgctcggtttgcacggaggagatcgcggtggcggacgccgtggtgcgtctcccctgcgcgcactggtaccacgccggctgcatctccccgtggctcgggatccggagcacatgccccatgtgccgcgccgagctgccggccagcgacgacgccgccgaggaaggcggtggtgccggccgggagaagccgccgcgcgcggcccccgccgggactagcgccggcggcggtgtcaggcgtgacgcgtcgtatgagctcctcgccggcggcggcgtcttgtctggctgagtggctgagcgtgtgggcc

SEQ ID NO: 22783 - DNA, 490 bp, Oryza sativa
  Clone ID: TF_OsC126152_1
aacaacaaagttttttttcctttttttttaaaaaaaagagcaaattgctcatgcaggcaacagctaggatggattctgattaaccaagctagaaaccggcgacgaagagggaggagaaccagatgacgaggtcgtcgccgagctggagctcgtcgagcccggccacggcggcggccaccacggcgccgccgacgtggaggcggcagagcgggcacgtccgccgccggcagtagagcgccagccaccggtcgacgcagtcccggtggaacgcgtgcccgcacggcagccgccgcacctcctccccgtccctgaaccccgatatgcacacgcagcaccccgccgccgccgcctgcccgccgccgacgccgtcgccgtcccgccagcaccggcactgccctccgtcgtcgtcgccgtcaccttccgccgccgccttcttcccggacagcgccgacgacaggagcgccatgacatggctcaccaccaccaccat

SEQ ID NO: 22784 - DNA, 1355 bp, Oryza sativa
  Clone ID: TF_OsC66748_1
ttttttttttttttttttttcatcaatgagacagtgccgcctattaattatttatctttcagcaacgccaataaattacaagtgttttcagcgtttcatgttgcacttgcacacaaatcaatcgatcgatcgaatcccctataagtttcaatttttttttcaggttaattttcagcggagcggcgcatgaattggccactcgtacgccatcaaccaatccaaccaacaaatcttatagctactaccgccatgctgcatgatcgttctatctgcatctgaattctgaagaagattagaagatgtcgaggatttcttggtttgcatctgaattctgaagaagatgattagaagatgtcgaggatttcttggatgaaaccgttgcagagagggcagttgccgcggctgacccagagctcgcgggagcagaggcggcagaaggtgtggccgcacgggatgaaggcggcgcccttgtggcgcaccatgcacacgcagcacacgtgcaccatctcctcctcccgcccctcgccgtcgtcctcgtcgtcgtcgccgtcgccgttcttgcgcgcgccgccgccgccgccgccgccgccgttgcccccgccgccgccgccaccgccgtggccttggtcgtcctcgtcctccgagtcccactggctgtccgattgctccagtagcgccatcagcgacatctgcgccgcgggcgcgtcgtccttgccttgctcctcttcgtcgtcgtcgtcgtcgtcgtcggtgtggtcctcgtcgtcgtcctcattggcgtggccgccgccgtcgaccgcggcgcgcctggagccgctggagaaggctgtggctccgaggcgggtggaggtggcgcgcgagaaggtcggcgtcgggcggagcgaccgcgtgcgggagaaggtgcgcgagaacgccgccgcggcctcgccgggggagtagttgtacttgttgctgtggttgctgccgctgttgctgctgctcagcgtcgcgccgccgccgcctccgccgccgctgttcgacgcggcgggcttgggcgacgcggacatccacgcgctcgcggcgcggcgtagccggagccggtcacgcagcggcttccagttgatcatgccaccgacgccaccgccgccaccggaggcgcccgcggcggcggggatcctccctccctcgccgtcgccgccgccgaggccgtcgtgtgggatcttgaggaagtcgcggatggcctggtcgggcgcggacagctgctccgagagcgtcatcgtccgccgcagctccggccgccgctccatctctcagccttgtcgcgctactcttccgccgccgcgccggaagcctcgccgtctgcgtgcgaggcggcg

SEQ ID NO: 22785 - DNA, 858 bp, Oryza sativa
  Clone ID: TF_OsC82464_1
atgagcgaggagcagggattgattcattgtgctgcgctgttgctactgctgctgctggaacacgttggagatgcagccgggagggctaatgctatccagaggaactatggtggagcatgtgtgcagatgaggttgtcgtgcagctcactggcgccattctttctttacctcatccagtggctggattgtggctgctgttatgctcttcccagttatctaggcctttttcacattctcatttgcaaggtttatgcagatggagatagctcagtatcaacgtatgaaaggcgtgcaagccttagagaattctatgccttaaacaatctctgccttccagcgatcatctaccctatccttcaacagcttgagggtagtttgattgagagggacctgaaagggaaagggcgatgtaaagacatagtgagtaggaagcggctcgaagattggaggaagctttgtaacaaggatgtggaaagggaggatgaatgtgggatttgcatggagacatgcaccaagatggttctgcctaattgcagtcatgcaatgtgcataaaatgctacagggactggtatagaagatcagagtcttgccctttctgccgaggaagccttaaacgaattcgctcaagagacctgtgggtgctcacaaattacaatgatgtggttgatcctgtaactctagaaagagaaaatgtgaagttcattgtattgctcatggtctctttgttatgaatacttccagataatattttcttcttctactatgattacctactctaatctggaaacaccacaagttgtgtgtgtgaaattatgaaaccggagaaacccatttggtgaaaaaaaaaaaaaaaaaaa

SEQ ID NO: 22786 - DNA, 531 bp, Oryza sativa
  Clone ID: TF_OsC240119_2
atgggttcgcgttccggctcgacgacgacgagtatgccgccgccggtgccgcaggagaaccagtccgtgggcaaagggacggccatcttcagctacacctgcgtcggcctcacgggcgtcgcgctcgtcgccgtcgtcgccttctactgcaaccgccacgtccggaggcgcgcgcctgtcgtagccgccgagggcgccggcggcgccggcgggcgagaggacgacggactgcgcggcgtcgctgacgtggcggccaagatcccggagttcgcgtacgcggggtcggcgaggcacggcggcggcggcgagtgctcggtgtgcctcggcgcggtgcagggcggcgaggcggtgcggcggctgccggcgtgcaagcacctgtaccacgtggagtgcatcgacatgtggctggcctcgcacgccacgtgcccgctctgccggacggaggtcgagccgccgccgggggacggcggcggccgacctgcgccggcggcagatgagtcgtcgccgacggaggcgctgccaccggtgtag

SEQ ID NO: 22787 - DNA, 1548 bp, Oryza sativa
  unsure (1)..(1548): unsure at all n locations
  Clone ID: TF_OsC33248_1
ggctgcaggattcggcacgaggcaaaaagcggaacgggctaaagccggccgggaacgggcgccgaggtcagacttccacccagacttccagactccagaggcgagggcttcccaatgggcaacatcgcgagcagcggcggcgctagcccacgtccgccgccgccgcatctcgaagcctatagacacggggtgccgcccccgtactaccacagctaccctcgtccgccccccggcgccgccgcgccgccgccggtgccggtgcctgcgcacgtggagcggcacagggccgtggcggtcagcgtcggcgtcaacgtcaagggggacaccctgcggctggtgcccgacgacgacgacgacgatggccgcagcctactcctcgccttctccttcgacgccgatggccccggaagcataactgtctgcttctttgcacaagaagataagtgtgccttgaagaccgcaaaggaaaatttgcttcaacctgtgaccgtgccttttaaggaaggtcgaggtcaggagttcaagcaaccaagtgggtcgggaatcgatgtctctcgttttgaggaatctgagctaactaatgttggggaaggtggtgtattccctgtagcattcaaagtacaaatggatgtgtcaggcaaccaagaatcagaaggggcacatgagaccgaacaatcgaaatatcttgttaaatatgctatatttgtgaagaaagacaatgctgaatatggagttcatgttgtgcagcagatcctttgggtaaatggaatcagatatgtcttgcaggaaatatatggtattgggaacacagctgataagaatgctcatgaggatgattccgggaaagaatgtgtggtttgcctttctgaaccaagagatactgctgttcttccatgcaggcatatgtgcctgtgcagggagtgtgctcaagttttaaaatatcagaccaacaaatgcccaatatgcaggcaacctgttgagggccttcgcgagatagaggttgataacaaaccgattccccaacaaggatctcagcagttaacagcacctcaataaagtctcatctgattgcaagcaaactacctgtacatgtgtcatgtgtatataaaaggtctgtgctttcgggaaggggaaatcggaagttacctggtagcaacaaagctgtttctgatattttgttaaaggatgaacctactgggatttaattgtctacgtttggaccgccaaactcgacttattacttggaaaagacactattttagattgtatggttcaagccttttgcaggggacaatcgttttcttgttctaatttagttactcatccatcactttgatgtgtttaagaccaaaaaaaaaaaaaattctagtggatgcccttattgttctgtgatgtcaccaattggaagtttttcctcctactggcatgtccctgggaagacaagccaggcaacattttggtgctacttttaccatgctttagatcttactattacaagattatgtagatcgacnatcctttttgggttaaaaaaaaaaaaaaaaaaaa

SEQ ID NO: 22788 - DNA, 783 bp, Oryza sativa
  Clone ID: TF_OsC46309_2
ttttgttttttttttgctatgaggtcaccaaatccattatttataccggtgaaaacttggccctgatttttttccctttttacatagatgaagaaactgaaccagcagaaggcatgtttggatgcgaagaaaaaactaagaactgtggacgaccatgagagccggaacgacccctgtgtccttctcttctaccaaggtggtgtgaccttcccattgcagcggctgctgctaggtgatgctgaacctcaaaatctccaagagcaggatgatgaaatatagttgtatttcgagtttgattggtccttacattcctttcacgctccactgcctcgagcagctcttgactggtaggatccttcaaactgataggctgccaacacataggacactgagaacttctctgacaccattcaagaatgcattggaggtggaactcgtgtttgcaaccagtcaatgtggaagggtcactctcacagaacgcctcaaggcagatactacatgcatcatcacatgcatcctgaatcccaccctcaacaaaggctgcagctgatgtcaaaccctccatcttggctttctcatcagttccagatgccattgcaacggaatcacaacactgatatcaggggcaccgccgccgacgccgacgaggacgcccgatcggatccggctgcgcgcgcgaggcgatggggagcacgaaaccctagctagctagctagccttttcgcctcctccttcaacctccttttctctttgggtgagcggacgaataggcggacgcgtggg

SEQ ID NO: 22789 - DNA, 1500 bp, Oryza sativa; identical to SEQ ID NO: 13432
  Clone ID: TF_OsC345789_1

SEQ ID NO: 22790 - DNA, 1180 bp, Oryza sativa
  Clone ID: TF_OsC219076_1
atggcctccgaggacggctgcggcggcggcaacccgccgggggacgcagcggccgcgccgccggtgtggaacgccgcacctgcggcgggagctggctgcggcgatctggaggaggacctccggttccagtgctgcgtctgcctggagcttctgtacaaaccagttgttattgaggatgagaagcgtgtggatacatattctccacaaatcattgagtttttaaactccaagagcaacaattgtgaaattgatggggagaatagacctgaagaaagtaatagtcgacctccacaagaagttacatctgatggcaacactatcaatgggcatccgaagaaagttaagctggaggacgtgtcatgtgctctttgtaaggagctgttgtatcaacctgctgttcttaattgtggtcatgtgtactgcatgtcctgtttgtcgtccttggatgatggtgcactcaaatgccaagtttgtggaggtcttcatccaggagattttcctaatgtttgcttggatttggaccattttatcgaagactattttccagcagaatatgacttaagacgagagaagattaagcttttgaagggtgaatgcaatcaaggatcatcttcaggtacttcatgcataaaagaaggcaggggtagaccaacaaataaggaaaaccgtgcacatcaggatgatgacttgtcagatgttcatattggggttggatgcgattcatgcgggatgtatccaatacgagggaagaggtacaaatgtaaggactgcactgaattaattggatttgacctctgcgaagaatgctacaatacaaaatcgaaacttccaggccggtttaatcagcatcatacccctgaccacaggatggaacttgatcattcagcactcttcaataggttgatgaggctacaagggatacacgaggagggcccaggagagataatcatagaaggtgcatttgttgctcctgacgctgtggtgcatataatagcagatgatcatgaggaaatcgaggataacggtgaggatgatcacttgctctagaaacgaatcagtggtattaaccctgaatttcggcattgtcctttctttaatgtggaggaggctacatgaatcatgaatggtactgtatgaaatggagggattgaacaaagcttgtaggcgtgtaacgcccata

SEQ ID NO: 22791 - DNA, 616 bp, Oryza sativa
  unsure (1)..(616): unsure at all n locations
  Clone ID: TF_OsC198988_1
caaaaaaagtagttnatctcctcgcggcggcgctctctctctctctccgccggcnacgatggccacggcgaacggcgtcgacctcgcgacggcggggctcctgcggctgctggcgatggggatggggccgtccgtgcagattccgggagaaggcggggttccggtgatgatggtgcagcacatcatcatcggcgacgacggcggcgacctgttctccggcgggctcggcggcggcgtgccccccgcgtcgaaggcggcgatcgcctcgctgaaggaggtgaaggccggggaggacggcgaaggcggggactcgctgggcgactgcgcgatctgcctggacgccttcgccgccgggaaggagatgccgtgcgggcaccggttccacagcgagtgcctcgagcggtggctcggcgtccacgggagctgccccgtctgccgccgcgagctccccgcggcggaacaacaaccaccagaggagcagcagagcggcggcgcggacgccggcgagaggcggaggccgagggcggtggtggtgagctacgtggtgctcggagacggcggccgcggcggggagagaggggagccatggaacattaggatagaggacgtggattag

SEQ ID NO: 22792 - DNA, 758 bp, Oryza sativa
  unsure (1)..(758): unsure at all n locations
  Clone ID: TF_LIB4309-011-Q1-K1-H9
caaccacccgcgcgatcgcggcggcactgagtttggtggaggtgcaaggaatgcagcagcattggattatccagaaagggcgggtcaacctatatgcgagtattacatgaagactgggacttgcaaatttggtaccaattgcaaatatcaccatcctaagcaagatggagctgtgctacctgttatgttaaacaacagtggattccctatacgcctgggtgagaaggagtgctcctactacatgaaaactgggcaatgtaaatttggaactacatgtaaattccatcatccggaattcggtggtgttccgatgacccctggaatatacccaccattacagtctccatctatagcttcccctcatccatatgcttctcttgcaaattggcaaatggggagaccacctgtagttcctggatcatatataccaggctcatacaccccaatgatgctctcatctggaatgatcccattgcaaggatggagcccttatccggtaattgatttgaattacatgttctattgtggaaaaataaacagcatacctataaatgcaaaactgataaacaaattggacatgacagccaacttatactatgaaatgcaaagtgaatcaacaaatgaggcacgacagcatacttgtgtcatgatttgtgaagcaggttctttgtaatctagactganagatgtaagatgtgcttattgtcttttaggccagagctggaaggcactcactgatgtgctgcctgaataccagc

SEQ ID NO: 22793 - DNA, 731 bp, Oryza sativa
  Clone ID: TF_LIB4831-020-R1-N1-A9
gtcgttaaccctctcgattccgcggctggtcgcttccccttccgcttccctccgccaaccacgagctagggtttcgatctcgcccccgaccggcttcccctcccttccctcctcctccctccgcgcgaaggctcgccatggagggagccggcgccgcccgcaagagatcccggccggacacggccaacggaggcgccgccggagggaagcgctcgagagcactatcggatgcccttttggcgagggttgtcatttctcgcactttgtccctggtgggtatcaagcagtagcaaaaacactcaatctaggcaacccagctgtgcctgcaccggcaagagctcctatggatcatgctgctggtggtaattctcatccagcttcttctggcaagacacgcatgtgcaccaagtataacactgcagaaggctgcaaatttggtgacaagtgccatttcgcccatggtgagagggaacttggcaagccagcttacatgtcccatgagagtgccatggctcctcctatgggtggtcgatatggaggccgacctgaaccacctccaccagccgctatgggtcctccagcaggaaactttggtgcatctgctactgccaagatcagcgttgatgcctcgcttgctggtggcataattgggaagggtggagtcaacacgaagcagatatgccgagtaactggggtcaagctctcaaaacgtgaccatgaatcagattcaa

SEQ ID NO: 22794 - DNA, 2424 bp, Oryza sativa; identical to SEQ ID NO: 13670
  Clone ID: TF_OsC307477_1

SEQ ID NO: 22795 - DNA, 409 bp, Oryza sativa
  Clone ID: TF_LIB3432-044-P1-N1-E6
cgcttcccaaagatctgcattaacaaaaaataaactgtacatctccggtagcaactcaatttacagaactttgattccggggagttaggagggggtggcaacattcacacagcgcctgagacgggcgtgcgatggacttttttatacatcacggtggtttgggtcacaactgccaggacgccgccttaggaagtgtacgcggatgcggatggggattgcaggagacgccgaaccataggtacattagttgaagcagagccgtaggcatacactcccattggaggagccatcgttggatggtcaaatttgcaattcgcgccgaacttgcagatgccatagcgagaatagaacttgcacagttcttctcccggacgtagtggaagacccactggactcaagacacaatctg

SEQ ID NO: 22796 - DNA, 2157 bp, Oryza sativa; identical to SEQ ID NO: 13677
  Clone ID: TF_OsC206898_1

SEQ ID NO: 22797 - DNA, 703 bp, Oryza sativa
  Clone ID: TF_jC-osleLIB3474044d01b1
cccacgcgtccgcgccgtgtccctgatctgattgattgatgccggggcggccgtgatggcggcgggagcaggagcgggcggcgggggcggggagggcgacagcaacgggggaggcacctccccgggtggcgtgtcggcggcggcgccggcgatcgggccccaccacctcggggttgccgccgcggaagaagcaatgtggcaaatgactttaggaggaggagagtctatggagtccactccataccctgagcggataggagagccagactgcagttattatatgaggactggactatgtaggtttgggatgacctgcaaattcaatcaccccccaaatagaaaactggctgttgctgctgcaaggatgaatggagagtatccttatagagttggtcaacctgagtgtcaatactacttgaaaactggaacgtgcaagtttggtgcaacatgcaagtttcatcaccccagggagaaggctgcacttgcaaaccgtgtacaaatgagaaggaatgtgcttactacttaagaacagggcagtgtaaatttgcaagcacatgtaagtttcatcatccacagccctttaatacaatggttgctgtacggaactttatgtattcacctggacagtctgcaacctctcctggtcaacatacttattctggggccgtaacaaactggaccttgtcaagatctgcatcattta

SEQ ID NO: 22798 - DNA, 2395 bp, Oryza sativa
  unsure (1)..(2395): unsure at all n locations
  Clone ID: TF_OsC208927_1
gaacaagcaacaccatttaataattgcattctctagcgaaacaactcgataggccacactgtacatactaccaattacataggaattcatctcacttaaagcaaactcaaatggaaatgtaggatgttaataaatttaggtagcattacacaataaatcacatgtaaatagttcatgagtaggcacaccataagagtagaaaataggcaagantccatgaactaaggtccaacacttattccttcaccttgtacatccttttcagccacccaagtcttccttcacgtgtatcaagggtaagaaatatttccctatattcaggtttaataaataataaggtagccatgaaatgctcatcactgccttccacagctcctgcatcaacaactaactccattatctctgaaatactgcatcctcctcgacagatcctcacagatgattctaagttagttggcttctctttctcaatgagataactgattgctccatctgcataatttttctgaggatccattttgttatttgggacttcatcataagatttttgtaatattgcctcttcattttgcctattgacattcttacgagtcatctcgacatcatttgaagctatggaagatttattgccaccaatcatagcattgacgcaaatattagattcatcacctgctgaatctgaatccagcatgccttcaaatattatatttagcaaatcaacttttccaagtggttcaaagcgaaacttacaacaatccatcactgcctgaacaatgtgatctattatcttatttgtgatcaactttttcttgagcagggctcgaatgaaattaatatttcccagtgtttcaagtttcactaccctttctttatcccgttgctccatctctcggtcttgtccaatcaatttgccaatctcagaacatacggtgtgagcactttcgaatatttcttgacatttgttcgacagtgcttgtttgaacgtaatttcttcacaatcacagtcttcaggagggaatggtgtgaggttttgatttagatatgtgcaaagttgcgcatacgtcgaacagaaggctggctcagcaacaaccttttcaaatataagattaataacatccttcaaaatatcagcgctagagattcttgtttctattagctggcccttctgaagatcgaacatctttggtgaaaatgtgtttagtatacttttcaatgttttcagaacttcatctttgccagagataatgcctctctgatctttagaatcaaagtggaagcttgattggtcaggcttgttaaatttctcttgcttccaacctaaagaatagggttcttttgcttcagagaagttgtcccaaaatttctgttcccaattagtttgtgcagaccatgaatgccagtcacggctgtctgtcgcgtcaaaccgtttatatgatggagtttgtactatgaaatacaagactttgcatctttgaggaacattaatcagagcagcacaaacgatttctgccatgatgacatatgagaagggaaggatgctcacatgatctttctctgctccaaatcccgaaattttatcttcaccattcagttcaacattaatatcttgacaaaattttaagatgtccttgggcacttcgacattctgacaaagttggagaagttggtcccttgtgtaactgattcgttggtgaaaacttggaatccctggctgatggacttcttcggaggtaaaagtatgctcattcgattctccatggtcaagcaccgagtaaatgttcacctgagaggaaacttgattggcattacttgaaacgacccacttctcatgatctgagcctggatctgggtggtcaaacttgcagttagtgccaaatttgcagattccccggttcatgtagtatgagcacaaccctgtcccaggacgaagtggaagcccaagaacgttcagctttacttgctcaactttacttttgccttcaatatggtggcagtggcatgcattcccagagaaatactcttgttgtggtggcactggcatgcggggagggtggttgaacctgcaattcatcccaaacttgcagctcccgaacttgacgtagtagctgcagtcgggctcgccgggccgccgcgggaactgctcggccggcttcttgtcgtcggcgccatgctgcggcctcggatccgggtggttgtacacgcagctgatgccgaacttgcagctcccgaacttgacgtagtagctgcagtccggctcccccggtcgccgtgggtgctgctcctccaccttcttcgtctttcccgccaccggcggctttggcttcgacgtcgtctcgccgtcgccgacgacgacgggagtcgggcgcccccagaaccagtcatcgtcctgaggcat

SEQ ID NO: 22799 - DNA, 2566 bp, Oryza sativa
  Clone ID: TF_OsC2916_1
tcaccggaggggcggcaatggccggcggagaaaaacgagggaggcggcgaagaccggcgatgccgaggtgcggacgagcgacggcgacaccgggatcggcgggaggtgggggaaggacccgacaggtggggcctcgggggaaaggagagaggaggagacggttggggggagacgatgacaggtggggcctcgggtccaccggtgcaccacgcgcatcaccccctcatagttccacatcagcccccgcagcacgccgtcgagccaccgcagctgcgcctcacagacggcaccgttgaacatcacgaaccgcctggccacgccggcaaggccgctcgggttgttcttgtccgtgttcgggttcctcttgtccaagaatctccccgctgccgcggccatcgggtggtcgcgcgaccatcccacggcgttgaagtcgtacgcgtcgaggaagcggtcaaactcggcgacgacggcctggacggccagcagcgacggcgccaccgccgccgtcattggatgcttgtggttgtgggcattccaggagcggacggctctctggaggacggtgaggctgtggcggtagtagcgggggacgccgaggaaggagcggccgtcggggatgtcagtgtgctgggcgtcggcgttcggcggctgaaccagcatcggtcgtcgttgccgaatgattgccaatcggccgacgaccaccacaagtttgtcttcctctccggcgagcggtgaccactggccagtgaccaagagaggggaggaggaagaggagtatccgccgcgtccaccgctcgtgtcgaggtggacgatgtcgccgaagcgtctccaagtcggcgcgctctgcccctttttttggagcattagtctcgctttttttttttttttttttcagtattccagcaagactttcattaaataagcatctcttgtccgttacaatgtgccttgctcccagtatagacacatatgtacttatgtagtttcgagtctcatgtccgttgaatatatagatatataatatatgacaatatacagaaccaaaaaaaaaagggaaaaagacgaactccggaagctggacgagcaaaatccagtagcttctgcatgtataaacctccttgcctgagaattatttaccgagggaatggatccgagtctcccagtgccgcgaactgccgatgagaactatcgagcctgacattcaaaaaccttccttttctttcccgtttcagagaacagaagaacgcaaaaattgcaagtgaatcgagcttgcctgtaacctatgaatgctttattgagatggcagagaaacaccaccctcgccgagccttctctacagaggccacagctttttattcacattggaggggcctatcataactgtgtcaagtgattgaaaaattgtgctgagatctctcagctcagaaaaatcagcgaccaccgccaggactcgagctaccaccagatgttgtgttagtctgagcacgcatcatggtgtctgctgggaaaacccctttcggcaatattgatccaacaggctcggatgctgccacgggcgatgttacttggtggacgtctttgaaattctggccttaaatccgggaagtggaagccaagggattggccatacggcctgatttaggtgcactcaactctcgggggtgatgatatttacatgtaccgccaaatttgcaacctcctgttcccatataatattgacaatcaggctgcctggccgctcagggaatccatgttcttgttgattgttgctatatggaacgtaaggaccaccataagcaattgtagaggaagatccatggtgccccatgccgtacacaggtccagcttgaacattttgttgagctccacctgacactacagggtttaccgaagccggataagggctccatccttgcaatgggatcattccagatgagagcatcattggggtgtatgagcctggtatatatgatccaggaactacagtggtctccccatttatgtagttccaaatttacattgcccagttttcatgtagtaggagcactccttctcaccctccaccgcgaacccaaactctaatgctgctacccgatgagtgctaccgatgcgccggacaagatctaggcagtggcatgcccaattttcaagctcagtgccgccgcgatcgcgcgggtggttgtagcggcagcggtcaccgaagccgcacgcgccggtgcggaggtagtagacacagtcctcctccccgggccgctccggcagcctccccgccgcgtccccatcccctcctcctccacctccacctcccccgcctcctcctcccagccccatcctccacatcggcccttccaggccggtgtcggggctagccccgccctccccctcccctccaccagctgcggcggcggcggcgtgcggctgctccatgccttcgtcggcgtcagcggcggcgatcggggcggggagcgatcggagtgggaggaggggcggcgcgggggtgggggttgagagagagggagagggaggcgggtgggtgcctcgtgccgaattccttgcagcccggggg

SEQ ID NO: 22800 - DNA, 2079 bp, Oryza sativa
  Clone ID: TF_OsC170_5
ttagggacgacggcgcccggcgaagagcatttccgctgccgggtcagcgagcgggtcgacgttcgcgacgagtggatcgttggctgccgccgccgccgcagcggcgtgctgctggcggcagagcttgaggtggtgctggacggcggcgagctcggcgtgcagcatctcgtactggcggcagagctcgacgacgacgcgcgccgcgccgccgacggggtcgctggcgcgcgcgttggcctcgaacgtgagcgcctgcatggcgtcggcgtggagctccggcggcgtgtcccgcagcgtcttctggatcttgctgacgccgaacaggtggtgcgcgttgaggaatcgccgctgctcgtcggcggggaagtagcgcgcgagcgggcagtccgcgttgcacttgcgccgctggtacttgcacgcggcgcacgcctggctctgccctacgccgccgccgccgccgccgcagttcctccaatctgcacgatctgccatgcttagcaacccagccaacacctcacggccaaactgagcagggaacttctcattactgtcaaccaaatgtaaaagcactgaaccttctggtagctcaacataaaacaagcttgatttgctgtcacactctgatcttaacaattccctggcgcggttagcatcaccatctggattcactacagaaaattcaaatcccagtctctgtgctgctaaatggaatatctttttaacacttgatgctttagacaatggtactggaacagcctgaaggtttgcatggcgggactgctgagaaacccactcgaagtatatagctatctttccttgtttctcaaaatacttggccagagcatccttatatctcccaagctctgcctcagcttccacgggcatctttagtgtactagagcagtgctcaactggtataactagaacatggtttggaacaagtggcccttttgcaagtgcacagtagtaaccttctccaatgctgataacaagatgtgattcaacatctggacttgacaagcagaaccagcaactgctctcaacacgtcttcgttcgattcctattgtaatgctccctggcctcctcatcatgcctataattgcatttactccctcgaggacaggatcctgatgatgtaaatttgaaacatagacgattcccaccggcttcaccatgtctttgcttcttgacatcgtaacgccagtattgcaaatcagcatcctcagcaggacgctttggagtttcttcaacaggaactgactttgctgcttctctttgtttccaacattagcaagtccaataaaacgggtaacatgtgcagcggaatcactcacatatggttcccttgcatagaatacacctttagaaccatggagggtgaagcgggcgctgcctctgagccagaagaggttggggcatatctggatgcctccgggggagaagcctcgggcgctggacgcggccttcgcgagaaggcgaggcgccgcggggccgtagtccccggtgaagtaggtcgggatgggcacggcggcgcgtccctccaggtagtccgcgacctccccgccgccgccgccatccccgtcgccggcatcgggggagaagaactgcccgacgcagagcagcgcgtggaacggccccgtcgactggttcaccgaggtgacgcgcttgaagagctggtggaggcggccgttcgcgtcgccggcgaggaggatccgcggcggcgtcggtcgagacgtcgatcggagttagtacaacagcatgtgtatagatgcccttccccagaagacgagaatcccagatcaggacggtcttaaccatgataaagagtctacaactaataataccacaagttgttttggtaacctctgttgtactgtaaatttttcccccttcagttttgtgttttgacagcaaacaactgtctaactgactggttagttcctcgtcttttcctcgatgggacaatcaccgatcctgtaaaatttcctttcttttgatgacagaatcatacactgtttctatgatatattctaaaattttgcagtcaatacaaagagataatacatcccagtttttac

SEQ ID NO: 22801 - DNA, 627 bp, Oryza sativa
  Clone ID: TF_LIB3598-036-Q6-N1-H9
gtgttgggggtttttttttagtcatacagcattccttctttctctatacatgtcgtatccttcctgtagtaatcctaatgctatattgaaagcaaaaaatttcttgataaatcttctattaatcttacaaggcaaaaggagtatcaacgccgggggggggcggacttgtcgatgtgccatatttctttctgcactctggttacttacagtgtgcatttctgtgggtacgtgcagcagttccccttatcaagcatttgtgttaagaacactgtacagcttcggctcctcaagttttgttgcgggtaatttactcagagagtcaagaacaggaagcagcatgaaacatttgcaccgaggatggcttaggacgcctctctctcggtgcctctttcaccagagggtatttgctgggaatctgaatgggtgatcctccgagacctccctgagacattgtcaggcgatacttctgaatgtgctggtacaggtgccagcatacgtcgggcagacacatcaccagttggtgatgttgcgagaccatacatcacagttcccattggatgatcaaatttgcaattcggaccaaacttgcagatgccatagcgagaatagaatgtgcatatgggctct

SEQ ID NO: 22802 - DNA, 2037 bp, Oryza sativa
  Clone ID: TF_OsC40248_1
tcaggaatcatgactactgcgacttctttttctccttgacctgtgcgttgagagattctcgtcactgcttctcgatcggctcctccatgcatcagagctcatatctctggtgtctgaatctgaagtaacctctaaagtgtcgctgcgctcaccgtttccactctgacgcttcctttccctacggctcttggttgttccacttcttgaccttccgtacccagtttctgaatctgatcgagcatgatatttcattcccagcttgctgccttcactacttgacctctggtattgagtctccaagtctgaatcaacatcactgtttgttgctacccatctatcatccgatgtatcatggtgatccttgcgttttacagctacagactgtcctcttccatcatcttccatgtcccgatgccttgagctccttctggtgctgtgctcttctaaggattgcctcctggtcttcttgtgatgcctgccagtggacttgctgcctgaaggactctcggtggtgtcttgatcgatgaagtccgaagaccggccagaagatccaggctccaaactttcttggcgttcagatctgttcttcctcgacctaactttaccatggtctcctttacctccatttccatggtcaatcctatgtttttcttcacgcatgtacttgtgggactctctttcactttccatgttagaggagtatttgctggtcttatctttaatctctcgatgtcggtgcttatctgatgcagatgattcttttctgtctcgtctgtgctcagtatggctgctgcgttcatgcttcgaatgtgaataatctctggacgagtgctgtttatgtgcatcttcatcccttgttctgcttggtgtgtacctaggatcagaacttctcggtctcctcctgtctgaactctgtgagcgctctaaatgtggggtgtcgcttggcttgccatagatagaatcatccgagggaccaaaaagagcagccatcttcctaatccagtatctaggaggaggattatcccaatcagcccactcataatctcctccagggttgcgaaagcaatgaataaaattacaagcgattccacgtgaacatgtcttgaatcttgacctcatgtattcaccacatatggcaaccttccatcttgtcacagcaacaaattcacatgttatctgcttcccagcaaaataccgtccattcatgctgctgtaggcaataagagctgaatccaatgatttataatgcacataaacatttcctcgaagatggagtgatccatttcgacacaccttaaagttcacaagttcaccaaatttcagaaattctgtgtgcacatcttcataaaattcttcatagctctgttcaatctcttcatctgtacactcaagcccttcatcttgctccaaagcaaggcctggaccactatacatgtttctcatgagcagagtgcatgatttatcaggataaaaatgaactctgctgcaacgcactccaaagcggcaagcccctgtcttgaggtgaaatgggcaatgtgccttatcctgttgaattggctggttttccttggctttctttggtactttgaccattttcttcttcacagtgatttcatttccttcccatatgatctctgctggtccatcttcaacatattcccattcgtcatcctcctcggttccatttccatggtcatctttatactcgcgggaggaatcctccggagccgtcgactcctctctcgcagccgcggccttctccgcggcgcgcgcggcggcggcctccagccaccggcgctccgcgtcctcgaaggctcgccgcgcgcgctcggacgcgtcggcctcggcctcctcgagctcccggaggcggcgctcctcctccgggtcggccgcgagcgcctcagccgccttccgagcggcctccgcggcctccctccgcgcccggcgccgccgctccttcttccgctccctccgcctctccttcctcgtgaccgccgcatccgccgccgcggcgggatcagcggccgccgtcgacat

SEQ ID NO: 22803 - DNA, 2433 bp, Oryza sativa
  Clone ID: TF_OsC5401_1
gctcggggctcccgctctcgctctcgctccccctcccgcgtgccgacctcgccgcgccggccacccggggttcctctcgctccccttccttcctccctcttccgcctccgcctcctcctcctccgcccttacccccgcgcgcgtgcacgcgacggcgcggcgatctgatgctgccgccgctgctgctgcaggcgccgcggtgatggcggcggcgccgtccgccggcggcgttggggagggctcttcctcctccgccgccgccgccgctgctgctgctgccgcgacgatcgggccccacgtggtcgacgaagaggcaatgtggcagatgaatctaggagaagctatggaagctgggccatacccagagcgtattggagaaccagattgtagttattacatgaggactggcttgtgcaggtttgggatgacctgtaaatttaatcacccagcagatcgtaagatggctgttgctgctgcaaggatgaagggggaatatcctcaaagaattggtcaacctgaatgtcaatattatttgaagactggaacatgcaaatttggagcaacatgcaagtttcaccacccccgagaaaaagctgcaattgcaacccgagtacagctgaatgctttaggctacccattgcggccgaatgagaaggaatgcgcttattatttaagaaccggacagtgcaaatttgggagcacatgtaagtttcatcatccacagccatctaatacgatggttgctgtacgtggctctgtttattcacctggacagtcagttacttctcctagtcagcatacttacccaggggctgtaacaaactggcccttgtcaagatctgcttcgtttattgcaagtccaaggtggccaggccattctagctatgcacaagtgattgttcctccagggctcgttcaagttccagggtggaatccttatgcagcacaaattggttcttcatcctcagacgatcaacagaggacagctggaggtgcacaatactatactggctcacgtcacagtgaaacacctaacatgggtgaccagggaatgttttcatcataccaagctggttctgttcctcttgggctatatacagtacagagggagagcatatttccagagcgacctgaccaaccagaatgccagttctatatgaagactggggactgtaagtttggtgctgtatgcaagttccatcatcccaaggagagaattatccctactccaaactgtgcgttgagctcattaggtcttccactgcgtccgggagagcccatatgcacattctattctcgctatggcatctgcaagtttggtccgaattgcaaatttgatcatccaatgggaactgtgatgtatggtctcgcaacatcaccaactggtgatgtgtctgcccgacgtatgctggcacctgtaccagcacattcagaagtatcgcctgacaatgtctcagggaggtctcggaggatcacccattcagattcccagcaaataccctctggtgaaagaggcaccgagagagaggcgtcctaagccatcctcggtgcaaatgtttcatgctgcttcctgttcttgactctctgagtaaattacccgcaacaaaacttgaggagccgaagctgtacaggtctcgcccttttgcctcacatttgagctttacataccggagcttgcttcaagacttccaacatgtatcgcattcaggcaggaaaaagttcttgcttgttagggatgctcttttgccccgtgtaaacgggacaaccgaccttatttaaacatctatatatggaacaaactcacctctggacattcgatttcgagtgatgtgccttgatccctttgttgtagttatacaggtgccttgcaatggacaaagcttttgccaaacgggggatatgtgcaaatcgctctcctctctgtttctttcttttttttgccttccctctaatttagcagtttcataaggggcaacccccgcttctggaattgtgcatgttgaggatgcggaaataataggcaattgtataatcatctacatatttataccctgtcccttgttcccatcacaaatgtttgataaggggaattgttgcaggtacccacagaaatgcacactgtaagtaaccagagtgcagaaagaaatatggcacatcgacaagtcaggttgccattggcgttgatactccttttgccttgtaagattaatagaagatttatcaagaaacttttttgctttcaatatagcattaggattactacaggaaggatccgacatgtatagagaaagaaggaatgttgtatgactagatgaataacagatgagtatgtgatctctgcatctattgttagaaacaatattgttttgcacacggcaatgcatgtgacttgttacattggtaatgagaaaacaaggctggattccctggccc

SEQ ID NO: 22804 - DNA, 1653 bp, Oryza sativa
  Clone ID: TF_OsC6441_1
gttctagatcgcgagcggccgtccttttttttttttttttttttttttttttttttttttttttagttagatatgctcaacaaagtcaataaaaaaatactatagcatatgatgtcacctgcacatgaacgcccaaaccgaaaggtgcatatactcaaaatgcatcagctaaaaccactaaataacagggaatacatcagatgccacagagatctacaaagacgacatacctacccaagtagtgcggtttcatgtttaattcatatgcgaggaatgaataaggcatggatttaattcggccttgcgtcaatatatttgtctctcttctcagctccctgaattcgacaccttggcgatagcctcctgagggggtgggtggtcgaacttgcactgcataccaaacttgcacacgccagtcttcatgtagaaggcacataccacggcatcctctcttcttggtaggccagcaagagtaagctgcacagactcctcagcaggctcccagtttgcagagggatcgggagcagaacgatcaattgggtggtgaaacttgcatcggtcagcaaacttgcaaaatcctgtcttcatgtagaaatcacaaacagttgctccaggcctctggggataggtgactggcccaggtccaacaggcatgtgtaccgcatgaaaatacaagccttgcaagaagtctgcagaggtaataaggaacatggatccctgagaaggtagaatggtgtgtccccatggaagaggaaaatttacttctccacggtctggatggttgtatagacaggtagaaccgaactttcaactgtctatctaaatgtaaaaaggacaatcaactttacctgttctcataggcagtcctttagagttaaactcttgcgcagcagcaactggagtttgcatcttcgctgaaactgaatcagctgctgaaccagtatccgtttcacttacaggagtcgctcaacttacgggagcatcatgacttgaaggtatgtcaatatggttggaatgattggacgtacacaatgcaagaaatttggatcagcctgtttgaacataaaaatcactcgtattttccaacggtactgcatcatcctataactttggatgattgaacttgcatttcgatccaaacttgcatttaccagtcttcataaaaaaaggacaatctggttccccttcttgttctggataggattcttcaacatttgcagcctctttccaatttggaatcccaccctctggaacccattgtggatggtcaaatttgcaggaacctccgaatttacaggttcgggtcatcatatagaaggcacagtccttttcccccggtcgctgtggatatataggaaggctgctttcaagcctagggcgcttggtcatagtatttgaagaatacaaagcctcaatctgttcaacagtactatggcttcccataattggctgatgatagagaactcccatggatcgcctcgcgccggccagccgcgcgtcgaggtcggcggcggccgaggaagggttggcgagcgggcggccgccgtagcgggccgcgatgaggtcgacctcgtaggacgagtaccccgccgcggccgcgccctcgccgcccgcggcgccgccgtggccgtgcgggtagaaggggtccgacat

SEQ ID NO: 22805 - DNA, 1605 bp, Oryza sativa
  Clone ID: TF_OsC23226_6
atgtcggtgatggacgccaatcaggcgtacgctcggcaccactttgacggcggacacctgcgtggtgaccgcgccgacgtgctggcgcagcaggctgggatggatatcggcagcatggcggactcggaggatggagatcacgttgcgacgacgacgacggagcagcgctacgacgacgacgggcacctcgtccccagcagcggcggccaggaggaggagggatccggcggccgcgacgtcgtcgtccccggcggccacgtcgctgaggattaccgctctggcgttggcgtccccgtcggccgagacgcaggcggcgccacctcctccccgccgcagccagtccacgtcaccccgagcatcctcgtcggcagcatccacgcgccggtcttccagggcgagctcgtcggcatgaagttcggggtcgggtcaggctccatgggtgccggcaccagcgcgaccaggcgcctccccgcgaccggttttggtgctctgccgaccagcagcatggcggaggatagtgccgaccacgccgacgacgaccacctcgccgaggaggaggaggaggaggaggaggagcactacatcgacgacgggcccctcgtccccagcagcggcggccaggaggaggagggatccggcggccgccacgtcttcgtccccggcggccacgatggtgaggaggaccaccccgacgacctcgtcgccgacctcgacctcgacctactcgtcgacggcgtagtcggccctgtccccggtggccacctcaacgcagatgcccccgccttcgtccccaccacccgtgggcgccaggacctctattccgccctctcctcatccgcccccgccgccggttaccggtaccgccactacatcacctcgtccgcgctcgcagaagccggccacgtgtccccattcctcggtctcccgtacgccacggccttcgattctccgctcgaccgcgagttggtcggcccgtcgtcagcgccgccgccgtgctccgccgctagccgtgcctggttagtgcgctgttcctcaccgctctccgactccgagtggactcggcgttcgatcctggcgcgagaggctgcacacacaccggcctccaccgtcactgggcgtgggcggttcgagttcgtgcccattcccggcgcaccctatgctccgccgccgtcattcgcccccatcgccgccggagctggaccagcagcgcgaccgctacagcagctggcattcggactggaggaacacaagacgaagctgtgcgcggaatattattcccgtgggcttggttgtcctcgtggcaacacatgcaagtacgcccatggagaagatgacctgcgtttggtggtggcggtgagctctctagccgacgccggtgagggctcctcgtcctcggattcgtccttcgccgctttgggaggggaagacaagtacaagacgaagctatgcaagacgttcacgagtggtggattatgcctgtttgcagccaactgcaggttcgcgcatggggaggtggagcttgggaagaaggagccgtgctggtatttcttctccggtcagacctgcccccgcggtgacacctgtggtttccggcattcctactag

SEQ ID NO: 22806 - DNA, 1164 bp, Oryza sativa; identical to SEQ ID NO: 13694
  Clone ID: TF_OsC333015_1

SEQ ID NO: 22807 - DNA, 1648 bp, Oryza sativa
  Clone ID: TF_OsC3834_1
ctcgagttttttttttttggtgctccccccctttttttttttttttttttttttttttttttgacaggtaaacaggcagttcatactttcagataaccatatctaactttccaggtacaggtattgcaaccatgacttcatatcatgtaagcaccatacatgatatcaggtattgcaacagacagcacaacataaaattcagtctaacaacccgcagactatgtcttgactctgaccaggtttccacatggctaatctaaatgtcttgagaccaggattccaaaatggctaactaattgacatctccttttcgctcaagacaatggtttttcccaatggctaactatagcatcttgttttcgccttcaggtggtggcgacgaaagatcaaaggtttgatttcgcctactcggtttcgtctatccagtcaccatagatcctgctgatcttgtcagggcccttccatttctgaatgggcctctgtacctgcccagacctttggccggcaatggtagaacgctgcgcctgcacgcctagatggtacacgtctgcatgagggagcactgtggtggatgcagcagcggtctctgctggagctttcgcagataccacagcttgcttggagtcgggagttgctgcagcatccctgctgtctatgtcaacaagtcccccaccatacttgtggagttcagctgctccatgagcgaagtggcatttgctgccaaaggggcagtacccagtcatctcccacttgttacagatcctcgtcttccagttcgacggcttctgcatcggcccattccccgccgcggcggaggcggaggcggccgcggcggccgcagaattgtagctcccgccaccgccgccgccgccgacgctcggcgagaggctgatcgcgacgctctccctggccttggactgctcgtcgtggaggaacgtgcacgcgtcgccgtaggggcatccctcgtcggtgtagaacttcttgcagtgcctccccttgtaggccctcccggagccgccgccgccgccgccgccgcagcccgcgtcgccgccggcggtgggtcccgacgacgtcatgatggggatctggtgctcctccctcgcctccgtggcctcctcgtgcgccgcgacgatctcctgccagttgggcggcggcttgcggagctcctccatgccgtgggcgaagttgcagttggtgacgtaggggcaggtccccgccctgaacttgcagcacagcttcgtcttgaagaacatcttcccgatcgcccgcgacttgctcgtgttcccgccgccttcgccgccgccgccgccgcgggatttcttgcccggaggtggctgctcgctcccggccctcgaggagccgccgccgccgccgtcggcgttccactggctgttgtagtcgtcctcggtggcccatatcccggcgtccccgccctgcgccgccgcgttcgcccaggcgtcggggcccgccgcgtccgggatgatgtggatggcgttggtgtaatccatcacccgctaccaagaatcgaaggcagcggaagaaggaggaggtgggagagacgaacagcgaggtcacttgcttgctcggtgatggcgaacggcggcgccggcggcgaaggcggcagcgctatcccgccgaggagatgagt

SEQ ID NO: 22808 - DNA, 1373 bp, Oryza sativa
  Clone ID: TF_OsC4710_1
gcacgtcgcagccaacacctcacaccactctcttccaaactccacatctctcacctcctctcgcccacccaatcccttccgccttctacccgccgccgccgccgcgacgagccggaaaccctagccgagctccgaggcggcgtgcgcgagcgcgagcgcgggcgcgggtgtgggggagccgagagatggaagtcggcggccgcaagaggggcaagcccgacggtgcgaacggcgccggcgggaagcgcgcgcgagaatcggagtcatttcaaaccggtgtaggaagcaaatcgaagccatgcaccaaatttttcagtacctctggttgcccctttggtgagggttgccacttcctccaccacttccctggtggctaccaagctgttgcaaagatgaccaatcttggtggtccagctattgcgccgcctccaggaagaatgccaatgggaaatgctgttcctgatgggccaccaacacccactgttaagactcgcctgtgcaacaagtataacactgcagagggatgcaaatggggggataagtgccactttgcgcacggtgagagggagctcggcaagcctatgttgatggatagctcaatgcctcccccaatgggaccaaggcccactggtcactttgcacctccaccaatgcctagccctgccatgtccactccagcaagctttggcgcttcggccacagccaagatcagtgttgatgcatctcttgcaggtggcataatcgggaggggtggggttaacacaaagcagatatccagagtcacaggggccaagctggccatccgtgatcatgaatcagacaccaacttgaaaaacattgagcttgagggcacatttgatcagatcaagaacgctagtgcaatggtgagggagctgattgtcagcatcggtggcggtgcccctccacaaggcaagaaacctgtgggaggatcccaccgcgggggaggccccggaagcaacttcaagaccaagctgtgcgagaacttcaccaaagggtcgtgcacttttggcgacaggtgccattttgcccatggtgaaaatgagcttcggaaatcagctgctgcttgagatccattgtggtttgtagcgattagtcattgtaactcgaaactttgagggctgatgctgaattttctgaccgtttaggcttatgtgctgtcttgttttacctctggattctttattgcattttatttttgagctatttctcgtacgcctggttatgtgattatgttatcccttttctcctgcgatgttaaagcctactgtggttgatgattactatgcttttcataaaattaatgctactgtgactgtttctctggcaaagtgagcagtctcgttgattgttgg

SEQ ID NO: 22809 - DNA, 2038 bp, Oryza sativa
  Clone ID: TF_OsC98105_1
atggagccgtacgcggcggcggaggggggaggaggaggaggaggtggaggcagcaccgacaccgggctcgaagagtcgatgtggaggatggggctgggcggcggcgggggtggcggaggggaggcggtggcggcagggaggctgccggagcggccgggggaggcggactgcgtctactacctccgcacgggggcttgcggctacggggagaactgccgctacaaccacccgcgcgatcgcgccgccgcagcagtgttaaatggaggtgggaagaccacacattcggcagagtatccagaacggccggggcaaccagtttgtgagtactatatgaagaatggaacttgtaagtttggctctaattgcaagtatgatcacccaagggaaggctctgtgcaagcagtcatgttaaattccagtggataccctctacgctcaggtgagaaagattgtacctactatgtcaaaactggccattgcaaatttggatctacatgtaaattccatcacccagaaattggtggagtttcagagacacctaacatgtatccaccagttcagcctcagcctatctcttcctctcatccatatcaacatcttgctggctggcaaatggggaggcctcctgttttgccaggatcatttttatcaggctcatatccaccaatgatgcttccgtccacagtcgtaccaatgcagggatggaacccttacatttcacctgtgaaccaagttgcgtcagctggggggcatcaaactgttcaagcagggccgttttatggcttatcgcaccaagggccttctgctgcagtcacttatggcagtcagtatgcaccgttatcttcttcaaccatgccttcaagtagcagtaaacaagaacctgcctttcctgcgcgacctgggcaacctgaatgccagtattatctgaagacagggagttgtaaatttggatctgcatgcaaatatcatcatcctcagtatttgaatacacctaagtctaactgtatgctgagtcctcttggtcttcctcttcggccgggtagccaaccatgtgcttactatacacagcatggattttgcaaatttggtccgacttgcaagtttgatcacccaatgggtactctaagctatagcccttcagcgtcatcgattactgatttgcctattgctccctatcccctcaattacgctgttgctcctgtggctccaccttcatcttcttctgatttgcggccagaataccttctaaccaaagagttttcagccaaccagtcagcgtcacctggtactacatgcggacctgctggagcaatgttaaaagcgtacgctccacacatgcttatccgacctcaaacttctggagctggtggcatggttacaactcatggtggagagctctaaccaccttcagcaagcttctcgggacttttttggcatatggtgaatgagatctcgtctcctttttttgcgtcagttcgacttaccctctcagcatcagttcacttggacccccactcattgtgaataaggcttcaactgactttgacaaaggcatggccaaggtggtaatcttgccacctgaataaattcatcatagatagataggcagtggcaagctcattcacttgccgtttatctcttcatgtctgaaatggaacaggggtcattctgaagtccagttaactgtttgactgtcattgcactatgattcagagcttcgaatccatctcctcggtacataattttatcggcggagcaggccgttgagtgtgcaccactgcagagagtttcatgtcagaaagttatttggtttggtcgctcttgcccaaatctctgtttatttttaatcatcatatatatatgcaatctcgagttcagctatatgcatattcatatatatactgggatcaagaaactgtaatcacacacttggaaaccctcatctgaatcgccccaagctaacttgctgcatcatcattttgctcatttagtcgattgcatccgacttatgtttgaaccctgcaaaaaaaaaaaaaaa

SEQ ID NO: 22810 - DNA, 1403 bp, Oryza sativa
  unsure (1)..(1403): unsure at all n locations
  Clone ID: TF_OsC2916_5
gcagactgactacacagatgtgtgtagttagccgcatcatgtgtcgctgganacccccttcggcaatattgatccacaggctcggatgctgccactggcgatgttacttggttgacagattggtctttggtcgaaatgtattctggccttaaatccggggaaggcgaagacggagccaatgtggcaatagagaagccaataggatatggggcaattggcatatcagagaggggcaaagcagacggactgtagccaagcgtgcccattgggtgatcatacttgcatgcaactccatatctgcaatacccattttgggcatagtatgcacaaggctgagcccccggacgaagtggaagacaaagggagttgaccatatagcctgatttaggtgcactcaactctcgggggtgatgatatttacatgtagctccaaatttgcaatctcctgttctcatataatattgacaatcaggctgccctggccgctcagggaatccatgttcttgttgattgttgcttgattgtccagttgaggaagcatatggaacgtaaggaccaccataagcaattgtagaggaagatccatggtgccccatgccgtacacaggtccagcttgaacattttgttgagctccacctgacactacagggtttaccgaagccggataagggctccatccttgcaatgggatcattccagatgagagcatcattggggtgtatgagcctggtatatatgatccaggaactacaggtggtctccccatttgccaatttgcaagagaagcatatggatgaggggaagctatagatggagactgtaatggtgggtatattccaggggtcatcggaacaccaccgaattccggatgatggaatttacatgtagttccaaatttacattgcccagttttcatgtagtaggagcactccttctcacccaggcgtatagggaatccactgttgtttaacataacaggtagcacagctccatcttgcttaggatggtgatatttgcaattggtaccaaatttgcaagtcccagtcttcatgtaatactcgcatataggttgacccgccctttctggataatccaatgctgctgcattccttgcacctccaccaaactcagtgccgccgcgatcgcgcgggtggttgtagcggcagcggtcaccgaagccgcacgcgccggtgcggaggtagtagacacagtcctcctccccgggccgctccggcagcctccccgccgcgtccccatcccctcctcctccacctccacctcccccgcctcctcctcccagccccatcctccacatcggcccttccaggccggtgtcggggctagccccgccctccccctcccctccaccagctgcggcggcggcggcgtgcggctgctccat

SEQ ID NO: 22811 - DNA, 2073 bp, Oryza sativa; identical to SEQ ID NO: 13700
  Clone ID: TF_OsC42413_1

SEQ ID NO: 22812 - DNA, 747 bp, Oryza sativa
  unsure (1)..(747): unsure at all n locations
  Clone ID: TF_LIB4309-005-Q1-K1-C12
ctggtcgcttccccttccgcttccctccgccaaccacgagctagggtttcgatctcgcccccgaccggcttcccctcccttccctcctcctccctccgcgcgaaggctcgccatggagggagccggcgccgcccgcaagagatcccggccggacacggccaacggaggcgccgccggagggaagcgctcgagagaaacggagtcatttcaaactggtctatcaagcaaattgaagccttgcaccaagtttttcagcactatcggatgcccttttggcgagggttgtcatttctcgcactttgtccctggtgggtatcaagcagtagcaaaaacactcaatctaggcaacccagctgtgcctgcaccggcaagagctcctatggatcatgctgctggtggtaattctcatccagcttcttctggcaagacacgcatgtgcaccaagtataacactgcagaaggctgcaaatttggtgacaagtgccatttcgcccatggtgagagggaacttggcaagccagcttacatgtcccatgagagtgccatggctcctcctatgggtggtcgatatggaggccgacctgaaccacctccaccagccgctatgggtcctccagcaggaaactntggtgcatctgctactgccaagatcagcgttgatgcctcgcttgctggtggcataattgggaagggtggagtcaacacgaagcagatatgccgagtaactggggtcaagctctcaatacg

SEQ ID NO: 22813 - DNA, 2152 bp, Oryza sativa
  Clone ID: TF_OsC49276_1
cggcacgccgtgctgcacccccgggctggaggcttgtctcctcctctctcctcctcgccgcctcctctcctcgcgtgcctagcttcccttcccttcccttcccttcttccctactcctcccactccactccacgcgcacctcgccgcgtccctgatctgattgattgatgccggggcggccgtgatggcggcgggagcaggagcgggcggcgggggcggggagggcgacagcaacgggggaggcacctccccgggtggcgtgtcggcggcggcgccggcgatcgggccccaccacctcggggttgccgccgcggaagaagcaatgtggcaaatgactttaggaggaggagagtctatggagtccactccataccctgagcggataggagagccagactgcagttattatatgaggactggactatgtaggtttgggatgacctgcaaattcaatcaccccccaaatagaaaactggctgttgctgctgcaaggatgaatggagagtatccttatagagttggtcaacctgagtgtcaatactacttgaaaactggaacgtgcaagtttggtgcaacatgcaagtttcatcaccccagggagaaggctgcacttgcaaaccgtgtacagttaaatgttctaggctacccgatgcgtccgaatgagaaggaatgtgcttactacttaagaacagggcagtgtaaatttgcaagcacatgtaagtttcatcatccacagccctctaatacaatggttgctgtacggaactctatgtattcacctggacagtctgcaacctctcctggtcaacatacttatcctggggccgtaacaaactggaccttgtcaagatctgcatcatttattgcaagccccaggtggcctggccattcaggctatgcacaagtaatcgttccccagggccttgttcaagttccagggtggaatccttatgctgcacaaatgggctcttcgtctccagatgaccagcaacgaacacctgtaaccactcaatactatggctcacgtcagagtgaaacaggtggtatgggagatcatggaatgtatcagtcataccaaggaggctctgttccagtcggtgtttacacagtacaaggggaaaatatatttcctgagagacctgatcaaccagagtgtcaattctacatgaaaactggagactgtaagtttggtgctgtttgcaagtttcatcaccccaaggagcgactggtacctgctccaaactgtgcattgaattcacttggtcttccactacgcccgggagaacctgtctgcacattctattctcgttacgggatctgcaagtttggtcctaattgcaaatttgaccatcctatgggaacccttatgtatggaagtgcaacatcaccaagaggtgatgtgtcatctatgcattatcagttgtcaccctcaccagggcatccaggaatattgcttgatggaggctctggaaggtctcaccgggttcctcagtctgattcccagcaaataccctctggcgatgggaatgccgagagagaggcatcataagccctcctcggcctttcctcatgctacctcccattcttgactcttcagtaattatctccaacaaattcaaagagctgaagctgtacaggtccttgtccatcctttttctgcttctctgaatcaccacacaccggtgcttcatcatgtatcacattcaggcaggaaaatgttcttgcttgcccctccccgccccaattcctgcatgccccgtgaaaataaatggggcaaccattcttatttatccctaccatatatacacacacaagatacactcacctcctgacactcggttcggcgaatgatgtgccttgatccctctgttgtagttatacaggtggcctgcagtggacaaagcttaccaaactgactgtattggggattctgtttcgttttgctcttcttcctttctaggcattggggagtaagcgcaggacttgctgcttgtgcaagtgtgcatgttgaaaacaacggaaataatgctctgccttaattgtaataattgtaatttatgttctaccaactgaattatttgttcaataaaagaatcggccatggctgcgcgatctgggtcattgttctcgacaaaaaaaaaaaaaaaaaaaa

SEQ ID NO: 22814 - DNA, 1460 bp, Oryza sativa
  Clone ID: TF_OsC1290_1
caaagttaaaaacgataacatatgaacttgtttttatttagcatatgctccctttgttgtctactttttctgtatgtaatgcgctatgacgactctaaatcccacgcgtccgccctcgcccccggcctctccccaactcggcgtcgcgccgcctcaaccgaagcaaggagcaaagcggggattcagaacgggaaggagaaggtccggttcgtccgctctcgagctcaagtgtcagttgaagtgttttgaaagtcatggcggagcatttggcttcaatatttgggactgagaaggatagggttaactgccccttttacttcaagattggggcttgccgtcatggggatcgttgctcccgtctgcacaacaggccaactgtgtcgccgacaattgtgcttgctaacatgtatcagcgccctgatatgatcacaccaggagtcgatgctcaaggccaacctattgatcctgaaaagatgcaggagcactttgaggatttctatgaggatatctatgaggagctgagcaagtttggtgaggttgagaccctcaatgtctgtgataaccttgctgaccacatgataggcaatgtgtatgtccagttcagggaggaagaacaggcagtcgctgcgcataatgcccttcaaggtcgcttctactcagggcgcccaataattgttgagtattcccctgtgactgatttccgtgaggcgacctgtaggcagtttgaggagaacagctgcaaccgtgggggctactgtaattttatgcatgtaaagcagattggcagggagctcaggaggaagctttatggggggcgatccaggaggagccatgggagaagccgcagcccaagcccacgccacaggaggggcaatcgtgaccgtgatgatttccgccgtgaacgtgatggttatcgtggtggtggtgatggttaccgtggcggcggcggtggcggtggtggtgacggttaccgcggcggtgatagttaccgtggtggtggtggtggtggacgcaggggtgggggcagcaggtatgacaggtatgatgatggaggaaggcgcaggcatggcagccccccaaggcgtgcaaggagcccagtcagggaaagcagcgaggaacgcagggcgaagattgaacagtggaaccgtgaacgggaggaaaagccttgaacgaaagcagtgatatctctatggatggccggttcatgccttcatggcaatcactatccgctggagtcgtggtgtgctgctatgttctaagtggatatttagtgtgtgtcgtttggtactcatgcttggctgagtaacccttttaaatgcaggattctggattctatttacattgtgtttcgtttgacgtgtaaaccgccgtttgtttttaaatatgcaatattggatcttttgtcagtctaaaaaaaaaaaaaaaaaaaaaaaaaaaaaaaaaaaaaaaaaaaaaaaaaa

SEQ ID NO: 22815 - DNA, 1954 bp, Oryza sativa
  Clone ID: TF_OsC2718_1
ttttttttttttttttgtcctcaactgatgaaactactatagatgaataaagtgagggtgaagatactgaaagagggagctctacactggcatacaccccagaaagactaagttatttgcttcttagacatctatcaaaagctgaaccgaaaacgtaacaatccatatagaaaatcgcaatacaacaggctaatcacctaaagatgcagagatatatatagtcacaaaaggcaatggagaattagtgcgccgcgcccaagatgcgtttcggctctcaagcagcgcccttccgctgctcgttctcgccatgagcgaagtggcatcggtcgccgaacgtgcaggttcccttcacgaagttctcgcacagcttggtcttgtagttgctcctgcccccggggccgcctcggcctgctggtgctgctcctgctgctgaaccagcgggtttcttggctggtgtgctcgggctgattgttgcaatgagctcacccaccatgttgcttgcctgctttatctggtcgaaattgccttcgagctcaatgttcttcaggtttgaatctgattcatggtcacgtattgagagcttgaccccagttactcggcatatctgcttcgtgttgactccacccttcccaattatgccaccagcaagcgaggcatcaacgctgatcttggcagtagcagatgcaccaaagtttcctgctggaggacccatagcggctggtggaggtggttcaggtcggcctccatatcgaccacccataggaggagccatggcactctcatgggacatgtaagctggcttgccaagttccctctcaccatgggcgaaatggcacttgtcaccaaatttgcagccttctgcagtgttatacttggtgcacatgcgtgtcttgccagaagaagctggatgagaattaccaccagcagcatgatccataggagctcttgccggtgcaggcacagctgggttgcctagattgagtgtttttgctactgcttgatacccaccagggacaaagtgcgagaaatgacaaccctcgccaaaagggcatccgatagtgatgctcctggccatcatctcctggtacctccggtacgactcctgcttctccagcaagaacttggcatggcacctcgcgatgaacctctccgcgagcctgtcgatctcgttcaccgcaccattgccgtcgccgtcgccgttgccgttgccgccgtcttctccttctccggcagccggcaatgcaccggccgacgtctcctcctccagccagcacaggtacccgcagtcctccccgtcgtcgccgccgccgccgcgcagctcctccgccgcgccgtcggccggaaccaccacgttccacgtcgagtcgtcgtagtcgtagtagtacgggtggtagtgcagctcgagatccttggcgcgagccggcgtgacggcggcggcggcggcccagttgaagcgcagcagcttcatgaagctggcgatcctcttcttgctcttctccggtctcgagcggtagccgatggcgtacttcttgccgccgccgcctctcgtcggcgccctcttcttgcggacgacgtcgaggagcagcgacttgaacttggcgagggcacggaagacatggccgacgtcgttttcgttctgtaaaactctgattactgaatacttgtagtcaaaaagaaaagtaaaaaaatgatgcactgcatgcctcatcggatgctttgcctgtctcaagactttggggccaaaaaaccttggctccatgaagcttttgtttccagtcatgtccttctcaaaggaaagagaagcgacgaacaactttctgtgagcaagcctgttggcacaaaaatggaccttaatctgttgtttgattctttctgcacgccactgactagaattgttcagctggataacagacaagagagagatggagcgatgaactgtgtacgcacttgacat

SEQ ID NO: 22816 - DNA, 659 bp, Oryza sativa
  unsure (1)..(659): unsure at all n locations
  Clone ID: TF_LIB4371-030-R1-K1-G10
ctcctcctcctgcttcccctccggcgacggcggcgcagatctccgagaaatctctagctttttcagcggcgaagcgaatccatggccgagcacctcgcttccatctttggcacggagaaggaccgcgtgaactgccccttctacttcaagatcggcgcgtgccgccatggcgaccgatgctcccgcctgcacaacaagccgtcggtctcgccgacgctgctgctctccaacatgtacctgcgtccggacatgatcacccctggaattgatgctcagggcaaccccatcgaccctgagaagatccaggccgacttcgaggatttctacgaggacatctttgaggaactcagcaagtacggcgagatcgagagcctccacgtgtgtgacaacttcgccgaccacatgatcggcaatggtgtatgttcaattcagggagggaggatcaggccgccagagcgctgcaggcgctgacggggcggtactactcncggccgtcctatncattgtcgagttctcgcncggtgtccgatttccggggaggccacctgccggcaatatgaagagaacagctgcaaccgtggtgggtactgcaacttcatgcacgtcaaggagatcggcagagacctgaggagnaaggttgtttgggcacctgcataggt

SEQ ID NO: 22817 - DNA, 1552 bp, Oryza sativa
  Clone ID: TF_OsC1291_1
agtggatcccccggccgggaggaaacccaccaccgaattcgtccgtactcctcctcctgcttcccctccggcgacggcggcgcagatctccggttggaagttagggtgttcatcttgacacaaaatcatgccgaaatcaaactgtaccgaagcgaaaataagatatggattagctctccttccaattgatttatcgttctgtcaatattgatccgaatacgaaaattttaagtgctgttattttgaaggtttcggaaccggaattcggaattgcagtagcagtggatgcctttataaatcaagttcttgtccttggcttcaaatactcgatgtgtttcttggctaatcctaatccctagctgcttgtgtgttgcgtgtgcaatttctgacccttttgtggtggtgtatatcaacagagaaatctctagctttttcagcggcgaagcgaatccatggccgagcacctcgcttccatctttggcacggagaaggaccgcgtgaactgccccttctacttcaagatcggcgcgtgccgccatggcgaccgatgctcccgcctgcacaacaagccgtcggtctcgccgacgctgctgctctccaacatgtacctgcgtccggacatgatcacccctggaattgatgctcagggcaaccccatcgaccctgagaagatccaggccgacttcgaggatttctacgaggacatctttgaggaactcagcaagtacggcgagatcgagagcctccacgtgtgtgacaacttcgccgaccacatgatcggcaatgtgtatgttcaattcagggaggaggatcaggccgccagagcgctgcaggcgctgacggggcggtactactccggccgtcctatcattgtcgagttctcgccggtgtccgatttccgggaggccacctgccggcaatatgaagagaacagctgcaaccgtggtgggtactgcaacttcatgcacgtcaaggagatcggcagagacctgaggaagaggttgtttgggcacctgcataggtcccggagaagccatagccatggccggagccgcagcccgagcccgtaccattaccggagggactatgatcggaggagctcatcgcggtccagggaccacgacgattactaccgtggaggtagccacgattactaccgtggaggtagccggaggagcagcgagaggcaccgcagcagctacgacagcgatggcagcaggcggcggcacaggtccaggactaggagtcctgtcagggatggtagcgaggagaggagagctcaaattgagcagtggaaccgtgaaagggaggctgcacaagtgtgatctctggattagttgctgtttgcaatggcccatgtttctcatcttgtactggtagccctagattaaattagcatcatatcttatcttaatgatctgagcttggatgtactcgagattttccttactgaacttgaattttctgtcagatgcatgtgttaactgaacctatttggtgttaaattatatttgtactgatggttgtgtgctaaaaaaaaaaaaaaaaaaaa

SEQ ID NO: 22818 - DNA, 685 bp, Oryza sativa
  Clone ID: TF_LIB4309-025-R1-N1-C2
gctcgccaacccttcctcggccgccgccgacctcgacgcgcggctggccggcgcgaggcgatccatgggagttctctatcatcagccaattatgggaagccatagtactgttgaacagattgaggctttgtattcttcaaatactatgaccaagcgccctaggcttgaaagcagccttcctatatatccacagcgaccgggggaaaaggactgtgccttctatatgatgacccgaacctgtaaattcggagggtcctgcaaatttgaccatccacaatgggttccagagggtgggattccaaattggaaagagcaggctgcaaatgttgaagaatcctatccagaacaagaaggggaaccagattggcctttttttatgaagactggtaaatgcaagtttggatcgaaatgcaagttcaatcatccaaaggaaaagggtaatgcattatcgtctggaaataccaatgataagcatctaattgctgataggtctatcttaccagtgaggccttctgagccactttgttctttttatgcaaaaacaggcaaatgcaaatttcgtgcaatgtgtaagttcaatcatcccaaggatattgaaataccttcaagtcaaaatgaaccccaaagtgcagtgactgttgaaggagaaacggatattggttcagcagctgattcagtttcagcg

SEQ ID NO: 22819 - DNA, 2081 bp, Oryza sativa
  Clone ID: TF_OsC53320_1
atgctcctcgtcgacggcgagcccgtctccgcctccgcctcccccaccttcggctcctcccgcggggtgcgcctacttggttgttggagggatttcttcccaccgatcaattcgtcgttataatgggaatttggatagctctaattattgcttaaaataacggtaatcatgtgtcatattttctgttcattagcgaatcaaaccctgtacaggactacaagaaaattccttcctttcagctgtgttaaaaaatggtacctcccaatcatgcaatagtttttttttttaaagtccttccagcgggagttcgccacggttgatccggcgcgcgtcgagttagtgggcacagatgaggtgactacatgcgtgggtgtagtaattcgcaacaacaagactggaatgacctccattagccacatggacttcccaaaaattgtggagggagggctcaaacagatgttagaattacttggtgatgacaatgcaccgtttgatgttgtacattctgctggaaggaagcacatcaaacaggaagggtattcctatccactatgttgcaggatacttgaggtgttgtataagtcccggcagcaattccatcttcgtacattttgtgtccttgggagcaataccacaactgattcatacgggaatacacggccaataatcggtggatttgtggtggagacctcatctggggctgttaatccagcaagctttgaaatgaattcaaggtgtccagatgaaatagttaggagaattcgtgtgagcgtttcttcttatgatccaaattggcaaggaaggctactagagacttatgatactcacagtgatgcttttgaaattgcacctgcctgctggatgccggattgggctgaaatggcatcatcacttaaccagctatcggactctgaggtcttgttgcagtgctccacctctccagctgccgagccaccacattttgtggaaaatgagagaaggatatggagatacttgattgaaaatccatattggcaagacacatttccgaaatacaagcctcgggtcttccataggaccagtgatggaagtacttctggctgtccttttggttcaagttgtcattttctccataacttccctggtggctaccaggctgctgcaaagatgaccagccatggtgggacagctgttgcagctcctcctggaagaatgcctttaggacctggtgctcctaatgggccacctacatccagcgtgaaaactcgcatgtgtaacaagtacaacactgcagaaggatgtaaatggggtagcaagtgtcattttgctcatggagagagggagcttggaaagccgatgctgctggacaactcaatgccacatccaatgggatcaatgccgtttgaggctccaccaatgcctggcccggacatcgttcctccctcaacctttggtgcctcagccacagcaaagatcagtgttgatgcatccctggctggcggtatcattgggaagggtggaaccaacacaaagcatatatcccggatgactggggccaagctagccatccgggataacgagtccaaccccaacctcaagaatatcgagcttgagggtacatttgaccagatcaaacatgctagtgctatggtcacggagctaatcgtccgcatcagtggtaatgcccctccagccaagaacccgggcagggggtcgcatgctggggggcctggaagcaacttcaagaccaagctgtgtgagaacttcaacaaaggctcctgcacgtttggagacaggtgtcatttcgcccatggtgaaagtgagctgcgcaagccgccggctgctgcttgatacatgcgtgtcgtggcttggactagacggccagcatacctgagctccaaatatgaaaacgattgcacacaaggtgaaaatgatatgtgcattgttgctgcttctgcagcatgagatattttgtcatgggaggaaactggatgtaatctgggaggaaatagataacagggaatttcggtgtcttagatttgtagaattaccttggagtttttccctcggcgcttcagtcaaattttgtaatgcttcgaatg

SEQ ID NO: 22820 - DNA, 1401 bp, Oryza sativa
  Clone ID: TF_OsC121777_1
tttttttttttttttttgaacgtcatttcgcttcccaaagatctgcattaacaaaaaataaactgtacatctccggtagcaactcaatttacagaactttgattccggggagttaggagggggtggcaacattcacacagcgattttacgatatgggatagggtcttctccgagtacatgtgtgtttggtggagccccggaggaatctgtcgggtccttggctccttgctgccaagatccactaaagccgataccgacaatcataggtacattagttgaagcagagccgtaggcatacactcccattggaggagccatcgttggatggtcaaatttgcaattcgcgccgaacttgcagatgccatagcgagaatagaacttgcacagttcttctcccggacgtagtggaagacccactggactcaagacacaatctggagtaggcattgatcgcacccggggatgatggaacttgcacaccgcaccaaatttacagtctccagtcttcatgtagtattgacattctggttgatcaggtctctcaggaaatacattctctctctgcaatgcgtattgaggtacaggatatgaactagatctgtagggtgacaacattccctgattgcctgcactggcatcaacttgctgagaagttccataggtttgttgagcccctggggactgcagtcgactctcagaagatgaaacaggcatcatttggccagtatatgagttccagcttggtacttgaacaagaccttgcggtacaatcatcggtgcataatttgagggattctgccatctagggcttggaataaaagaacctcttggaaaagcccagctagccattgttccagtataaggtggacccgcggttgcagaggaatgtacagaaggataaataggtgaaccacgtgaagaagccatagcattgaaaagttctggatggtgaaatttacatgtattcccatatttacactgtcctgtttttaagtaatatgcacactccttttcactcggtcggagtggatatcctaatgtgtttagctgcaccctccctgcaattccagctttttctctgggatgatggaatttgcatgtaggcccaaacttgcatgttccagtcttcagataatactgacattctggttgccccatcctctcagggtattctcctttcattctgcacaatccagtcctgaggtagtaagtgcagtccggttctccggaccgctcaggatatggtccaggttgcatagcgccactgccgctcatggtcatctgctgccacataccctctccatagagagcggcggggtcgtgggaaggctcgtccgtggcggcggcggtggcggggagcgtcaccaccgctggagcggaggcccttccggcgtcgtccat

SEQ ID NO: 22821 - DNA, 2123 bp, Oryza sativa; identical to SEQ ID NO: 15061
  Clone ID: TF_OsC359_6768

SEQ ID NO: 22822 - DNA, 499 bp, Oryza sativa
  unsure (1)..(499): unsure at all n locations
  Clone ID: TF_LIB4506-043-R1-K1-B5
ccacgcgtccgcttaaatattatagcaatacacgactagaaacgtaggaatcggtgcggatgcgggtgcggcaccaggagcaccctgatgacaagtgtcggaattgcaataagataggccactgggctaaagattgtcgctcaaaggccaagaactgccgaaggccacatcgcagcggaggacgacgacgagcccacgctgctgatggcccggacgtgctttggttgaacggtgatgcccgcgcgggtgttgactgacagttttttttttttgggttcagatttggatagaacatgaggatccaaggacatagcagggtgccttcagcaagctgaccgtgcttaattttggtggaatcttagccgggcgtgagctctcttggacgatcttcctcctcccggaattcgaccttttcggttgatcgactctttggctggaaaagatgtccgaatgctncaataaagaaggctcttaaacagcaagctgaaggtgtgaagat

SEQ ID NO: 22823 - DNA, 4515 bp, Oryza sativa
  Clone ID: TF_OsC1517_1379
ctaagggagcagctccggaaactcggcgcggagaagatcttctcgttcccaggttgcttcatcttcagaatgattgctccattggactttgtagaacttgattgtcttccttcgagtctgacgttctgcttcttcaagaaccttgatcggtctttccttgtaggtcagattcttttccagctcgatattacccaggggaacttgctcttctggaactcgaagacatttctttaactgggatacgtgaaacacgttgtgcacatctgcgagaccttcaggtagctcaagctgataagccacttcgccacgtctggcggttatgaggtaggggccgatgtagcggggtgctaacttgccggacatcccaaaccttctcataccacggaggggtgatacccgcaggtatacatgatctcctttttcgaactcaaggtcatgcctccgattgtcagcgtaattcttctgacggtccagggcttcgcccacctcgttccagcacaagggggtgcgacactttcttccgaacattgcctcattcggcgacatctgaatgctggcctgataactgttgttgtatgagaactcagcatatggcaaacaacgatcccaagtgccttcgaaatccaaggcacacgcacgcaacatgtcttctaggatttggtttacccttttcgtctgaccatcggtctgcggatggtaggctgtactaaagtttagatcagtcccgagggcttcatgcaactgcttccagaaccttgaggtgaactgagtgcctcggtctgacacaattttcttggggcagccaaatctacatacgacatgggtcatgtagagttctgccagtttccttccatcataggtggttttcactggcacgaaatgagctgatttcgtgagtcggtccacgattacccaaatagagtcgtacccgctgggggttcttggcaaaccggtgatgaaatccattccgatctcttcccatttccactcgggaatcggtaggggttgcagcagaccagctggcctctgatgctctgccttgactctttggcaaatgtcacacaaggctacgtattcagcgacatctcgcttcattccagcccaccaaaagtatgccttgatatcctggtacatcttcgtacttcccggatgaatggagtaagcggactcatgagcttcctttaggatgagatctcttaactccttcttggccggtacacagatgcgtgaatcgcaccaaactgtgccttgatcgtctatggagaaattggtgtctttcttctcctgtattctttttattaactcttttatcccttcgtcatctttctgagcctcccggatttgcgactctagggtaggctgtactgtcaagctggctgggactcctgtctgtaccacggtcagccttaacttctccaattctctgcacagatgatcttggtcaggccgtatttgagctacattgcaataggccttgcgacttagcgcatcagcgaccacgttggctttaccaggatgatagtggattccaagatcgtaatccttgattagttccaaccatcttctctgcctcatatttaactcggtctgtgtgaagatatatttaagacttttgtgatcggtgtatacttcacatctgttccctattaagtagtgcctccagatcttaagagcatgaatcacggctgccaactcgagatcatgggtgggataattgacttcatgaggcctgagctgcctggatgcataggccacaacctttcgttcttgcattaggacacatcctaagccttgtcttgatgcatcacagaagatctcgaaatcttttcggatatctggcaaggtgagaactggggcagtggtcaaccttttcttcatttcttgaaagctgtcttcacaggctgcagaccattgaaatttcttttccttctttaacagctcggtcataggtctggctagcttagagaatccttcaatgaatcttcgataatatccagctaagccaaggaagctgcgaatctctgacacattcttgggcgggttccaagcaagtacagcttcaaccttgctgggatctacttcgacaccactggaggagatcacgtgtccaagaaatgctattcggtctaaccagaattcacatttcgagaatttagcgaatagttggtgatctctgagcttttccattatcagcctcaggtgttcggcatgttcttcctcgttcttggagtatatcaggatgtcatcgatgaacaccacgacaaactggtccaggtaatccataaagattttgttcattaagttcatgaagaacgctggagcattggtgagtccgaaggacatcactgtgaactcatatagaccataacgcgttgagaaagcggtcttcgggatatcttcagatctgattttcagttggtggtaacctgatctcaagtcaatttttgagaaaactcttgctcctttaagttgatcgaacaagtcgtcaatccatggcaacgggtacttgttctttatagttacttcattcagggctctatagtcgattaccattctctcagagccatcctttttcttaaccagaagcactggggctccccaaggggatgagctaggtcgcacataacctttactctccaactcttcgatttgtcttttaacttctgctaactcattagctgccattcggtagggtctttttgcaattggtgcagtgcctggcgccagttctatggcgaactcaatctctcggtctggtggcatactcgttaattcttccggaaatacgtcgggatattcacagactataggcaccgactccaaggaggtgacttgtaaacaggttaggatagaccgacttgcggtaggggtgttagaggtaaagcggacttgctttcctccaggtccttgcaaggtgatggactttttggcacaatctatctgtcctttgtgcttagcgaaccaatccatccctaggatgatgtccaagctttgcgagtctaggactatcggtttggctaggaagtcaacttcctcaattctaaggttaacttccgggcatatttgagttgcccttatattcctcccaggggaatgtaccatcacaacgtctggagcatcctgagcggtttcagcttgaatgtggttcacccggcctcgaccaaagttgttggaagcacgtgaaccttgtccacttgcctgagagctaggacgaaactgagctgccgctggagtaggagttctggcagtgctgccattagcatgccctgagttggtgttggtaggattctgagggcactgtctggcatagtggcccatctggtcgcaccggaaacactgaactgttgttggtccctgcggtgacttgaaagaggtaacactgtttggcgcagtattgccactaggggcacgctgctgtggctgaggtgccggacggttcatctgaggacgaggggcgtagcctggctggcggttagcctgagtgaccgactggtggtattgcatgggttgaccgtagcgagggtgaggtgcgcctcgggaagaatttccctgatggttagacttgcgtttcttgtattcttcggtagcctcttttctggcatcctcaagtagaagtgccttgttgatcatatattgaaaagtggggaagtcatgagcaagcaactggagtctcattccaactgcgattcctttcaagaatttcctgatcttcttcttgtctgtgtccacttcctcaggggcgtaccgagccaacttgttgaacatacttaggtactcattgacactgctgttgccttgcttaagtctgttgaattcctctttcttcatgtcaatagtgctttcaggcacatgagctgcacggaaagccgtagcaaactcatcccaagcaatgttagtgggttcagggtgtgcgttgcagtaattctcccaccaatctgcagcaggtcctcttagctggtgagaggcgtagagcgtcttctcaaccggagtacactgcactaagttgagttttctatcaacatccttcagccaatcgtcagcctcgacgggctcgacggtctgagagaactctggcggacgagacctcagaaaatctgtcagcttggatctattgttattcgtgtgagggtggccatttccatgcgcattatgctgaaaaccagctacggctgcggctaatccttgcaagatttgtgtctgaactgccatcaggtgctgcatgttgttttccacatgaggtggggaagggaggcgttcttctccagaattgtgactggcagtgcggtgagagcggtgagactgttcaatctctgcatcacgggaagctgtgcgatgcgagcggttgctgcggcgaggttgctcaacttctgcgttgcgggaagcagtacggtgcgaacggttgctgtggtgagaccgctcattagctgactcatgatttgcttctggctcgactctaccatcttcaaaaccaaagcgggctggtgcacgagctgcacggcgggggcggctagccat

SEQ ID NO: 22824 - DNA, 3615 bp, Oryza sativa; identical to SEQ ID NO: 14926
  Clone ID: TF_OsC1528_1944

SEQ ID NO: 22825 - DNA, 3526 bp, Oryza sativa
  unsure (1)..(3526): unsure at all n locations
  Clone ID: TF_OsC22400_1
attcccggngtcgacccacgccgtccgggnaacttaaatattaaagcaaatacaacgactagaaacgtaggaatcggtgcggatgcgggtgcggcaccaggagcaccctgatgacaagtgtcggaattgcaataagataggccactgggctaaagattgtcgctcaaaggccaagaatgccgaaggccacatcgcagcggaggacgacgacgagcccacgctgctgatggcccggacgtgctttggttgaacggtgatgcccgcgcgggtgttgactgacagtttttttttttttgggttcagatttggatagaacatgaggatccaaggacatagcagggtgccttcagcaagctgaccgtgcttaattttggtggaatcttagccgggcgtgagctctcttggacgatcttcctcctcccggaattcgacctttcgataactaaagactgaaaccactctaatgtcaccggcactgcactttgtcagacaaaatgagtacctctttctgctgttctcaatcaagtttcagccataaaaacagatagcggagtcatcattttgtgacatgcatgttcaatcctctctatgttaattaggatgcatcctctctatattaattctgttgcaaatatgccaggtcctcatggttcttcctgtttgtcttgcaatggcatagttattggcaacaaaatagagtgacaatcgcctgctcatgatgaatatttttcagttcaaatcccagtcccaactttagaaaccagccccgagtatggcccgcacggcgagtgccgccaccggtggcgacgagccgccgcccgaaccccaccatcaggccggcgtccagcggccgcccaaaaatgacggcgacggcggtgaggaggcggggggcgggaatgtgggtgttcctgcggccgccgccgacgaggatccaaccgccggcgcggtgggtgccgcggggaggggatcgaggaggaggaggaaggcgggcaggagagcggccgcgccagacgaagaggacctcgacacgatcctcgccgagatcgaccaaaatatggccagtgcggcgctcgattccatgccggagatgaatctggcccaggcttcggcgtccacggcgatggatgtggctgctaccgtgaacgatgttggtgccgaggtgaaggatgacgaaatggaggcggagtcggccgctcctaagaggaggaagcggaagaaggagaaggagaaggagaggaaaactacctcgaaggtggcggaggccgacgcgaagaagccacctaggcacgtgcgggtgatgctggaggtgctcgccaagaggaaagaggcggaggagctgaggaagcgcgaggaggagctgaggaagaggaaggcagaggaggagcggctacagagggaggaggacgagaggatggtggaagagatgaagatgcagcagaaggagagagataagggcaaaacgatgaagaagaggcaggatgggaagaccttgactgggaagcagaaggaggaggctaggaggcttgatgccatgaggcgacagttccttgggcagagtagaattcttgctcgcagcgaccttggcaatgatggtggtgccaatgagagaaagaagaggcccatatatgattccaagagaaagaaagtgcaatcaaaggctgatgaggctgctaatggagatggcggtcacatgcaggagcttcataaggttaacaaggaagaagaagaatgtgccattatggaagagcaaccccactaccgtgtggaggaggatggggagaaaatcaaacttgaggagattaaaggggctgaatcagtagaaagaattaactttgaggagagaatcacaaaggaagagaagaatgaagctatgaaatcctccaatgaggaggttgtttctctagtcacaggctggaagaatagaattgaagaatgggatgttgatgttgatgaaaatgataaggacactagaaaacttactccaaagagagatcctgctaaggtggacaaagctgagaaatatacggacctccgctcaccgatctgctgcattcttggtcatgttgatactggaaagactaaattgttggattgtattcgatgcaccaacgtgcaaggaggggaagcggggggtattacccaacagattggtgcaacattctttccaattgaaaacattagagaaagaaccaaggagttgaaagctggtgctgctcttcatgttccaggatttcttgttattgatactcctggtcatcagtccttctctaacttgcgtactagaggttccagtttgtgtgatatcgcgattttagttgttgacatcatgcgtggtattcaagcacaaacaattgagtctttgaatattttgaagagacataaggcagacttcatcattgttttaaataaggttgatcgactctttggctggaaaagatgtccgaatgctccaataaagaaggctcttaaacagcaagctgaaggtgtgaagatggagtttgatgcaaggctaacagattgtactgtcctagaggttaaggttactgaaggccactgcactacaattgatgttgtgttggccaatggtttcctccgtgaaggagatcaaatagttacatgtggcatgcagggacccattgtgactcatatcagggctctgttaacacctcatcctatgaaagagcttcgaattaagtgcccatatcaacatcataaggagatcaaagcttctcaaggcatcaagatatctgcgccaggcctagaacattcggttgcaggcacaagtctctttgtagtgcagccaggtgatgatcaggaaaagtcagtgaacaaagccatggcagagatggttgttttaatgaacaggattgacaagaacagtgatgctctcatagagtttctaaagagcccagctgtcaatatccctatttatgatttcaatatagggcctgtccacagaaaagatgttatgaaagccagtgtgatgcttgagaagaagaaagaatatgcagctatctttgcttttgatgtcaaagtgatgcctgatgcccgtgagattgccaatgaatctggtgtaaaaatctttgtggcagatgtaatatatcaccttttcgaccaatttaccacatacattgagggtttgagggaaatagagaaggatgaaaagattgtagaggctgtgttcccttgtgttctcaagatcattccagactatgtgttcaacttgaaggacccaattgtcttaggcgttgatgtccttgaaggagtagctaaggtgggaactcctctgtgtctcccttccaatggtttcgctcgtattgggaacattgcctctatccagaatagcagtaagcaagttgatgtggcaagaaaaggagagaaggttgctataaagaatatagtcttgggcgttttcgacagatcacaggaagcactccagatgagcaaaagaaatgtttcgggtgacctcacgttgaaagagtgggagcttgtgaggacgctaaagcacatcttccgtataccttga

SEQ ID NO: 22826 - DNA, 4429 bp, Oryza sativa
  Clone ID: TF_OsC1713_4887
tccgcacgactgctccgctccagttcgtcttcctctgcatcgtcttcgccaacatgtcgaacaccggtgacaacagcaacactggacacaaggagaaggaggctcccgccaacaccaacggaggcaatactgcctcaaattctagcaaagggccattctcagggtacaactcaactttcatcgtgttcatgttcttttctcaaatactactgttaggtgcaatgttttcattgcattcccatgtgacaaatgtttatgcttattctatattaagcatgatatgtagtcagtggcagacgtaggtttaaaatacagatttggcggcagagctagccctaattagttgcactagtttattccctgcagatgtcatacttattgtcttaatattttagattaaaatatatcgaattgtgaccatatttctaacaattcaaaaacctgataggtccttttcggtagttggctttgccgcatcactgaaaccgcacgctttcgatggttcaaactataagagatggaaagcatgtgcagtattatggttgacagcgatgcaatatttctttgtttcacggggcaaaccgagtgaaccgcctctctctcctgaggaggaggccaagttcgaggctgcagattgcctgttccgtggagcattgatcagtggtgctcgccgacaacatagtggacgtgtacatgcacatgcctttagggaaggaaatgtgggatgcacttgaggcgaagttcagggtttccgatcctagcagtgagctgtatatcatggagcagttctatgactaagagatggtcgatgatcgatctgtagtggaacaggctcatgagatacagatgctggcaaaggaacttgagaacaaccgctgtgagttgccatacaagtttgtggcgggaggcatcatcgccaaattgccaccttcttggtccgactttgctatttctctaaaacacaagaggcaagagttcactgtcactgatctcatatgctctttgggtgttgaggagaaggcgagggcaaaggacaaccgcggcaaaagggtggaggggagttctagtgtcaattaagcatcccataacaacaagaaagtcaagcctgatgtcaaactaaaggctacgaatacttttaagaagaaaggcatgggaaagcctaagggtgactgctttgtgtgtggcaagcctgggcattaggccaaggactgtcctaagcgcaaagacagaaagtttgcaaacatggtcattagcgagggtggacgaacatcggggtatggtaaatttttacctacaattgtttctgtctgtcactcacctgattggtgggttgacactggtgctaatatccatgtgtgtgctaacatttccctgttttcttcttatcaggccaggagaggttcctccttattgatgggaaatgggtcgcttgcggctgttcttggtgttggtacggtcgatctgaagtttacttcgggaaagaccgtgcagctgaaaaacatgcagcatgtcctttcaataaagaagaatctagttagcagctctctactatgtagagatggttttagactggtgtctgaatctaataaatgtgtcgtatctaaatatgaaacgtttattggaaaaggttttgacagcggaggcttgttccgcttctctttggataacatgtgtaataagattgtgaactatgtaagcaatgatgacgagtcaaatgtgtggcattcgcgactctgtcatgtgaactttggttgtatgacgcacttagacaacatgagtttaattccaaaatttactttagtgaaaggtgccaagtttcatacctgtgttcaatcgaaacaacctcgcaagcctcatagggaatttgaggcgaggaatttggcacctctagaacttattcattctgatctgtgcgaaatgaatggcgtgtagactaaagggggaaagaaatatttcatgacactgatagatgattgcactagattctgctatgtgtacctattaaaaacaaaggatgaagcattacattactttaagatatatatggctgaggtagaaaaccagctggaaaggaaaatcaaacggttgaggtctgataggggtggagagtttttccaatgagcttacctctttctgcgaagagtttggaattattcatgagaggatgcctccatattcaccctagtcaaacggagtagccaaaagaaagaactgcactctaactgagttggtgaatgccatgttagacaccgcgggactttccaaggaatcgtggggtgaggcaatcctgattgcatgtcatgtcctgaatagaattcctaccaagcataaagaagtaacaccattcgaggaatgggaaaggaggaaattaaatctctcatacctgctcacttggggttgtttggccaaggtaaatatatctataggtgcaaacttggaccaaagaccgtagattatgtgttcctcggttatgctatccatagtgtgggatataggttcttaatagtaaattctggagtacctgacatgcgtgttggtacaattactgagtctagagatgctacatttagcacttctagtgaagaacctatcttaacccctgagcattttgcaccgatagaacacattgatcaaacgcctgagggaaatcctgaggaggataataatgtagctactcgcaagagtatgagacaaagtactgcaaagtcggtttgtgatgactacattgtatacatagtggataacactccaagaaccatagaagaggcatattcatctcctaacgctaattattggaaggaagcggtacacagtgagatggactcgattatgtctaatggtacttgggaagttatcgagcgtccatttgggtgcaagccataggatgcaaatgagttttaaagaaaaatcttaggcttgatggtacaattgaaaagtacaaggcaagacttgtggccaagggttatacccaaaaggaaggcgaggattttttgacatttactcatcggttgcttgcttgaccacgattcgagtattattcgctacggcagcctctcatggtctacttgtccatcagatggacgttaagatagctttcctcaatggagagttggaggaggagatccatatggatcaaccaaacgggtatacattggaaggtcaggagggaataatgtgcaagctgttgaagtccttgtatacattggaagctgttgaagtcctcaaacaagcgcctaagcaatggcatgagaagtttgataaaacacttacatctgctggctttgttgtgaacgaagctgacaaatgtgtattctatcgctatggtgggggagagagagtgatcttgtgtttatatgtcaatgacatgtcgatctttgggaccagcctcaatttgattgaggaggtaaaggactttctatccaaaagctttgaaatgaaggatttgggagtggctgatgttattcttaacattaagctactgagaggagatgagggtgggattacacttgtgcaatctcactatgtggacaaagtcttgagtcgctttggttatagtgactgcaaggcagctcctactccttatgatcccagtgtgctattaaggaaaaaccgaagaatagcaagggatcaattgagatactctaagatcattggttcattgatgtacttagctagtgcaacgaggcctgacatctcatttgctgtgaacaagttgggccggtttgtttcaaatccgggagatgatcattggcatgctcttgaaagagtaatgcgctatctaaaagggataatgagctatgaaattcactacgtcgggtacccaaaagtgctggagggctatagtgagtcaaactggatatttgatgctgatgagataaaggccacaagtgggtatgtgttcacacttggagggggcgctgtttcctggaagtcttgcaagcagaccatcttaacgaggtcaacaatggaagcagaactcacagctttagatactgccacagttaaggccgaatggcttcgtgagctcctgatggacttgccggtggttgaaaaaccagtaccagcaatcctgatgaattgtgataatcaaacagtgattattaaagtgaacagttcgaaggacaacatgaagtcatccaggcatgttaaaagaagactgaagtgcctccgaagctccgtccgcttgagaacctgcacgggtaggcgggcgatcaagtttttgggtagcgcttcaagcgcgactgctctcgttcttcgcggctactgctgctacatcggcgccttcaccaagatgtcaacggagattggagacaagaagatgaacgacatcaacggaggcaatactgcctcaaaatccagcgcgcatagggatggggggtgccaggcccaccccggcacccccggtggcttcgccactggaggtggatga

SEQ ID NO: 22827 - DNA, 5194 bp, Oryza sativa; identical to SEQ ID NO: 14946
  Clone ID: TF_OsC359_7611

SEQ ID NO: 22828 - DNA, 2912 bp, Oryza sativa
  Clone ID: TF_OsC1528_2115
atggctaaggaactcgaactccttaagtttgtcttacccgacaaatttgtggtcgggtgcattattgcgaaactacctccatcttggagaggtttcggtactgcactcgaacacaagagacatgaatactccgttaaggggttgatagcgtctcttgatgttgaggagaaagctcgggaaaaagatgccgcgtctaagggcgatggtgggcagtccagtgccaatgttgtgcacaaggcccagaacaagagtaaggggaaatacaaagctcaacagaccaccaacttcaagaagcagaagaagaacaacaacaatcctaaccaggatgagaggacttgctttgtgtgtgggcaacctggtcatctagctaggaagtgtctacagcgcaaggggatgaaggcacctgcagggcagacttctaagtctgctaatgtgaccattggcaacactggagatggaagcgggtatggtaatttacctactgttttttcagttaatcagtctactaattggtgggttgatactagggccaatgtacatgtttgtgctgacatcttattgttttcttcttatcaggtcgcacggggtttcaccgtcctaatggggaatgggtcacatgcttctgttcatggtgttggcacggtagatctgaagtttacttcgggaaagatcgtgcagctgaagaacgtgcagcatgtcccttctattgacaggaatcttgttagtggctcccgtctgactagagacggatttaagttggtttttgagtctaataaagtagtcgtgtctaaacatggatattttattggtaaaggttatgagtgcggaggcctgttccgcttttccctttttgatttctgcaataagtctgtgaaccatatttgtggcagtgtggatgatgaggctaatgtttggcactcacgtttatgtcatattaattttggcttgatgtctcggctttccagcatgtgtttaattcctaagtttttcattgtcaaaggttctaagtgccatagttgtgtgcaatcgaagcaacctcgcaagcctcacaaggctgccgaggagagaaacttggcaccactagaactcctacattcagatctttgtgaaatgaatggggtgttgacgaagggtggaaaacgatatttcatgacgttgattgatgatgctactagattttgctatgtgtacttattgaaaacgaaagatgaggctctagactattttaaaatttataaggcagatgttgaaaatcaacttgacagaaagataaaaagacttaggtctgatcgtggtggagagtttttctcaaacaagtttgacttattctgtgaggaacatggcattatacatgagaggacgcctccctgttctcccgagtctaatgggattgctgaaaggaagaaccgcacactgactgacttggtgaatgccatgttggacaccgcgggactacctaaggcatggcggggagaggcattgttgacctcgaatcatgtgttaaacagagttcctaacataaataaggacaaaacaccatatgagatatggattggaagaaaaccatcactttcttacttgcgcacatgggggtgcttggcgaaagtcaatgtaccaataacgaaaaagcgcaaacttggacctaagactgtggactgtgtctttctgggatatgctcaccacagcattgcctatagatttttaatagttaaatctgaggtacctgacatgcatgttggtacaattatggagtctcgtgatgctaccttctttgagagctttttcccaatgaaggatacacatagtagttcgagccaaccctttgaagtaattcccagttcaattacactaccagaacaaactgaacatacacatgaacatgtcactgaggaggatgttagtgaagctcctcgaaggagtaagagacaaaggacggctaagtcctttggtgatgatttcactgtgtacctcgtggatgacactcctaagtcaatttcacaagcatatgcatctcttgatgtaaactactggaaggaggctatccgtagtgaaatggattctattatcgctaacgggacttgggaggtgacagagcgaccctatgggtgtaaatctgtggggtgcaagtgggtgttcaagaagaagcttaggcctgacggtactattgaaaagtacaaggctcggcttgttgctaaaggctatactcagaaagaaggcgaagatttctttgacacttactcacctattgctagattgaccacaattcgcgtgctactttccctagcagcctcacatggtcttctcgttcatcaaatggacgttaagacagcttttcttaatggagagctggatgagaagatctatatggatcaacctgataggtttgtagttgaaggtcaacaaggcaaggtgtgcaaattgttgaaatctttgtatgatctgaaataagctcctaagcaatggcatgagaaatttgatagaacattgacatctgcacgcttcgcggtcaatgaggcagataaatgtgtatactaccactatggtgggggtgagggagttattttgtgcttgtatgttgatgacatactaatatttgggacaaaccttgaggtgataagtgaggttaaatcattcttgtctcaaagtttccatatgaaagatttgggagtagctgatagataaacattaagctaattagaggtgagaatgggactacactcttgcagtcccattatgtggagaagatcctgaatcgctttggctacattgatagtaagccttctcaaacaccttatgattctaacttgttgcttcgcaagaacaagagaattgctgggaatcaattggaatactcccaaatcattggctcgcttatgtactatgctggagctctgttggtcggcatccacatg

SEQ ID NO: 22829 - DNA, 3645 bp, Oryza sativa; identical to SEQ ID NO: 15263
  Clone ID: TF_OsC1528_1610

SEQ ID NO: 22830 - DNA, 795 bp, Oryza sativa
  Clone ID: TF_OsC25048_1
ttttttttttttttttttaagcagaatgatccctctttagcacatagtaaaaaggtaatatgtcttagttgcatattacatccatcccataagttttttaacgtcagaaataagaggctgaaatatcaaggcagataaagtagtaaaccttaattgaagtcaatcagttgatgccagtcttaaagcattcatggcatgcaagccaaagagcagacggtcaagcacaggcatcagggtctagctcctgctacggcggtacctgccaccatcttacccatcagcataaggagaaccacctcggccacgtggtgacctgctgtagctgcgcccacgaactggtgaaacactgcggcgccttggagagcgatcacgaggactgtagcttcttctaccataggtcgggctcttgcggtattgagggctgcgactgcggctgcgactcctgctacgacgctttccactacccagacctccaggaccaatacgcaaacgacattcacgagcaaagtgcccagtttcaccacactcatagcacttcatctcagacccaccatgtcgatcacgacctccgcggctacttgagttccgtgagagctcaactctccatccattcttgccatctaaatcacggagtgcatcctcagcatccctcttgtcatcaaaatcgataaatgcaaaaccaggtggtttacgggcaacccagacacttcgcagaactccaaacacacgaaactcatcttcaagttccccggaagtcactcggggatccaagttgccaacatacaagcgggccat

SEQ ID NO: 22831 - DNA, 429 bp, Oryza sativa
  Clone ID: TF_OsC25048_4
atgcgcgttcctggcgcgcgggcgcacgaggggaagtccacctacgagtcacaaaaagaatggagggatctcacgcgcgtccacgtcgtgagtcgtgacgtgctctccttcctcgggatccccaccggcgcctcgtgcgcgcgacagctggggaatagagaaactggacttggcggtggcgagtcgggctcttgcggtattgagggctgcgactgcggctgcgactcctgctacgacgctttccactacccagacctccaggaccaatacgcaaacgacattcacgagcaaagtgcccagtttcaccacactcatagcacttcatctcagacccaccatgtcgatcacgacctccgcggctacttgagttccgtgagagctcaactctccatccattcttgcctattaaaagaggaaccacgcatttga

SEQ ID NO: 22832 - DNA, 3342 bp, Oryza sativa; identical to SEQ ID NO: 15068
  Clone ID: TF_OsC266287_1

SEQ ID NO: 22833 - DNA, 1902 bp, Oryza sativa
  Clone ID: TF_OsC359_7110
atggccgccgccggcgaccataggggcgcgggcgcgccgcctcccgtcggccgtgccggcgaggccgcctttgggcgcgccccgcggctgccatgtggggcccggccgtcagccgcccgcgccctcggtgcggctgacgcgtgggacccacggcgccggccagcgcaagccgcgtgcgcccggtccaccgtggaccgtgaggctgccgcgtgggccccactcccgtggacccggctgggctcggggtgcatggttttgatagtagcacctcggccatataaggaccggtcttcgggcctctgttgcaaagcactaccgtacttccacatgtctagtggggcaaatgaaggctacacgagctgcggcccggtagtcgagatgtcatggcacagggctggtgtcctgctgctaggggctcaatcctgcctacctgtcccggaggttccggccgtaggtggggttgggtcggtactcttgtttatggctaggatgggttgggaactatgtcacgtcttccgtccgtataccgtggtgatgtttaatagagaaaaaggaaagaatgtcagcgggtatacctcaagtaactcaagttttcaactcaatccaccactggcctccagagagttaacaagggcacacccttggtccattccgagcatgctgcttagttcacagctaccattggttcgaagtcaagaccagaatcagtatgtgtttgatcgagcatttgccccccaggtcaatgagcttccaatgccagaagaggatgtccccttttgtcatgattgtagagaacaaggacactatgccctgaattgtccatgggtatatgccaaagaagccccttcctttggtttagcagtgcagacatcgctaaaccagcctcctcacaccaagtcaagcttgcagcctagtgtgcaaagtagagagcccaatggagagaatccattgaatcccgggaaatgctttcctcctagcctttcgtaccacgtggggtcacgtactaagcaagccaaaggcaagaagagtaagaatcagaagagaaaagcaccgatgcgaactgaagaagaagtacgtaagatgactattaccagcaccgaatggcctccagcagggataactattcctagacgtcaaagaggaaataccttccgaggtgcacgacagttgacccagcacctcctaagccatggcggcagagtatctgatagtgaagggtcagatcaagtctcctcggatgatgaagatgagtctccccgacatctcgacgaggaagagatggaatcaaaggcatgcacccgttgtggagaaattggacacattgctagcatgtgtctcacactctgcccttattgtgaagaagaccatccaccaggggagtgtcccacccgcaaggtcacatgttttctgtgcgaaggtacaaaccatgtgcccaaggattgccaactcagtgtgttgttgaccaagaccgcagaaatccaacgaacaaccctacgattgtctcatcagctagttagctccaacagcaacatcgacgatatcatccacagcaccaatgctcctcctgctgcacctgactctgcaataaatcatagcaataataccttcagcaccaaccattctctgcaccgacagcctcagcaaagaattgtcgtcgatggaagaagttgtgtctctccccgaccacctgttagatgtaggccgaaaggtgattgataaaggataatcagaaacatgctcagcatcactcaaaggagacccctgatagtaatcgccctgggccttgttccgggcctgccgaggctcccgctgtccgaacctcctggtgaccgttcggggccacccgccaaaggcgtgttgcttgtggttcgggacggaggtgttatttttcttccggcgagc

SEQ ID NO: 22834 - DNA, 2104 bp, Oryza sativa
  Clone ID: TF_OsC1528_2171
atgtcgataaccggcgacaacaacaacactggagacaaggagaaggagcctcccgtcaacagcaacagaggcaatactacctcaaactccagcaaatggccattctcgggtgtgctccccgatagtattgtggatgtgtatatgcacatgcctttagggaaggacatgtgggatgctcttgaggccaagttcggggtttccgacgccggcagcgatctgtatgtcatggagctgttctatgactacaagatggtcgatggccgttctgtattggaacaggatcatgagattcagatgttggcaaaggaacttgagaacaacaactgtgagttgtcggacaagtttgtggcaggtggcattattgccaaattgccaccttcttggacggactttgctacttctctaaaacacaagaggcaagagttcagtgttactgatcttattggctctttgggtgttgaggagaaggcgagggcaaaggacaaccggggcaaaaagatcgagggaggttctagcgccaatttggtgcagaagaagaaccctcacgcatctcacaacaacaacaagaaagtcaagcctgatgtcaaaccaaaggcaactaccaattttaagaagaaaggcaagcgaaaggccaaaggcgtctgctttgtgtgcggtaagcctgggcattgggccaagaattgtccttatcgcaaggacaagaagtctgccaacatggtcattagcgagggcggaggaacattggggttcttaatagtaaattctggagtacccgacatgagtgttggtacaattactgagtccagagatgccacattttttgagaatgaattttctatgaaaaatgcacctagcacttctagtcaagaacctattttatcccctgagcactttgcgctgatagaacacattgatcaaacacttgaggaaaatcctgaggaggataacattttagcaactcgaaagagtaagagacaaaggactgcaaagtcttttggagatgactacattgtatatcttgtggatgatactccaagaaccattgaagaggcatattcatcttctgacgctgactattggaaggaagcgatacgcagtgagatggactcaattatgtctaatggtacttgggaagtcgtcgagcgtccatatgggtgcaagcctgtaggatgcaaatgggttttcaagaaaaagcttaggcttgatggtacaattgaaaagtacaaggcaaggcttgtggccaaggggacaatgagctatggaattcactacgccgggtacccaaaagtgctggagggctatagtgattcaaactggatatctgatgctgatgagataaaggctacaagtggcgggcgactccattccacaggcatccttgacggcagcgacgaaaccaacctcttcgagacatcttcaactgagaaggacttcaactctggcaacgggcagcccccctttcgtgccgcggtgaatccggaagctgatcaaccggacaccccggccgacccaactccatcacgcccaccctcgccaccggtgcctaggaaagggtcgagctatacctcagatcaagcagttacccactcccgcttgtggccgaccgaccgaccaaggcgaggcggcggcgaggcacggccaccgacggcggtgaccggcggtgcgggaagcggcggcgacggccgaaaggcggcggcgcatggccggagcagcggcgtcgcgggaaggccgaagcggaagacgaaggcggcgacgacgacccgacgagaggaagggcggacgagcggcggcgacacctagaggaggggaggagatgagttagggatggagaggacgaccgcgacgaccaaagtggccggccggagacggaggggaatggatagctcaccggctcgtgagggagatggggttccggtggggttccggcgacgcgaggcggtggccgagatggcccacacagcggcggagctagcggcggcggcggcttggcgcggcggcagccctagcggcgacggcacgcggccggagatgggcggcggcggcggagctcggcgagcgcggcgcgacggcggtagagggcgtgggagaggacggtgaatggggg

SEQ ID NO: 22835 - DNA, 4599 bp, Oryza sativa; identical to SEQ ID NO: 15085
  Clone ID: TF_OsC359_5735

SEQ ID NO: 22836 - DNA, 3854 bp, Oryza sativa; identical to SEQ ID NO: 15184
  Clone ID: TF_OsC359_5774

SEQ ID NO: 22837 - DNA, 5616 bp, Oryza sativa
  Clone ID: TF_OsC359_5862
tcatcgccgcccctcgccggcgaccttccagccggccaccactgccgccctaagcaccgccaagtcgcaccaccaccaccgtcggcttcgccgctccatgccgcatcccagcctccaccacgcttcccgctccagccgcgcatagccgcctgtccggtcgaccccgtggtgctctgtcgccctcctcgataccgcggccattgtccgcagcccgtccacccctccatcttcgcgaatcgccgccgaaaatccctcccctctgctcaagctcccttccataccttccccatgtcctaccagtcctcggccgcgctgcggtcttcaccgggaatcgccggagcgccgtcccaccgtcatcctgaggcgcccgccgtcaccttgctcgccgccggccgcctccttccgccgtttggcctctcgattccgtcgtttctggagagtccgttttcgcggaagaagagtttgaagagttccaaggccagcaaggcagctcctggtttggaatggtacattcctggtttggagatagaactgtgcagccggggtggttgttcagaatggttgggcctatacaacaggatgccgcgttacaagcctgagtacctgtttggtgttgagggttttgtccaggagttgcgtacgatgtcctttgtcattggatttgggactgcccctttttatgcccagattcctcatgatcgtcatgaagagaagtgccgagtcaaagtcaccttaaacagcaatagtgaagatgtcccctcagtgatgtttgaagctggaggaagaaactacatccatgcatgtcaggaagtggcaaggatcgccataggagagctccgtgatcgctacagtgatcaattggccgacactgagtatcgctaccatcctcgccaacctcagggaagtgaccgtggcagttaccttgagactgaaggaattgagaatgatgttaccacgaaacatttggttgagatgttgtgggctatggatgaaagtcgtgcggggactgtgttagcagctcaagatcgtgaagatcggaatcgtggtaagatttgcaagctagaagacaaggtggatcgtttggagaaggaattagccgcattgaagggagaagcaccgccgcagaaggccaggattcgtcttaccgcaaggaagagagccctatttgtccctcgctatcaattggcgccaaagatggtgaatactcgcagcaatgggaatggccctaacaaccccaataacaacaacaatggagagaatcctactctggcccaagttcttgctcaacagacacagcttatgaacatgatgatgcagcaatttcagaatcagcaaaaccaagggaataatcatgcacctccacagaacaagttagcagaatttcttcgtgtgaggccgcctgttttctctagtaccactaatcctgttgaagctagtgattggctgcatgccatagagaagaagttggatttacttcagtgtactgatcaggagaaggtctcatttgcatcacatcagttgcatggccctgcctctgaatggtgggatcacttccgccttaacaggactactgctgaacctatcacttggcttgaattcaccgctgctttccggaagacgcatataccatcaggagtagtgtctctcaagaagaaggagttcaggtcgctttcccagggatctcgctctgttacggagtacctacacgagttcaatcgtcttgctcgttatgctccggaagatgtgcgcaatgatgaagagcgccaggagaagtttttgggaggacttaatgatgagctttcttacccactcatggttggagattatcctgatttccagaaattagtggataaggctattcgtcaggaggacaagtacaatcgcatggagcagaagaaacgtcggattgctcaattcaagacacaacagggaaataatcagaagccgcgtcttactttaggaccccagcccatgccacagggaggttcatcgtctgttgttcgtccgcaacgtcagttcttcaacaacaatgctggcaacaacatccgtaatcaagctccacgtcctgttgcagctccaacacagcaacaacctgccaagagagagcaaggcaacaagcccgtggtgtgtttcaactgtggagacccaggacattacgctgacaagtgtccgaagccccgacgcgtgaaggttgtccctgcccagagcaattctaccgtatcagcatcaaaggcccgtgtaaatcatgtcgctgctgcagaagctcaagatgctccagatgtgattttgggtacgttccttgttaactcagttcctgcaacagtacttttcgattctggtgctacacattcattcttatctatgagttttgcgggaaatcatgggatggaagtagaagatcttagacgtcctttgatggttagtaccccaagtaatcaagcactctctttgcaacgtagcccctctgtcagaatagaaattcaaggagtaccatttctggccaatcttatcttgttagaatccaaagaccttgatgtcatcctagggatggactggttagccagacataaaggtgtgatagactgtgccaacagaaaagtaactctcaacagctatgatggtcgagttgtaactgttcatgcattgtcatctgagtttttaaggtcaagactgaaccagataactttggaagagattcctatagtccgggagtatcctgatgtgttcccagatgatttacctggtatgccgcctaaaagggatatagagttcagaatagatttggtacctggaacaactccgatccatacgagaccttatcgaatggcagccaatgagttggcagaagttaagaggcaagtagatgatttgctacagaaaggatacatcagaccgagttcatcaccatggggagctccggttatttttgtggaaaagaaagaccatactcagagaatgtgtgtggactatcgtgcactaaacgatgtgactatcaagaatgagtatccactacccaggattgatgatttgtttgatcaacttaaaggtgccactgttttctccaagatagatcttcgatcagggtatcatcagttgagaatcaaagaggaagatatacctaagacagctttcaccactaggtatgggttgttcgaatgtactgttatgtcttttggacttaccaatgcccctgctttcttcatgaacttgatgaataaggtgtttatggaatacttagacaagttcgtggtggtctttattgatgatattcttatctactctcgaaccaaagaagagcatgaggaacatcttcgccttgcattggagaagctacgagaacatcaactatatgctaagtttagcaagtgtgaattttggttgtccgaagtgaaattccttggtcacgtcatctcagccggaggagttgccgtcgatcctagtaacgtggaatccgtaaccaattggaagcaaccaaagacagtttcagagattcgcagtttcctaggccttgcaggatattatcggaggtttatagagaatttttccaagattgctaagcccatgacacgactgcttcagaaagatgtaaagtacaagtggtcggaagaatgtgaacagagttttcaagaattgaaaagtcgcttaatatcagctccaattttgattttgcctgatccaaagaagggttttcaagtgtattgtgatgcatccaaatttgggttaggttgtgttctgatgcaagaagggaaggtggttgcctatgcatctcgtcagttacgtccgcatgagaagaactaccctactcatgatattgagttagctgcagtcgttcatgcattgaagatttggcgtcattatcttttcggtactcgtacagaagtgtacaccgatcacaagagtttaaagtatatctttactcagccggatctgaacatgagacagcggagatggttggaattaattaaggattatgacatgggaattcattatcatccgggaaaggctaatgtggtagcagacgctcttagcagaaaaggctattgcaatgctacagaaggacgacagttgccattggaattatgcaaggaatttgaaagattaaatttgggaattgtcggtagaggtttcgttgcagccttagaagcgaagcccactctaattgatcaagttagagaagcccaaattaatgatcctgatattcaagagatcaagaagaaaatgagaagaggaaaagctattggtttcttggaggatgagcacggaactgtatggttgggtgagagaatctgtgtccccgacaacaaagatttaaaggatgcaattctgaaagaagctcatgatactttatactccattcaccctggtagtactaagatgtaccaggatcttaaggaaagattttggtgggcaagtatgaagcgtgaaatcgcagaatacgtagcagtatgtgatgtttgtcaacgagtcaaggcagaacatcagaaacccgccggtttgttgcaacctttgaagattcctgaatggaaatgggaagaaattggtatggattttattactggtttacccagaacgtcatcaggccatgactctatttgggtgatagtcgacagacttaccaaagtggctcatttcattccggtaaagacaacttattccggaagtcgcttagcggaattgtatatggcaaggattgtgtgtttgcatggcgtccctaagaagatagtgtctgatcgaggcagtcagtttacttcaaatttttggaagaaacttcaggaagagatgggttctaagctgaactttagtactgcttatcatccgcagacagacggacaaaccgaaagggtgaatcagattttggaagacatgttgagagcttgtgctctagatttcggtggaagttgggataagaatctaccctatgcagaatttttgtacaacaacagttatcaagctagtctacagatggctccgtacgaagcactgtatggtcggaagtgccgcactccgcttttgtgggatcaaacgggagaacgtcaggttttcggaacggatatcctaagggaagcagaagaaaaggtaaagatcattcaagaaagattgcgtgtggctcagtctcgtcataagagttatgccgacaatcgccgcagagatttgagttttgaagagggagattatgtgtatcttcgtgtcacgcctcttcgaggagttcatcgttttcataccaagggaaaattggcaccgcgttttgtgggaccttataagattgtcagtagaagaggagaggttgcttatcagttggagttacctcaatctttggcaggagtacataatgtgttccatgtgtcgcaattgaaaaagtgtttaagggtacctaccgaagaagctaatattgagcagatagaagtccaagaggatttgacttatgttgagaaaccaatccgtatcctagaaacaagtgagagaagaaccaggaatcgagttatccgtttttgcaaagtccagtggagtaatcactcggaagaagaatcaacttgggaacgagaagatgaattgaaatcagctcatccgtacctgttcgccagttcttccgaatctcgaggacgagattctgtttaa

SEQ ID NO: 22838 - DNA, 5170 bp, Oryza sativa; identical to SEQ ID NO: 15135
  unsure (1)..(5170): unsure at all n locations
  Clone ID: TF_OsC359_6016

SEQ ID NO: 22839 - DNA, 2232 bp, Oryza sativa; identical to SEQ ID NO: 15093
  Clone ID: TF_OsC359_6046

SEQ ID NO: 22840 - DNA, 4605 bp, Oryza sativa; identical to SEQ ID NO: 15199
  Clone ID: TF_OsC359_6050

SEQ ID NO: 22841 - DNA, 5896 bp, Oryza sativa
  Clone ID: TF_OsC359_6406
aaagtcttcttttggctttgggccgaaagtcggcccaaaacctctcttctctctcctcggcccagccggcccagtcagccgcgcgcgcgcgccctcgctgtcgctgacaggtgggtcccgcctgtcggagtcgtcgtcctcctcgggccgaaaccctagtttcgcgccgccgagccgccgccgccgtttcctttccaatccggccattcctttccttctccggccgaatcaatagaggggaaatgatctccgggatctcctctaccttttctcctttggaatctttggttaaatcgctttggaaagcgtcggagacgagttcgattcggatcggttttccctctctccaagccgaaggtttccttcgccgttgccgtcgccgtgggcctccgccgtcgcctccgagcccctttaaaaggatccccggtgtctcctctacccgtcgcagccctcgccttcgcctctcgtcgtcggaagagctctagcgccgtgtgccctagcttcgccgtcgccgccgccgcttcagccgtgctccgccgtcgctccagctgtcgccgccgctcgggaagaccgccgtcgtcatcgccaagtcgccgccgtcctcgtccgccccttcgcagccgtcggaacccgccggagcttcgtcgccgtcgacaacccgaaggtagccgccgcttccttctcgtcgccgtcgtcgtccgttattccgtcgtttccggagagtccgttttcgcagaagaagagtttgaagagttccaaggccagcaaggcaactcctggtttggaatggtacattcctggtttggagatagaactgtgcagccggggtggttgttcagagtggttgggcctatacaacaggatgccgcgttacaagcctgagtacctgtttggtgttgagggttttgtccaggagttgcgtacgatgtcctttgtcattggatttgggactgcccctttttatgcccagattcctcatgatcgtcatgaagagaagtgccgagtcaaagtcaccttgaacagcaatagtgaagaggtcccctcagtgatgtttgaagctggaggaagaaactacatccatgcatgtcaggaggtggcaaggatcgccataggagagctccgtgatcgctacagtgatcaattggccgacactgagtatcgctaccatcctcgccaacctcagggaagtgaccgtggcagttaccttgagactgaaggaattgagaatgatgttaccacgaaacatttggttgagatgttgtgggctatggatgaaagtcgtgcggagactgtgttagcagctcaagatcgtgaagatcggaatcgtggtaagatttgcaagctagaagacaaggtggatcgtttggagaaggaattagccgcattgaagggagaagcaccgccgcagaaggccaggattcgtcttaccgcaaggaagagagctttatttgtccctcgctatcaactggcgccaaagatggtgaacactcgtagcaatgggaatggtcccaacaaccccaataacaacaacaatggagagaatcccactcttgcccaagttcttgctcaacagacacagcttataaacatgatgatgcagcaatttcagaatcagcaaaaccaagggaataatcatgcacctccacagaacaagttagcagaatttcttcgtgtaaggccgcctgttttctctagtaccactaatcctgttgaagctagtgattggctgcatgccatagagaagaagttggatttacttcagtgtactgatcaggagaaggtctcatttgcatcacatcagttgcatggccctgcctctgaatggtgggatcacttccgccttaacaggactactgctgaacctatcacttggcttgaattcaccgctgctttccggaagacgcatataccatcgggagtagtgtctctcaagaagaaggagttcaggtcgcttacccagggatctcgctctgttacggagtatctgcacgagttcaatcgtcttgctcgttatgctccggaagatgtgcgcaatgatgaagagcgccaggagaagtttttgggaggacttaatgatgagctttcttacccactcatggttggagattatcctgatttccagaaattagtggataaggctattcgtcaggaggacaagtacaatcgcatggagcagaagaaacgtcggattgctcaattcaagacacaacagggaaataatcagaagccgcgtcttactttaggaccccagtccatgccacagggaggttcttcgtctgttgttcgtccgcaacgtcagttcttcaacaacaatgctggcaacaacatccgcaatcaagctccacgtcctgttgcagctccagcacagcaacaacctgccaagagggagcaaggcaacaagcccgtggtgtgtttcaactgtggagatccaggacattatgctgacaagtgtccgaagccccgacgcgtgaaggttgtccctgcccagaataactctgctgtaccagcatccaaggctcgtgtaaatcatgtcgctgctgcagaagctcaagatgctccagatgtgattttgggtacgttccttgttaactcagttcctgcaacagtacttttcgattctggagctacacattcattcttatctatgagttttgcgggaaatcatgggatggaagtagaagatcttagacgtcctttgatggttagtaccccaagtaatcaagcactctctttgcaacgtagcccctctgtcagaatagaaattcaaggagtaccatttctggccaatcttatcttgttagaatccaaagaccttgatgtcatcctagggatggactggttagccagacataaaggtgtgatagactgtgccaacagaaaagtaactctcaacagctatgatggtcgagttgtaactgttcatgcattgtcatctgagtctttcaggtcaagactgaaccagataactttggaagagattcctatagtccgggagtatcctgatgtgttcccagatgatttacctggtatgccgcctaaaagggatatagagttcagaatagatttggtacctggaacaactccgatccataagagaccttatcgaatggcagccaatgagttggcagaagttaagaggcaagtagatgatttgctacagaaaggatacatcagaccgagttcatcaccatggggagctccggttatttttgtggaaaagaaagaccatactcagagaatgtgtgtggactatcgtgcactaaacgatgtgactatcaagaataagtatccactacccaggattgatgatttgtttgatcagcttaaaggtgccactgttttctccaagatagatcttcgatcagggtatcatcagttgagaatcaaagaggaggatatacctaagacagcttttaccactaggtatgggttgttcgaatgtactgttatgtcttttggacttaccaatgcccctgctttcttcatgaacttgatgaataaggtgtttatggaatacctagacaagttcgtggtggtctttattgatgatattcttatctactcttgaaccaaagaagagcatgaggaacatcttcgccttgcattggagaagctacgagaacatcaattgtatgctaagtttagcaagtgtgaattttggttgtccgaagtgaaattccttggtcacgtcatctcagctggaggagttgccgtcgatcccagtaacgtggaatccgtaaccaattggaagcaaccaaagacagtttcagagattcgcagtttcctaggcctcgcaggatattatcggaggtttatagagaatttttccaagattgctaagcccatgacacgactgcttcagaaagatgtgaagtacaagtggtcggaagaatgtgaacagagttttcaagaattgaaaagtcgcttaatatcagctcctattttgattttgcctgatccaaagaagggttttcaagtgtattgtgatgcatccaaacttgggttaggttgtgttctgatgcaagatgggaaggtggttgcctatgcctctcgacagttacgtccgcatgagaagaactaccctactcatgatattgagttagctgcagtcgttcatgcattgaagatttggcgtcattatcttttcggtactcgtacagaagtgtacaccgatcataagagtttaaagtatatctttactcagccggatctgaacatgagacaaaggagatggttggaattaattaaggattatgacatgggaattcattatcatccgggaaaggctaatgttgtagcagacgctcttagcagaaaaggctattgcaatgctacagaaggacgacagttgccattggaattatgcaaggaatttgaaagattaaatttgggaattgtcggtaaaggtttcgttgcagccttagaagcgaagcccactctaattgatcaagttagagaagcccaaattaattatcctgatattcaagagatcaagaagaatatgagaagaggaaaagctattggtttcttggaggatgagcacggaactgtatggttgggtgagagaatctgtgtccccgacaacaaagacttaaaggatgcaattctgaaagaagctcatgatactttatactccattcaccctggtagtactaagatgtaccaggatcttaaggaaagattttggtgggcaagtatgaagcgtgaaatcgcagaatacgtagcagtatgtgatgtttgtcagcgagtcaaggcagaacatcagaaacccgccggtttgttgcaacctttgaagattcctgaatggaaatgggaagaaattggtatggattttattactggtttacccagaacgtcatcaggccatgactctatttgggtgatagtcgacagacttaccaaagtggctcattttattccggtaaaaacaacctattccggaagtcgcttagcggaattgtatatggcaaggattgtgtgtttgcatggtgtccctaagaagatagtgtctgatcgaggcagtcagtttacttcaaatttttggaagaaacttcaggaagagatgggttctaagctgaactttagtactgcttatcatccgcagacagacggacaaaccgaaagggtgaatcaaattttggaagacatgttgagagcttgtgctctagatttcggtggaagttgggataagaatctaccctatgcagaattttcatacaacaacagttatcaagctagtttacagatggctccgtacgaagcactgtatggtcggaagtgccgcactccgcttttgtgggatcaaacgggagaacgtcaggttttcggaacggatatcctaagggaagcagaagaaaaggtaaagatcattcaagaaagattgcgtgtggctcagtctcgtcataagagttatgccgacaatcgccgcagagatttgagttttgaagagggagattatgtgtatcttcgtgtcacgcctctacgaggagttcatcgttttcataccaagggaaaattggcaccgcgttttgtgggaccttataagattgtcagtagaagaggggaggtcgcttatcagttggagttacctcaatctttggcaggagtacataatgtgttccatgtgtcgcaattgaaaaagtgtttaagggtacctaccgaagaagctaatattgagcagatagaagtccaagaggatttgacttatgttgagaaaccaatccgtatcctggaaacaaatgagagaagaaccaggaatcgagttatccgtttttgcaaagtccagtggagtaatcactcggaagaagaatcaacttgggaacgagaagatgaattgaagtcagctcatccgcacctgtttgccagttcttccgaatctcgaggacgagattctgtt

SEQ ID NO: 22842 - DNA, 3039 bp, Oryza sativa; identical to SEQ ID NO: 15169
  Clone ID: TF_OsC359_6469

SEQ ID NO: 22843 - DNA, 3993 bp, Oryza sativa
  Clone ID: TF_OsC359_6565
atggtgcgctgcggtggattgtgttatgcaaggggtattgtcacagctcctttccgagctcctggtttggaatggtatattcctggtttggagataggactgtgcagccgggatgattgttcagaatggttgggcctatacaacaggatgccgcgctacaagcctgagtacttgtttggtgttgagggatttgtccaggagttgcgtacaatgtcctttgccataggatttgggactgcccctttttatgcccagattcctcatgatcgtcacgaagagaagtgccgagtcaaagtcaccttgaacagtaatagtgaagatatcccctcagtgatgttcgaagctggaggaagaaactacatccatgcatgtcaggaggtggcaaggatcgccataggagagctccgcgatcgctacagtgatcagttggccgacactgagtatcgctaccatcctcgtcaaccacagggaagtgaccgtggcagctaccttgagactgaaggaattgagaatgatgctaccacaaggcatttggttgagatgctgtgggctatggatgaaacccgtgcggagaccgtgttagcaggtcaagatcgtgaagatcggaatcgtggtaagatttgcaagctagaggacaaggtggatcgtttggagaaggaactagccgcattaaagggagaagcaccaccgcagaaggccaggattcatcttaccgcaaggaagagagctctatttgtccctcgctaccaattggcgccaaaggtccgtgtggtggagaaagaagttaccccagccccagcggatcctccggtcgtcaataacaagttagcagaatttcttcgtgtgaggccgcctattttctctagcaccactaatcctgttgaagctggtgattggctgcatgccatagagaagaagttggatttgcttcagtgcactgatcaggagaaggtctcatttgcatcacaccagctgcatggccctgcctctgaatggtgggatcacttccgccttaacaggactactgctgaacctatcacttggcttgaattcaccgctgctttccggaagacgcatataccatcgggagtggtgtctctcaagaagaaggaattcaggtcgctcactcaggggtctcgctctgttacggagtatctgcacgagttcaatcgtctggctcgttatgctccggaagatgtacgcactgatgaagagcgccaggagaagttcttggaaggacttaataatgagctttcttatccactcatgactggagattatcctgatttccagaagttagtggataaggctattcgccaggaggacaagtacaaccgcatggagcaaaagaaacgccggattgctcaattcaagacacaacaggggaataatcagaggccgcgtcttactttaggaccccagtccatgccacagggaggttcttcgtctgttgttcgtccgcagtgtcagttcttaaacaacaacgcagtcaacaacatccgcaatcaagctccacgtccagttgtagcctcgacgcagcaacaacctgccaagagggagcaaggcagcaagcccgtggtgtgtttcaactgtggagacccaggacattacgctgacaagtgtccgaagccccgacgcgtgaaggttgtccctgctcagagcaactctaccgcaccagcatcaaaggcccgtgtcaatcatgttgctgctgcagaagctcaagatgctccagatgtgattttgggtacgtttcttgttaacttagttcctgcaacagtgcttttcgattctggtgctacacattcattcttatctatgagttttgcgggaaatcatgggatggaagtagaaaattttagacgtcctatgatggttagtaccccaagtaatcaggcactctatttgcaacgtagcccctctgtcagaatagaaattcaaggcataccatttctggccaatcttatcctgttagaatccaaagaccttgatgtcatcctagggatggactggttagccagatataaaggtgtgatagactgtgctaacagaaaagtaactctcacgagtgatgatggtcgagttgtaactgttcatgcattgtcttctgagtctttaaggtcaagactgaaccaaataactttggaagagattcctatagtccgggagtatcctgatgtgttcccagatgatttacctggtatgcctcctaaaagggatatagagttcagaattgatttggtaccaggaacaactccaatccataagagaccttatcgaatggcagccaatgagttggcagaagtcaagaggcaagtggacgatttgcttcagagagggtacatcagaccgagttcatctccatggggagctccggttatttttgtcgaaaagaaagatcatacccagaggatgtgtgtggactatcgtgcactaaatgatgtgactatcaagaataagtatccgctgcccagaattgatgatttgtttgatcagcttaaaggtgctaccgttttctccaagatggatcttcgatcagggtatcaccagttgagaatcaaagaggaagatatacctaagacagcttttaccactaggtatggattgtttgaatgtactgttatgtcttttggacttaccaatgcccccgctttcttcatgaacttgatgaataaggtgcttatggaatacctagacaagttcgtggtggtctttattgatgacattcttatctactcccgaaccagagaagagcatgaagaacatcttcgctttgcactagagaagctacgagaacatcaactgtatgccaagtttagttgtgttctgatgcaagatgggaaggtggttgcctatgcatctcgtcagttacgcccgcatgagaagaactaccctactcatgatcttgagttagctacagtagttcatgcgttgaaaatttggcgtcattatcttttcggtactcgtacagaggtgtataccgatcacaagagtttaaagtatatctttactcagccggatctgaacatgagacaaaggagatggctagaattaattaaggattatgacatgggaattcattatcacccaggaaaggctaatgttgtagcagacgctcttagcaggaaaggctattgcaatgctacggaaggacgacagttgccattggaattatgcaaggaatttgaaagattaaatttggaaattgtcagtagagctttcgttgcagccttagaagcgaagcccactctaattgatcaagttagagaagcccaaattaatgatcctgatattcaagaaatcaagaagaatatgagaagaggaaaggctatcggtttcttggaagatgagcaaggaactgtatggttgggtgagagaatctgcgtccccgacaacaaagatttaaaagatgcaattctgaaagaagctcatgatactttatattccattcaccctggtagtaccaagatgtaccaggatctcaaggaaagattttggtgggcaagtatgaagcgtgaaatcgcagagtacgtagcagtatgtgatgtttgtcagcgagtcaaggcagaacatcagaaacccgccggtttattgcagcctttgaagattcctgaatggaaatgggaggaaatcggtatggatttcatcactggtctacccagaacgtcatcaggccatgactctatttgggtgatagtcgacagacttaccaaagtggctcatttcatcccagtaaagacaacctattccggaagtcggttggccgaattgtatatggcaaggattgtgtgtttgcatggcgtccctaagaaaatagtgtctgatcgaggcagtcagtttacttcaaatttttggaagaagcttcaggaagagatgggttctaagctgaactttagtactgcttatcatccgcagacagacggacaaaccgaaagggtaaatcagattttggaagacatgttgagagcttgtgctttagacttcggtggaagttga

SEQ ID NO: 22844 - DNA, 6468 bp, Oryza sativa; identical to SEQ ID NO: 15152
  Clone ID: TF_OsC359_6605

SEQ ID NO: 22845 - DNA, 5162 bp, Oryza sativa
  Clone ID: TF_OsC359_6632
cgtgattagtctcacccttctcaccataatagaagaactgtgcagccgggatggttgttcagaatggttgggcctatgcaacaggatgccgcgctacaagcctgagtacttgtttggtgttgagggttttgtccaggagttgcgtacaatgtcctttgtcgttggatttgggactgcccctttttatgcccagattcctcatgatcgtcatgaagagaagtgccgagtcaaagtcaccttgaacagtaatagtgaagatatcccatcggtgatgttcgaagctggaggaagaaactacatccattcatgtcaggaagtggcaaggatcgccataggagagctccgtgatcgttacagtgatcagttggctgacactgagtatcgttaccatcctcgtcaaccacagggaagtgaccgtggcagttaccttgagactgaaggaattgagaatgatgctaccacaacacatttggttgagatgctatgggctatggatgaaagtcgtgcggaaactgtgttagcggcccaagatcgtgaagattggaatcgtggtaagatttgcaagctagaagacaaggtggatcgtttggagaaggaactagccgcgttgaagggagaagcaccacctcagaaggtcaggattcgtcttaccgcaaggaagagagctctatttgtccctcgctatcaattggcgccaaagtttcccccggtttctcttcttgtgccctgtccatgccagatggtgaacactcgcagcaacgggaatggtcccaaccccaacaaccccaataacaataacaatggggagaatccaacccttgctcaagttcttgctcaacagactcagctaatgcacatgatgatgcaacaacttcagaaccagcagaaccagggaaataaccatgcacctcctcagaataagttagcagaatttcttcgtgtgaggccgcctattttctctagtaccactaatcctgttgaagctagtgattggttgcatgccttagagaagaagttggatttgcttcagtgcactgatcaggagaaggtctcatttgcatcacatcagttgcatggccctgcctctgaatggtgggatcacttccgtctgaataggactactgctgaacctatcacttggcttgaattcaccgctgcttttcggaagacgcatataccatcgggagtggtgtctctcaagaagaaggagttcaggtcgctcacccagggatctcgctctgttacggagtatctgcacgagttcaatcgtctggctcgttatgctccagaagatgtgcgcaatgatgaagagcgtcaggagaagttcttggaaggacttaatgatgagctttcttacccactcatgactggagattattctgatttccagaaattagtggataaggctattcgtcaggaggacaagtataatcgcatggagcagaagaaacgccggattgctcaattcaagatacaacaggggaataatcagaagccgcgtcttattttaggacaccagtctatgccacatggaggttcttcgtctgttgttcgtccgcagcgtcagttcttcaacaacaatgctggcaacaacaaccgcaatcaagctccacgccttattgcagcctcgacacagcaacaacctgccaagagggagcaaggcagcaagcttgtggtgtgtttcaactgtggagacccaggacattatgctgacaagtgtccgaagccccgacgcgtgaaggttgtccctgcccagagcaactctaccgcaccagtatcaaaggcccgtgtcaatcatgttgctgctgcagaagctcaagatgctctagatgtgattttgggtacgttccctgttaactcagttcctgcaacagtacttttcgattctggtgctacacattcattcttatctatgagttttgcgggaaatcatgggatggaagtagaggatcttagacgtcctttgatggttagtaccccaagtaatcaagcactttctttgcaacgtagcccctcggtcagaatagaaattaaaggagtaccatttctggccaatcttatcctgttagaatccaaagacctagatgtcatcctagggatggactggttagccagacataaaggtgtgatagactgtgctaacagaaaagtaactctcaccagtaatgatggtcgagttgtaactgttcatgcattgtcttctgagtctttaaggtcaagactgaaccagataactttggaagagattcctatagttcgggagtatcctgatgtgttcccagacgatttacctggtatgccgcctaaaagggatatagagttcagaatagatttggtacctggaacaactccgatccataagagaccttatagaatggcagccaatgagttggcagaagttaagaggcaagtagatgatttgcttcagaaaggatacatcagaccgagttcatctccatggggagctccggttatttttgtggaaaagaaagatcatacccagaggatgtgtgtggactatcgtgcactaaatgatgtgactatcaagaataagtatccactacccagaattgatgatttgtttgatcagcttaaaggtgccaccattttctccaagatagatcttcgatcagggtatcatcagttgagaatcaaagaggaagatatacctaagacagcttttaccactaagtatggattgttcgaatgtactgttatgtcttttggacttaccaatgcccctgctttcttcatgaacttgatgaataaggtgtttatggagtacctagacaagttcgtggtggtctttattgatgacattcttatctactcccgaaccaaagaagagcatgaagaacatcttcgccttgcattagagaagctacgagaacatcaactgtatgctaagtttagcaagtgtgaattttggttgtttgaagtgaagttccttggtcacgtcatctcagccggaggagttgccgtcgattctagtaatgtggaatccgtaaccaactggaaacaaccaaagacagtttcagagattcgcagtttcctaggcctcgcaggatattaccggaggtttatagagaatttttccaagattgctaagcccatgacacgactgcttcagaaagatgtgaagtacaagtggtcggaagaatgtgagcagagttttcaagagttgaagaatcgcttgatatcagctcctattttgattttgcctgatccaaagaagggtttccaagtgtattgtgatgcatccaaacttgggttaggttgtgttctgatgcaagatgggaaggtggttacctatgcatctcgtcagttacgtctgcatgagaagaactatcctactcatgatcttgagttagctgcagtagttcatgcgttgaagatttggcgtcattatcttttcggtactcgtccagaggtatataccgatcacaagagtttaaagtatatctttactcagccggatctgaacatgagacaaaggagatggttggaattaattaaggattatgacatgggaattcattatcacccgggaaaggctaatgttgtagcagatgctcttagcaggaaaggctattgcaatgctacagaaggacgatagttgccattggaattatgcaaggaatttgaaagattaaatttgggaattgtcagtagaggtttcgttgcagccttagaagcgaagcccactctaattgatcaagttagagaagcccaaattaatgatcctgatattcaagagatcaagaagaatatgagaagaggaaaagctatcggtttcttggaggatgagcatggaactgtatggttgggtgagagaatctgtgtccccgacaacaaagatttaaaagatgcaattctaaaagaagctcatgatactttatactccatacaccctggtagtactaagatgtaccaggatctcaaggaaaggttttggtgggcaagtatgaagcgtgaaatcgcagaatacgtagcagtatgtgatgtttgtcagcgagtcaaggcagaacatcagaaacccgccggtttgctgcagcctttgaaaattcctgaatggaaatgggaagaaatcggtatggattttatcactggtctacccagaacgtcatcaggccatgactctatttgggtgatagtcgacagacttaccaaagtggctcatttcatcccggtaaagacaacctattctggaagtcggttagcggaattgtatatggcaaggattgtgtgtttgcatggcgtccctaagaaaatagtgtctgatcgaggcagtcagtttacttcaaatttttggaagaaacttcaggaagagatgggttctaagctgaactttagtactgcttaccatccgcaaactgatagacaaactgaaagggtgaatcagattttggaagacatgttgagagcttgtgctttagatttcggtggaagttgggataagaatctaccttatgcagaattttcgtataataacagttatcaagctagtcttcagatggctccttacgaagcactgtatggtcggaagtgtcgcactccgcttttgtgggatcaaacgggagagcgtcaggttttcgggacggatatcctaagggaagcagaagaaaaggtgaaaatcattcaagaaagattgcgtgtggcttagtctcgtcataagagttatgccgacaatcgccgcagagatttgagttttgaagagggagattatgtgtatattcgtgtcacacctcttcgaggagttcatcgttttcataccaaaggaaaattggcaccgcgttttgtgggaccttataagattgtcagtagaagaggagaggttgcttatcagttagagttacctcaatctttggcaggagtccatgatgttttccatgtgtcgcaattgaagaagtgtttaagggtacctaccgaagaagctatcttgaacagatagaagtccagaggatctgacctatgttgagaaaccaatccgtatcttggaaacaaatgagagaaggaccaggaatcgagttatccgtttttgcaaagtccaatggagtaatcactcggaagaagagtcaacttgggaacgagaagatgaattgaagtcagcccatccgtatctgttcgccagttcttccgaatctcgaggacgagattctgtt

SEQ ID NO: 22846 - DNA, 2775 bp, Oryza sativa
  Clone ID: TF_OsC359_6662
cgagccactggccgctgtgctatgccgtgcccgtgtctagctcaccggtttagtcgcagccgttattgagtcgttcgctcgttcgttcaaacgaggtgttccccttgcttcgttcgttcgtccgtgttgagtcgtcctttagtttagagccgttcagagctgccggttccgttcgccggtttcggttgatcatttgggtgatctttatgtgtactatttatttggtttttattagtctttttcctcgttttgcgtgttagcttgtcgtttccgtcgtttcgaaggatcgcgtgtgcgtcggaagtgttcaagaagacataataaaagatgcttaatctggtaataatttgtttagctcctggtttggaatggtacattcctggtttggagatagaactgtgcagccgggatggttgttcagaatggttgggcctatacaacaggatgccgcgttacaagcctgagtacctgtttggtgttgagggttttgtccaggagttgcgtacgatgtcctttgtcattggattcgggactgcccctttttatgcccagattcctcatgatcgtcatgaagaaaagtgccgagtcaaagtcactttgaacagtaatagtgaagatatcccctcagtgatgtttgaagctggaggaagaaattacatccatgcatgtcaggaggtggcaaggatcgccataggagagctccgtgatcgctacagtgatcaattggccgacactgagtatcgttaccatcctcgtcaaccacagggaagtgaccgtggcagttatcttgagactgaaggaattgagaatgatgctaccacaaggcatttggttgagatgctgtgggctatggatgaaagtcgtgcggagactgtactagcagctcaagatcgtgaagaccggaatcgtggtaagatttgcaagttagaagacaaggtggatcgtttggagaaggaattagccgcattgaagggagaagcaccgccgcagaaggccaggattcgtcttaccgcaaggaagagagctttatttgtccctcgctatcaactggcgccaaagatggtgaacactcgcagcaatgggaatggtcccaacaaccccaataacaacaacaatggagagaatcccactctggcccaagttcttgctcaacagacacagcttatgaacatgatgatgcagcaatttcagaatcagcaaaaccaaggaaataatcatgcacctccccagaacaagttagcagaatttcttcgtgtgaggccgcctgttttctctagtaccactaatcctgttgaagctagtgattggctgcatgccatagagaagaagttggatttgcttcagtgtactgatcaggagaaggtctcatttgcatcacatcagttgcatggccctgcctctgaatggtgggatcacttccgcctgaataggattactgctgaacctatcacttggcttgaattcaccgctgctttccggaagacgcatataccatcaggagtagtgtctctcgagaagaaggagttcagcgccaggagaagttttttgggaggacttaatgatgagctttcttacccactcatggttggagattatcctgatttccagaaattagtggataaggctatacgtcaggaggacaagtacaattgcatggagcagaggaaacgtcggattgctcacttcaaggcacaacaggggagtaatcagaagccgcgtcttactttaggaccccagcccatgtcacagggaggttcttcgtctgttgttcgtccgcagcgtcagttcttcaacaacaatgctggcaacaacatccgtaatcaagctccacgtcctgttgcagctccagtacagcaacaacctgccaagagggagcaaggcagcaagcccgtggtgtgtttcaactgtggagacccaggacattatgctgacaagtgtccgaagccccgtcgcgtgaaggttgtccctgcccagagtaactctgctgtaccagcatcaaaggcccgtgtcaatcatgtcgctgctgcagaagctcaagatgctccagatgtgattttgggtacgttccttgttaactcagttcctgcaacagtgcttttcgattctggtgctacacattcattcttatctatgagttttgcgggaaatcatgggatggaagtggaagatcttagacgtcctttgatggttagtaccccaagtaatcaagcactctctttgcaacgtagcccctctgtcagaatagaaattaaaggagtaccatttctggccaatcttatcttgttagaatccaaagaccttgatgtcatcctagggatggactggttagccagacataaagatgatttacctggtatgccgcctaaaagggatatagagttcagaatagatttggtacctggaacaactccgatccataagagaccttatcgaatggcagccaatgagttggcagaagttaagaggcaagtagatgatttgctacagaaaggatacatcagaccgagttcatcaccatggggagctccggttatttttgtggaaaagaaagaccatactcagagaatgtgtgtggactatcgtgcactaaacgatgtgactattaagaataagtatccactacccaggattgatgatttgtttgatcaactgaaaggtgccactgttttctccaagatagatcttcgatcagggtatcatcagttgagaatcaaagaggaggatatacctaagacagcttttaccactaggtatgggttgttcgaaggtttatag

SEQ ID NO: 22847 - DNA, 4905 bp, Oryza sativa; identical to SEQ ID NO: 15213
  Clone ID: TF_OsC359_6777

SEQ ID NO: 22848 - DNA, 4119 bp, Oryza sativa
  Clone ID: TF_OsC359_6816
atggtgggttgtgagcacatggttttgaaggtcgtgctcataacaattaaggacccgttcgcgagctactgttgtgaaacattaaccgtgccaaccacaagccagcgtgtgcaacggctttaccttttgtatagcatggttcattacggggtgccagattgagaagcggcgagaagtccgtgggggtcgctggggagtccatgcctctggttattgagggggtgattatgatccaggaatggtgcactgtggtgagttgtgttgtgcgaaaggtattgtcacgatttccccctttgcagctcctggtttggaatggtatattcctggtttggagatagaactgtacagccggatgtcgcgctacaagcctgagtacttgtttggtgttgagggatttgttcagaagttgcgtacgatgtcctttgtcataggatttgggactgcccctttttatgcccagattcctcatgatcgtcacgaagagaagtgccgagtcaaagtcaccttgaacagtaatagtgaagatatcccctcagtgatgttcgaggctggaggaagaaactacatccatgcatgtcaggaggtggcaaggatcgccataggagagctccgcgatcgctacagtgatcagttggccgacagtgagtatcgctaccatcctcgccaaccacagggaagtgaccgtggcagctacctagagaccgagggaattgagaatgatgctaccacaaagcatttggttgagatgctgtgggctatggatgaaacccgtgcggagactgtgttagcggctcaagatcgtgaagaccggaatcgtggtaagatttgcaagctagaggacaaagtggatcgtttggagaaggaactagccgcattaaagggagaagcaccgccgcagaaggccaggattcgtcttaccgcaaggaagagagctctatttgtccctcgctaccaattggcgccaaaggtccgtgtggtggagaaagaagttaccccagccctagcggatcctccggtcatcaacatggtgctcactcgcagcaacgggaatggccccaacaacaccaataataacaacaacaatggagagaatcccacacttgcccaagtcctggctcaacagacacagcttatgaacatgatgatgcagcaactccagaaccagcagaaccagggaaataaccatgcacctccccagaacaagttagcagaatttcttcgtgtgaggccgcctattttctctagtaccactaatcctgttgaagctggtgattggctgcatgccatagagaagaagttggatatgcttcaatgcacggatcaggagaaggtctcatttgcatcacaccagttgcatggccctgcctctgaatggtgggatcacttccgcctgaataggactactgctgaacctatcacttggcttgaattcaccgctgctttccggaagacgcatataccatcgggagtggtgtctctcaagaagaaggaattcaggtcgctcactcaggggtctcgctctgttacggagtatctgcacgagttcaatcgtctggctcgttatgctccagaagatgtgcacactgatgaagagcgccaagagaagttcttggaaggacttaatgatgagctttcttacccactcatgactggggattatcctgatttccagaagttggtggataaggctattcgtcaggaggacaagtacaatcgcatggagcagaagaaacgccggattgctcaattcaagacacaacaggggaataatcagaagccgcgtcttactttaggaccccagtctatgccacagggaggtttttcgtctgttgttcgtccgcagcgtcagttcttcaacaataacgcgggcaacaacatccgtaatcaagctccacgccctgttgcagctccaacacaacaacaacctgccaagaaggagcaaggcagcaagctcgtagtgtgtttcaactgtggagacccaggacattatgctgacaagtgtccgaagccccgacgcgtgaaggttgtccctgcccagagcaactctaccgcaccagcatcaaaggctcgtgtcaatcatgtcgctgctgcagaagctcaagatgctccagatgtgattttgggtacatttcttgttaacttagttcctgcaacagtgcttttcgattctggtgctacacattcattcttatctatgagttttgcgggaaatgatgggatggaagtagaagatcttagacgtcatttgatggttagtaccccaagtaatcaagcactctctttgcagcatagtccctctgtcagaatagaaattcaaggagtaccctttctggccaatcttatcctattagaatccaaagaccttgatgtcatcctagggatggactggttagccagacataaaggtgtgatagactgtgctaacagaaaagtaactctcaccagcaatgatggacgagttgtaactattcatgcattgtcatctgagtctttaaggccaagtctgaaccaaataactttggaagagattcctacagtccgggagtatcccgatgtgttcccagacgatttacctggtatgccgactaaaagggatatagagttcagaatagatttggtaccaggaacaactccgatccataagagaccttatagaatggcagccaatgaattagcagaagtcaagaggcaagtagacgatttgcttcagaaagggtacatcagaccgagttcatttccatggggagctccggttatttttgtggaaaagaaagatcatacccagaggatgtgtgtggattatcgtgcactaaatgatgtgactatcaagaataagtatccgctacccagaattgatgatttgtttgatcagcttaaaggtgccaccgttttctccaagatagatcttcgatcaaggtatcaccagttgagaattaaagaggaagatatacctaagacagcttttaccactaggtatggattgttcgaatgtactgttatgtcttttggacttaccattgcccccgctttcttcatgaacttgatgaataaggtgtttatggaatacctagacaagtttgtgttggtctttattgatgacattcttatctactctcgaacaaaagaagagcatgaagaacatcttcgccttgtactagagaagctacgagaacatcaactgtatgctaagtttagcaagtgtgaattttggttgtctgaagtgaagttccttggtcacgtcatctcagccggaggagttgccgttgatcctagtaatgtggaatccgtaaccaactggaaacaaccaaagacagtttcagagattcgtagtttcctaggcctcgcaggttattatcggaggtttatagagaatttttccaagattgctaagcccaggacacgattgcttcagaaagatgtgaagtacaagtggtcagaagaatgtgagcagagttttcaagagttgaagaatcgcttaatatcagctcctattttgattttgcctgatccaaagaagggtttccaagtgtattgcgatgcatccaaacatgggttaggttgtgttctgatgcaagatgggaaggtggttgcctatgcatctcgtcagttacgtccgcatgagaagaactaccctactcatgatcttgaattagctgcagtagttcatgcgttgaaaatttggcgtcattatcttttcggtactcgtacagaggtatataccgatcacaagagtttaaagtatatctttactcagccggatctgaacatgagacaacggagatggttggaattaattaaggattatgacatgggaattcattatcacccgggaaaggctaatgttgtagcagacgctcttagcaggaaaggctattgcaatgctacggaaggacgacagttgccattggaattatgcaaggaatttgaaagattaaatttgggaattgtccgaagaggtttcgttgcagccttagaagcgaagcccactctaattgatcaagttagagaagcccaaattaatgatcttgatattcaagaaatcaagaagaatatgagaagaggaaaagctatcggtttcatggaggatgagcaaggaactgtatggttgggtgagagaat

SEQ ID NO: 22849 - DNA, 3285 bp, Oryza sativa
  Clone ID: TF_OsC359_6857
ccaacctcattcttcttgagtccaaggaccttgatgtcattcttggaatggattggttgacacggtacagaggagtgattgattgtgctagccgcaccatcaagttaaccaatgcgaaaggagaagtggtaaccttccagtctccagtgccgcagaagccagggatcagtttaaaccaggctgctggtgaagaacaagaggtagcagtggagaaaaccactaagaagttggaggatattcctatagtcagagagtatccagaggtttttccggatgatctgacaacaatgccaccaaaaagggatatcgagttccggattgacttggtacctagaactgcaccgatccacaagaggccttacagaatgagagccaacgagttggcggaagtcaagaaccaagttgatgaacagttacagaagggatacattcgcccgagcacgtcgccttggggtgctctagttatctttgtggaaaagaaagataaaaccaaaaggatgtgcgtcgactaccgcgcactcaatgaggtcactattaagaacaagtatccgttgccaagaattgatgatctgtttgatcagttgaaaggagctactgtgttctctaagatagacctacgatcaggctatcaccagttgaggatccgcgaagaggatattccaaagacagcattcatcgctcgcaagtgtgacttttggcttaaggaagttcagtttctcggtcacatcgtgaatgctcaaggagtagctgtggatccagcaaatgtggagtcagttaccaaatggaccccaccaaggacagtcactcaggatggcaaagtggtttcttatgcttcatggcagttgcgtcctcatgaaggcaactacccgacgcatgatctggaattggccgcagttgttcatgctttaaagatttggtggcactatctcatcggtaaccgttgtgaggtatatacagatcacaaaagtctaaagtacatcttcactcaacctgatttgaatctcagacagcgaagatggttagagctaatcaacgattatgatatgggaatacattatcatcccggcaaggctaatgtggttgcagatgccttgagcaggaagagctactgcaatgttgcatgggtagagcaactatgttgtgaggttcaatgtgatttggaacatctgaaccttggtatagttgagcacggattcgtggctgccctagaggcacaacccacactggtggagcaggttcgcatagctcaagcaagtgaccctaaaatagcagagctcaaaaagaacatgagagttggaaaagcccgaggttttgttgaggatgaacaaggaacaatctggatgggggaaagattgtgtgtacctgaaaacaaggagttaaaggacttgataatgacagaagctcatcaaactcagtattccattcatcctggcagtaccaagatgtaccaagacctcaaagaaaaattctggtgggtcaacatgagaagggaaatagctgaattcgtcgcactctgtgacgtttgccagcgagtaaaggcagaacaccaaaggccagcaggtttgctacagccacttcagattccagaatggaagtgggaagaaatcggaatggatttcattacgggtttgcccaggacgtcatcggggcatgattctatttgggtagttgttgatcgactcactaaagtggctcactgcattccggtgcatactacctactcagggaagagcggtgacgtcaccgacagcggcagcggctcggcggagcggacggctcgggcggcgcacactcaccggcaaacggcggcgctaggacgcaaacggagggcaccaagatgtagaggacaacacggcgaactcaccggtgacctaaacggcggcggaagaccaacggacggcgacggcgacaaggaggaagcggcgggaaccttcgggtcgacgacggcgaagctgctccggtgatctccggcgacggcgaaggggcgaacgaggacggcgacgacttggcgagcacgacggtggtcttcccgagcgacggcgacggcggagctccccatggagatgaactaggtctgatgtatcccttctgaagcaaatcatctacttgcctcttaacttctgccaactcattggcaggtaaatcatctgggaacacatcggaatactcccgaactataggaatctcttccaaagttatatctggagcatcttgagcttctgcagcagcgacatgatttacacgagccttggatgctggtacagcagagttattctgggcagggacaaccttcacgcgtcggggcttcggacacttgtcagcataatgtcctgggtctccacagttgaaacacaccacgggcttgctgccttgctctctcttggcaggttgttgctgtgctggagctgcaacaggacgtggagcttgattacggatgttgttgccagcattgttgttgaagaactgacgctgcggacgaacaacagacgaagaacctccctgtggcatggactggggtcctaaagtaagacgcggcttctgattatttccctgttgtgccttgaagtgagcaatccgacgtttcttctgctccatgtgattgtacttgtcctcctgacgtatagccttatccactaatttctggaaatcaggataatctccaaccatgagtgggtaagaaagctcatcattaagtcctcccaaaaacttctcctggcgctcttcatcattgcgcacatcttccggagcataacgagcaagacgattgaactcgtgcagatactccgtaacagagcgagatccctgggtaagcgacctgaactccttcttcttgagagacactactcctgatggtatatgcgtcttccggaaagcagcggtgaattcaagccaagtgataggttcagcagtagtcctgttaaggcggaaatgatcccaccattcagaggcagggccatgcaactgatgtgatgcaaatgagaccttctcctgatcagtacactgaagcaaatccaacttcttctctatggcatgcagccaatcactagcttcaacaggattagtggtactagagaaaacaggcggcctcacacgaagaaattctgctaacttgttctggggaggtgcatgattatttccttggttttgctgattctgaaattgctgcatcatcatgttcataagctgtgtctgttgagcaagaacttgagcaagagtgggattctctccattgttgttgttattggggttgttgggaccattcccattgctgtgagtgttcaccat

SEQ ID NO: 22850 - DNA, 5253 bp, Oryza sativa
  unsure (1)..(5253): unsure at all n locations
  Clone ID: TF_OsC359_6997
ctacgcgttcaggggggcgtgcggcacaaccgcatgctcgaaaagatcgcttccaaagagccccagaccaccgcggagctttttcagctcgcggaccgagtggctcgtaaggaggaagcgtggacatggaactcctccggttccggagtggcagcttcggccgcccccggatccgccgctcagacagggcggcgtgacaggaggaggaagaagaggtcggtccattccggcgacgagggtcatgtcctcgccgtcgagggcgctccgcgggccacccgaaaggggaggcccataaccctcggtcaccacgctcccggcctggccagtctcgacatgtggatctccccaggcactagccccgacccgagccatttgaggactagaacccgggtcgccagcctcgtcgccactgtcgcccacaccgccgtcatcgccctcctcgtcggagttgagggcgaacgcgagccgaggggccgaaccctcgaagctgtggacgatatggtcggcggcatcccggacctgcacgcgcgcgccgtcctcggtcccgggagggaactcgtccagcgccgtccatggggagaagtcggggtccctggcctggtaactcgccagtacgagctccaccgctcctcgggcgaggtccctcgaggatgagttaatcgtcccctcgagctcctcggggagccgctggagagtcccggccatctccgagaggcgctgggcgaggcccccctggttggcggcgtacttcacagtccgcccgccccagagacccgcctgccgcccggcgcggtctaaacgggacacggcatcgcgaagcatgctgggccctatctcgcctgccaggcgaagggcctcgacctccccggtggacgaatccagcgcgccctgcagatccgcgatggtgtgttcggcagctgcgaggcgggcggctaagtcgctgtcgcccgtggccgccccgccgctacgcgcccttgcatccagctcccttgcctgcgcctcgagttcagcggcccgctggttcagtgcggccctctcggcgcgggcactttccagattgcgacgcgcttgttcctcttgcgcagcctcgcggagggacaggctgtccgccagccgttgcgccgcggcctcggcctccttgagagctcgctcccgctcggtgagcgcgtcctcgcggaggcggagcgcggactcttcttcggcacaggcggcttcgtgcaccgccagtgtgacctcccgaatagcaacggcggcctcgcgatccgccaggtccctctccacggcgcaggcacgctcttccagcgccatggcacgggcctcaagggcttcttcgcgccgccgggatgccacctcggtctccgccgcccgccgttctcgggcagcggcagcgtcaaggaccccccgggcggcgtcgagctttttccctagctccgcctcccagctcccgtattgaaggcggagggtgtcctgcgcctcgttcatcacggtggtggcgatgagggcagccccccgctcctcctccacctccttggcgatctcccccagcaccttccgacgggcttcgagctctgagacgtgccggcggtgtgccttgcggcccacctccaccatggcctccaccgagcgtcgcccctcttcgacacgcgcccatgcggcgtcaagctccgcccgctctgcttgcagggcctccacttgggcacttaacccgtccaacaccgtggtgtttgcgacggccaaggcctgcagaaggggttctgcgctcagtggagcaacggaaggcgtggggaagagccgcctcggtgaggatgccgcgcggctcggcccgccgatggacatgccggactcagggatgtcccccggacctggcttgtcctgagcgtcgcccgagggagtgggcccaagcgatacgcccgcggcctcgtcgcgagctgcctcggaagtcgtcgccgcctcggcctggcgaagtctggcctcctcccgagcggcttcttcagcttggcgagctcggacggccacctgggcggcctccccggcttcccgtaggcgatccgcggcttctcgccggtcagattcccgcctccgagcctctgtggtcgccgggtcctcggcctcagactggccggacttggaatggcgggagggacgcgacgggatctcgcttggaggggaaataaggtttccccgggatggttctgtcccccccatcttgcggagccgtttcttcttccgctccccctcgggctgcgacgtcggcgtggccccctccgggcgcctgctgctggcacgcgccgccccgccccctcggggaggagatgggggaggggttccttcctgcttcctcttcccccgggcgtcggcagggcggccgctccccgggcccccgtcgcggggcccagaagcacgaccccctcccggggtagattgttcccccctgcggctcccgcccgcgccatcgtggcctcgaggagcccgctcctccgacgccccgaccgcctgcatgatggtcaggatggaggcgcggtctggatcgctgcagagggggaggactccttgaggaatgagggatgcctccacggagctgagattcagcacccgttggaccactatcttgaagtcctcaggagcccggtcccatctgaccccctggtgggtcctcatacagtcctcggacccggtgtactcccaggcgccccgggcgcgccgctggagtggcgcgatccggcgacgaagatagtcgccgaacaccatggcccctgtgagcccctgggatcgcaggcccgccaggcggtcgaggacggcgtcgtagccatctcccagatctaccggcgcccgccagttggaggcctgcgttggaggctggctcggaagtcggaggcgcgcttcgtcggcgaggggggtgtagaaccagtcgctcttccagtcatcccacttcttgcggaggacgcagggaatgtagcggttcagcaccggccctcgcggctggaagtagcaaccaccaaccaccgacggcggcgacaccggctgtacggtgaagaaccaccggaacagccgaagggatgggcgcaccccgatgaacatctcgcacaggtgcgcgaagatggccaatgtcattaccgcgttgggggtgaggtgcgccatctggagatcgtaaaactccagaacatccatgaagaaagaagaaaatggcggaaccagccctgccatagcaaaagggaggaagaagacggaccgccccgggtagcgtggcgccgggcatccctcgcccagcgagactatctcccggtcagtggcagattccggcatgaagcggcgcggcagcccggcctgtctctcgctcacgatgcgggaaggcggcagcacggcctcgccccgtcctgtcaggatgagagtctctaggcactcgtccctagccggagccagcgtgctagctcctggagatggcacgttggtcatcaccgacgacggcggcggctcggcgaagaagacggctcgggcggcggacactcgccggcgaacggcggcaccacggcaccaacggagggcaccagcacgtagaggacaacgcggcgaacacaccggtgaccaaaacggcggcggagaaggaacggacgacgacggcgacgagaaggaagcggcggctaccttcgggttgtcgacggcgacgaagctccggcgggttccgacggctgcgaaggggcggacgaggacggcggcgacttggcgatgacgacggcggtcttcccgagcgacggcgacggctggaacgacggcggcgcacggagttccgtgctcatcctccaagaaaccaatagcttttcctcttctcatattcttcttgatctcttgaatatcaggatcattaatttgggcttctctaacttgatcaattagagtgggcttcgcttctaaggattcttccgaccacttgtactttacatctttctgaagcagtcgtgtcatgggcttagcaatcttggaaaaattctctataaacctccggtaatatcctgcgaggcctaggaaactagtggtaaaagctgtcttaggtatatcttcctctttgattctcaactggtgataccctgatcgaagatctatcttggagaaaacagtggcacctttaagcggagctccccatggtgatgaacttggtctgatgtatcctttctgtagcaaatcatctacttgcctcttaacttctgccaactcattggcaggtaaatcatctgggaacacatcaggatactcccggaccaaaatcacatctggagcatcttgagcttctgcagcagcaacatgattgacacgggcctttgatgctggtacagcagagttattctgggtagggacaaccttcacacgtcggggcttcggacacttgtcagcataatgtcctggatctccacagttgaaacacaccacgggcttgctgccttgctccctcttggcaggttgttgctgtgctggagctgcaacaggacgtggagcttgattacggatgttgttgccagcattgttgttgaagaactgacgctgcggacgaacaacagacgaagaacctccctgtgacatgggctggggtcctaaagtaagacgcggcttctgattatttccctgttgtgtcttgaattgagcaatccgacgtttcttctgctccatgcgattatacttgtcctcctgacgaatagccttatccactaatttctggaaatcaggataatctccaaccatgagtgggtaagaaagctcatcattaagtcctcccaaaaacttctcctggcgctcttcatcattgcacacatcttccggagcataacgagcaagacgattgaactcgtgcagatactccgtaacagagcgagatccctgagtaagcgacctgaactccttcttcttgagagacactactcccgatggtatatgcgtctttcggaaagcagcggtgaattcaagccaagtgataggttcatcagtagtcctgttaaggcggaagtgatcccaccattcagaggcagggccatgcaactgatgtgatgcaaatgagaccttctcctgatcagtacactgaagtaaatccaacttcttctctatggcatgcagccaatcactagcttcaacaggattagtggtactagagaaaacaggcggcctcacacgaagaaattcttgctgcgtgcggtcngataccaaggatcccctgttgttgttatctggggggttgggaccattccaattgctccgagtattcaccat

SEQ ID NO: 22851 - DNA, 2401 bp, Oryza sativa
  Clone ID: TF_OsC359_7193
atggtgaacactcgcagcaacgggaatggtcccaacaaccccaataacaataacaatggagagaatcccactcttgctcaagttcttgctcaacagacacagctaatgaacatgatgatgcagcaacttcagaaccagcagaaccaaggaaataaccatgtacctcctcagaataagttagcagaatttcttcatgtaaggccgcctgttttctctagtaccactaatcctgttgaagctggtgattggttgcatgccatagagaagaagttggatttgcttcagtgcactgatcaggagaaggtctcatttgcatcgcatcagttgcatggccctgcctctgaatggtgggatcatttccgccttaataggactactgctgaacctatcacttggcttgagttcaccgctgctttccggaagacgcatataccatcgggagtggtgtctctcaagaagaaggagttcaggtcgcttacgcagggatctcgctctgttacggagtatctgcacgagttcaatcgtcttgctcgttatgctccggaagatgtgcgcaatgatgaagagcgtcaagagaagttcttggaaggacttaatgatgagctttcttacccactcatgactggagattattctgatttccagaagttagtggataaggctattcgtcaggaggacaagtataatcgcatggaacagaagaaatgccggattgctcacttcaaggcacaacaggggaataatcagaagccgcgtcttactttaggatcccagtctatgccacagggaggttcttcgtctgttgttcgtccgcagcgtcagttcttcaacaacaatgctggcaacaacatccgcaatcaagctccacgtcctgttgcagctccagcacagcaacaacctgtcaagagggagcaaggcagcaagcccgtggtgtgtttcaactgtggagacccaggacattacgctgacaagtgtccgaagccccgacgcgtgaaggttgtccctgcccagagcaactctaccgcaccagcatcaaaggcccgtgtcaatcatgttgctgctgcagaagctcaagatgctccagatgtgattttggtccgggagtattccgatgtgttcccagatgatttacctgccaatgagttggcagaagttaagaggcaagtagacgatttgcttcagaaaggatacatcagaccgagttcatcaccatggggagctccggttatttttgtggaaaagaaagatcatacccagaggatgtgtgtggactatcgtgcattaaatgatgtgactatcaagaataagtatccactacccagaattgatgatttgtttgatcagcttaaaggtgccactgttttctccaagatagatcttcgatcaggatatcaccagttgagaatcaaagaggaagatatacctaagacagcttttaccactaggtatggattgttcgaatgtactgttatgtcttttggacttaccaatgcccctgctttcttcatgaacttgatgaataaggtgtttatggaatacctagacaagtttgtggtggtctttattgatgatattcttatctactctcgaaccaaagaagagcatgaagaacatcttcgccttgcattggagaagctacgagaacatcaactgtatgctaagtttagcaagtgtgaattttggttgtctgaagtgaagttccttggtcacgtcatctctgcaggaggagttgccgtcgatcctagtaatgtggaatccgtaaccaattggaaacaaccgaagacagtttcagagatccgcagttttctaggccttgcaggatattatcggagatttatagagaatttttccaagattgctaagcccatgacacgactgcttcagaaagatgtgaagtacaagtggtcagaagaatacgtcgccgtcgctcgggaaggacgtcatcgtggtcgccgtcgcgtcgccgtcctcgttcgccccttcgccgtcgccggagatcaccggagcagcgtcgccgtcgacaacccgaaggtttccgccgcttccttctcgtcgccgtcgtcgtctgttgttcgtccgccgccgttttggtcaccggtgtgttcgccgcgtcgtcctctacgtgctggtgccctccgtttgcgtcctagtgccgccgttcgccggcgagcgtgcgccgcccgagccgtccgctccgccgagccgccgccgctgtcggtgacgtcaccgctgacgtcatcggggtcgtccgcccgtggttcattgcggggcaccagactgagaagtggcggagataagcccacgggggtcgctggggagtccatgccttgtttataagggggtgattatgatccaggaagaggaagagttcttcaatgaggctgatggtgtggaggagtag

SEQ ID NO: 22852 - DNA, 10549 bp, Oryza sativa
  unsure (1)..(10549): unsure at all n locations
  Clone ID: TF_OsC359_7218
atgccgcgctacaagcctgagtatctttttggtgttgagggttttgtccaggagttgcgtacgatgtcctttgtcattggatttgggactgtccctttttatgcccagattcgtcatgatcgtcatgaagagaagtgccgagtcaaagtcaccttgaacagtaatagtgaagatattccctcagtgatgttcgaagctggaggaagaaactacatccatgcatgtcaggaggtggcaaggatcgccataggagagctccgtgatcgctacagtgatcagttggccgacactgagtatcgctaccatcctcgccaaccccagggaagtgaccgtggagactgaaggaattgagaatgatgctaccacaaggcatttggttgagatgctgtgggccatggatgaaagtcgtgcagagactgtgttagcagctcaagatcgtgaagatcggaatcgtggtaagatttgcaagttagaagacaaggtggatcgtttggagaaggaattagccgcattgaagggagaagcaccacctcagaaggccaggattcgtcttaccgcaaggaagagagctttatttgtccctcgctatcaattggcgccaaaggttcgtgtggtggagaaagaagttgccccagcagatcctccggtcatcatcataagtagtgatgaagaagaagaatccaagcgcaactgttccaagattgagtgggtagcaacccaagatgatgaagacgagccgaacgagccttcaatcgacctccgatgctcggaagaactagacaacgggaatggtcccaacctcaacaaccccaataacaataacaatggagagaatccaacccttgctcaagttcttgctcaacagactcagctaatgaacatgatgatgcagcaacttcagaaccagcagaaccaaggaaataaccatgcaccccctcagaataagttagcagaatttcttcgtgtaaggccgcctgttttctctagtaccactaatcctgttgaagctggtgattggttgcatgccatagagaagaagttggatttgcttcagtgcactgatcaggagaaggtctcatttgcatcacaccagttgcatggccctgcctctgaatggtgggatcacttccgcctgaataggactactgctgaacctatcacttggcttgaattcaccgctgctttccggaagacgcatataccatcgggagtggtgtctctcaagaagaaggaattcaggtcactcactcaaggatctcgctctgttacggagtatttgcacgaattcaatcgtcttgcccgttatgctccggaagatgtacgcaatgatgaagagcgtcaggagaagttcttggaaggacttaatgatgagctttcttacccactcatgactgaagattattctgatttccagaaattagtggataaggctattcatcaggaggacaagtacaatcgcatggagcagaagaaacgccggattgctcacttcaaggcacaacaggggaataatcagaagccgcgtcttactttaggaccccagtctatgccacatggaggttcttcgtctgttgttcgtccgcagcatcagttcttcaacaacaatgctggcaacaacatccgtaatcaagctccacgtcctgttgcagcttcgacacagcaacaacctgccaagagggagcaaggcagcaagcctgtggtatgtttcaactgtggagacccaggacattatgctgacaagtgtccaaagccccgacacgtgaaggttgtccctgcccagagcaactctgctgtaccagcatcaaaggcccgtgtcaatcatgttgcagctgcagaagctcaagatgctccagatgtgattttgggtacgttccttgttaactcagttcctgcaacagtgcttttcgattctggtgctacacattcattcttatctatgagttttgcgggaaatcatgggatggaagtagaagatcttagatgtcctttgatggttagtaccccaagtaatcaagcactctctttgcaacgtagcccctctgtcagaatagaaattcaaggggtaccatttctggccaatcttatattgttagaatccaaagaccttgacgtcattctagggatggactggttagccagacataaaggtgtgatagactgtgctaacagaaaagtaactctcaccagcaatgatggtcgagttgtgactgttcatgcattgtcttctgagtttttaaggtcaagactgaaccagataactttggaagagattcctatagtccgggggtatcctgatgtgttcccagatgatttacctggtatgccacctaaaagggatatagagttcagaaaagatttggtacctggaacaactccgatccataagagaccttatagaatggcagccaatgagttggcagaagttaagaggcaagtagatgatttgcttcagaaaggatacatcagaccgagttcatcaccatggggagctccggttatttttgtggaaaagaaagaccatacccagaggatgtgtgtggactatcgtgcattaaatgatgtgactatcaagaataagtacccgctacccagaattgatgatttgtttgatcagcttaaaggtgccaccgttttctccaagatagatcttcgatcagggtatcaccagttgagaatcaaagagtacgggttgttcgaatgtactgttatgtcttttggacttaccaatgcccccgctttcttcatgaacttgatgaataaggtgtttatggaatatctagacaagttcgtggtggtctttattgatgacattcttatctactctaagaccaaagaagagcatgaagaacatcttcgccttgcattggagaagctacgagaacatcaattgtatgccaagttcagcaagtgtgaattctggttgtctgaagtaaagttccttggtcacgtcatctcagcaggaggagttgccgtcgatcctagtaatgtggaatccgtaaccaactggaaacaaccaaagacagtttcagagatccgcagtttcctaggcctcgcaggatattatcggaagtttatagagaatttttccaagattgctaagcccatgacacgactgtttcagaaagatgtgaagtacaagtggtcagaagaatgtgagcagagttttcaagagttgaagaatcgcttgatatcagctcctattttgattttgcctgatccaaagaagggtttccaggtgtattgcgatgcatccaaacttgggttaggttgtgttttgatgcaagatgggaaggtggttgcctatgcatctcgtcagttacgtccgcatgaaaagaactaccctactcatgatcttgagttagctgcagtagttcatgcgttgaaaatttggcgtcattatcttttcggtactcgtacagaggaatttgaaagattgaatttgggaattgtcagtataggtttcgttgcagccttagaagcgaagcccactctaattgatcaagttagagaagctcaaactaatgatccggatatccaagaaattaagaagaatatgagaagaggaaaagctattggtttcttggaggatgagcacggaactgtatggttgggtgagagaatctgtgtccccgacaacaaagatttaaaagatgcaattctgaaagaagctcatgatactttatactccattcaccctggtagtactaagatgtaccaggatctcaaggaaaggttttggtgggcaagtatgaagcgtgaaattgcagaatacgtagcagtatgtgatgtttgtcagcgagtcaaggcagaacatcagaaacccgccggtttgttgcagcctttgaagattcctgaatggaaatgggaagaaatcggtatggattttatcactggtttgcccaaaacgtcattaggccatgactctatttgggtgatagtcgacagacttaccaaagtggcacatttcattccggtaaaaacaacctattccggaagtcgcttagcagaattgtatatggcaaggattgtgtgtttgcatggcgtccctaagaagatagtgtctgatcgaggcagtcagtttacttcaaatttttggaagaaacttcaggaagagatgggttctaagttgaactttagtactgcttatcatccgcagacagacggacaaactgaaagggtgaatcagattttggaagacatgttgagagcttgtgctttagatttcggtggaagttgggataagaatctaccttatgcagaattttcatacaacaacagttatcaagctagtcttcagatggctccttacgaagcactgtatggtcggaagtgccgcactccgcttttgtgggatcaaacgggagaacgtcaggttttcgggacggatatcctaagggaagcagaagaaaaggtgaaaatcattcaagaaagattgcgagtggctcagtctcgacataagagttatgccgacaatcgccgcagagatttgagttttgaagaaggagattacgtgtatcttcgtgtcacgcctcttagaggagttcatcgtttccataccaaaggaaaattggtaccgcgttttgtgggaccttataagattgtcagtagaagaggagaggttgcttatcagttagagttacctcaatctttggcagaagtccataatgtgttccatgtgtcgcaattgaagaagtgtttaagagtacctaccgaagaagctaatcttgaacaaatagaagtccaagaggatctgacctatgtggagaaaccaatccgtatcttggaaacaaatgagagaagaaccaggaatcgagttatccgtttttgcaaagtccagtggagtaatcactcggaagaagaatcaacttgggaacgagaagatgaattgaacgagggattcgagttcgtctcggattcgtctttcccgaaccttccttcctcgtcgccggtcgccgtgggccttcgccttcgcctccgagcccctttaaaaggttccccgtggtctcctctacccgccgccaccctcgccttcgcctctcgtcgccggagtcgccctagcgccccgtgcgccgccgttgttccagccgtcgccatcgctcgggaaggccgccgtcgtgttcgccgtcgcgtcgccgtcctcgtccgccccttcgccgtcgccgaagaccgccggagcgtcatcgccgccgtcgacccgaagagcttcgccgcttcctcctcgtcgccgtcgccatccgttgatcttccgcctccgtttgcgtcctcgcgccgtcgttcgccggcgagcatgcgccgcccgagccgtcccagctgcccgagccgccgccgccggggtgacgtcatcgctgacgccatcaagttcgtcctccattccgtcgtttccggagagtccgttttcaccggagaagagtttgaagagttccaaggccagcaaggcaactcctggtttggaatggtatattcctggtttggagatagaactgtgcagccaggatggttgttcagaatggttgggcctatacaacaggatgccgcgctacaagcctgagtacctgtttggtgttgagggttttgtccaggagttgcgtacaatgtcctttgccataggatttgggactgcccctttttatgcccagattactcatgatcgtcacgaagagaagtgccgagtcaaagtcactttgaacagtaatagtgaagatatcccctcagtgatgttcgaagctggaggaagaaactacatccatgcatgtcaggaggtggcaaggatcgccataggagagctccgcgatcgctacagtgatcagttggccgacacggagtatcgctatcatcctccagtcgtcaatgtaagtgatgatgaaggagaagaatcgaagcgcactcattccaagattgagtggggagcaactcaagctgatgaagacgagccgaacgagccttcaatcaactccgatgctcggaagacctagaaagccttgtcgaaccgttgtcttagatcgttgtgttagtttgcttgagtcttcagtttgtaataatgaaactcacttaagatcaataaaagttaaagtaattctctgtcctaagtagtttcccccggtttctcttcttgtgccctgcccataccagatggtgaatactcgcagcaatgggaatggccccaacaaccccaataacaacaacaatggagagaatcccacacttgcccaagttcttgctcaacagacacagctaatgaacatgatgatgcagcaactccagaaccagcaaaaccaaggaaataaccatgcacctccccagaacaagttagcagaatttcttcgtgtaaggccgcctactttctctagcaccgctaatcctgttgaagctggtgattggttgcatgccatagagaagaagttggatttgcttcaatgcactgatcaggagaaggtctcatttgcatcccatcagttgcatggccctgcctctgaatggtgggatcatttccgcctgaataggactactgcggaacctatcacttggcttgaattcaccgctgctttccggaagacgcatataccatcgggagtggtgtctctcaagaagaaggaattcaggtcgctcacccagggatctcgctctgttacggagtatttgcacgagttcaatcgtttggctcgttatgctccggaagatgtgcgcaatgatgaagagcgccaggagaagttcttggaaggacttaatgatgagctttcttacccactcatgactggagattatcatgatttccagaagttagtggataaggctattcgtcaggaggacaagtacaatcgcatggagcagaagaaacgccggattgctcaattcaagacacaacaggggaataatcagaagccgcgtcttactttaggaccccagtccatgccacagggaggttcttcgtctgttgttcgtccgaagcgttagttcttcaacaacaatgctggcaacaacatccgcaatcaagctccacgtcctgttgcagctccagcacagcaacaacctgccaagagggagcaaagcagcaagcccgtggtgtgtttcaactatggagacccaggacattatgctgacaagtgtccgaagcccagacgcgtgaaggttgtccctacccagagcaactctaccgcaccagcatcaaaggctcgtgtcaatcatgtcgctgctgcagaagcacaagatgctccagatgtgattttgggtacgttccttgttaactcagttcctgcaacagtgctttacgattctggtgctacacattcattcttatctatgagttttgcaggaaatcatgggatggaagtagaagatcttagacgtcctttgatggttagtaccccaagtagtcaagcactctctttgcaacgtagcccctctgtcagaatagaaattaaaggagtaccatttctggccaatcttatcttgttagaatccaaagaccttgatgtcatcctagggatggactggttagccagacataaaggtgtgatagactgtgctaacagaaaagtaactctcaccagcaatgatggtcgagttgtgactgttcatgcattgtcttctgagtttttaaggtcaagactgaaccaaataattctggaaaagattcctatagtccgggagtatcccgatgtgttccccgatgatttgcctggtatgccgcctaaaagggatatagagttcagaatagatttggtaccaggaacaactccgatccataagagaccttatagaatggcagccaatgagttggcagaagtcaagcggcaagtagatgatttgcttcagaaaggatacatcagaccaagttcatctccatggggagctccggttatttttgtggaaaagaaagatcatacccagaggatgtgtgtggactatcgtgccctaaacgatgtgactatcaagaataagtatccgctacccagaattgatgatttgtttgatcagcttaaaggtgccactgttttctccaagatagatcttcgatcagggtatcaccagttgagaatcaaagaggaagatatacctaagacagcttttaccactaggtatggattgttcgaatgtactgttatgtcttttggacttaccaatgcccccgctttcttcatgaacttgatgaataaggtgtttatggaatacctagacaagttcgtggtggtctttattgatgatattcttatctactctcgaaccaaagaagagcatgaagaacatcttcgccttgcactagagaagctacgagaacatcaactgtatgctaagtttagcaagtgtgaattttggttgtctgaagtgaagttccttggtcacgtcatctcagctagaggagttgccgttgatcctagtaatgtggaatccgtaaccaactggaaacaaccaaagacagtttcagagattcgcagtttcctaggtcttgcaggatattatcggaggtttatagagaatttttccaagattgctaagcccatgacacgattgtttcagaaagatgtgaagtacaagtggtcagaagaatgtgagcagagttttcaagagttgaaaagtcgcttaatatcagcacccattttgattttgcctgatccaaagaagggttttcaagtgtattgcgatgcatctaagtttgggttaggttgtgttctgatgcaagatgggaaggtggttgcctatgcatctcgtcagttacgtccgcatgaaaagaactaccctactcatgatcttgagttagctgcagtagttcatgcgttgaaaatttggcgtcattatcttttcggtactcgtacagaggtatataccgatcacaagagtttaaagtatatctttactcagccggatctgaacatgagacaaaggagatggttggaattaattaaaggattatgacatgggaattcattatcacctgggaaaggctaatgttgtagtagacgctcttagcaggaaaggctattgcaatgctacggaaggacgacagttgtcattggaattatgcaaggaatntgaaagattaaatttgggaattgtcagtagaggttttgttgcagccttagaagcgaagcccactctaattgatcaagttagagaagcccaaattaatgatcccgatattcaagagatcaagaagaatatgagaagaggaaaagctatcggtttcttggaggatgagcacggaactgtatggttgggtgagagaatctgcgtccccgacaacaaagatttaaaagatgcaattctgaaagaagctcacgacactttatactctattcaccctggtagtactaagatgtaccaggatctcaaggaaagattttggtgggcaagtatgaagcgtgaaatcgcagaatacgtagcagtatgtgatgtttgtcagcgagtcaaggcagaacatcagaaacctgccggtttgctgcagcctttgaagattcctgaatggaagtgggaagaaatcggtatggattttatcactggtttacccagaacgtcatcaggccatgactctatttgggtaatagtcgacagacttaccaaagtggcacatttcattccggtaaagacaacttattccgaaagtcgcttagcggaattgtatatggcaaggattgtgtgtttgcatggcgtccctaagaagatagtgtctgatcgaggcagtcagtttacttcaaatttttggaagaagcttcaggaagagatgggttctaaactgaactttagtactgcttatcatccgcagacagacggacaaacagaaagggtgaatcagattttggaagatatgttgagagcttgtgctttagacttcggtggaagttgggataagaatctaccttatgcagaattttcgtacaacaacagttatcaagctagtcttcagatggctccttacgaagcactgtatggtcggaagtgccgcactccgcttttgtgggatcaaacgggagaacgtcaggttttcgggacggatatcctaagggaagcagaagaaaaggtaaagatcattcaagaaagattgcgagtggctcagtctcgacataagagttatgccgataatcgccgtagagatttgagttttgaagaaggagattatgtgtatcttcgtgtcacgcctcttcgaggagttcatcgttttcacaccaaaggaaaattggcaccgcgttttgtgggaccttataagatcgtcagtagaagaggagaggttgcttatcagttggagttacctcaatctttggcaggagtccataatgtgttccatgtttcgcaattgaaaaagtgtttaagggtacctaccgaagaagctaatcttgaacagataaaagaccaagaggatctgacctatgttgagagaccaatccgtatcttggaaatagatgagagaagaaccaggaatcgggttatccgtttttgcaaagtccaatggagtaatcactcggaagaagagtcaacttgggaacgagaagatgaattgaagtcagctcatccgcatctgttcgccagttcttccgaatctcgaggacgagattccgtt

SEQ ID NO: 22853 - DNA, 4782 bp, Oryza sativa
  Clone ID: TF_OsC359_7242
atggccaggcgtcggggagcagcagccgttggcggcgccctgaccagcggcgagctggaggccatggcggtagagagtagcgggcaaggggcctggttggctgctgttgctgtccttgaatctatcaaaatttcattgatgattggaatctggaaaaattcgaaacgtgcaataacaaggatgccgcgcttcaagcctgagtacttgtttggtgttgagggatttgtccaagagttgcgtacaatgtcctttgtcattggatttgggactgcccctttttatgcccagatttctcatgatcgtcatgaagagaagtgccgagtcaaagtcaccttgaacagtaatagtgaagatatcccctcagtgatgttcgaagctggaggaagaaactacatccatgcatgtcaggaggtggcaaggatcgccataggagagctccgcgatcgctatagtgatcagttggccgacacggagtatcgctatcatcctcgtcaaccccagggaagtgaccgtggcagctaccttgagactgaaggaattgagaatgatgctaccacaaggcatttggttgagatgctgtgggctatggatgaaacccgtgcggagactgtgttagcggctcaagatcgtgaagaccggaatcgtggtaagatttacaagctagaagacaaggtggatcgtttggagaaggagctagctacgttgaagggagaagcaccgccgcagaaggccaggattcgtctcaccgcaaggaagagagctctatttgtcccttgctatcaattggcgccaaaggttcgtgtggtggagaaagaagttgccccaaccctagcagatccttcggtcatcatcataagtgacgatgaaaaagaagaatccaagcgcaaccattccaagattgagtgggtagcaactcaagatgatgaagacgagccgaacgagccttcaatcgacctccgatgctcggaagaactagagtgccataaccagcaaaaccaaggaaataaccatgcacctccccaaaacaagttagcagaatttcttcgtgtgaggccgcctattttctctagtaccactaatcctgttgaagctggtgattggctgcataccatagagaagaagttggatttgcttcagtgcactgatcaggagaaggtctcatttgcatcacaccagttacatggccctgcctctgaatggtgggatcacttccgcctgaataggactactgctgaacctatcacttggcttgaattcaccgctgctttccggaagacgcatataccatcgggagtggtgtctctcaagaagaaggagttcaggtcgctcacccagggatctcgctctgttacggagtatttgcacgagttcaatcgtctggctcgttatgctccggaagatgtgcgcaatgatgaagagcgtcaggagaagttcttggaaggacttaatgatgagctttcttacccactcatgactggagattatcatgatttccagaagttagtggataaggctattcgtcaggaagacaagtacaatcgcatggagcagaagaaacgccggattgctcaattcaagacacaacaggggaataatcagaagccgcgtcttactttaggaccccagaccatgccacatggaggttcttcgtctgttgttcgtccgcagcgtcagttcttcaacaacaatgctggcaataacaaccgcaatcaagctccacgtcctgttgcagctccaacacagcaacagcctgccaagagggagcaaggcagcaagcccgtggtgtgtttcaactgtggagacccggggcattatgctgacaagtgtccgaagccccgacgcgtgaaggttgtccctgcccagagcaactctaccgtaccagcatcaaaggcccgtgtcaatcatgttgctgctgcggaagctcaagatgctccagatgtgattttgggtacgtttcttgttaacttagttcctgcagcagtgcttttcgattctggtgctacacattcattcttatctatgagttttgcgggaaatcatgggatggaagtagaagatcttagacgtcctttgatggttagtaccccaagtaatcaagcactctctttgcaacgtagcccctctgtcagaatagaaattaaaggagtattatttctggccaatcttatcctgttagaatccaaagaccttgatgtcatcctagggatggactggttagccagacataaaggtgtgatagactgtgccaacagaaaagtaactctcaccagtcatgatggtcgagttgtgattgttcatgcattgtcttctgagtctttaaggtcaagactgaaccagataactttggaagagattcctatagtccgggagtatcccgatgtgttcccagatgatttacctggtatgccgcctaaaagggatatagagttcggaatagatttggtacctggaacaactccgatccataagagaccttatagaatggcagccaatgagttggcagaagtcaagaggcaagtagatgatttgcttcagaaaggaaacatcagaccgagttcgtctccatggggagctccggttatttttggtggaaaagaaagatcatacccagaggatcttaaaggtgctactgttttctccaagatagatcttcgatcagggtatcaccagttgagaatcaaagaggaagatatacctaagacagcttttaccactaggtatgggttgtttgaatgtactgttatgtcttttggacttaccaatgcccctgctttcttcatgaacttgatgaataaggtgtttatggaatacctagacaagttcgtggtggtctttattgatgatattcttatctactcccgaactaaagaagagcatgaagaacatcttcgccttgcattagagaagctacgagaacatcaactgtatgctaagtttagcaagtgtgaattttggttgtctgaagtgaagttccttggtcacaaacaaccgaagacagtttcagagatctgcagtttcttaggcctcgcaggatattatcggaggtttatagagaatttttccaagattgctaagcccatgacacgactgcttcagaaagatgtgaagtacaagtggtcggaagaatgtgagcagagttttcaagagttgaagaatcgcttgatatcagctcctattttgattttacctgatccaaagaagggtttccaggacgggaaggtggttgcctatgcatctcgtcagttacgtccgcatgaaaagaactaccctactcatgatcttgaattggccgcagtagttcatgcgttgaaaatttggcgtcattatcttttcggtactcgtacagaggtatataccgatcacaagagtttaaagtatatctttactcagccggatctgaacatgagacaaaggagatggttggaattaattaaggactatgacatgggaatctgtgtccccgataacaaagatttaaaagatgcaattctgaaagaagcccatgataccttatactccattcaccctggtagtacaaaaatgtaccaggatctcaaggaaagattttggtgggcaagtatgaagcgtgaaatcgcagaatacgtagcagtatgtgatgtttgtcagcgagtcaaggcagaacatcagaaacccgccggtttgttgcagcctttgaagattcctgaatggaaatgggaagaaatcggtatggattttatcactggtttacccagaacgtcatcaggccacgactctatttgggtgatagtcgatagacttaccaaagtggctcatttcatcccggtaaagacaacctattccggaagtcggttggcggaattgtatatggcaaggatcgtgtgtttgcatggcgtccctaagaaaatagtgtctgatcgaggcagtcagtttacttcaaatttttggaagaagcttcaggaagagatgggttctaaattgaactttagtactgcttatcatccgcagacagacggacaaaccgaaagggtgaatcagattttggaagatatgttgagagcttgtgctttagatttcggtggaagttgggataagaatctaccttatgcagaattttcgtacaacaacagttatcaagctagtcttcagatggctccttacgaagcactgtatggtcggaagtgccgcactccgcttttgtgggatcgaacgggagaacgtcaggttttcgggacggatatcctaagggaagcagaagaaaaggtgaaaatcattcaagaaagattgcgtgtggcccagtcgcattataagagttatgccgacaatcgccgcagagatttgagttttgaagaaggggattatgtgtatcttcgtgtcacgcctcttcgaggagttcatcgttttcacaccaaaggaaaattggcaccgcgttttgtgggaccttatatgattgtcagtagaagaggagaggttgcttatcagttggagttacctcaatctttggcaggagtccataatgtgttccatgtgtcgcaattgaagaagtgtttaagggtacctaccgaagaagctaatcttgaacagatagaagtccaagaggatctgacctatgttgagaaaccaatccgtatcttggaaacaaatgagagaagaaccaggaatcgagttatccggttttgtaaagtccaatggagtaatcactcggaagaagaatcaacttgggaacgagaagatgaattgaagtcagctcatccgcatctgttcgccagttcttccgaatctcgaggacgagattctgtttaa

SEQ ID NO: 22854 - DNA, 4765 bp, Oryza sativa
  Clone ID: TF_OsC359_7268
ggagaaggaactagccgcgttgaagggagaagcaccgccgcagaaggccaggattcgtctcaccgcaaggaagagagctttgtttgtccctcgttatcaattggcgccaaagattcgtgtggtggagaaagaagttgccccagctcaagcagatcctccagtcatcatcataagtagtgatgaagaagaagaacccaagcgcaacaattccaagtttgagtgggtagctatcaaagatgaggaagatgagccgaacgagccttcgatcgacctcctatgctcggaagaactagagtgactttttccccggtttcttttcttatcctgtccatgccagatggtgaacactcgcagcaacgggaatggtcccaacctcaacaaccccaataacaataacaatggagagaatccaacccttgctcaagttcttgctcaacagactcagctaatgcacatgatgatgcaacaacttcagaaccagcagaaccaaggaaataaccatgcacctccccagaacaagttagcagaatttcttcgggtgaggccgcctattttctctagtaccaccaatcctgttgaagccggtgattggctgcatgccatagagaagaagttggatttgcttcagtgcactgatcaggagaaggtctcatttgcatcacaccagttgcatggccctgcctctgaatggtgggatcacttccgcctgaataggactactgctgaacctatcacttggcttgaattcaccgctgcttttcggaagacgcatataccatcgggagtggtgtctctcaagaagaaggagttcaggtcgcttacgcagggatctcgctctgtcacggagtatttacatgagttcaatcgtcttgcccgttatgctccggaagatgtgcgcaatgatgaagagcgtcaggagaagttcttggaaggacttaatgatgagctttcttacccactcatgactggagattattatgatttccagaagttagtggataaggctattcgccaggaggacaagtacaatcgcatggagcaaaagaaacgccggattgctcaattcaagacacaacaggggaataatcagaagccacgtcttactttaggaccccagtctatgccacagggaggttcttcgtctgttgttcgtccgcagcgtcagttcttcaacaacaatgctggcaacaacatccgcaatcaagctctacgtcctgttgcagtttcgacacagcaacaacctgccaagaaggagcaaggcagcaagcccgtggtgtgtttcaattgtggagacccaggacattacgctgacaagtgtccgaagccccgacgcgtgaaggttgtccctgcccagagcaactctaccgcaccagcatcaaaggcccgtgtcaatcatgttgctgctgcagaagctcaagatgctccagatgtgattttgggtacgttccttgttaactcagttcctgcaacagtgcttttcgattctggtgctacacattcattattatctatgagttttgcgggaaatcatgggatggaagtagaagatcttagacgtcctttgatggttagtaccccaagtaatcaagcactctctttgcaacgtagcccctctgtcagaatagaaattcaaggagtatcatttctggccaatcttatcctgttagaatccaaagaccttgatgtcatcctagggatggactggttagctagacataaaggtgtgatagactgtgccaatagaaaagtaactctcaccagcaatgatggtcgagttgtgactgttcatgcattgtcttctgagtctttaaggtcaagactgaaccagataactttggaagagattcctatagtccgggagtatcctgatgtgttcccagatgatttacctggtatgccgcctaaaagggatatagagttcagaatagatttggtaccaggaacaactctgatccataagagaccttatcgaatggcagccaatgagttggcagaagtcaaaaggcaagtagacgatttgcttcagaaaggatacatcagaccgagttcatctccatggggagctccggttatttttgtggaaaagaaagaccatacccagagaatgtgtgtggactatcgtgcactaaatgatgtgactatcaagaataagtatccactacccagaattgatgatttgtttgatcagcttaaaggtgccaccattttttccaagatagatcttcgatcagggtatcaccagttgagaatcaaagaggaagatatacctaagacaacttttaccactaggtatgggttgttcgaatgtactgtgatgtcttttggacttaccaatgcccctgctttctttatgaacttgatgaataaggtgtttatggaatacctagacaagtttgtggtggtctttattgatgacattcttatctactcccgaaccaaagaagagcatgaagaacatcttcgccttgcactagagaagttacgagaacatcaactgtatgctaagtttagcaagtgtgaattttggttgtccgaagtgaagttccttggtcacgtcatctcagcgggaggagttgccgttgatcctagtaatgtggaatccgtaaccaactggaaacaaccgaagacagtttcagagattcgcagtttcctaggcctcgcaggatattaccggaggtttatagagaatttttccaagattgctaagcccatgacacgactgcttcagaaagatgtgaagtacaagtggtcagaagaatgtgagcaaagttttcaagagttgaagaatcgcttgatatcagctcctattttgattttaccttatccaaagaagggtttccaagtgtattgcgatgcatccaaacttgggttaggttgtgttctgatgcaagatgggaaggtggttgcctatgcatctcgtcagttgcgtccgcatgagaagaactaccctactcatgatcttgagttagctgcagtagttcatgcgttgaagatttggcgtcattatcttttcggtactcgtacagaggtatataccgatcacaagagtttaaagtatatctttactcagtcggatctaaacatgagacaacggagatggttggaattaattaaggattatgacatgggaattcattatcacccgggaaaggctaatgttgtagcagacgctcttagcaggaaaggctattgcaatgctacggaaggacggcagttgccattggaattatgcaaggaatttgaaagattaaatttgggaattgtcagtagaggtttcattgcagccttagaagcgaagcccactctaattgatcaagttagagaagcccaaattaatgatcctgatattcaagagatcaagaagaatatgagaagaggaaaagctatcagtttcttggaagatgagcaaggaactgtatggttgggtgaaagaatctgcgtccccgacaacaaagatttaaaagatgcaattctgaaagaagctcatgataccttatactccattcaccctggtagtaccaagatgtaccaggatctcaaggaaagattttggtgggcaagtatgaagcgtgaaatcgcagaatacgtagcagtatgtgatgtttgtcagcgagtcaaggcagaacatcagaaacccgccgggttgttgcagcctttgaagattcctgaatggaaatgggaagaaatcggtatggattttatcactggtttacccagaacgtcatcaggccatgactctatttggataatagtcgacagacttaccaaagtggctcatttcatcccggtaaagacaacctattccggaagccggttagcggaattgtatatggccaggattgtgtgtttgcatggcgttcctaagaaaatagtgtctgatcgaggcagccagtttacttcaaatttttggaagaaacttcaggaagagatgggttctaagctgaactttagtactgcttatcatccgcaaacagacggacaaaccgaaagggtgaatcagattttggaagacatgttgcgagcttgtgctttagacttcggtggaagttgggataagaatctaccttatgcagaatttttgtataacaacagttatcaagctagtcttcagatggctccttacgaagcactgtatggtcggaagtgccgcactccgcttttgtgggatcaaacgggagaacgtcaggttttcgggacggatatcctaagggaagcagaagaaaaggtgaaaatcattcaagaaagattgcgtgtggctcagtctcgtcataagagttatgccgacaatcgccgcagagatttgagttttgaagaaggagattatgtgtatcttcgtgtcacgcctcttcgaggagttcatcgttttcacaccaaaggaaaattggcaccgcgttttgtgggaccttataagattatcagtagaagaggagaggttgcttatcagttggagttacctcaatctttggcaggagtccataatgtgttccatgtgtcgcaattgaaaaagtgtttaagggtacctaccgaagaagctaatcttgaacagatagaagtccaagagcatctgacctatgttgagaaaccaatccgtattttggaaatagatgagagaagaaccaggaatcgagttatccatttttgcaaagtccagtggagtaatcactcggaagaagaatcaacttgggaacgagaagatgaattgaagtcagctcatccgcatctattcgccagttcttccgaatctcgaggacgagattctgtttaa

SEQ ID NO: 22855 - DNA, 2954 bp, Oryza sativa
  Clone ID: TF_OsC359_7295
atggtgaacactcgtagcaacgggaatggccccagtaacaataacaacaacaatggagagaatcccacacttgctcaagttcttgctcaacagactcagttaatgaacatgatgatgcagcaacttcagaaccagcagaaccaaggaaataaccatgcacttccccagaacacgttagcagaatttcttcgtgtgaggccgcctattttttctagtaccacaaatcctgttgaagctggtgattggctgcataccatagagaagaagttggatttgcttcagtgcaccgatcaggagaaggtctcatttgcatcacacaagttgcatggccctgcctctgaatggtgggatcacttccgcctgaataggactaccgctgaacctatcacttggcttgagttcaccgctgctttccggaagacgcatataccatcgggagtggtgtctctcaagaagaaggagttcaggttgctcacccagggatctcgctctgttacggagtatctgcacgagttcaatcgtcttactcgttatgctccggaagatgtgcgcaatgatgaagagcgccaggagaagttcttggaaggacttaatgatgagctttcttacccactcatgactggagattattatgatttccagaagttagtggataaggctattcgccaggaggacaagtacaatcgcatggagcaaaagaaacgccggattgctcaattcaagacacaacaggggaataatcagaagccacgtcttactttaggaccccagtctatgccacagggaggttcttcgtctgttgttcgtccgcagcgtcagttcttcaacaacaatgctggcaacaacatccgcaatcaagctctacgtcctgttgcagtttcgacacagcaacaacctgccaagaaggagcaaggcagcaagcccgtggtgtgtttcaattgtggagacccaggacattacgctgacaagtgtccgaagccccgacgcgtgaaggttgtccctgcccagagcaactctaccgcaccagcatcaaaggcccgtgtcaatcatgttgctgctgcagaagctcaagatgctccagatgtgattttggtgaagttccttggtcacgtcatctcagcgggaggagttgccgttgatcctagtaatgtggaatccgtaaccaactggaaacaaccgaagacagtttcagagattcgcagtttcctaggcctcgcaggatattaccggaggtttatagagaatttttccaagattgctaagcccatgacacgactgcttcagaaagatgtgaagtacaagtggtcagaagaatccttagaagcgaagcccactctaattgatcaagttagagaagcccaaattaatgatcctgatattcaagagatcaagaagaatatgagaagaggaaaagctatcagtttcttggaagatgagcaaggaactgtatggttgggtgaaagaatctgcgtccccgacaacaaagatttaaaagatgcaattctgaaagaagctcatgataccttatactccattcaccctggtagtaccaagatgtaccaggatctcaaggaaagattttggtgggcaatcatcgtcgtcgctcgggaagaccgccatcgtgctcgccaagtcgtcgccgtcctcgtctgccgcttcgccaccgtcggagaccgccggagcatcgtcgccgtcatcaagccgaagagcgccgccatttcaacctcgtcgccgtcgccgtccgttggtcttccgccgtcgctttggtcgccggaaggtgcgctgcggtggattgtgttatgcaaggggtattgtcacaactcctttccgaggtaccgtggtggtattgaggcacatggtgacatgataggcaagcgagtggtgcggcagttggcaagcgtgacgaggggtgtgcagcgagggcagtgcagcagccacggcggccggcgagtgcccgatgagcgcattgagctggcaaccacgatgaggggatcggagcactactacagaaggcctaaatggtgccggttgagaaaccccctaagaaaaacaacacatcaagaacacatccatcaagaatacaacaagaagaatacattcatcaagaaccggatggagaggaggagggcgccactgccttctccaccgccacagacgtctccactgccaccgccgtcgtcggatggagaggaggagggcgccgctgtcttctccaccaccaccactaccactgtcgcgggaagccgctgtcgccacctcccgggctatcggaccaccgccgcctcccctcccatcgccaagccgccacagccacctcccctcccgccagatctggcggaggggagggcgccgccgctgggccatcggaccaccgccgcctccgctcccgccgtcgagccgccgcagagccaccgccgccacctcctctcccgccagatctagtggaggggagggcgccgccgccacctcccgggccgtcggaccaccgccgcctcccctcccgctgccgcacgacgttgcagcagccgcctctggatccaaaaaaaaacccctaaccctaaagctgccgccgccgccctcctcacggtcgtcatcgtcgtcgtcgccgtcgccgtctgagcccgcccacccgtcgccacctccacgggatccaggtgggggacggccgctaccgccagatccggtcggggggcagccgcctccaccagatccgggtggggggcggtcgtccgccgtcgtgcgcccgctactcccgccttccaccgagcccgtcgctcccagtcaccaccaagcccgccgttcccgcccaccgctctccatcgcctagcaccgctgcgtgcccgtcgccgagccgcgcgtcgctgtgctgggagaagtgcgatggcggggcgactgttgtgcaagaagttcatgagattgggatgcggctgatgacgctgatctctggtcattag

SEQ ID NO: 22856 - DNA, 2654 bp, Oryza sativa
  Clone ID: TF_OsC359_7353
gggctgtcttcctcctccagccgtcgcccggccgaaccctagccgagctgcgccgccgccgctgcccttccaaattccgtcgcccctctctatttccggtcaaattgattgagggcaaatgatctttgagatctcctcttccttttctcttttggaaacatcggctaattttctttggaaaccggtggatttgagttggattcggattcatctatctcctctaaccctagactttcctcctcgccgccggtcgccgtgggcctccgtcgccgcctcctagcctctataaaagcatccctgggacctcctctatccgccgccacctttgccttagcccgccgtcgcgtctagcgccgcctccgcgtagccctagccgtcgccgtcgttgccgtcggttcagccgcgccgcgccgccgttgcagccgccgtcgtcggtcgccgtcgccaccatcgggatcgcgaggtcgtcgccgtccccgtccaccgcttcgccgccgccgaagaccgccggagcaccgccgtcaccgtcgacccgaagaccgccgccgcttcttcctcatggccggcgccgtccgttgctcttccgccgtggttttggtcaccgcgccctagcgccgagtagcctcgagccgccgtcgccgccgtcgctccagccgtgcgccgccgccgttccggtcatcgccgtcgctcgggaagaccaccgtcgtggtcgccaagtcgccgccgtcctcgtccgccccttcgccgtcgccgaagaccgccggagcaccgtcgccgtcgtcaagccgaagagctccgccgtttcaacctcgtcgccgtcgccgtccgttggtcttccgccgctcctttggtcatcggcgagcatgcgcgtccgagccgccgagccgccgccgccggtggtgcgccaaggtgaagagaagcccggccgcacctcctccttcgtcgccggccgccgtagctcgccgttgccggtcaagccgagccgccgccgccgttcatctcgtcgccggccgtcgtcgttcgtcgtttggctcaagggtgagtaccgttgggttcgtctcgtcgttctccacgtgtacatgtcctccaaatttgcagccgaccatccaatctccggcgaggtcgccaacccgggccggccattgatgatccgcgccgagcagccgtctccgccgtcgccgccgcttgccgccaccgccattagcaccactaatcctgttgaagctggtgattggctccatgccatagagaagaagttggatttgcttcaatgcactgatcaggagaaggtctcatttgcatcccatcagttgcatggccctgcctctgaatggtgggatcacttccgtctgaataggactactgctgaacctatcacttggcttgaattcaccgctgctttccggaagacgcatataccatcgggagtggtgtctctcaagaagaaggaattcaggtcgctcactcagggatctcgctctgttacggagtatctgcacgagttcaatcgtcttgctcgttatgctccggaagataagttagtggataaggctattcgccaggaggacaagtacaatcgcatcgagcagaagaaacgtcggattgctcaattcaagacacaacaggggaatagtcagaggccgcgtcttactttaggaccccagtccatgccacagggaggttcttcgtctgttgttcgtccgcagcgtcagttcttcaacaacaatgctggcaacaacatccgcaatcaagctctacgccctgttgcagcctcgacacagcaacaacctgccaagagggagcaaggcagaaagcccgtggtgtgtttcaactgtggagacccaggacattacgctgacaagtgtccgaagccccgacgcgtgaaggttgtccctgctcagagcaactctaccgcaccagcgccaaaggcccgtgttaatcatgtcgctgctgcagaagctcaagatgctccagatgtgattttggaaaggatacatcagaccgagttcatctccatggggagctccggttatttttgtggaaaagaaagaccatacccagaggatcttaaaggtgccactgttttctccaagatagatcttcgatcagggtatcaccagttgagaatcaaagaggaagatatacctaagacagcttttaccactagatatgggttgttcgaatgtactgttatgtcttttggacttaccaatgcccctgctttcttcatgaacttgatgaataaggtgtttatggaatacctagacaagttcgtggtggtctttattgatgacattcttatgatcggagcgaggatcagggacacggacttcttgcaaggagatgacattctctggatcaatttcaggggaatctacgaactataccagctggacgccctcgacgtctctattatgagttgctggattttaatggagattcaaagggcccgacggcggagggttttcgatactggattcatcgaccctcggagagtaaacgtcacaatgcttgaccaatatccacaagaaacagaggacaatctcgtccatctcctgaaggcgcagcattacaagacgttcatactgttgccgtacaacatagaattccactgggtgcttttactcttcgacctgtcggcctgcaccgtcaac

SEQ ID NO: 22857 - DNA, 2026 bp, Oryza sativa
  Clone ID: TF_OsC359_7374
atggtgaacactcgcgccagtggaagtggaaacaacaacaatggagagaatcccacacttgcccaagttcttgctcaacagactcagttaatgaacatgatgatgcagcaactccagaaccagcagaaccagggaaataaccatgcacctccccagaataagttagcagaatttcttcgtgtgaggccgcctattttctctagtaccactaatcctgttgaagctggtgattggttgcatgccatagagaagaagttggatttgcttcagtgcactgatcaggagaaggtctcatttgcatcacatcagttgcatggccctgcctctgaatggtgggatcacttccgcctgaataggactactgctgaacctatcacttggcttgaattcaccgctgctttccggaagacgcatataccatcgggagtggtgtctctcaagaagaaggaattcaggtcgctcactcaggggtctcgctctgtcactgagtatctgcacgagttcaatcgtctggctcgttatgctccggaagatgtgcgcaatgatgaagagcgccaggagaagttcttggaaggacttaatgatgagctttcttacccactcatgactggggattatcctgatttccagaagttggtgattaaggctattcgtcaggaagacaagtacaacagcatggagcaaaagaaacgccggattgctcaattcaaaacacaacagggaaataatcagaagccgcgtcttactttaggaccgcagtctatgccacagggaggttcttcgtctgttgttcgtccgcagcgtcagttcttcaacaacaatgctggcaacaacatccgcaatcaagctccacgtcctgttgcagcttcgacacagcaacaacctgccaagagggagcaaggcagcaagcccgtggtgtgtttcaactgtggagacccaggacattacgcggacaagtgcccgaagcctcgacgcgtgaaggttgtccctgcccagagcaactctaccgtaccagcatcaaaggctcgtgtcaatcatgtcgctgctgcagaagctcaagatgctccagatgatccccggtgtcgccgctacccgtcgccactctcgccttcgcttctcgtcgccgggagcgctctagcgccgtgccgcttcgcgccgccgtcgtcgccgccacttcagccgtgcgccgccgtcgctccagtcatcgtcgtcgctcgggaaggtcgccatcgtggtcgccgtcacgtcgccgtcctcgtccgctccttcgccgttgctgtagaccgccggagcaccgtcgccgccgtcgacccgatcttctccgccgcttcgatctcgccgccggtgccgtccgttgatcttccgccgcttctttggtcaccggtgagttcgccgcgtcacgctctacgtcctggtgccctccgttctcgtcgtcgcgccgtcgttcgccggcgagcttgcgccgcccgagccgccgccggtggtgacgtcaccgctgacgtcatcgtggccgtttgccgtgagccgcatggttcattgcggagcaccagactgagaagtggcggagataagcccacaggggtcgctccagtcatcgtcgtcgctcaggaaggtcgccatcatggtcgccgtcatgtcgccgtcctcgtccgctcctccgccgttgctgtagaccgccggagcaccgtcgccgccgtcgacccgatcttctccgccgcttcgatctcgccgccggtgccgtccgttgatcttccgccgcttctttggtcaccggtgagttcgccgcgtcacgctctacgtcctggtgccctccgttctcgtcgtcgcgccgtcgttcgccggcgagcttgcgccgcccgagccgccgccggtggtgacgtcaccgctgacgtcatcgtggcggtttgccattccgacgtttccggagagtccgttttcgcaggagaagattttgaagagttccaaggccagcaaggcaagtcacacagatcccaaacaaccctttgagcatgttgatcctatttaa

SEQ ID NO: 22858 - DNA, 2450 bp, Oryza sativa
  Clone ID: TF_OsC359_7395
ctcctggtttggaatggtacattcctggtttggagatagaactgtgcagccggggtggttgttcagaatggttgggcctatacaacaggatgccgtgttacaagcctgagtacctgtttggagttgaaggttttgtccaggagttgcgtacgatgtcctttgtcattggatttgggaatgctcctttttatgcccagattcgtcatgatcgtcatgaagaaaagtgccgagtcaaagtcaccttgaacagcaatagtgaagatatcccctcagtgatgtttgaagctggaggaagaaactacatccatgcatgtcaggaggtggcaaggattgccataggagagcttcgtgatcgctacagtgatcagttggccgacactgagtatcgctatcatcctcgccaaccccagggaagtgaccgtggcagttaccttgagactgaaggaattgagaatgatgttaccacaagacatttggttgagatgttgtgggctatggatgaaagtcgtgcggagactgtgttagcagctcaagatcgtgaagatcggaatcgtggtaagatttgcaagctagaagacaaggtggatcgtttggagaaggaattagccgcattgaagggagaagcaccgccgcagaaggctaggattcgtcttaccgcaaggaagagagctttgtttgtccctcgctatcaattggcgccaaaggtccgcgtggtggagaaagaagttgccccagcaaatcctccggtcatcatcataagtagtgatgaagaagaagaacccaagcgcaacaattccaagtttgagtgggtagctatcaaagatgaggaagatgagccgaacgagccttcaatcgacctcctatgctcggaagaactagataccactaatcctgttgaagctggtgattggctgcatgccatagagaagaaattggatttgcttcagtgcactaatcaggagaaggtctcttttgcatcacatcagttgcatggccctgcctctgaatggtgggatcacttccgcctgaataggattactgctgaacctatcacttggcttgaattcaccgctgctttccggaagacgcatataccatcgggagtagtgtctctcaagaagaaggagttcaggtcgcttacccagggatctcgctctgttacggagtatctgcacgagttcaatcgtcttgctcgttatgctccggaagatgtgcgcaatgatgaagagcgccaggagaagtttttgggaggacttaatgatgagctttcttacccacttatggttggagattaccctgatttccagaaattagtggataaggctattcgtcaggaagacaagtacaatcgcatggagcagaagaaacgtcggattgctcaattcaagacacaacagggaaataatcagaagccgcgtcttactttaggaccccagcccatgccacagggaggttcttcgtctgttgttcgtccgcaacgtcagttcttcaacaacaatgctggcaacaacatccgtaatcaagctccacgtcctgttgcagctccagcacagcaacaacctgccaaaagggagcaaggcagcaagcctgtggtgtgtttcaactgtggagatccaggacattatgctgacaagtgtccgaagccccgacgcgtgaaggttgtccctgtccagaataactctgctgtaccagcatcaaaggcccgtgtcaatcatgttgctgctgcagaagctcaagatgctccagatgtgattttggtccgggagtatcctgatgtgttcccagatgatttacctgaaaggatacatcagaccgagttcatcaccatggggagctccggatattatcggaggtttatagagaatttttccaagattgctaagcccatgacacgactgcttcagaaagatgtgaagtacaagtggtcggaagaatctttagaagcgaagcccactctaattgatcaagttagagaagcccaaattaatgatcctgatattcaagagatcaagaagaataggagaagaggaaaagctattggtttcttggaggatgagcacggaactccgtgctccgccgtcgctccagctgtcgccgccgctcgggaagaccgccgtcgtcatcgccaagtcgccgccgtcctcgtccgccccttcgcagccgtcggaacccgccggagcatcgtcgccgtcgtcaacccgaaggtagccgccgcttccttctcgtcgccgtcgccgtccgttccttttccgccgccgttttggtcaccggtgtgttcgccgcgttgtcctctacgtgctggtgccctccgttggtgccgtggtgccgccgttcgccggcgagtgtccgccgcccgagccgtcttcttcgccgagccgccgccgtcgtcggtgacgtcatcgctgacgtcatcgggatcctatcccgtgagccggtcgtggaccgattga

SEQ ID NO: 22859 - DNA, 4905 bp, Oryza sativa; identical to SEQ ID NO: 15143
  Clone ID: TF_OsC359_7429

SEQ ID NO: 22860 - DNA, 2883 bp, Oryza sativa
  Clone ID: TF_OsC359_7443
atggtgaacactcgcagcaacgggaatggccccagtaacaataacaatggagagaatcccactcttgctcaagttcttgctcaacagacacagctaatgaacatgatgatgcaacaactccagaaccagcagaaccaaggaaataatcatgtacctcctcagaataagttagcagaatttcttcgtgtgaggccgcctgttttctctagtaccactaatcctgttgaagctggtgattggctgcatgccatagagaagaagttggatttacttcagtgcactgatcaggagaaggtctcatttgcatcacatcagttgcaaggccctgcctctgaatggtgggatcacttccgcctgaataggattactgctgaacctatcacttggcttgaattcaccgctgctttccagaagacgcatataccatcgggagtggtgtctctgaagaagaaggagttcaggtcgcttacccagggatctcgctctgttacggagtatctgcacgagttcaatcgtctggctcgttatgctccggaagatgtgcgcaatggtgaagagcgtcaggagaagtttttggaaggacttaatgatgagctttcttacccactcatgactggagattatcatgatttccagaagctagtggataaggctattcgtcaggaggacaaatacaatcgcatggagcagaagaaacgtcggattgctcaattcaagacacaacaggggaataatcagaagccgcgtcttactttaagaccccagtccatgccacatggaggttcttcgtttgttgttcgtccgcagcgtcagttcttcaacaacaatgctggcaacaacatccgcaatcaagctccacgtcctgttgcagctccaacacagcaacaacctgccaagagggagcaaggcagcaagcccgtggtgtgtttcaactgtggagacccaggacattatgctgacaagtgtccgaagccccgacgcgtgaaggttgtccctacccagagcaactctacggtaccagcatcaaaggcccgtgtcaatcatgttgctgctgcaagaggttcaagatgctccagatgtgattttgggtacgttccttgttaactcagttcctgcaacagtacttttcgattctggtgctacacattcattcttatctatgagttttgcgggaaatcatgggatggaagtagaagatcttagacgtcctttgatggttagtaccccaagtaatcaagcactctctttgcatcgtagcccctctgtcagaatagaaattcaaggagtaccatttctggccaatcttatcctgttagaatccaaagacctagatgtcatcctagggatggactggttagccagacataaaggtgtgatagactgtgctaacagaaaagtaactctcaccagcaatgatggtcgagttgtgactgtttatgcattgtcttctgagtctttaaggtcaagattaaaccaaataactttggaagagattcctatagtccgggagtatcccgatgtgttcccagatgatttacctggtatgccgcctaaaagggatatagagttcagaatagatctggtaccaggaacaactccgatccataagagaccttatagaatggcagccaatgagttggcagaagtcaagaggcacgtagatgatttgcttcagaagggatacatcagaccgagttcatcaccatggggagctccagttatttttgtggaaaagaaagaccatacccagagaatgtgtgtggattatcgtgcattaaacgatgtgactatcaagaataagtatccgctacccagaattgatgatttgtttgatcagcttaaaggtgccactgttttctccaagatcgatcttcgatcaggatatcaccagttgagaatcaaagaggaagatatacctaagacagcttttaccactaggtatgggttgttcgaatgtactgttatgtcttttggacttaccaatgcccctgctttcttcatgaacttgatgaataaggtgtttatggaatacctagacaagttcgtggtggtctttattgatgatattcttatctactcccgaaccaaagaagagcatgaagaacatcttcgccttgcattggagaagctacgagaacatcaactgtatgctaagtttagcaagtgtgaattttggttgtccgaagtgcttttctcctttggaatctttggttaaatcactttggaaagctttggaatcgagttcgattcggatcggttttccctctctccaagccgcgagtttccttcgccgttgccgtcgccgtgggcctccgccgtcgcctccgagccccggagcttcgtcgccgtcgacaacccgaagtagccgccgcttccttctcgtcgccgtcgtcgtccgttccttttccgccgccgttttggtcaccggtgtgttcgccgtgttgtcctctacgtgctggtgccctccgttggtgccgtggtgccgccgttcgccggcgagtgtccgccgcccgagccgtcttcttcgccgagccgccgccgtcgtcggtgatgtcatcgttgacgtcatcgggatcctctcccgtaagccggtcgtggaccgatcgatctcggccatccgatttggatcggatcaatctcgaccgtccgttcgtgtgaaccgccgcccgtgcgccggtccacccaaaccctagcccgctgacgcaataaatccccttttccttgcaatcattcatcagaggaagagttctacaatgaggctgatggtgtggaggattaggtgtagccttggtcaagctgcctgtggagtggagccgtctgcgccgtttatttattttccgctgcttagaactttattgattgagaggaactatctacctctgt

SEQ ID NO: 22861 - DNA, 4911 bp, Oryza sativa; identical to SEQ ID NO: 15129
  Clone ID: TF_OsC359_7488

SEQ ID NO: 22862 - DNA, 5271 bp, Oryza sativa; identical to SEQ ID NO: 15227
  Clone ID: TF_OsC359_7516

SEQ ID NO: 22863 - DNA, 3027 bp, Oryza sativa; identical to SEQ ID NO: 15178
  Clone ID: TF_OsC359_7532

SEQ ID NO: 22864 - DNA, 5082 bp, Oryza sativa; identical to SEQ ID NO: 15118
  Clone ID: TF_OsC359_7537

SEQ ID NO: 22865 - DNA, 1997 bp, Oryza sativa
  Clone ID: TF_OsC359_7756
ctcctggtttggaatggtacattcctggtttggagatagaactgtgcagccgggatggttgttcaaaatggttgggcctatacaacaggatgccgcgttacaagcctgagtacctgtttggtgttgagggttttgtccaggagttgcgtacgatgtcctttgtcattggatttggaactgcccctttttatgcccagattgctcatgatcgtcatgaagagaagtgccgagtcaaagtcaccttgaacagtaatagtgaagatatcccctcagtgatgtttgaagctggaggaagaaactacatccatgcatgtcaggaggtggcaaggatcgccataggagagctccgtgatcgctacagtgatcaattggccgacactgagtatcgctaccatcctcgccaaccacagggaagtgaccgtggcagttaccttgagactgaaggaattgagaatgatgttaccacaaagcatttggttgagatgttgtgggctatggatgaaagtcgtgcggagactgtgttagcagcccaagatcgtgaagattggaatcgtggtaagatttgcaagttagaagacaaggtggatcgtttggagaaggaattagccgcattaaagggagaagcaccgccgcagaaggccaggattcgtcttaccgcaaggaagagagctctatttgttcctcgctatcaattggcgccaaaggttcgtgtggtggagaaagaagttgccccagctcaagcggatcctccggtcatcatcataagtagtgatgaagaagaagaatccaagcgcaacaattccaagattgagtgggtagcaacccaagttgataaagacgagccttcaatcgacctccgatgcttggaagaactagagactactgctgaacctatcacttggcttgaattcaccgctgctttccggaagacgcatataccatcaggagtagtgtctctcaagaagaaggagttcaggtcgcttacccagggatctcgctctgttacggagtatctgcacgagttcaatcgtcttgctcgttatgctccggaagatgtgcgcaatgatgaagagcgccaggagaagtttttgggaggacttaatgatgagctttcttacccactcatggttggagattatcctgatttccagaaattagtggataaggctatacgtcaggaggacaagtacaatcacatggagcagaagaaacgtcggattgctcacttcaaggcacaacagggaaataatcagaagccgcgtcttactttaggaccccagtccatgccacagggaggttcttcgtctgttgttcgtccgcagcgtcagttcttcaacaacaatgctggcaacaacatccgtaatcaagctccacgtcctgttgcagctccagcacagcaacaacctgccaagagagagcaaggcagcaagcccgtggtgtgtttcaactgtggagacccaggacattatgctgacaagtgtccgaagccccgacgcgtgaaggttgtccctgcccagaataactctgctgtaccagcatccaaggctcgtgtaaatcatgtcgctgctgcagaagctcaagatgctccagatgtgattttccttgttaactcagttcctgcaacagtacttttcgattctgccaatgagttggcagaagttaagaggcaagtagatgatttgcttcagaagggatacatcagacctagttcatctccatggggagctccgccgtcgccgtcgctcgggaagaccaccgtcgtgctcgccaagtcgtcgccgtcctcgttcgccccttcgccgtcgccggagatcaccggagcagcttcgccgtcgtcgacccgaaggttcccgccgcttcctccttgtcgccgtcgccgtccgttggtcttccgccgccgtttaggtcaccggtggtacacctctgatcagagtaaaactattcgaatagccgtgcccgcggttatgggcgggtctaacaatgtctttcgtgattag

SEQ ID NO: 22866 - DNA, 4775 bp, Oryza sativa
  Clone ID: TF_OsC359_7844
atggttgttcagaatggttgggcctatgcaacaggggtttacacacatatgccgcgctacaagcctgagtacttgtttggtgttgagggttttgtccaggagttgcgtacaatgtcctttgtcgttggatttgggactgcccctttttatgcccagattcctcatgatcgtcatgaagagaagtgccgagtcaaagtcaccttgaacagtaatagtgaagatatcccatcggtgatgttcgaagctggaggaagaaactacatccattcatgtcaggaagtggcaaggatcgccataggagagctccgtgatcgttacagtgatcagttggctgacactgagtatcgttaccatcctcgtcaaccacagggaagtgaccgtggcagttaccttgagactgaaggaattgagaatgatgctaccacaacacatttggttgagatgctatgggctatggatgaaagtcgtgcggaaactgtgttagcggcccaagatcgtgaagattggaatcgtggtaagatttgcaagctagaagacaaggtggatcgtttggagaaggaactagccgcgttgaagggagaagcaccacctcagaaggtcaggattcgtcttaccgcaaggaagagagctctatttgtccctcgctatcaattggcgccaaaggtccgtgtggtggagaaagaagttgccccagcagatcctccggtcgtcaacatggtgaacactcgtagcaacgggaatggtcccaaccccaacaaccccaataacaataacaatggggagaatccaacccttgctcaagttcttgctcaacagactcagctaatgcacatgatgatgcaacaacttcagaaccagcagaaccaaggaaataaccatgcacctcctcagaataagttagcagaatttcttcgtgtgaggccgcctattttctctagtaccactaatcctgttgaagctgctgattggctgcatgccatagagaagaagttggatttgcttcagtgcactgatcaggaaaaggtctcatttgcatcgcatcagttgcatggccctgcctctgaatggtgggatcacttccgtctgaataggactactgctgaacctatcacttggcttgaattcaccgctgcttttcggaagacgcatataccatcgggagtggtgtctctcaagaagaaggagttcaggtcgcttacccagggatctcgcactgttacggagtatctacacgagttcaatcgtctagcccgttatgctccggaaaatgtacgcaatgatgaagagcgtcaggagaagttcttggaaggacttaatgatgagctttcttacccactcatgactggagattattctgatttccagaaattagtggataaggctattcgtcaggaggacaagtataatcgcatggagcagaagaaacgccagattgctcaattcaagacgcaacaggggaataatcagaggccgcgtcttactttaggaccccagtctatgccacatggaggttcttcgtctgtcgttcgtccgcagcgtcagttcttcaacaacaatgttggcaacaacatccgcaatcaagttccacgtcctgttgcagctccaacacaacaacagcctgccaagagggagcaaggtagcaagcccgtggtgtgtttcaactgtggagacccgggacattacgctgacaagtgtccgaagccccgacgcgtgaaggttgtccctgtccagagcaactctaccgcaccagcatcagaggctcgtgtcaatcatgttgcagctgcagaggctcaagatgctccagatgtgattttgggtacgttccttgttaactcagttcctgcaacagtgcttttcgattctggtgctacacattcatttctatctatgagttttgcgggaaatcatgggatggaagtagaagatcttagacgtcctttgatggttagtaccccaagtaatcaagcactctctttgcaacgtagcccctctgtcagaatagaaattaagggagtaccatttctagccaatcttatcttgttagaatccaaagaccttgatgtcatcctagggatggattggttagctagacataaaggtatgatagactgtgccaacagaaaagtaactctctccagcaatgatggtcgagttgtaactgttcatgcattgtcttctgagtctttaaggtcaagactgactcaagtaactttggaagagattcctatagttcgggagtatcccgatgtgttcccagatgatttacctggtatgccgcccaaaagggatatagagttcagaatagatttggtacctggaacaactccgatccataatagaccttatagaatggcagccaatgagttggcagaagtcaagaggcaagtggatgatttgcttcagaagggatacatcagaccgagttcatctctatggggagctccggttatttttgtggaaaagaaagatcatacccagaggatgtgtgtggactatcgtgcactaaatgatgtgactatcaagaataagtatccgctacccagaattgatgatttgtttgatcagcttaaagataagtttgtggtggtctttattgatgacattcttatctactctcgaaccaaagaagagcatgaagaacatcttcgccttgcattggagaagctacgagaacatcaactgcatgctaagtttagcaagtatgaattttggttgtctgaagtgaaattccttggtcacaaagatgtgaagtacaagtggtcagtagaatgtgagcagagttttcaagagttgaaaagtcgcttaatatcagctcctattttgattttacctgatccaaagaagggtttccaggtgtattgcgatgcatccaaacttgggttaggttgtgttctgatgcaagatgggaaggtggttgcctatgcatctcgtcagttacgcttgcatgagaagaactaccctactcatgatcttgaattagctgcagtagttcatgcgttgaagatttggcatcattatcttttcggtactcgtacagaggtatacactgatcacaagagtttaaagtatatctttactcagccggatctgaacatgagacaacggagatggttggaattaattaaggattttgacatgggaattcattatcacccgggaaaggctaatgttgtagcagatgctcttagcaggaaaagctattgcaatgctacggaaggacgacagttgccattggaattatgcaaggaatttgaaagattaaatttgggaattgtccgaagaggtttcgttgcagccttagaagcgaagtccactctaattgatcaagttagagaagcccaaattaatgatcctgatattcaagagatcaagaagaatatgagaagaggaaaagctatcggtttcttagaggatgagcaaggaactgtatggttgggtgagagaatttgtgtccccgacaacaaagatttaaaagatgcaattctgaaagaagcccatgatactttatactctattcaccctggtagtacaaaaatgtaccaggatcgcaaggaaagattttggtgggcaagtatgaagcgtgaaatcgcagaatacgtagcactatgtgatgtttgtcaacgagtcaaggcagaacatcagaaacctgccggtttgctgcagcctttgaagattcctgaatggaaatgggaagaaatcggtatggattttatcactggtttgcccagaacgtcatctggccatgactctatttgggtaatagtcgacagacttaccaaggtggcacatttcattccggtaaagacaacttattccggaagtcgcttagcggaattgtatatggcaaggattgtgtgtttgcatggcgtccctaagaagatagtgtctgatcgaggaagtcagtttacttcaaatttttggaagaaacttcaggaagagatgggttctaagctgaactttagtactgcttatcatccgcagacagacggacaaaccgaaagggtgaatcaaattttggaagacatgttgagagcttgtgctttagatttcggtggaagttgggataagaatctaccctatgcagaattttcgtataataacagttatcaagctagtcttcagatggctccgtacgaagcactgtatggtcaaaagtgccgcactccgcttttgtgggatcaaacgggagaacgtcaggttttcgggacagatatcctaagggaagcagaagaaaaggtgaaaatcattcaagaaagattgcgtgtggctcagtctcgtcataagagttatgccgacaatcaccgcagagatttgagttgtatcctaagggagattatgtgtatcttcgtgtcacgcctcttcgaggagttcatcgttttcacaccaaaggaaaattggcaccgcgttttgtgggaccttataagattgtcagtagaagaggagaagttgcttatcagttggagttacctcaatctttggcaggagtccataatgtgttccatgtgtcgcaattgaagaaatgtttaagggtacctaccgaagaagctaatcttgaacaaatagaagtccaagaggatctgacttatgtggagaaaccaatccgtatcttggaaacaaatgagagaaggaccaggaatcgagttatccgtttttgcaaagtccagtggagtaatcactcggaagaagagtcaacttgggaacgagaagatgaattgaagtcagctcatccgtatctgttcgccagttcttccgaatctcgaggacgagattctgtt

SEQ ID NO: 22867 - DNA, 6117 bp, Oryza sativa; identical to SEQ ID NO: 15208
  Clone ID: TF_OsC359_7902

SEQ ID NO: 22868 - DNA, 4949 bp, Oryza sativa
  Clone ID: TF_OsC359_7935
ttcttatagtgagacataactgagtatatagcctggatcatcaaattgggaacttgtagtgacttccgatatggacgtcaattcaatcttgccatgtggggtgatcatgtcctattaggactcttgttgtaggttgtatacccattattatatggaaagttatctctaaatatagataaagatacaaacaaaatctccgggatctcctctaccttttctcctttggaatctttggctcaatcggtttggaatgagtttgattcgagttcgaatcggatcggctttcctctctccaagccgcgagtttccttcgccgttgctgtcgccgtgggccttcgccgccgcctccgagccccggagcgtcatcgccgccgtcgacccgaagagcttcgccgcttcctcctcgtcgccgtcgccgtccgttgtttctccgccgtcgttttggtcgtcggtgagttcgccgcgccgtccgctacccgttggtgccctttgttagcgtcctcgcgccgccgttcgccggcgagcgtgcgccgcctgagccgtcccagccgccgagccgccgccgccggggtgacgtcatcgctgacgccatcaagtccgtccgccgtgagccgctgtggacccgatcgatctcggccgtccatcttggatcgatgccgcgttacaagcctgagtacctgtttggtgttgagggttttgtccaggagttgcgtacgatgtcctttgccataggatttgggactgcccctttttatgcccagattcctcatgatcgtcatgaagagaagtgccgagtcaaagtcaccttgaacagtaatagtgaagatatcccctcagtgatgtttgaagctggaggaagaaactacatccatgcatgtcaggaggtggcaaggatcgccataggagagctccgtgatcgctacagtgatcaattggccgacactgagtatcgctaccatcctcgccaaccccagggaagtgaccgtggcagttaccttgagactgaaggaattgagaatgatgctaccacgaagcatttggttgagatgttgtgggctatggatgaaagtcgtgcggagactgtgttagccgctcaagatcgtgaagaccggaatcgtggtaagatttgcaagctagaagacaaggtggatcgtttggagaaggaattagccgcattgaagggagaagcaccgcctcagaaggccaggattcgtcttaccgcaaggaagagagctttatttgtccctcgctatcaactggcgccaaaggttcgtgtggtggagaaagaagttgccccagctcaagcggatcctccggagaaggtctcatttgcatcacatcagttgcatggccctgcctctgaatggtgggatcacttccgcctgaataggattactgctgaacctatcacttggcttgaattcaccgctgctttccggaagacgcatataccatcaggagtagtgtctctcaagaagaaggagttcaggtcgcttactcagggatctcgctctgttacggagtatctgcacgagttcaatcgtcttgctcgttatgctccggaagatgtgcgcaatgatgaagagcgccaggagaagtttttgggaggacttaatgatgagctttcttacccactcatggttggagattatcctgatttccagaaattagtggataaggctattcgtcaggaggacaagtacaatcgcatggagcagaagaaacgtcggattgctcaattcaagacacaacagggaaataatcagaagccgcgtcttactttaggaccccagtccatgccacatggaggttcttcgtctgttgttcgtccgcagcgtcagttcttcaacaacaatgctggcaacaacatccgtaatcaagctccacgtcctgttgcagctccagtacagcaacaacctgccaagagggagcaaggcagcaagcccgtggtgtgtttcaactgtggagacccaggacattatgctgacaagtgtccgaagccccgtcgcgtgaaggttgtccctgcccagagtaactctgctgtaccagcatccaaggcccgtgtcaatcatgtcgctgctgcagaagctcaagatgctccagatgtgattttggtccgggagtatcctgatgtgttcccagatgatttacctgccaatgagttggcagaagtcaagaggcaagtagacgatttgctacagaaaggatacatcagaccgagttcatcaccttggggagctccggttatttttgtggaaaagaaagatcatacccagaggatgtgtgtggactatcgtgcactaaacgatgtgactatcaagaataagtatccgctacccagaattgatgatttgtttgatcagcttaaaggtgccactgttttctccaagatagatcttcgatcagggtatcaccagttgagaatcaaagaggaagatatacctaagacagcttttaccactaggtatgggttgttcgaatgtactgttatgtcttttggacttaccaatgcccctgctttcttcatgaacttgatgaataaggtgtttatggaatacctagacaagttcgtggcggtctttattgatgatattcttatctactctcgaaccaaagaagagcatgaggaacatcttcgccttgcattggagaagctacgagaacatcaactgtatgctaagtttagcaagtgtgaattttggttgtctgaagtgaaattccttggtcacgtcatctcagccggaggagttgccgtcgatcctagtaacgtggaatccgtaaccaattggaagcaaccaaagacagtttcagagattcgcagtttcctaggcctcgcaggatattaccggaggtttatagagaatttttccaagattgctaagcccatgacacgactgcttcagaaagatgtgaagtacaagtggtcggaagaatgtgagcagagttttcaagagttgaagaatcgcttagtatcagctcctattttgactttgcctgatccaaagaagggtttccaagtgtattgcgatgcatccaaacttgggttaggttgtgttctgatgcaagatgggaaggtggttgcctatgcatctcgacagttacgtccgcatgaaaagaactaccctactcatgatcttgagttagctgcagtagttcatgcgttgaagatttggcgtcattatcttttcggtactcgtacagaggtatataccgatcacaagagtttaaagtatatctttactcagccggatctgaacatgagacaacggagatggttggaattaattaaggattatgacatgggaattcattatcatccgggaaaggctaatgttgtagcagacgctcttagcagaaaaggctattgcaatgctacaaaaggacgacagttgccattggaattatgcaaggaatttgaaagattaaatttgggaattgtcggtagaggtttcgttgcagccttagaagcgaagcccactctaattgatcaagttagagaagcccaaattaatgatcctgatattcaagagatcaagaagaatatgagaagaggaaaagctattggtttcttggaggatgagcaaggaactgtatggttgggtgaaagaatttgtgtccctgacaacaaagatttgaaagatgcaattctgaaagaagctcacgatactttatactccattcaccctggtagtactaagatgtaccaggatctcaaggaaagattttggtgggcaagtatgaagcgtgaaatcgcagaatatgtagcagtatgtgatgtttgtcagcgagtcaaggcagaacatcagaaacccgccggtttgttgcagcctttgaagattcctgaatggaaatgggaagaaataggtatggattttatcactggtttgcccagaacgtcatcgggccatgactctatttgggtgatagtcgacagacttaccaaagtggctcattttattccggtaaagacaacctattccggaagtcgcttggcggaattgtatatggcaaggattgtgtgtttgcatggcgtccccaagaagatagtgtctgatcgaggcagtcagtttacttcaaatttttggaagaaacttcaggaagagatgggttctaagctgaactttagcactgcttatcatccgcagacagacggacaaaccgaaagggtgaatcagattttggaagacatgttgagagcttgtgctttagatttcagtggaagttgggataagaatctaccctatgcagaattctcgtataacaacagttatcaagctagtcttcagatggctccttacgaagcactgtatggtcggaagcggagtgcgtgtcgcactccgcttttgtgggatcaaacgggagaacgtcaggttttcgggacggatatcctaagggaagcagaagaaaaggtaaagatcattcaagaaagattgcgagtggctcagtctcgacataagagttatgccgacaatcgccgtagagatttgagttttgaagaaggagactatgtgtatcttcgtgtcacgcctcttcgaggagttcatcgttttcacaccaagggaaaattggcaccgcgttttgtgggaccttataagattgtcagtagaagaggagaggttgcttatcagttagaattacctcaatctttggcaggagtccataatgtgttccatgtgtcgcaattgaaaaagtgtttaaggatacctaccgaagaagctaatattgagcagatagaagtccaagaggatttgacttatgttgagaaaccaatccatatcttggaaacaaatgagagaagaaccaggaatcgagttatccgtttctgcaaagttcaatggagtaatcactcggaagaagagtcaacttgggaacgagaagatgaattgaagtcagctcatccgcatctgttcgccagttcttccgaatctcgaggacgagattctgtttaa

SEQ ID NO: 22869 - DNA, 10187 bp, Oryza sativa
  Clone ID: TF_OsC359_7977
atgcccgttgggttatttccggtcgtgacagccaccaagacctctggcgctgctaccaccggctccgtgtcgtcaaggcggagggcgcggcgagcggcggctgttgctcgccgttcggctgccactccctcgtcagcacctctgacccgggaagatcagcgtggagggccagatgcccgcatcggtatcgagcgccggcgtaatggtcgacgtgctacccacgcaacggagggtgcctcctcgtccggagtgtcacctcaacacggacgcggggatcagccctccgtgcccccggttggtggtgtcggctgtagagcctttgtagcgagccttcggaacgtccgttggcccccaaggttccggcccaccatcgccgaaaaatatgacgggagcgtcaaccccgccgagtttctccaggtctacacgaccgggatcgaggccgccgggggtgatgacagggtgaagaagcggacttacacgcagtacagcgaagggatgatgagtcacttcgctcatacattcagcggtctgtcaagtccgcaacaccataccatgcatccctgcacacgcggtgatctacgcgttcaggggggtgtgcggcacaaccgcatgctcgaaaagatcgcctccaaggagccccagactaccgcggagctttttcagctcgcggaccgagtggctcgtaaggaggaggcctggacctggaacccctccggttccggtgtggcaacttcggccgcccccgggtccgctgctcagacagggcgacgtgacaggaggaggaagaagaggtcagcccattccgacgacgagggtcatgtcctcactgtcgagggcgcttcgcgggccacccgaaaggggaggcctgcgagcgacaaaaagaaggaggccggcgctcccagcagggagcgcccaaccggcaagtggtgcatcgtccacaacacctccctccacgacctcgcggactgccgcgcagtcaaaagtttggctgagcggacgagaaagtgggaggaggagaggaggcaggagcgccgagagggtaagtccccggcggtaccctccggcaatcggcgaagtgaggccaagcagaaggcccccgtcgaggacatcgatggcggcgatgatgacctaggctttcaggagcctggggccaccattgccactgtcgatgggggagcgtgtgctcacgtttctcgccggagcctcaaggccatgaagcgagagcttctggccgcggcccccactcatgaggcgacgcgtcgggcgcggtggtcggaggttgccctcaccttcgaccagaccgaccacccaccgtgtgttgcccggggaggacagatcgcgatggccccggggatggtgctctggccgtcccagccgattatcggtgtgacgccggggcacacatggccgttaggtcatatcgacctaccggtcaccttcggtggatccgtcaacttccgcacggagcgggtaaacttcgatgtggcggacctaagtctgccctacaacgcggtcctagggaggcccgcgttggtgaagttcatggcggcggtccattacgcttaccttcagatgaagatgccgggccccggtggccccatctctgtccatggcgacctcaaagtcgcgcttgcttgtatggagcagcgcgcggatcacctcgccgctgcgtccaagcccgagggtggcgacgagaggcttggcacctccgttcccgccgccccgaggcagaggatgatcacatgcgacgaggtcccggaagacgcgctcgtctccttcctgcgggcaaacgctgacgtcttcgcatggagaccggcggatatgcccggggtccccagggaggtgattgagcaccgtctcgccgtacggccgggcgcaaggccgatccggcagaaagtgcggcggcaggccccggaacgtcaagccttcatccgcgaggaggtggcgcgacttctggaggccggattcatccgcgaggtcatccatccggagtggctggcgaacccggtggtcgttcccaaggcgaatggcaaacttcggatgtgcatcgactacaccgaccttaacaaggcatgtcctaaggacccttaccccctgcctcgcatagatcagattgtcgactccacagcggggtgcgaccttttgtgttttctagatgcatactctggttaccatcagattcgcatggctagggaggatgaggaaaaaactacattcattacccccataggaacttattgttatacgacaatgcccttcgggttaaagaatgcaggtcctacttttcaacgtactactcgaatttctttgggtagccaaataggacgtaatgttgaggcttatgtcgatgacttggttgtgaagacgcgcgaccaagaaactttactttcagatctggcggaaactttcgagagtctccgctccgcccgcataaagctgaaccctgataagtgcgtgttcggtgtacctgcgggcaagcttctcggcaagcttagggatgtgcaatgcgtcaccggttgcatggccgccctaagtcggttcatatcgaggctgggagagaaggcgctacccttatttaagctcctcaaacgctccgggccgttcacttggacggaggaagctgaacgtgccctcactcagttgaaggcgtatctcagctctcccccagttttgatcgccccggagccagatgaacccttgctactctacttagcggcgaccccgcaagtagttagtgcggcgttggttgtggagcgcgatgaggacaatcctcattccgcgcatccccaccctgtgctggcttggcccgggagagagcagggaggagaggcccccgagccgaacggtggcccaaggcccccgacgaccggagctggccctctgcccgcttgtcagacggtgccaggtgcccccgacccccaggatggcccgggggccactgcgggaaggccgcacctatcgccctctgaccccgaggttaaccctgtgccgactcgacccgggagagagcagggagaagaggcccccgagccgaacggtggcctaaggcccccgacgaccggagttggccctttgcccgcttgtccgacgatgccaggagcccccgacccccaggacggcaccgaggccactgtgggaaggccgcgcctgtcgtcctccgaccccgaggtcgtcggcacagaagacgagtgcgccccgcgaggccgcttggacgaagagcgccccagggatgcggcccctggcgaagaggatcggccccaccgaaaggtgcagcggcccgtctactttgttagtgaggccctccgggacgccaagacccgataccctcaggcccagaagatgctttatgctattctgatggcttcgaggaaactgcgccattatttccaggcgcatcgggtcacggtggttacgtcttaccccctcggccaaatcttgcataatcgagagggtacaggacgggtggtctgtatggagtaccggtgctctgacccgcagatggatgcttacgtacgccaagtacggcgtatggagcgccatttcgacgggatagagcttcggcacgtgcccagacgggataacacgattgccgacgaactctcacggctcgcttcctcgcgagcccagaccccaccgggcgcctttgaagaaaggcttgcccagccgtcggcgcgacccgaccccttaggggagacggacgcgcctgaccggcccccgaggcccgtcggagtccaggcctcgggacccgaggggagtgctcccagctcccttagattgattgcttggatcgctgagatccaagcatacctcacagataagactctacccgaggaccgcgaagggagtgaacgcgtccagcgcatctccaaacgctacgtgctggtagaagggaccctctatcggcgcgcggctaacggaatcctcctgaagtgcattcctcgggaacaaggcgtcgagcttcttgccgatatccatgaaggcgaatgcggagcccactccgcctcgcgcaccttggttggcaaagcctttcgtcaaggtttctattggccgacagctctcaatgatgcggtcgacctggtccggcgatgcagagcgtgtcaattccacgccaagcaaatccatcagccggcccaggccctgcagatcataccactttcatggccatttgctgtctgggggctcgatatcctgggaccgtttaggcaggccccgggcgggtttgagtatctgtatgtcgcgatcgacaagttcactaagtggcccgaggcttatccggtcgtcaagatcgataagcactccgcacttaagttcattaagggcattacagcccggtttggggtgcctaaccgtattattacggataatggcacccaattcactagtgaacttttcggcgatcactgcgaagacatgggcatcaagctctgcttcgcctcccccgcccaccccagaagcaatggccaagtggagcgcgccaatgcggaaatcctcagaggccttaaaaccaagaccttcaacatcctcaagaagcacggcgattcgtggatcgaggagttgccagcggtgctctgggcgaaccgaaccacaccaagccgagcaaccggggaaacgcctttcttcctcgtctacggcgcggaagcggttctcccatccgagctcaccctgaggtcccctcgggccaccatgtactgcgaggctgatcaagatcagcttcgcagagatgacctcgactacttggaggagcgaaggcggcgcgcggccctccgagccgcgcgctaccagcagagcctacggcgctaccatcagcgccgcatccgggcccgatcactctgcgtcaacgacctcgtcctacgccgcgtccaaacgcgtgctggattgagcaagctctcaccaatgtgggagggtccgtatcgagtgatcagcgtcccccggccgggctccgttcggctggccgcgggcgacggcacagagctgcctaacccgtggaacatcgaacaccttcgtcgcttctacccctaataggggctcgagtcggctaaaatcgccaaaaggggcccagaaccgagccgtgccccggggcgtggttaactccgggggggaatcggcaaaaacccacaaccgggtcacccataaccctcggtcaccacgctcccggcctggccagtctcgacacgtggatctccccaggcactagccccgacccgagccatttgaggactagaacccgggtcgccagcctcgtcgccactgtcgcccacaccgccgtcatcgccctcctcgtcggagttgagggcgaacgcgagccgaggggccgaaccctcgaagctgtggacgatatggtcggcggcatcccggacctgcacgcgcgcgccgtcctcggtcccgggagggaactcgtccagcgccgtccatggggagaagtcggggtccctggcctggtaactcgccagtacgagctccaccgctcctcgggcgaggtccctcgaggatgagttaatcgtcccctcgagctcctcggggagccgctggagagtcccggccatctccgagaggcgctgggcgaggcccccctggttggcggcgtacttcacagtccgcccgccccagagacccgcctgccgcccggcgcggtctaaacgggacacggcatcgcgaagcatgctgggccctatctcgcctgccaggcgaagggcctcgacctccccggtggacgaatccagcgcgccctgcagatccgcgatggtgtgttcggcagctgcgaggcgggcggctaagtcgctgtcgcccgtggccgccccgccgctacgcgcccttgcatccagctcccttgcctgcgcctcgagttcagcggcccgctggttcagtgcggccctctcggcgcgggcactttccagattgcgacgcgcttgttcctcttgcgcagcctcgcggagggacaggctgtccgccagccgttgcgccgcggcctcggcctccttgagagctcgctcccgctcggtgagcgcgtcctcgcggaggcggagcgcggactcttcttcggcacaggcggcttcgtgcaccgccagtgtgacctcccgaatagcaacggcggcctcgcgatccgccaggtccctctccacggcgcaggcacgctcttccagcgccatggcacgggcctcaagggcttcttcgcgccgccgggatgccacctcggtctccgccgcccgccgttctcgggcagcggcagcgtcaaggaccccccgggcggcgtcgagctttttccctagctccgcctcccagctcccgtattgaaggcggagggtgtcctgcgcctcgttcatcacggtggtggcgatgagggcagccccccgctcctcctccacctccttggcgatctcccccagcaccttccgacgggcttcgagctctgagacgtgccggcggtgtgccttgcggcccacctccaccatggcctccaccgagcgtcgcccctcttcgacacgcgcccatgcggcgtcaagctccgcccgctctgcttgcagggcctccacttgggcacttaacccgtccaacaccgtggtgtttgcgacggccaaggcctgcagaaggggttctgcgctcagtggagcaacggaaggcgtggggaagagccgcctcggtgaggatgccgcgcggctcggcccgccgatggacatgccggactcagggatgtcccccggacctggcttgtcctgagcgtcgcccgagggagtgggcccaagcgatacgcccgcggcctcgtcgcgagctgcctcggaagtcgtcgccgcctcggcctggcgaagtctggcctcctcccgagcggcttcttcagcttggcgagctcggacggccacctgggcggcctccccggcttcccgtaggcgatccgcggcttctcgccggtcagattcccgcctccgagcctctgtggtcgccgggtcctcggcctcagactggccggacttggaatggcgggagggacgcgacgggatctcgcttggaggggaaataaggtttccccgggatggttctgtcccccccatcttgcggagccgtttcttcttccgctccccctcgggctgcgacgtcggcgtggccccctccgggcgcctgctgctggcacgcgccgccccgccccctcggggaggagatgggggaggggttccttcctgcttcctcttcccccgggcgtcggcagggcggccgctccccgggcccccgtcgcggggcccagaagcacgaccccctcccggggtagattgttcccccctgcggctcccgcccgcgccatcgtggcctcgaggagcccgctcctccgacgccccgaccgcctgcatgatggtcaggatggaggcgcggtctggatcgctgcagagggggaggactccttgaggaatgagggatgcctccacggagctgagattcagcacccgttggaccactatcttgaagtcctcaggagcccggtcccatctgaccccctggtgggtcctcatacagtcctcggacccggtgtactcccaggcgccccgggcgcgccgctggagtggcgcgatccggcgacgaagatagtcgccgaacaccatggcccctgtgagcccctgggatcgcaggcccgccaggcggtcgaggacggcgtcgtagccatctcccagatctaccggcgcccgccagttggaggcctgcgttggaggctggctcggaagtcggaggcgcgcttcgtcggcgaggggggtgtagaaccagtcgctcttccagtcatcccacttcttgcggaggacgcagggaatgtagcggttcagcaccggccctcgcggctggaagtagcaaccaccaaccaccgacggcggcgacaccggctgtacggtgaagaaccaccggaacagccgaagggatgggcgcaccccgatgaacatctcgcacaggtgcgcgaagatggccaatgtcattaccgcgttgggggtgaggtgcgccatctggagatcgtaaaactccagaacatccatgaagaaagaagaaaatggcggaaccagccctgccatagcaaaagggaggaagaagacggaccgccccgggtagcgtggcgccgggcatccctcgcccagcgagactatctcccggtcagtggcagattccggcatgaagcggcgcggcagcccggcctgtctctcgctcacgatgcgggaaggcggcagcacggcctcgccccgtcctgtcaggatgagagtctctaggcactcgtccctagccggagccagcgtgctagctcctggagatggcacgttggtcatcaccgacgacggcggcggctcggcgaagaagacggctcgggcggcggacactcgccggcgaacggcggcaccacggcaccaacggagggcaccagcacgtagaggacaacgcggcgaacacaccggtgaccaaaacggcggcggagaaggaacggacgacgacggcgacgagaaggaagcggcggctaccttcgggttgtcgacggcgacgaagctccggcgggttccgacggctgcgaaggggcggacgaggacggcggcgacttggcgatgacgacggcggtcttcccgagcgacggcgacggctggaacgacggcggcgcacggagttccgtgctcatcctccaagaaaccaatagcttttcctcttctcatattcttcttgatctcttgaatatcaggatcattaatttgggcttctctaacttgatcaattagagtgggcttcgcttctaaggattcttccgaccacttgtactttacatctttctgaagcagtcgtgtcatgggcttagcaatcttggaaaaattctctataaacctccggtaatatcctgcgaggcctaggaaactagtggtaaaagctgtcttaggtatatcttcctctttgattctcaactggtgataccctgatcgaagatctatcttggagaaaacagtggcacctttaagcggagctccccatggtgatgaacttggtctgatgtatcctttctgtagcaaatcatctacttgcctcttaacttctgccaactcattggcaggtaaatcatctgggaacacatcaggatactcccggaccaaaatcacatctggagcatcttgagcttctgcagcagcaacatgattgacacgggcctttgatgctggtacagcagagttattctgggtagggacaaccttcacacgtcggggcttcggacacttgtcagcataatgtcctggatctccacagttgaaacacaccacgggcttgctgccttgctccctcttggcaggttgttgctgtgctggagctgcaacaggacgtggagcttgattacggatgttgttgccagcattgttgttgaagaactgacgctgcggacgaacaacagacgaagaacctccctgtgacatgggctggggtcctaaagtaagacgcggcttctgattatttccctgttgtgtcttgaattgagcaatccgacgtttcttctgctccatgcgattatacttgtcctcctgacgaatagccttatccactaatttctggaaatcaggataatctccaaccatgagtgggtaagaaagctcatcattaagtcctcccaaaaacttctcctggcgctcttcatcattgcacacatcttccggagcataacgagcaagacgattgaactcgtgcagatactccgtaacagagcgagatccctgagtaagcgacctgaactccttcttcttgagagacactactcccgatggtatatgcgtctttcggaaagcagcggtgaattcaagccaagtgataggttcatcagtagtcctgttaaggcggaagtgatcccaccattcagaggcagggccatgcaactgatgtgatgcaaatgagaccttctcctgatcagtacactgaagtaaatccaacttcttctctatggcatgcagccaatcactagcttcaacaggattagtggtactagagaaaacaggcggcctcacacgaagaaattctgctaacttgttctgtggaggtgcatgattattcccttggttttgctgattctgaaattgctgcatcatcatgttcataagctgagtctgttgagcaagaacttgggccagagtgggattctctccattgttgttgttattggggttgttgggaccattcccattgctacgagtattcaccat

SEQ ID NO: 22870 - DNA, 5805 bp, Oryza sativa
  Clone ID: TF_OsC359_8111
gatttgtcaggaggatcagcgcaaccagatggatcgcaaaagaaagggagcttagttcagggcgcgtcaggggaacaaccatagtgccacccccggcaacggcggtctcggatgagagcggcgatggtgggtccagcgggcaagggcggcagtctcaagcgagagctcgggtggtggcggtggcttgcaaccatgcgaatcccgtcgacggcggcaacagtagtgccggatccagcacctcctccccctcccgtgctgacctcgccgcctctccaatgacgatgacggtggcagcagcagcgacgatagtggatccaggcacgatgacgacgatagtcgatccaggcgtcgcatcggtgatacattctagggtccgtgcgccgccgtcgtttcagccgtcgccgtcgctcgggaagaccaccgtcgtgctcgccaagtcgtcgccgtcctcgtccgccccttcgccgtcgccggagatcaccggagcagcttcgccgtcgttgacccgaaggttcccgccgcttcctcctcgatgctttaactggtaataatttgattagctcctggtttggaatggtatattcctggtttggagatagaactgtgcagccgatgccgcgttacaagcctgagtacctgtttggtgttgagggttttgtctaggagttgcgtacgatgtcctttgtcattggatttgggactgctcctttttatgcccagattcctcatgatcgtcatgaagagaagtgacgagtcaaagtcaccttgaacagtaatagtgaagatatcccctcagtgatgtttgaagctggaggaagaaactatatccatgcatgtcaggaggtggcaaggatcgccataggagagctccgtgatcgctacagtgatcaattggccgacactgagtatcgccaccatcctcgccaacctcagggaagtgaccgtggcagttaccttgagactgaaggaattgagaatgatgctaccacgaagcatttggtggagatgttgtgggctatggatgaaagtcgtgcggagactgtgttagcagctcaagatcgtgaagaccggaatcgtggtaagatttgcaagctagaagacaaggtggatcgtttggagaaggaattagccgcattgaagggagaagcaccgccgcagaaggccaggattcgtctcaccgcaaggaagagagctctatttgtccctcgctatcaactggcgccaaaggttcgtgtggtggagaaagaagttgctccagctcaagcggatcctccggtcatcatcataagtagtgatgaagaagaagaatccaagcgcaacaattctaagattgagtgggtagcaactcaagatgatgaagacgagccttcaatcgacctccgatgcttggaagaactagacaatgggaatggtcccaacaaccccaataacaacaacaatggagagaatcccactcttgctcaagttcttgctcaacagacacagcttatgaacatgatgatgcagcaatttcagaatcagcaaaaccaaggaaataatcatgcacctccacagaacaagttagcagaatttcttcgtgtgaggccgcctgttttctctagtaccactaatcctgttgaagctagtgattggctgcatgccatagagaagaagttggatttacttcagtgtactgatcaggagaaggtctcatttgcatcacatcagttgcatggccctgcctctgaatggtgggatcacttccgccttaacaggactactgctgaacctatcacttggcttgaattcaccgctgctttccggaagacgcatataccatcaggagtagtgtctctcaagaagaaggagttcaggtcgcttacccagggatctcgctctgttacggagtatctgcacgagttcaatcgtcttgctcgttatgctccggaagatgtgcgcaatgatgaagagcgccaggagaagtttttgggaggacttaatgatgagctttcttacccactcatggttggagattatcctgatttccagaaattagtggataaggctattcgtcaggaggacaagtacaatcgcatggagcagaagaaacgtcggattgctcaattcaagacacaacaggggaataatcagaagccgcgtcttactttaggaccccagcccatgccacagggaggttcttcgtctgttgttcgtccgcagcgtcatttcttcaacaacaatgctggcaacaacatccgtaatcaagctccacgtcctgttgcagctccagcacagcaacaacctgccaagagggagcaaggcagcaagcccgtggtgtgtttcaactgtggagatccaggacattatgctgacaagtgtccgaagccccgacgcgtgaaggttgtccctgcccagaataactctgctgtaccagcatccaaggctcgtgtaaatcatgtcgctgctgcagaagctcaagatgctccagatgtgattttgggtacgttccttgttaactcagttcctgcaacagtacttttcgattctggtgctacacattcattcttatctatgagttttgcgggaaatcatgggatggaagtagaagatcttagacgtcctttgatggttagtaccccaagtaatcaagcactctctttgcaacgtagcccctctgtcagaatagaaattcaaggagtaccatttctggccaatcttatcttgttagaatccaaagaccttgatgtcatcctagggatggactggttagccagacataaaggtgtgatagactgtgccaacaaaaaagtaactctcaccagctatgatggtcgagttgtaactgttcatgcattgtcatctgagtctttaaggtcaagactgaaccaaataactttggaagagattcctatagtccgggagtatcccgatgtgttcccagatgatttacctggtatgccgcctaaaagggatatagagttcacaatagatttggtacctggaacaactccgatccataagagaccttatcgaatggcagccaatgagttggcagaagttaagaggcaagtagatgatttgctacagaaaggatacatcagaccgagttcatcaccatggggagctccggttatttttgtggaaaagaaagaccatactcagagaatgtgtgtggactatcgtgcactaaacgatgtgactatcaagaataagtatccactacccaggattgatgatttgtttgatcagcttaaaggtgccactgttttctccatgatagatcttcgatcagggtatcatcagttgagaatcaaagaggaagatatacctaagacagcttttaccactaggtatgggttgttcgaatgtactgttatgtcttttggacttaccaatgcccctgctttcttcatgaacttgatgaataaggtgtttatggaatacctagacaagttcgtggtggtctttattgatgatattcttatctactctcggaccaaagaagagcatgaggaacatcttcgccttgcattggagaagctacgagaacatcaactgtatgctaagtttagcaagtgtgaattttggttgtctgaagtgaaattccttggtcacgtcatctcagccggaggagttgccgtcgatcctagtaacgtggaatccgtaaccaattggaagcaaccaaagacagtttcagagattcgcagtttcctaggcctcgcaggatattatcggaggtttatagagaatttttctaagattgctaagcccatgacacgactgcttcagaaagatgtgaagtacaagtggtcggaagaatgtgagcagagttttcaagagttgaaaagtcgcttaatatcagctcctattttgattttgcctgatccaaagaagggttttcaagtgtattgcgatgcatccaaacttgggttaggttgtgttctgatgcaagatgggaaggtggttgcctatgcctctcgacagttacgtccgcatgagaagaactaccctactcatgatattgagttagctgcagtcgttcatgcattgaagatttggcgtcattatcttttcggtactcgtacagaagtgtacaccgatcacaagagtttaaagtatatctttactcagccggatctgaacatgagacaacggagatggttggaattaattaaggattatgacatgggaattcattatcatccgggaaaggctaatgttgtagcagacgctcttagcagaaaaggctattgcaatgctacagaaggacgacagttgccattggaattatgcaaggaatttgaaagattaaatttgggaattgtcggtagaggtttcgttgcagccttagaagcgaagcccactctaattgatcaagttagagaagcccaaattaatgatcctgatattcaagagatcaagaagaatatgagaagaggaaaagctattggtttcttggaggatgagcaaggaactgtatggttgggtgagagaatttgtgtccccgacaacaaagatctaaaagatgcagttctgaaagaagctcatgatactttatactccattcaccctggtagtactaagatgtaccaggatctcaaggaaagattttggtgggcaagtatgaagcgtgaaatcgcggaatatgtagcagtatgtgatgtttgtcagcgagtcaaggcagaacatcagaaacccgccggtttgttgcagccattgaagattcctgaatggaaatgggaagaaataggtatggattttattactggtttacccagaacgtcatcaggccatgactctatttgggtgatagtcgacagacttaccaaagtggctcattttattccggtaaagacaacctattccggaagtcgcttggcggaattgtacatggcaaggattgtgtgtttgcatggcgtccctaagaagatagtgtctgatcgaggcagtcagtttacttcaaatttttggaagaaacttcaggaagagatgggttctaagctgaactttagtactgcttatcatccacagacagacggacaaaccgaaagggtgaatcagattttggaagacatgttgagagcttgtgctttagatttcggtggaagttgggataagaatctaccttatgcagaattttcatacaacaacagttatcaagctagtttacagatggctccttacgaagcactgtatggtcggaagtgccgcactccgcttttgtgggatcaaacgggagaacgtcaggttttcgggacggatatcctaagggaagcagaagaaaaggtaaaggtcattcaagaaagattgcgagtggctcagtctcgacataagagttatgccgacaatcgccgtagagatttgagttttgaagaaggagattatgtgtatcttcgtgtcacgcctcttcgaggagttcatcgttttcacaccaaaggaaaattggcaccgcgttatgtgggaccttataagattgtcagtagaagaggagaggttgcttatcagttagaattacctcaatctttggcaggagtccataatgtgttccatgtgtcgcaattgaagaagtgtttaagagtacctaccgaagaagctaatcttgaacagatagaagtccaagaggatttgacttatgttgagaaaccaatccgtatcttggaaacaaatgagagaagaaccaggaatcgagttatccgtttttgcaaactccaatggagtaatcactcggaagaagaatcaacttgggaacgagaagatgaattgaagtcagctcatccgcacctatttgccagttcttccgaatctcgaggacgagattctgtttaa

SEQ ID NO: 22871 - DNA, 7413 bp, Oryza sativa
  Clone ID: TF_OsC359_8129
atgacacgactgcttcagaaagatgtgaagtacaagtggtcggaagaatgtgaacagagttttcaagaattgaaaagtcgcttaatatcagctcctattttgattttgcctgatccaaagaagggttttcaagtgtattgcgatgcatccaaacttgggttaggttgtgttttgatgcaagatgggaaggtggttgcctatgcctctcgacagttacgtccgcatgagaagaactaccctactcatgatattgagttagctgcagtcgttcatgcattgaagatttggcgtcattatcttttcggtactcgtacagaagtgtacaccgatcacaagagtttaaagtatatctttactcagccggatctgaacatgagacaacggagatggttggaattaattaaggattatgacatgggaattcattatcatccgggaaaggctaatgttgtagcagacgctcttagcagaaaaggctattgcaatgctacagaaggacgacagttgccattggaattatgcaaggaatttgaaagattaaatttgggaattgtcggtagaggtttcgttgcagctttagaagcgaagcccactctaattgatcaagttagagaagcccaaaataatgatcctgatattcaagagatcaagaagaatatgagaagaggaaaagctattggtttcttggaggatgagcacggaacggtatggttgggtgagagaatctgtgtccccgacaacaaagatttaaaggatgcaattctgaaagaagctcacgatactttatactccattcaccctggtagtactaagatgtaccaggatctcaaggaaagattttggtgggcaagtatgaagcgtgaaatcgcagaatacgtagcagtatgtgatgtttgtcagcgagtcaaggcagaacatcagaaacccgccggtttgttgcaacctttgaagattcctgaatggaaatgggaagaaattggtatggattttattactggtttacccagaacgtcatcaggccatgactctatttgggtaatagttgacagacttaccaaagtggctcatttcattccgacagacggacaaaccgaaagggtgaatcaaattttggaagacatgttgagagcttgtgctctagatttcggtggaagttgggataagaatctaccttatgcagaattttcatacaacaacagttatcaagctagtttacagatggctccttacgaagcactgtatggtcggaagtgccgcactccgcttttgtgggatcaaacgggagaacgtcaggttttcggaacggatatcctaagggaagcagaagaaaaggtaaagatcattcaagaaagattgcgtgtggctcagtctcgtcataagagttatgccgacaatcgccgcagagatttgagttttgaagagggagattatgtgtatcttcgtgtcacgcctcttcgaggagttcatcgttttcataccaaaggaaaattggcaccgcgttttgtgggaccttataagattgtcagtagaagaggagaggttgcttatcagttggagttacctcaatctttggcaggagtacataatgtgttccatgtgtcgcaattgaaaaagtgtttaagggtacctaccgaagaagctaatattgagcagatagaagtccaagaggatttgacttatgttgagaaaccaatccgtatcctggaaacaactcctggtttggaatggtacattcctggtttggagatagaactgtgcagccggggtggttgttcagaatggttgggcctatacaacaggatgccgcgttacaagcctgagtacctgtttggtgttgagggttttgtccaggagttgcgtacgatgtcctttgtcattggatttgggactgcccctttttatacccagattcctcatgatcgtcatgaagagaagtgccgagtcaaagtcaccttgaacagcaatagtgaagatattccctcagtgatgttcgaagctggaggaagaaactacatccatgcatgtcaggaggtggcaaggatcgccataggagagctccgtgatcgctacagtgatcaattggccgacactgagtatcgttaccatcctcgccaaccccagggaagtgaccgtggcagttatcttgagactgaaggaattgagaattatgttaccacaagacatttggttgagatgttgtgggctatggatgaaagtcgtgcggagactgtgttagcagctcaagatcgtgaagaccggaatcatggtaagatttgcaagttagaagacaaggtggatcgtttggagaaggaattagccgcattgaagggagaagcaccgccgcagaaggccaggattcgtcttaccgcaaggaagagagctctatttgtccctcgctatcaactggcgccaaagatggtgaacactcgtagcaatgggaatggtcccaacaaccccaataacaacaatggagagaatcccactcttgctcaagttcttgctcaacaaacacagcttatgaacatgatgatgcagcaatttcagaatcagcaaaaccaagggaataatcatgcacctccccagaacaagttagcagaatttcttcgtgtgaggccgcctgttttctctagtaccactaatcctgttgaagctagtgattggctgcatgccatagagaagaagttggatttacttcagtgcactgatcaggagaaggtatcttttgcatcacatcagttgcatggccctgcctctgaatggtgggatcacttccgccttaacaggactactgctgaacctatcacttggcttgaattcaccgctgctttccgaaagacgcatataccatcgggagtagtgtctctcaagaagaaggagttcaggtcgcttactcagggatctcgctctgttacggagtatctgcacgagttcaatcgtcttgctcgttatgctccggaagatgtgcgcaatgatgaagagcgccaggagaagtttttgggaggacttaatgatgagctttcttacccactcatggttggagattatcctgatttccagaaattagtggataaggctattcgtcaggaggacaagtataatcgcatggagcagaagaaacgtcggattgctcaattcaagacacaacagggaaataatcagaagccgcgtcttactttaggaccccagtctatgccacagggaggttcttcgtctgttgttcgtccgcaacgtcagttcttcaacaacaatgctggcaacaacatccgtaataaagctccacgtcctgttgcagctccagtacagcaacaacctgccaagagggagcaaggcagcaagcccgtggtgtgtttcaactgtggagacccaggacattatgctgacaagtgtccgaagccccgtcgcgtgaaggttgtccctgcccagagtaactctgctgtaccagtatccaaggctcgtgtaaatcatgtcgctgctgcagaagctcaagatgctccagatgtaattttgggtacgttccttgttaactcagttcctgcaacagtacttttcgattctggtgctacacattcattcttatctatgagttttgcgggaaatcatgggatggaagtagaagatcttagacgtcctttgatggttagtaccccaagtaatcaagcactctctttgcaacgtagcccctcggtcagaatagaaattaaaggagtaccatttctggccaatcttatcttgttagaatccaaagaccttgatgtcatcctagggatggactggttagccagacataaaggtgtgatagactgtgccaacagaaaagtaactctcaacagctatgatggtcgagttgtaactgttcatgcattgtcatctgagtctttaaggtcaagactgaaccagataactttggaagagattcctatagtccgggagtattctgatgtgttcccagatgatttacctggtatgccgcctaaaagggatatagagttcagaatagatttggtacctggaacaactccgatccataagagaccttatcgaatggcagctaatgagttggcagaagttaagaggcaagtagatgatttgctacagaaaggatacatcagaccgagttcatcaccatggggagctccggttatttttgtggaaaagaaagaccatactcagagaatgtgtgtggactatcgtgcactaaacgatgtgactatcaagaataagtatccactacccaggattgatgatttgtttgatcagcttaaaggtgccactgttttctccaagatagatcttcgatcagggtatcatcagttgagaatcaaagaggaagatatacctaagacagcttttaccactaggtatgggttgttcgaatgtactgttatgtcttttggacttaccaatgcccctgctttcttcatgaacttgatgaataaggtgtttatggaatacttagacaagttcgtggtggtctttattgatgatattcttatctactctcgaaccaaagaagagcatgaggaacatcttcgccttgcattggagaagctacgagaacatcaactgtatgctaagtttagcaagtgtgaattttggttgtccgaagtgaaattccttggtcacgtcatctcagccggaggagttgccgtcgatcctagtaacgtggaatccgtaaccaattggaagcaaccaaagacagtttcagagattcgcagtttcctaggcctcgcaggatattatcggaggtttatagagaatttttccaagattgctaagcccatgacacgactgcttcagaaagatgtgaagtacaagtggtcggaagaatgtgaacagagttttcaagaattgaaaagtcgcttaatatcagctcctattttgattttgcctgatccaaagaagggttttcaagtgtattgcgatgcatccaaacttgggttaggttgtgttttgatgcaagatgggaaggtggttgcctatgcctctcgacagttacgtccgcatgagaagaactaccctactcatgatattgagttagctgcagtcgttcatgcattgaagatttggcgtcattatcttttcggtactcgtacagaagtgtacaccgatcacaagagtttaaagtatatctttactcagccggatctgaacatgagacaacggagatggttggaattaattaaggattatgacatgggaattcattatcatccgggaaaggctaatgttgtagcagacgctcttagcagaaaaggctattgcaatgctacagaaggacgacagttgccattggaattatgcaaggaatttgaaagattaaatttgggaattgtcggtagaggtttcgttgcagctttagaagcgaagcccactctaattgatcaagttagagaagcccaaaataatgatcctgatattcaagagatcaagaagaatatgagaagaggaaaagctattggtttcttggaggatgagcacggaacggtatggttgggtgagagaatctgtgtccccgacaacaaagatttaaaggatgcaattctgaaagaagctcacgatactttatactccattcaccctggtagtactaagatgtaccaggatctcaaggaaagattttggtgggcaagtatgaagcgtgaaatcgcagaatacgtagcagtatgtgatgtttgtcagcgagtcaaggcagaacatcagaaacccgccggtttgttgcaacctttgaagattcctgaatggaaatgggaagaaattggtatggattttattactggtttacccagaacgtcatcaggccatgactctatttgggtaatagttgacagacttaccaaagtggctcatttcattccggtaaagacaacttattccggaagtcgcttagcggaattgtatatggcaaggattgtgtgtttgcatggcgtccctaagaagatagtgtctgatcgaggcagtcagtttacttcaaatttttggaagaaacttcaggaagagatgggttctaagctgaactttagtactgcttatcatccgcagacagacggacaaaccgaaagggtgaatcaaattttggaagacatgttgagagcttgtgctctagatttcggtggaagttgggataagaatctaccttatgcagaattttcatacaacaacagttatcaagctagtcttcagatggctccttacgaagcactgtatggtcggaagtgccgcactccgcttttgtgggatcaaacgggagaacgtcaggttttcggaacggatatcctaagggaagcagaagaaaaggtaaagatcattcaagaaagattgcgtgtggctcagtctcgtcataagagttatgccgacaatcgccgcagagatttgagttttgaagagggagattatgtgtatcttcgtgtcacgcctttacgaggagttcatcgttttcataccaagggaaaattggcaccgcgttttgtgggaccttataagattgtcagtagaagaggagaggttgcttatcagttggagttacctcaatctttggcaggagtccataatgtgttccatgtgtcgcaattgaaaaagtgtttaagggtacctaccgaagaagctaatattgagcggatagaagtccaagaggatttgacttatgttgagaaaccaatccgtatactggaaacaaatgagagaagaaccaggaatcgagttatccgtttctgcaaagttcaatggagtaatcactcggaagaagaatcaacttgggaacgagaagatgaattgaactttggaatcgagttcgattcggatcggttttccctctctccaagccgaaggtttccttcgccgttgccgtcgccgtgggccttcgccgtcgcctccgagcccctttaaaaggacccccggtgtctcctctacccgtcgcagccctcgccttcgcctctcgtcgccggaagagccttagcgccccatgctccgccgtcgctccagctgtcgccgccgctcgggaagaccgccgacgtcatcgccaagtcgccgccgtcctcgtccgccccttcgcagccgttggaacccgccggagcttcgtcgccgtcgacaacccgaaggtagccgccgcttccttctcgtcgccgtcgccgtccgttgcttctccgccgtcgttttggtcgtcgcgccgccgttcgccggtgagcgtgcgccgcccgagccgtccgctccgccgagccgccgccgccgtcggtgacgtcatcgctgacgccatcggggtcgtccgccattccgtcgtttctggagagtccgttttcgcggaagaagagtttgaagagttccaaggccagcaaggcaagtcacacagatcccaaacaaccctttgagcatgccgactccaccgccactcccggatccggcccgcgggagcagctgaag

SEQ ID NO: 22872 - DNA, 1916 bp, Oryza sativa
  Clone ID: TF_OsC359_8165
ttggagatggatgaagtcgggcgtcgatggacatttttaggacaaatgaaggctacacgagctgcggcccggtagtcgagatgtcatggcacagggccggtgtcctgctgctaggggctcagtcctgcctgcctgtcccgggggttccggccgtaggtgggattgggtcggtactcttgtctatggctaggatgggttggaaactatgtcacgtcttccgtccgtataccgtggtggtatgtggcacgtggtcacacgtgaggaagatgtgtcttgtggcacttgtgggtgtgtcttgttgagtacggtggttgtactcagtcttgctcaatttttcccaaacccagaagaggagttcctggaggatgaaggctttggtgtctagctcgtgcctgccgtcaagtgcctgtggtcgtcgccctagtcttccgctgtttgtcgtttgtctttgtgtgtgctgggccttgcctcctgggacaaggattaatgcacgcacgtaaggaacgcccgttgggttatttccggtcgtgacaagcagtcgtgtcatgggcttagcaatcttagaaaaattctctataaaccttcgataatatcctgcgaggcctagaaaactgcgaatctctgaaactgtctttggttgcttccaattagttacggattccacattactaggatcaacggcaactcctcctgctgagatgacgtgaccaaggaacttcacttcagacaaccaaaattcacacttgctaaacttagcatacagttgatgttctcgtagcttctccaatgcaaggcgaagatgttcttcatgctcttctttggttcgggagtagataagaatatcatcaataaagaccaccacgaacttgtctaggtatttccatttaaacagcgcttttattcatcaagttcatgaagaaagcaggggcattggtaagtccaaaagacataacagtacattcgaacaacccatacctagtggtaaaagctgtcttaggtatatcttcctctttgattctcaactggtgatatcctgatcgaagatcgatcttggagaaaacaagggcacctttaagctgatcaaacaaatcatcaattctgggtagcggatacttattcttgatagtcacatcgtttaatgcacgataatccacacacattctctgggtatggtctttcttttccacaaaaataactggagctccccatggagatgaactcggtctgatgtatcccttctgaagcaaatcatctacgtgcctcttgacttctgccaactcattggctgccattctataaggtctcttatggatcggagttgttcctggtaccagatctattctgaactctatatcccttttaggcggcataccaggtaaatcatctgggaacacatcgggatactcccggactataggaatctcttccaaagttatctggttcagtcttgaccttaaagactcagaagacaatgcatgaacagttacaactcgaccatcattgctggtgagagttacttttctgttggcacagtctatcacacctttatgtctggctaaccagtccatccctaggatgacatctaggtctttggattccaaaatcacatctggagcatcttgagcttctgcagcagcgacatgattaacacgggcctttgatgctggtacggtagagttgctctgggtagggacaaccttcatgcgtcggggcttcggacacttgtcagcataatgtcctgggtctccacagttgaaacacaccacgggcttgctgccttgctccctcttggcaggttgttgctgtgttggagctgcaacagggcgtagagcttgattgcggatgttgttgccaacattgttgttgaagaactgacgctgcggacgaacaacagacgaagaacctccctgtggcat

SEQ ID NO: 22873 - DNA, 3961 bp, Oryza sativa
  Clone ID: TF_OsC359_8172
atggacatctctaggacaaatgaaggctacacgagctgcggcccggtaatcgagatgtcatggcacagggctggtgtcctgctgctaggggctcaatcctgcctacctgtcccggaggttccggccgtaggtggggttgggtcggtactcttgtctatggctaggatgggttggaaactatgtcatgtctcccgtccaaatgccgtggtgcctgccaagagggagcaaggcagcaagcccgtggtgtgcttcaactgtggagacccaggacattatgctgacaagtgtccgaagccccgacgcgtgaaggttgtccctgcccagagcaactctaccgcaccagcatcgaaggcccgtgtcaatcatgttgcagctgcagaagctcaagatgctccagatgtgattttgggtacgttccttgttaactcagttcctgcaacagtacttttcgattctggtgctacacattcattcttatctatgagttttgcgggaaatcatgggatggaagtagaagatcttagacgtcctttgatggttagtaccccaaataatcaagcactctctttgcaacgtagcccctctgtcagaatagaaattaaaggagtaccatttctggccaatcttatcttgttagaatccaaagaccttgatgtcatcctagggatggactggttagccagacataaaggtgtgatagactgtgccaacagaaaagtaactctcaccagcaatgatggtcgagttgtaactgttcatgcattgtcttctgagtctttaaggtcaagactgaaccagataactttggaagagattcctatagtccgggagtattccgatgtgttcccagatgatttacctggtatgccgcctaaaagggatatagagttcagaatagatttggtacctggaacaactccgatccataagagaccttatagaatggcagccaatgagttggcagaagtcaagaggcaagtagacgatttgcttcagaaaggatacatcagaccgagttcgtcaccatggggagctccggttatttttgtggaaaagaaagaccatacccagagaatgtgtgtggattatcgtgcactaaatgatgtgactatcaagaataagtatccgctacccagaattgatgatttgtttgatcagcttaaaggtgccactgttttctccaagatagatcttcgatcagggtatcaccagttgagaatcaaagaggaagatatacctaacacaacttttaccactaggtatggattgttcgaatgtactgttatgtcttttggacttaccaatgcccccgctttcttcatgaacttgatgaataaggtgtttatggaatacctagacaagtttgtggtggtctttattgatgacattcttatctactctcgaaccaaagaagagcatgaagaacatcttcgccttgcgttggagaagctacgagaacatcaactgtatgctaagtttagcaagtgtgaattttggctgtctgaagtgaagttccttggtcacgtcatctcagcaggaggagttgccgttgatcctagtaatgtggaatctgtaaccaactggaaacaaccaaagacggtttcagagattcacagattcctaggcctcgcaggatattatcggaggtttatagagaatttttccaagattgctaagcccatgacacgactgcttcagaaagatagttttcaagagttgaaaagtcgcttaatatcagctcctattttgattttgcctgatccaaagaagggtttccaagtgtattgcgatgcatcaaaacttgggttaggttgtgttctgatgcaagatggaaaggtggttgcctatgcatctcgtcagttacgtccgcatgagaagaactaccctactcatgatcttgaattggccgcagtggttcatgcgttgaaaatttggcgtcattatcttttcggtactcgtacagaggtgtataccgatcacaagagtttaaagtatatctttactcagccggatctgaacatgagacaaaggagatggttggaactaattaaggattatgacatgggaattcattatcacccaggaaaggctaatgttgtagcagacgctcttagcaggaaaggctattgcaatgctacggaaggacgacagttgccattggaattatgcaaggaatttgaaagattaaatttgggaattgtcagtagaggtttcgttgcagccttagaagcgaagcccactctaattgatcaagttagagaagcccaaattaatgatcctgatattcaagaaatcaagaagaatatgagaagaggaaaagctatcggtttcttggaggatgagcacggaactgtatggttgggtgagagaatctgtgtccccgacaacaaagatttaaaagatgcaattctgaaagaagctcatgatactttatactccattcaccctggtagtactaagatgtaccaggatctcaaggaaagattttggtgggcaagtatgaagcgtgaaatcgcagaatacgtagcagtatgtgacgtttgtcagcgagtcaaggcagaacatcagaaacccgccggtttgttgcagcctttgaagattcctgaatggaagtgggaagaaatcggtatggattttatcactggtttacccagaacgtcatcaggtcatgactctatttgggtgatagtcgacagacttaccaaagtagctcatttcattccggtaaagacaacctattccggaagtcgcttagcggaattgtatatggcaaggattgtgtgtttgcatggcgtccctaagaaaatagtgtctgatcgaggcagtcagtttacttcaaatttttggaagaaacttcaggaagagatgggttctaagctgaactttagtactgcttatcatccgcagacagacggacaaaaggaccgtataaggaccggtcttcgggcctctgttgcaaagcactaccgtacttccacatgtctagtgggtaaggcttagtttgtggctcagtcttgcctccttggacaaggaataatacacgcacgtaaggaacgcccgttgggttatttccggtcgtgacaataattgtaccagctgagagattaactccgtgcagcattgtgatgaaatctttttcctctttcggtattgctctatgtgaccttaggaatttcttgagtgaaaactttctaaccagaggatgtgtgtgttcttcaacaaactgaattacttcccacctagctcctttcctcttcactgtcatccttgctttgcaggcagcctgtcttgttctacttcttttcattttctttggggggcacgcttcacccgttttttcttctggaccacatttgttgcaaacaaacattactttgtcacgttctccatctttggctgacttccttgaagtgttgattttgattgaaaatccaacgcgctttgcgtacctgttgtagtgagcccttgcttcctcctctgagttgaaagtcaaggtgaggtacggcacttgtgtgctgcacggaatatcctgtgatggcgctgactgtgcttctgaatcatctgttccagtgtcttcacttgaaattgtgttggcagtagcagttgttgcgccagttgcaacactagtatgcattgtgtctgcacgatctgacatttcttcaaatacttgcatctcatcatcgccttcaaatatttgcatctcatcattggcttcaaatacttgcatctcatcattggctacattgtgtgcttgtaaacttccagcatcaccagtagtatacatagtttcaaagtcaaaagtgtcgtccaaatttatagcaggaatctccatgctagtgtcagtcagatttatagggaagtatgtttcatttctgtcttcatcatcaactagtaaatggtgtactggaggttcattttcaccagaaactaattccgggatactgttgaggtcaaagtccat

SEQ ID NO: 22874 - DNA, 3964 bp, Oryza sativa
  Clone ID: TF_OsC359_8188
atgtctttcgtgattagtctcacacctctcatcattgtaaaagatgcttaaactggtaataatttgattagctcctggtttggaatggtatattcctggtttggagatagaactgtgcagccggggtggttgttcagaatggttgggcctatacaacaggatgccgtgttacaagcctgagtacctgtttggcgttgagggttttgtccaggagttgcgtacgatgtcctttgtcattggatttgggaatgctcctttttatgcccagattcgtcatgatcgtcatgaagaaaagtgccgagtcaaagtcaccttgaacagcaatagtgaagatatcccctcagtaatgtttgaagctggaggaagaaactacatccatgcatgtcaggaggtggcaaggatcgccataggagagctccgtgatcgctacagtgatcagttggtcgacactgagtatcgctatcatcctcgccaaccccagggaagtgaccgtggcagttaccttgagactgaaggaattgagaatgatgttaccacaagacatttggttgagatgttgtgggctatggatgaaagtcgtgcggagactgtgttagcagctcaagatcgtgaagatcggaatcgtggtaagatttgcaagctagaagacaaggtggatcgtttggagaaggaattagccgcattgaagggagaagcaccgccgcagaaggccaggattcgtcttaccgcaaggaagagagctttatttgtccctcgctatcaactggcgccaaaggttcgtgtggtggagaaagaagttgccccagctcaagcggatcctccggtcatcatcataagtagtgatgaagaagaagaatccaagcgcatcaattccaagattgagtgggtagcaactcaagatgatgaagatgagccttcaatcgacctcctatgctcggaagaactagagaagttggagagtttagtggtgtgggagtcttcagtttgtaataatgaaactcagttaagatcaataaaagttaaaatggtgaacactcgtagcaatgggaatggtcccaacaaccccaataataacatcaatggagagaatcccactctggcccaagttcttgctcagcagacacagcttatgaacatgatgatgcaacaatttcagaatcagcaaaaccaagggaataatcatgcacctccacagaacaagttagcagaatttcttcgtgtgaggccgcctgttttctctagtaccactaatcctgttgaagctagtgattggctacatgccatagagaagaagttggatttacttcagtgtactgatcaggagaaggtctcatttgcatcacatcagttgcatggccctgcctctgaatggtgggatcacttccgtcttaacaggactactgctgaacctatcacttggcttgaattcaccgctgctttccggaagacgcatataccatcgggggtagtgtctctcaagaagaaggagttcaggtcgcttacccagggatctcgctctgttacggagtatctgcacgagttcaatcgtcttgctcgttatgctccggaagatgtgcgcaatgatgaagagcgccaggagaagtttttgggaggacttaatgatgagctttcttacccacttatggttggagattaccctgatttccagaaattagtggataaggctattcgtcaggaagacaagtacaatcgcatggagcagaagaaacgtcggattgctcaattcaagacacaacagggaaataatcagaagccgcgtcttactttaggaccccagtccatgccacagggaggttcttcgtctgttgttcgtccgcaacgtcagttcttcaacaacaatgctggcaacaacatccgtaatcaagctccacgtcctgttgcagctccagcacagcaacaacctgccaagagggagcaaggcagcaagcccgtggtgtgtttcaactgtggagatccaggacattatgctgacaagtgtccgaagccccaacgcgtgaaggttgtccctgcccagagtaactctgctgtaccagcatcaaaggcccgtgtcaatcatattgctgctgcagaagctcaaggtgctccagatgtgattttgggtacgttccttgttaactcagttcctgcaacagtacttttcgattctggtgctacacattcattcttatctatgagttttgcgggaaatcatgggatggaagtagaagatcttagacgtcctttgatggttagtaccccaagtaatcaagcactctctttgcaacgtagcccctctgtcagaatagaaattcaaggagtaccatttctggccaatcttatcttgttagaatccaaagaccttgatgtcatcctagggatggactggttagccagacataaaggtgtgatagactgtgccaacagaaaagtaactctcaacagctatgatggtcgagttgtaaccgttcatgcattgtcttctgagtctttaaggtcaagactgaatcaaataactttggaagagattcctatagtccgggagtatcctgatgtgttcccagatgatttaccgggtatgccgcctaaaagggatatagagttcagaatagatttggtacctggaacaactccgatccataagagaccttatcgaatggcagccaatgagttggcagaagttaagaggcaagtagatgatttgctacagaaaggatacatcagaccgagttcatcaccatggggagctccggtaatttttgtggaaaagaaagaccatactcagagaatgtgtgtggactatcgtgcactaaacgatgtgactatcaagaataagtatccactacccaggattgatgatttgtttgatcagcttaaagacaagttcgtggtggtctttattgatgatattcttatctactctcgaaccaaagaagagcatgaggaacatcttcgccttgcattggagaagctacgagaacatcaactgtatgctaagtttagcaagtgtgaattttggttgtccgaagtgaaattccttggtcacgtcatctcagccggaggagttgccgttgatcctagtaacgtggaatccgtaaccaattggaagcaaccaaagacagtttcagagattcgcagtttcctaggccttgcaggatattatcggaggtttatagagaatttttctaagattgctaagcccatgacacgactgcttcagaaagatgtgaagtacaaatggtcggaagaatgtgagcggagttttcaagagttgaaaagtcgcttaatatcagctcctattttgattttgcctgatccaaagaagggtttccaagtatattgcgatgcatccaaacttgggttaggttgtgttctgatgcaagatgggaaggtggttgcctatgcatctcgtcagttacgtccgcatgagaagaactaccctactcatgatattgagttagctgcagtcgttcatgcattaaagatttggcgtcattatcttttcggtactcgtacagaagtgtacaccgatcacaagagtttaaagtatatctttactcagccggatctgaatatgagacaacggagatggttggaattaattaaggattatgacatgggaattcattatcatccgggaaaggctaatgttgtagcagacgctcttagcagaaaaggttattgcaatgctacagaaggacgacagttgccattggaattatgcaaggaatttgaaagattaaatttgggaattgtcggtagaggtttcgttgcagctttagaagcgaagcccactctaattgatcaagttagagaagcccaaattaatgatcctgatattcaagagatcaagaagaatatgagaagaggaaaagctattggtttcttggaagatgagcacggaactgtatggttgggtgaaagaatctgtgtctgtcacgtcctgataaattcatcccaaaattaa

SEQ ID NO: 22875 - DNA, 9213 bp, Oryza sativa
  Clone ID: TF_OsC359_8238
taaaaagaaaagccctaaaaagtctttttttcaacccctccccctcttgggccggctcggcccatctctctccctctctctcctctcccccgcggcccattcggcctcctccccgcgcacgcgccgctgacgggagggcccgcccgccaccctcgctgacgggtggggcccacccgtcatccccttcctcccgccgctcccgccgcccgcgccctagcgccgccgccgccgccgtgaatcccgccgcccccgtccgccccgcgtgcaatcaagaggggggaattattccccgtgattccctccccctttccccccatttttccctctctctctctccctcggattcgtttggaaactttccccctaacctcgccggcgccattaatggcggccgggactcccgcgcccgtttccccctcctccggccaccccctccctctcttaaccctatataaaccctccccgtgcctccctccaccggtttcgcggcactcgccggcctctctctctcgccggaatcgagctcgcgccgtcgctctctctctccgccgtcgccgccgagctccggtccgccgccgtcgtcgccccggaccaccttccccctcggggccgcctccttcagcttcgccgcatcctcaccgacctcgtccacccctccgtttcgcacgccgaccgccggagcaccgtcgaccccgtccacccaagccgcgccgccgccttcctccgctccgatgtaagttggcccggcctgggggaggcgggacgttacacgcgccgcctcccgtcggctgtgccggcgtggccgccttcgggcgcgccccgcggctgccgtgtggggcccggctgtcagccgcccacgcccttaggtgcggctgacgcgtgggacccacggcgtcggccggtgcgagcccgggtgcgcccggtccaccgtggaccgtggggctgccgcgtgggccccacccccgtggacccggcaaatgaaggctacacgagctgcggcccggtagtcgacatgtcatggcacagggctggtgtcctgctgctaggggctcagtcctgcctacctgtcccggaggttccggccgtagcgtcgtgtgccctagcttcgccgtcgccgccgccgctccagccgtgctccgccgccgttccagacgtcgccgtcgctcgggaagaccgtcgtcgtggtcgccaagtcgtcgccgtcctcgtccgccccttcgccgtcgccggagatcgtcggagcttcgtcgccgtcgacaacccgaaggtttccgccgtttcctcctcgtcgccgtcgtcgttcgttgtttttccgccgccgttttggtcaccggtgtgttcgccgcgtcgtcctctacgtgctggtgccctccgtttgcgtcctcgcgccgccgttcgccggcgagcgtgcgccgcccgagccgtccgctccgccgagccgccgccgctgtcggtgacgtcattgccgacgtcatcggggtcgtccgccgtgagccggcctgagtacctgtttggtgttgagggttttgtccaggagttgcgtacgatgtcctttgccattggatttgggactgcccctttttatgcccagattcctcatgatcgtcatgaagaaaagtgccgagtcaaagtcaccttaaacagcaatagtgaagaggtcccctcagtgatgttcgaagctggaggaagaaactacgtccatgcatgtcaggaagtggcaaggatcgccataggagaactccgtgatagctacagtgatcagttggccgacactgagtatcgctaccatcctcgccaaccccagggaagtgaccgtggcagctaccttgaaactgaaggaattgagaatgatgctaccacaaggcatttggttgagatgctgtgggctatggatgaaagtcgtgcggagactgtgttagcggctcaagatcgtgaagaccggaatcgtggtaagatttgcaagctagaagacaaggtggatcgtttggagaaggaactagctgcattaaagggagaagcaccgccgcagaaggccaggattcgcctcaccgcaaggaagagagctctattcgtccctcgctatcaattggcgccaaaggttcgtgtggtggagaaagaagttgccccatcccaagcggatcctccggtcatcatcataagtgatgaagaagaagaatccaagcgcaacaattccaagattgagtgggtagcaacccaagatgatgaagacgagccgaacgagccttcaatcgacctccgatgcttggaagaactagattttcccccggtttctcttcttgtgccatgttcctgccagatggtgaatactcgcagcaacgggaatggtcccaacaaccccaataacaataacaatggagagaacccaactctggcccaagttcttgctcaacagacacagcttatgaacatgatgatgcagcaacttcagaatcagcagaaccaaggaaataaccatgcacctcctcagaataagttagcagaatttcttcgtgtgaggccgcctgttttctctagtaccactaatcctgttgaagctggtgattggctgcatgccatagagaagaagttggatttacttcagtgcactgatcaggagaaggtatcttttgcatcacatcagttgcatggctctgcctttgaatggtgggatcacttccgcctgaataggactactgctgaacctatcacttggcttgaattcaccgctgctttccggaagacgcatataccatcaggagtagtgtctctcaagaagaaggagttcaggtcgcttactcagggatctcgctctgttacggagtatctgcacgagttcaatcgtcttgctcgttatgctccggaagatgtgcgcaatgatgaagagcaccaggagaagtttttgggaggacttaatgacgagctttcttacccactcatggttggagattatcctgatttccagaaattagtggataaggctatacgtcaggaggacaagtacaattgcatggagcagaggaaacgtcggattgctcacttcaaggcacaacaagggagtaatcagaagccgcgttttactttaggaccccagtctatgccacagggaggttcttcgtctgttgttcgtccgcagcgtcagttcttcaacaacaatgctggcaacaacatccgcaatcaagctccacgtcctgttgcagctccaacacagcaacagcctgccaagagggagcaaggcagcaagcccgtggtgtgtttcaactgtggagacccaggacattatgctgacaagtgtccgaagccccgtcgcgtgaaggttgtacctgcccagagtaactctgctgtaccagcatcaaaggcccgtgtcaatcatgtcgctgctgcagaagctcaagatgctccagatgtgattttggatgatattcttatctattctcgaaccaaagaagagcatgaagaacatcttcgccttgcattggagaagctacgagagcatcaactgtatgctaagttcagcaagtgtgaattttggttgtctgaagtgaagttccttggtcacgtcatctcagcaggaggagttgccgttgatcctagatattaccggaggtttatagagaatttttccaagattgctaagcccatgacacgactgcttcagaaagatgtgaagtacaagtggtctgaagaatcgccgtgtgccctagcttcgccgtcgccgccgccgctccagccgtgctccgccgccgttccagacgtcgccgtcgctcgggaagaccgtcgtcgtggtcgccaagtcgtcgccgtcctcgtccgccccttcgccgtcgccggagatcgtcggagcttcgttgccgtcgacaacccgaaggtttccgccgtttcctcctcgtcgccgtcgtcgttcgttgtttttccgccgccgttttggtcaccggtgtgttcgccgcgtcgtcctctacgtgctggtgccctccgtttgcgtcctcgcgccgccgttcgccggcgagcgtgcgccgcccgagccgtccgctccgccgagccgccgccgctgtcggtgacgtcattgccgacgtcatcggggtcgtccgccctcctggtttggaatggtacattcctggtttggagatagaactgtgcagccgggatggttgttcagaatggttgggcctatacaacaggatgccgcgctacaagcctgagtacctgtttggtgttgagggttttgtccaggagttgcgtacgatgtcctttgccattggatttgggactgcccctttttatgcccagattcctcatgatcgtcatgaagagaagtgccgagtcaaagtcaccttaaacagcaatagtgaagaggtcccctcagtgatgttcgaagctggaggaagaaactacgtccatgcatgtcaggaagtggcaaggatcgccataggagaactccgtgatagctacagtgatcagttggccgacactgagtatcgctaccatcctcgtcaaccccagggaagtgaccgtggcagctaccttgagactgaaggaattgagaatgatgctaccacaaggcatttggttgagatgctgtgggctatggatgaaagtcgtgcggagactgtgttagcagctcaagatcgtgaagaccggaatcgtggtaagatttgcaagctagaagacaaggtggatcgtttggagaaggagctagccgcattgaagggagaagcaccaccgcagaaggccaggattcgtcttaccgcaaggaagagagctctattcgtccctcgctatcaattggcgccaaagatggtgaatactcgcagcaacgggaatggtcccaacaaccccaataacaataacaatggagagaacccaactctggcccaagttcttgctcaacagacacagcttatgaacatgatgatgcagcaacttcagaatcagcagaaccaaggaaataaccatgcacctccccagaacaagttagcagaatttcttcgtgtgaggccgcctattttctctagtaccactaatcctgttgaagctggtgattggctgcatgccatagagaagaagttggatttacttcagtgcactgatcaggagaaggtatcttttgcatcacatcagttgcatggctctgcctctgaatggtgggatcacttccgcctgaataggactactgctgaacctatcacttggcttgaattcactgctgctttccggaagacgcatataccatcaagagtagtgtctctcaagaagaaggagttcaggtcgcttactcagggatctcgctctgttacggagtatctgcacgagttcaatcgtcttgctcgttatgctccggaagatgtgcgcaatgatgaagagcgccaggagaagtttttgggaggacttaatgacgagctttcttacccactcatggttggagattatcctgatttccagaaattagtggataaggctatacgtcaggaggacaagtacaattgcatggagcagaggaaacgtcggattgctcacttcaaggcacaacaggggagtaatcagaagccgcgctttactttaggaccccagtctatgccacagggaggttcttcgtctgttgttcgtccgcagcgtcagttcttcaacaacaatgctggcaacaacatccgcaatcaagctccacgtcctgttgcagctccaacacagcaacagcctgccaagagggagcaaggcagcaagcccgtggtgtgtttcaactgtggagacccaggacattatgctgacaagtgtccgaagccccgtcgcgtgaaggttgtccctgcccagagtaactctgctgtaccagcatcaaaggcccgtgtcaatcatgtcgctgctgcagaagctcaagatgctccagatgtgattttgggtacgttccctgttaactcagttcctgcaacagtacttttcgattcaggtgctacacattcattcttatctatgagttttgcgggaaatcatgggatggaagtagaagatcttagacatcctttgatggttagtaccccaagtaatcaagcactctctttgcagcgtagcccctcggtcagaatagaaattaaaggagtaccatttgtggccaatcttatcttgttagaatccaaagaccttgatgtcatcctagggatggactggttagccagacatagaggtgtgatagactgtgccaacagaaaagtaactctcaccagtaatgatggtcgagtggtaactgttcatgcattgtcttctgagtctttaaggtcaagactgaatcaaataactttggaagagattcctatagtccgggagtatcccgatgtgttcccagatgatttacctggaatgccgcccaaaagggatatagagttcagaatagatctggtaccaggaacaactccaatccataagagaccttatcgaatggcagccaatgagttggcagaagtcaagaggcaagtggacgatttgcttcagaaaggatacatcagaccgagttcatcaccatggggagctccggttatttttgtggaaaagaaagatcatacccagaggatgtgtgtggactatcgtgcattaaatgatgtgactatcaagaataagtacccgttacccagaattgatgatttgtttgatcagcttaaaggtgctaccgttttctccaagatagatcttcgatcagggtatcaccagttgagaatcaaagaggaagatatacctaagacagcttttaccactaggtatggattgttcgaatgtacggttatgtcttttggacttaccaatgcccccgctttcttcatgaacttgatgaataaggtgtttatggaatacctagacaagttcgtggtggtctttattgatgacattcttatctactctcgaaccaaagaagaacatgaagaacatcttcgccttgcattggagaagctacgagagcatcaactgtatgctaagttcagcaagtgtgaattttggttgtctgaagtgaagttccttggtcacgtcatctcagcaggaggagttgccgttgatcctagtaatgtggaatccgtaaccaactggaaacaaccgaagacagtttcagagattcgcagtttcctaggcctcgcaggatattaccggaggtttatagagaatttttccaagattgctaagcccatgacacgactgcttcagaaagatgtgaagtacaagtggtcggaagaatgtgagcagagttttcaagagttgaaaagtcgcttaatatcagctcctattttgattttacctgatccaaagaagggtttccaagtgtattgcgatgcatccaaacttgggttaggttgtgttttgatgcaagatgggaaggtggttgcctatgcatctcgtcagttacgtccgcatgagaagaactaccctactcatgatcttgagttagccgcagtagttcatgcgttgaagatttggtgtcattatcttttcggtactcgtacagaggtatataccgatcacaagagtttaaagtatatctttactcagccggatctgaacatgagacaaaggagatggttggaattaattaaggattatgacatgggaattcattatcacccgggaaaggctaatgttgtagcagacgctcttagcaggaaaggctattgcaatgctaccgaaggacgacagttgccattggagttatgcaaggaatttgaaagattaaatttgggaattgtcagtagaggtttcgttgcagccttagaagcgaagcccactctaattgatcaagttagagaagcccaaattaatgatcctgatattcaagaaatcaagaagaatatgagaagaggaaaagctatcggtttcttggaggatgagcaaggaactgtatggttgggtgaaagaatctgcgtccccgacaacaaagatttaaaagatgcaattctgaaagaagctcatgatactttatactccattcaccctggtagtactaaggtgtaccaggatctcaaggaaagattttggtgggcaagtatgaagcgtgaaatcgcagaatacgtagcagtatgtgatgtttgtcagcgagtcaaggcagaacatcagaaacctgccggtttgctgcagcctttgaagattcctgaatggaagtgggaagaaatcggtatggattttatcactggtttacccagaacgtcatcaggccatgactctatttgggtaatagtcgacagacttaccaaagtggctcatttcattccggtaaagacaacttattctggaagtcgattggcggaattgtatatggcaaggattgtgtgtttgcatggcgtccctaagaagatagtgtctgatcgaggcagtcagtttacttcaaacttttggaagaagcttcaggaagagatggtttctaagctgaattttagtactgcttatcatccgcagacagacggacaaaccgaaagggtaaatcagattttggaagacatgttgagagcttgtgctctagatttcggtggaagttgggataagaatctaccctatgcagaattttcgtacaacaacagttatcaagctagtcttcagatggctccttacgaagcactgtatggtcggaagtgccgcactccgcttttgtgggatcaaacgggagaacgtcaggttttcgggacagatatcctaagggaagcagaagaaaaggtgaaaataattcaggaaagattgcgagtggctcaatctcgtcataagagttatgccgacaatcgccgtagagatttgagttttgaagaaggagattatgtgtatcttcgtgtcacgccttttcgaggagttcatcgttttcataccaaaggaaaattggcaccgcgttttgtgggaccctataagattgtcagtagaagaggagaggttgcttatcagttggagttacctcaatctttggcaggagtccataatgtgttccatgtgtcgcaattgaaaaagtgtttaagggtacctaccgaagaagctaatcttgaacagatagaagtccaagaggatttgacctatgttgagaaaccaatccgtatcttggcaacaagtgagagaagaaccagaaatcgagttatccgtttttgcaaagtccagtggagtaatcactcggaagaagaatcaacttgggaacgagaagatgaattgaagtcagctcatccgcatctgttcgccagttcttctgaatctcgaggacgagattctgtttag

SEQ ID NO: 22876 - DNA, 1689 bp, Oryza sativa
  Clone ID: TF_OsC359_8239
atgtcatggcagagggttggtgccctgctgctaggggctcagtctcgcctgcctgtcccgggggttccggccgtaggcgggattaggtcggtactcttgtctatggctaggatgggttggaaactatgtcacgtcttccgtctgtataccgtggtgatgtttaacagagaaaaaggaaagaatgtcagcaggcatgcctccagtaactcaagttttcaactccatccaccactagcctcaagagagttaacaagggtacacccttggtccattccaagcatgctgcttggttcacagctaccattggttggaagtcaagaccaaaatcagtatgtgtttgatcgagcatttgccacccaggtcaatgagcttccaatgccagaagaggatgtccccttttgtcaggattgtagagagcaaggacactatgccctgaattgtccatgggtatataccaaagaagctccttcctttggtttagcagggcaggcatcgctaaaccagcctcctcgcaccaagtcaagcttgcagcctagtgtgcaaagcagagagcccaatgaagagaatccattgaatcccgggaattgctttcctcctagcctttcgtaccacgtggggtcacgtactaagcacgccaaaggcaagaagagtaagaatcagaagagaaaagcgccgatgcgaactgaagaagaagtacgtaagatgactattaccagcaccgaatggcctccagcagggataactattcctagacgtcaaagaggaaataccttccgaggtgcacggcagttgacccagcacctcctaagccatggtggcagagtatctgatagtgaagggtcagatcaagtctcctcggattatgaatatgagtccccccgacgtctcggcgaggaagagatggaattaaaagcatgcacccgttgcggagaaattggacacattgctagcatgtgtctcacactctgccctcattgtgaagaagaccatccaccaggggagtgtcccacccgcaaggtcacatgttttctatgcgaaggtacaaaccatgtgcccaaggattgccaactcagtgtgttgttgaccaagaccgcagaaatccaacgaacaaccctacgattgtctcatcagctagtcagctccaacagcaacctcgacgatatcatccacagcaccaatgctcctcctgctgcacctgactctgcaataaatcatagcaataataccttcagcaccaaccattctctgcactgacagcctcagcaatgaattgtcgtcgatggaagaagttgtttctctccccgacgtgaagtgggtaacttgtatgaggttgactccaaagatatgaactatgcaaagttctggaactgaagccccatcttcaagtgccgcaacccagtcgaagtcagctaaaggttcaaccagggacaagtcaggtgaagagaagattccatctatcttcttgctagcctcctcgaatctcggggacgagattcttctccctccttctctggggctcccctttccctcggcccactccctcctccctctctctcccgggctgcctttcccccccctcttccctcccggcctgctcggcccaggccgctgtcacgtcctgataaattcatcccgaaaataaaaatcatcttctaaaaggaataatagaattaattaaaattcgaaaag

SEQ ID NO: 22877 - DNA, 4467 bp, Oryza sativa
  Clone ID: TF_OsC359_8266
atgacgagggcgacggtgctccggcggtcggcgagcgaaacggaggcgcggacgaggtcgacggcgatgcggcgatgccgagggaggtggcgccgagccgggaggaagaccggagcgacggcggcggcgaaccgaaggtcgacggcgacggcggagagagaggagcacggcgctagcacgattccgacggcgagagcgagcggctttcacattgaattttacttattcttttgcacaattttgaggatgaattttagagtcgatttgggacgcgacattgaagctagtgattggctacatgccatagagaagaagttggatttacttccgtgtactgatcaggagaaggtctcatttgcatcacatcagttgcatggccctgcctctgaatggtgggatcacttccgtcttaacaggactactgctgaacctatcacttggcttgaattcaccgctgctttccggaagacgcatataccatcgggggtagtgtctctcaagaagaaggagttcaggtcgcttacccagggatctcgctctgttacggagtatctgcacgagttcaatcgtcttgctcgttatgctccggaagatgtgcgcaatgatgaagagcgccaggagaagtttttgggaggacttaatgatgagctttcttacccacttatggttggagattaccctgatttccagaaattagtggataaggctattcgtcaggaagacaagtacaatcgcatggagcagaagaaacgtcggattgctcaattcaagacacaacagggaaataatcagaagtcgcgtcttactttaggaccccagtccatgccacagggaggttcttcgtctgttgttcgtccgcaacgtcagttcttcaacaacaatgctggcaacaacatccgtaatcaagctccacgtcctgttgcagctccagcacagcaacaacctgccaagagggagcaaggcagcaagcccgtggtgtgtttcaactgtggagatccaggacattatgctgacaagtgtccgaagccccgacgcgtgaaggttgtccctgcccagagtaactctgctgtaccagcatcaaaggcccgtgtcaatcatgttgctgctgcagaagctcaagatgctccagatgtgattttgggtacgttccttgttaactcagttcctgcaacagtacttttcgattctggtgctacacattcattcttatctatgagttttgcgggaaatcatgggatggaagtagaagatcttagacgtcctttgatggttagtaccccaagtaatcaagcactctctttgcaacgtagcccctcggtcagaatagaaattcaaggagtaccatttctggccaatcttatcttgttagaatccaaagaccttgatgtcatcctagggatggactggttagccagacataaaggtgtgatagactgtgccaacagaaaagtaactctcaacagctatgatggtcgagttgtaaccgttcatgcattgtcttctgagtctttaaggtcaagactgaatcagataactttggaagagattcctatagtccgggagtatcctgatgtgttcccagatgatttaccgggtatgccgcctaaaagggatatagagttcagaatagatttggtacctggaacaactccgatccataagagaccttatcgaatggcagccaatgagttggcagaagttaagaggcaagtagatgatttgctacagaaaggatacatcagaccgagttcatcaccatggggagctccggttatttttgtggaaaagaaagaccatactcagagaatgtgtgtggactatcgtgcactaaacgatgtgactatcaagaataagtatccactacccaggattgatgatttgtttgatcagcttaaaggtgccactgttttctccaagatagatcttcgatcagggtatcatcagttgagaatcaaagaggaagatatacctaagacagcttttaccactaggtatgggttgttcgaatgtactgttatgtcttttggacttaccaatgcccctgctttcttcatgaatttgatgaataaggtgtttatggaatacctagacaagttcgtggtggtctttattgatgatattcttatctactctcaaaccaaagaagagcatgaagaacatcttcgccttgcattggagaagctacgagaacatcaactgtatgctaagtttagcaagtgtgaattttggttgtccgaagtgaaattccttggtcacgtcatctcagccggaggagttgccgtcgatcctagtaacgtggaatccgtaaccaattggaagcaaccaaagacagtttcagagattcgcagtttcctaggccttgcaggatattatcggaggtttatagagaatttttccaagattgctaagcccatgacacgactgcttcagaaagatgtgaagtacaaatggtcggaagaatgtgagcggagttttcaagagttgaaaagtcgcttaatatcagctcctattttgattttgcctgatccaaagaagggtttccaagtgtattgcgatgcatccaaacttgggttaggttgtgttctgatgcaagatgggaaggtggttgcctatgcatctcgtcagttacgtccgcatgagaagaactaccctactcatgatattgagttagctgcagtcgttcatgcattaaagatttggcgtcattatcttttcggtactcgtacagaagtgtacaccgatcacaagagtttaaagtatatctttactcagccggatctgaatatgagacaacggagatggttggaattaattaaggattatgacatgggaattcattatcatccgggaaaggctaatgttgtagcagacgctcttagcagaaaaggttattgcaatgctacagaaggacgacagttgccattggaattatgcaaggaatttgaaagattaaatttgggaattgtcggtagaggtttcgttgcagctttagaagcaaagcccactctaattgatcaagttagagaagcccaaattaatgatcctgatattcaagagatcaagaagaatatgagaagaggaaaagctattggtttcttggaagatgagcacggaactgtatggttgggtgaaagaatctgtgtccccgacaacaaagatctaaaggatgcaattctgaaagaagctcatgatactttatactccattcaccctggtagtaccaagatgtaccaggatctcaaggaaagattttggtgggcaagtatgaagcgtgaaatcgcagaatacgtagcagtatgtgatgtttgtcagagagtcaaggcagaacatcagaaacccgccggtttgttgcaacctttgaagattcctgaatggaaatgggaagaaataggtatggattttatcactggtttacccagaacgtcatcaggccatgactctatttgggtgatagtcgatagacttaccaaagtggctcatttcattccggtaaagacaacctattctggaagtcgcttggcggaattgtatatggcaaggattgtgtgtttgcatggcgtccctaagaagatagtgtctgatcgaggcagtcagtttacttcaaatttttgggagaaacttcaggaagagatgggttctaagttgaactttagtactgcttatcatccgcagacagacggacaaaccgaaagggtgaatcaaattttggaagacatgttgagagcttgtgctctagatttcggtggaagttgggataagaatctaccctatgcagaattttcgtacaacaacagttatcaagctagtctacagatggctccttacgaagcactgtatggtcggaagtgccgcactccgcttttgtgggatcaaacgggagaacgtcaggttttcgggacggatatcctaagggaagcagaagaaaaggtaaagatcattcaagaaagattgcgagtggctcaatctcgtcataagagttatgccgacaatcgccgcagagatttgagttttgaagaaggagattatgtgtatcttcgtgtcacgcctcttcgaggagttcatcgttttcagaccaaaggaaaattggcaccgcgttttgtgggaccttataagattgtcagcagaagaggagaggttgcttatcagttggagttacctcaatccttggcaggagtccataatgtgttccatgtgtcgcaattgaaaaagtgtttaagggtacctaccgaagaagctaatattgaccagatagaagtccaagaggatttgacttatgttgagaaaccaatccgtatactggaaacaaatgagagaagaaccaggaatcgagttatccgtttctgcaaagttcaatggagtaatcactcggaagaagaatcaacttgggaacgagaagatgaattaaagtcagctcatccgcttctgttcgccagttcttccgaatctcgaggacgagattctgtttaa

SEQ ID NO: 22878 - DNA, 4089 bp, Oryza sativa
  Clone ID: TF_OsC359_8286
atgccgcgttacaagcctgagtacctgtttggtgttgagggttttgtccaggagttgcgttcgatgtcctttgtcattggatttgggactgcccctttttatgcccagattcctcatgatcgtcatgaagagaagtgccgagtcaaagtcaccttgaacagtaatagtgaagatatccccttagtgatgtttgaagctggaggaagaaactacatccatgcatgtcaggaggtggcaaggatcgccataggagagctccgtgatcgctacagtgatcaattggccgacactgagtatcgctaccatcctcgtcaaccccagggaagtgaccgtggcagctatcttgagactgaaggaattgagaatgatgctaccacgaagcatttggttgagatgttgtgggctatggatgaaagtcgtgcggagactgtgttagccgctcaagatcgtgaagaccggaatcgtggtaagatttgtaagttagaagacaaggtggatcgtttggagaaggaattagccgcattgaagggagaagcaccgccgcagaaggccaggattcgtcttaccgcaaggaagagagctctatttgtccctcgctatcaactggcgccaaaggttcgtgtggtggagaaagaagttgccccagctcaagcggatcctccggtcatcatcataagtagtgatgaagaagaagaatccaagcgcaacaattccaagattgagtgggtagcaactcaagatgataaagacgagccttcaatcgacctccgatgcttggaagaactagagtgactttttccccggtttctcttcttgtgccctgtccatgccaatggtgaacactcgcagcaacgggaatggtcccaacaaccccaataacaacaatggagagaatcccattctggcccaagttcttgctcaacagacacagcttatgaacatgatgatgcagcaatttcagaatcaggaaaaccaaggaaataaccatgcacctccccagaacaagttagcagaatttcttcgtgtgaggccacctgttttctctagtaccactaatcctgttgaagctagtgattggctgcatgccatagagaagaagttggatttacttcagtgcactgatcaggagaaggtctcatttgcatcacatcagttgcatggccctgcctctgaatggtgggatcacttccgccttaacaggactactgctgaacctatcatttggcttgaattcaccgctgctttccggaagacgcatataccatcaggagtagtgtctctcaagaagaaggagttcaggtcgcttacccagggatctcgctctgttacggagtatctgcacgagttcaatcgtcttgctcgttatctccggaagatgtgcgcaatgatgaagagcgccaggagagtttttgggaggacttaatgatgagctttcttacccactcatggttggagattatcctgatttccagaaattagtggataaggctattcgtcaggaggacaagtacaatcgcatggagcagaagaaacgtcggattgctcaattcaagacacgacagggaaataatcagaagccgcatcttactttaggaccccagcccatgccacagggaggttcttcgtctgttgttcgtccgcagcgtcagttcttcaacaacaatgctggcaacaacatccgtaatcaaggtccacgtcctgttgcagctccagcacagcaacaacctgtcaagagggagcaaggcagcaagcccgtggtgtgtttcaactgtggagatccaggacattatgctgacaagtgtccgaagccccgacgcgtgaaggttgtccctgcccagaataactctgctgtaccagcatccaaggctcgtgtaaatcatgtcgctgctgcagaagctcaagatgctccagatgtgattttgggtacgttccttgttaactcagttcctgcaacagtacttttcgattctggtgctacacattcattcttatctatgagttttgtgggaaatcatgggatggaagtagaagatcttagacgtcctttgatggttagtaccccaagtaatcaagcactctctttgcaacgtagcccctctgtcagaatagaaattcaaggagtaccatttctggccaatcttatcttgttagaatccaaagaccttgatgtcatcctagggatggactggttagccagacataaaggtgtgatagactgtgccaacaaaaaagtaactctcaccagctatgatggtcgagttgtaactgttcatgcattgtcatctgagtctttaaggtcaagactgaaccagataactttggaagagattcctatagtccgggagtatcctgatgtgttcccagatgatttacctggtatgccgcctaaaagggatatagagttcagaatagatttggtacctggaacaactccgatccataagagaccttatcgaatggcagccaatgagttggcagaagttaagaggcaagtagatgatttgctacagaaaggatacatcagaccgagttcatcaccatggggagctccggttatttttgtggaaaagaaagatcatactcagagaatgtgtgtggactatcgtgcactaaacgatgtgactatcaagaataagtatccactacccaggattgatgatttgtttgatcagcttaaaggtgccactgttttctccaagatagatcttcgatcagggtatcatcagttgagaatcaaagaggaagatatacctaagacagcttttaccactaggtatgggttgttcgaatgtactgttatgtcttttggacttaccaatgcccctgctttcttcatgaacttgatgaataaggtgtttatggaatacttagacaagttcgtggtggtctttattgatgatattcttatctactctcgaaccaaagaagagcatgaggaacatcttcgccttgcattggagaagctacgagaacatcaactgtatgctaagtttagcaagtgtgaattttggttgtccgaagtgaaatttcttggtcacaaagatgtgaagtacaagtggtcggaagaatgtgaacagagttttcaagaattgaaaagtcgcttaatatcagctcctattttgattttgcctgatccaaagaagggtttccaagtgtattgtgatgcatccaaacttgggttaggttgtgttctgatgcaagatgggaaggtggttgcctatgcctctcgacagttacgtccgcatgagaagaactaccctactcatgatattgagttagctgcagtcgttcatgcattgaagatttggcgtcattatcttttcggtactcgtacagaagtgtacaccgatcacaagagtttaaagtatatctttactcagccggatctgaacatgagacaacggagatggttggaattaattaaggattatgacatgggaattcattatcatccggggaaggctaatgttgtagcagacgctcttagcagaaaaggctattgcaatgctacagaaggacgacagttgccattggaattatgcaaggaatttgaaagattaaatttgggaattgtcggtagaggtttcgttgctgtcggtgatatgggaccgggagtattgcgcccggaggcttgaggcagatggaatcgcccacgtggcctggcaccttcggggacgtcgggcccgagggtgaggtgtccgccctcctcctgatttccccgagggggggtcgggttgctcctgccccggccccgagggccgaggtggcgactggcggtctgacgcacgcctcgccccatcccgtcaggatgagagcctccaagcactcgtccctagccggagccggcgtgttagctcctggaggtggcacgttggacccggtcagatatatgtcaggcttcatcctaaccattacaggcaagatattgtatgaagaagggcgaacatgcagattgttaaactgacacgtggtggacaagaatgaccgatttgtgaccggtctgacactggtcatgtcgccagcagacagccatgttcccacgtcgcgcctgcctccggcggaagtggaggtaggtatgggccgtcccat

SEQ ID NO: 22879 - DNA, 6375 bp, Oryza sativa
  Clone ID: TF_OsC359_8350
tttttttttttttttttttttttttttaaagatctacaacatctcaaatattcttaactcatactcatgtgaatctagttcccaggatatacactagattcacactttcatcttaagcatggacatacatagcagacacatttaagaagaaaaggacttaaagacttacatcaacttgaagaaaagaacttaaagacttaaagtcaacttaatagttacataggccgaccggccaaatagatatataagagaacaagggaagcttatctacccaaaccacaagcacaccaactaggggtttacccccattaagttccaagtcctagaagaagcagtcgattacccgcatcactcaaagactaaatctaaaaccttgaatcaggaaaagtgtcagcatctaaatcacttcttcaccgtttaagcaatcatcgagattctagacaaggctagggatgtctgcagagccacagcgacggcgaagctccatggcggcatggcacaactccaggaatgacgtcggctgctcgatctgtaaggggagtcacggagagaatggaatcgatgatggaagcgattgaatggagttggagaacacgatgtcgatctccaagatcgctgcgccattggatgggttttcttggggtatcttgaagaggacgtcgaggtgatcctggtggcgcaagggttcggcttggggtggttcggttcggtcggaacgacgatgagaacccgatgacggcgtccagtgcgcgctccagagcatcgtcggcgagctctgcgttcccgtggatcatgtcaccatgtgcctcaataccaccacggtacctcggaaaggagttgtgacaataccccttatacaacacaatccactgcagcgcaccttcctggatcataatcacccccttataacaaggcatggactccccagcgacccccgtgggcttatctccgccacttctcagtctggtgccccgcaatgaaccacgggcggacggccttgatgacgtcagcggtgacgtcaccgacggcagcggcggctcggcggggcggacggctcgagcggcgcacgctcgccggcgaacggcggcgcgaggacacaaatggaaagcaccaagacaaagcgggcggcacggcgaactcaccggcgaccaaaacggcgacggaagatcaacggacggcgacggcgacgaggaggaaacggcgaagcttttcgggtcgacgacggcgatgacgctccggcggtcttcggcggcggcgaaggggcggacgaggacggcgacgacttggcgatcacgacggtggccttcccgagcgacggcgacggattcttctgaccacttgtacttcacatctttctgaagcaatcgtgtcatgggcttagcaatcttggaaaaattctctataaacctccggtaatatcctgcgaggcctaggaaactgcgaatctctgaaactgtctttggttgtttccaattggttacggattccacattactaggatcgacggcaactcctcctgctgagatgacgtgaccaaggaatttcacttcagacaaccaaaattcacacttgctaaacttagcatacagttgatgttctcgtagcttctccaatgcaaggcgaagatgttcttcatgctcttctttggttcgagagtagataagaatgtcatcaataaagaccaccacaaacttatctaggtattccataaacaccttattcatcaagttcatgtagaaagcaggggcattggtaagtccaaaagacataacagtacattcgaacaacccatacctagtggtaaaagctgtcttagggatatcttcctctttgattcttaactggtgataccctgagcgaagatctatcttggagaaaacggtggcacctttaagctgatcaaacaaatcatcaattctgggtagcgggtacttattcttgatagtcacatcgtttagtgcacgatagtccacacacatcctttgggtatggtctttcttttccacaaatataaccggagctccccatggtgatgaactcggtctgatgtatcctttctgaagcaaatcatctacttgcctcttaacttctgccaactcattggcaggtaaatcatctgggaacacatcagaatactcccggaccaaaatcacatctggagcatcttgagcctctgcagctgcaacatgattgacacgggcctttgatactggtgcggtagagttgctctgagcaggaacaaccttcacgcgacggggcttcggacacttgtcagcataatgtcctgggtctccacagttgaaacacaccacgggcttgctaccttgctccctcttagcaggctgttgctgtgttggagctacaacagggcgtggaacttgattgcggatgttgttgccagcattgttgttgaagaactgacgctgcggacgaacaaccgacgaagaacctcccggtggcatggactgaggtcctaaagtaagacgcggcttctgattattcccctgttgcgtcttgaattgagcaatccggcgtttcttctgctccatgcgattgtatttgtcctcctgatgaatagccttatccaccaacttctggaaatcagaataatctccagtcatgagtgggtaagaaagctcatcattaagtccttccaagaacttctcctgacgctcttcatcattgtgcacatcttccggagcataacgagctagacgattgaactcgtgcagatactccgtaacagagcgagatccctgggtaagcgacctgaactccttcttcttgagagacaccactcccgatggtatatgcgtcttccggaaagcagtggtgaattcaagccaagtgataggttcagcagtagtcctattcaggcggaagtgatcccaccattcagaggcagggccatgcaactgatgtgatgcaaatgagaccttctcctgatcagtgcattgaagcaaatccaacttcttctctatggcatgcagccaatcaccagtttcgacaggattagtggtactagagaaaacaggcggcctcacacgaagaaattctgctaacttgttctggggagttgcatggttatttccttggttctgctgattctgaagttgttgcatcatcatgtgcataagctgagtctgttgagcaagaacttgagcaagagtggggttctctccattgttgttattggggttgttgggaccattcccgttgtctagttcttccgagcatcggaggtcgattgaaggttcgttcggctcttcttcatcatcctgagttgctacccactcaatcttggaatgagtgtgcttgggttcttcttcatcatcactcacgttgacgaccggaggatctgctggggcaacttctttctccaccacacggacctttggcgccaattgataacgagggacaaataaagctctcttccttgcggtaagacgaatcctggccttctgcggcggtgcttctcccttcaacgcagctagttccttctccaaacgatccaccttgtcttctagcttacaaatcttaccacgattccaatcttcacgatcttgagccgctaacacagtttccgcacgactttcatccatagcccacagcatctcaaccaaatgtcttgtggtaacatcattctcaattccttcagtctcaaggtaactgctacggtcactcccctgtggttgacgaggatggtaacgatactcagtgtcggccaactgatcactgtagcgatcacggagctctcctatggcgatccttgccacctcctgacatgcatggatgtagtttcttcctccagcttcgaacatcaccgatggaatatcttcactattactgttcaaggtgactttgactcggcacctctcttcatgacgatcatgacgaatctgggcataaaaaggggcagtcccaaatccaatgacaaaggacattgtacgcaactcctggacaaaaccctcaacaccaaacaagtactcaggcttgtagcgcggcatggcggacggctttgatgacgtcagcggtgacgtcaccgacggcggcggcggctcggcggggcggacggctcgggcggcgcacgctcgccggcgaacggcggcgcgaggacacaaacggaaagcaccaagacaaagcgggcggcacggcgaactcaccggcgaccaaaacggcgacggaagatcaacggacggcgacggcgacgaggaggaaacggcgaagcttttcgggtcgacgacggcgatgacgctccggcggtcttcggcggcggcgaaggggcggacgacgacggtgacgacttggcgatcacgacggtggccttcccgagcgacggcgacggctggaacgacggcggcgcacggctggagcggcggcggcggcggcaaagctagggcacacgacgctagggcgattccgacgacgagaggcgaaggcgagggtggcggcgggtagaggagacaccggggagccttttaaaggggctaggaggcggcggcgaaggcccacggcggccggtgacgagaaggaaacttcgtggcttgaaggaaagaggccgatccgaatcgaactcgattccacgattcaattcatcttctcgttcccaagttgattcttcttccgagtgattactccattgaactttacaaaaatggataactcgattcctggttcttctctcatctgtttccaagatacggattggtttctcaacataggtcagatcctcttggacttctatctgttcaagattagcttcttcggtaggtacccttaaacactttttcaattgcgacacatggaacacattatggactcctgccaaagattgaggtaactccaactgataagcaacctctcctcttctactgacgatcttataaggtcccacaaaacgcggtgccaattttcctttggtgtgaaaacgatgaacccctcgaagaggcgtgacacgaagatacacataatctccttcttcaaaactcaaatctctgcggtgattgtcggcataactcttatgtcgggactgggccactcgcaatctttcttgaatgacctttaccttttcttctgcttccctcaggatatcagtcccgaaaacctgacgttctcccgtttgatcccacaaaagcggagtgcggcacttccgaccatacagtgcttcgtaaggagccatctgaagactagcttgataactgttgttgtacgaaaattctgcataaggtagattcttatcccaacttccaccgaaatctaaagcacaagctctcaacatatcttccaaaatctgattcaccctttcggtttgtccgtctgtctgcggatgataagcagtactaaagttcagcttagaacccatctcttcctgaagcttcttccaaaaatttgaagtaaactgactgcctcgatcagacactatcttcttagggacgccatgcaaacacacaatcctggccatatacaattccgccaaccgacttccagaataagttgtctttaccggaatgaaatgagccactttggtaagtctgtcgactatcacccaaatagagtcatggcctgatgacgttctgggtaaaccagtgataaaatccatacctatttcttcccatttccattcaggaatcttcaaaggctgcaataaaccggtgggtttctgatgttctgccttgacgcgctgacaaacatcacatactgctacgtattctgcgatttcacgcttcatacttgcccaccaaaatcgttccttgagatcctggtacattttggtactaccagggtgaatggagtataaagtatcatgagcttctttcagaattgcatcttttaaatctttgttgtcggggacgcaaattctctcacctaaccatacagttccttgctcatcttccaagaaaccgatagcttttcctcttctcatattcttcttgatctcttgaatatcaggatcattaatttgagcttctctaacttgatcaattagagtgggcttcgtttttaaggctgcaacaaaacctctactgacaattcccaaatttaatctttcaaattcctctgtacgagtaccaaaaagataatgacgccaaatcttcaatgcatgaaccactgcagctaactcaatatcatgagtagggtagttcttctcatgcggatgtaactgacgagatgcataggcaaccaccttcccatcttgcatcagaacacaacctaacccaagtttggatgcatcgcaatacacttggaaacccttctttggatcaggtaaaatcaaaataggagctgatatcaagcgattcttcaactcttgaaaactctgctcacattcttccgaccacttgtacttcacatctttctgaagcagtcgtgtcatgg

SEQ ID NO: 22880 - DNA, 6136 bp, Oryza sativa
  Clone ID: TF_OsC359_8355
ttattgcgtcataattcaattttaaccgatttaagtgttttaatccgatttaatcttcaaaaattcataactaattcatcttagctccgatttagttggttcaagtctctaaatttttctaaaattgagatctacacattaaaaattccgtcgtttccgaagagtccgttttcgccggagaagagtttgaagagttccaaggccagcaaggcaactcctggtttggaatggtacattcctggtttggagatagaactgtgcagccgatgccgcgttacaagcctgagtacctgtttggtgttgagggttttgtccaggagttgcgcacgatgtcctttgtcattggatttgggactgcccctttttatgcccagattcctcatgatcgtcatgaagagaagtgccgagtcagagtcaccttgaacagcaatagtgaagaggtcccctcagtgatgtttgaagctggaggaagaaactacatccatgcatgtcaggaggtggcaaggatcgccataggagagctccgtgatcgctacagtgatcaattggccgacactgagtatcgctaccatcctcgccaacctcagggaagtgaccgtggcagttaccttgagactgaaggaattgagaatgatgctaccacaaggcatttggttgagatgttgtgggctatggatgaaagtcgtgcggagactgtgttagcggctcaagatcgtgaagaccggaatcgtggtaagatttgcaagttagaggacaaggtggatcgtttggagaaggaactcgccgcattgaagggagaagcaccgccgcagaaggccaggattcgtctcaccgcaaggaagagagctctatttgtccctcgctatcaattggcgccaaaggttcgtgtggtggagaaagaagttgccccagctcaagcggatcctccggtcatcatcataagtagtgatgaagaagaagaatccaagcgcacccgttccaagattgagtgggtagcaactcaagatgatgaagacgagccgaacgagcctacaatcgacctccgatgcttggaagaactagacaatgggaatggtcccaacaaccccaataacaacaacaatggagagaatcccactctggcccaagttcttgctcaacagacacagcttatgaacatgatgatgcagcaatttcagaatcagcaaaaccaagggaataatcatgcacctccccaaaacaagttagcagaatttcttcgtgtgaggccgcctgttttctctagtaccactaatcctgttgaagctagtgattggctgcatgccatagagaagaagttggatttacttcagtgtactgatcaggagaaggtctcatttgcatcacatcagttgcatggccctgcctctgaatggtgggatcacttccgccttaacaggactactgctgaacctatcacttggcttgaattcaccgctgctttccggaagacgcatataccatcgggagtagtgtctctcaagaagaaggagttcaggtcgctttcccagggatctcgctctgttacggagtatctgcacgagttcaatcgtcttgctcgttatgctccggaagatgtgcgcaatgatgaagagcgccaggagaagtttttgggaggacttaatgatgagctttcttacccactcatggttggagattatcctgatttccagaaattagtggataaggctattcgtcaggaggacaagtacaatcgcatggagcagaagaaacgtcggattgctcaattcaagacacaacagggaaataatcagaagccgcgtcttactttaggaccccagcccatgccacagggaggttcttcgtctgttgttcgtccgcaacgtcagttcttcaacaacaatgctggcaacaacatccgtaatcaagctccacgtcctgttgcagctccagcacagcaacaacctgccaagagggagcaaggcaacaagcccgtggtgtgtttcaactgtggagatccaggacattatgctgacaagtgtccgaagccccgacgtgtgaaggttgtccctgcccagaataactctgctgtaccagcatccaaggctcgtgtaaatcatgtcgctgctgcagaagctcaagatgctccagatgtgattttgggtacgttccttgttaactcagttcctgcaacagtacttttcgattctggtgctacacattcattcttatctacgagttttgcgggaaatcatgggatggaagtagaagatcttagacgtcctttgatggttagtaccccaagtaatcaagcactctctttgcaacgtagcccctctgtcagaatagaaattcaaggagtaccatttctggccaatcttatcttgttaaaatccaaagaccttgatgtcatcctagggatggactggttagccagacataaaggtgtgatagactgtgccaacagaaaagtaactctcaacagctatgatggtcgagttgtaactgttcatgcattgtcatctgagtctttaaggtcaagactgaaccagataactttggaagagattcctatagtccgggagtatcctgatgtgttcccagatgatttacctggtatgccgcctaaaagggatatagagttcagaatagatttggtacctggaacaactccgatccataagagaccttatcgaatggcagccaatgagttggcagaagttaagaggcaagtagatgatttgctacagaaaggatacatcagaccgagttcatcaccatggggagctccggttatttttgtggaaaagaaagaccatactcagagaatgtgtgtggactatcgtgcactaaacgatgtgactattaagaataagtatccactacccaggattgatgatttgtttgatcaacttaaaggtgccactgttttctccaagatagatcttcgatcagggtatcatcagttgagaatcaaagagtatgggttgtttgaatgtactgttatgtcttttggacttaccaatgcccctgctttcttcatgaacttgatgaataaggtgtttatggaatacctagacaagttcgtggtggtctttattgatgatattcttatctactctcgaaccaaagaagagcatgaagaacatcttcgccttgcattggagaagctacgagaacatcaactgtatgctaagtttagcaagtgtgaattttggttgtctgaagtgaaattccttggtcacgtcatctcagccggaggagttgccgtcgatcctagtaacgtggaatccgtaaccaattggaagcaaccaaagacagtttcagagattcgcagtttcctaggccttgcaggatattatcggaggtttatagagaatttttccaagattgctaagcccatgacacgactgcttcagaaagatgtgaagtacaagtggtcggaagaatgtgaacagagttttcaagaattgaaaagtcgcttaatatcagctcctattttgattttgcctgatccaaagaagggttttcaagtgcattgtgatgcatccaaacttgggttaggttgtgttctgatgcaagatgggaaggtggttgcctatgcctctcgacagttacgtccgcatgagaagaactaccctactcatgatattgagttagctgcagtcgttcatgcattgaagatttggcatcattatcttttcggtactcgtacagaagaatttgaaagattaaatttgggaattgtcgatagaggtttcgttgcagccttagaagcgaaccccactctaattgatcaagttagagaagcccaaattaatgatcctgatattcaagagatcaagaagaatatgagaagaggaaaagctattggtttcttggaggatgagcacggaactgtatggttgggtgagagaatctgtgtccccgacaacaaagatttaaaggatgcaattctgaaagaagctcatgatactttatactccattcaccctggtagtactaagatgtaccaggatcttaaggaaagattttggtgggcaagtatgaagcgtgaaatcgcagaatacgtagcagtatgtgatgtttgtcagcgagtcaaggcagaacatcaaaaacccgccggtttgttgcaacctttgaagattcctgaatggaaatgggaagaaattggtatggattttattactggtttacccagaacgtcatcaggccatgactctatttgggtgatagtcgacagacttaccaaagtggctcatttcattccggtaaagacaacttattccggaagtcgcttagcggaattgtatatggcaaggattgtgtgtttgcatggcgtccctaagaagatagtgtctgatcgaggcagtcagtttacttcaaatttttggaagaaacttcaggaagagatgggttctaagctgaactttagtactgcttatcatccgcagacagacggacaaaccgaaagggtgaatcaaattttggaagacatgttgagagcttgtgctctagatttcggtggaagttgggataagaatctaccctatgcagaattttcgtacaacaacagttatcaagctagtcttcagatggctccttacgaagcactgtatggtcggaagtgtcgcactccgcttttgtgggatcaaacgggagaacgtcaggttttcggaacggatatcctaagggaagcagaagaaaaggtaaagatcattcaagaaagattgcgtgtggctcagtctcgtcataagagttatgccgacaatcgccgcagagatttgagttttgaagagggagattatgtgtatcttcgtgtcacgcctctacgaggagttcatcgttttcataccaagggaaaattggcaccgcgttttgtgggaccttataagattgtcagtagaagaggagaggttgcttatcagttggagttacctcaatctttggcaggagtacataatgtgttccatgtgtcgcaattgaaaaagtgtttaagggtacctaccgaagaagctaatattgagcagatagaagtccaagaggatttgacttatgttgagaaaccaatccgtatcctggaaacaagtgagagaagaaccaggaatcgagttatccgtttttgcaaagtccagtggagtaatcactcggaagaagaatcaacttgggaacgagaagatgaattgaactttggaatcgagttcgattcggatcggttttccctctctccaagccgcgagtttccttcgccgttgccgtcgccgtgggccttcgccgccgcctccgagcccctttaaaaggacccccggtgtctcctctacccgtcgccaccttcgccttcgcctctcgtcgtcggaaaagccctagcgccccgtgcgccgccgtcgtttcagccgtcgccgtcgctcgggaagaccgccgtcgtgctcgccaagtcgtcgccgtcctcgtccgccccttcgccgtcgccggagatcaccggagcagcttcgccgccgtcgacccgaagagcttcgccgcttcctcctcgtcgccgtcgccgtccgttggtcttccgccgccgtttaggtcaccgtgccgccgttcgccggcgagcgtgcgccgttcgagccgtcttctccgccgagccgccgccgctgtcggtgacgtcaccgctgacgtcatcggggtcgtccgccattccgtcgtttccggagagtccgttttcgcggaagaagagtttgaagagttccaaggccagcaaggcaagtcaccagaatatgtggctctatgtgatgtatgtcagcgggtcaaggcagaacatcagaaaccagccggtctgttacaaccgttgaagattccagagtggaagtgggaagaaataggaatggattttataaccggtctacccagaacgtcggcaggacatgattctatttgggtagtggttgatagattgactaaagtcgctcactttataccggttaaaacaacctatacgggacataagcttgcagagttatacatggccagagtgacagatggtcagacggaaagagtaaaccaaattttagaagatatgttgagagcctgtgttctagattttggtggaagttgggataagaatttgccgtacgcggaattctcatataacaacagttatcaagctagtttgcaa

SEQ ID NO: 22881 - DNA, 5577 bp, Oryza sativa
  Clone ID: TF_OsC359_8381
aaagatgactttattttcctatgggttataatttgactagcatggaccttatatattggattggttcagctagatgttatttatagttgcttagccgtgcttagaaacattagctcattaatgggataaatcatgcttcactatcacttatggatatttaatggaagctcacgatggtcaatcgtgattggttaattaattaaattgtcaactaaaacttgataatggtgggttgtgagcacatggttttgatggtcgtgctcatgacaattaaggaccggttcacgagtttcggttgtgaaacattaaccgtgccaaccacaagccagcatgggcaacgggctttatcttttgtatagcatggttcattgcggggcaccagactgagaagtggcggagataagcccacgggggtcgctggggagtccatgccttgtttataagggggtgattatgatccaggaaggtgcgctgcagtggattgtgttatgcgaggggtattgtcacaactccttttcgagataccgtggtggtattgaggcacatggtgacatgatgtggggttgtgtcttgtgggtacagtggtacacctctgatcagagtaaaactattcgaatagccgtgcccgcggttatggctcctggtttggaatggtatattcctggtttgaagatagaactgtgcagccgggatggttgttcagaatggttgggcctatgcaacaggattcctcatgatcgtcatgaagagaagtgccgagtcaaagtcactttgaacagtaatagtgaagatatcccctcagtgatgttcgaagctggaggaagaaactacatccatgcatgtcaggaggtagcaaggatcgccataggcgagctccgcgatcgctacagtgatcagttggccgacactgagtatcgctaccattctcgtcaaccccagggaagtgaccgtggcagctaccttgagactgagggaattgagaatgatgctaccacaaggcatttggttgagatgctgtgggctatggatgaaacccgtgcagagactgtgttagcagctcaagatcgtgaagatcggaatcgaggtaagatttgcaagctagaggacaaagtggatcgattggagaaggaactagccgcgttgaagggagaagcaccaccgcagaaggccaggatttgtcttaccgcaaggaagagagctctatttgtccctcgctatcaattggcaccaaaggtccgtgtggtggaaaaagaagttaccccagccctagcggatcctccggtcgtcaacatggtggtcactcgcagcaacgggaatggccccaacaacaacaataacaacaacaacaatggagagaatcccacacttgcccaagtcctggctcaacaggcacagcttatgaacatgatgatgcagcaactccagaaccagcagaaccagggaaataaccatgcacctccccagaacaagttagcagaatttcttcgtgtgaggccgcctactttctctagtaccactaatcctgttgaagctggcgattggctgcatgccatagagaagaagttggatttgcttcagtgcactgatcaggagaaggtctcatttgcatcacaccagttgcatggccctgcctctgaatggtgggatcacttccgcctgaataggactactgctgaacctatcacttggcttgagttcaccgctgctttccggaagatgcatataccatcgggagtggtgtctctcaagaagaaggaatttaggtcgctcacccagggatcccgctctgttacggagtatctacacgagttcaatcgtctggctcgttatgctccggaagatgtgcgcactgatgaagagcaccaggagaagttcttggaaggacttaatgatgagctttcttacccactcatgactggggattatcatgatttccagaagttagtggataaggctattcgtcaggaggacaagtacaatcgcatggagcagaagaaacgccggattgctcaattcaagacacaacaggggaataatcagaggccgcatcttactttaggaccccagtccatgccacagggaggttattcgtctgttgttcgtccgcagcgtcagttcttcaacaacaatgctggcaacaacatccgcaatcaagttccacgtcctgttgcagcctcgacacagcaacaacctgccaagagggagcaaggcagcaagcccgtggtgtgtttcaactgtggagacccaggacattacgctgacaagtgtccgaagccccgatgcgtgaaggttgtccctgcccagagcaactctaccgtatcagcatcaaaggcccgtgtcaatcatgttgctgctgcagaagctcaaggtgctccagatgtgattttgggtacgtttcttgttaactcagttcctgcaacagtgcttttcgattctggtgctacacattcattcttatctatgagttttgcgggaaatcatgggatggaagtagaagatcttagatgtcctttgatggttagtaccccaagtaatcaagcactctctttgcaacgtagcccctctgtcagaatagaaattcaaggagtaccatttctggccaatcttatcttgttagagtccaaagaccttgatgttatcctagggatggactggttagccaggcataagggtgtgatagactgtgctaacagaaaagtaactctcaccagcaatgatggtcgagttgtaactgttcatgcattgtcttctgagtctttaaggtcaatactgaaccaaataactttggaagagattcctatagtccgggagtatcccgatgtgttctcagatgatttacctggtatgccgcctaaaagggatatagagttcagaatagatttggtaccaggaacaactccgatccataagagaccttatcgaatggcagccaacgagttggcagaagtcaagaggcaagtggacgatttgcttcagaaaggaattgatgatttgtttgatcagcttaaaggtgccactgttttctccaagatagatcttcgatcagggtatcatcagttgagaatcaaagaggaagatatacctaagacagcttttaccactaggtatgggttgttcgaatgtactgttatgtcttttggacttaccaatgcccctgctttcttcatgaacttgatgaataaggtgtttatggaatacctagacaagttcgtggtagtctttattgatgatattcttatctactcccgaaccaaagaagagcatgaagaacaccttcgccttgcattggagaagctacgagagcatcaactgtatgctaagtttagcaagtgtgaattttggttgtctgaagtgaagttccttggtcacgtcatctcagcaggaggagttgccgtcgatcctagtaatgtagaatccgtaaccaactggaaacaaccaaagaccgtttcagagattcgcagtttcctaggcctcgcaggatattatcggaggtttatagagaatttttccaagattgctaagcccatgacacggctgcttcagaaagatgtgaagtacaagtggtcagaagaatgtgagcagagttttcaagagttgaagaatcgcttaatatcagctcctattttgatcttacctgatccaaagaagggattccaagtgtattgcgatgcatccaaacttgggttaggttgtgttctgatgcaagatgggaaggtggttgcctatgcatctcgtcagttacgtccgcatgagaagaactaccctactcatgatcttgaattagctgcagtagttcgtgcgttgaagatttggcgtcattatcttttcggtactcgtacagaggtgtataccgatcacaagagtttaaagtatatctttactcagccggatctgaacatgagacaaaggagatggttggaattaattaaggattatgacatgggaattcattaccacccaggaaaggttaatgttgtagcagacgctcttaggaggaaaggctattgcaatgctacggaaggacgacagttgccattggaattatgcaaggaatttgaaagattaaatttgggaattgtcagtagaggtttcgttgcagccttagaagcgaagcccactctaattgatcaaattagagaagcccaaattaatgatcctgatattcaagaaatcaaaaagaatatgagaagaggaagagctatcggtttcttggaggatgagcaaggaacagtatggttgggcgagagaatctgtgttcctgacaacaaagatttaaaagatgcaattctgaaagaagctcatgatactttatattccattcaccctggtagtaccaaaatgtaccaggatctcaaggaaagattttggtgggcaagtatgaagcgtgaaatcgcagagtacgtagcagtatgtgatgtttgtcagcgagtcaaggcagaacatcagaaacctgccggtttgttgcagcctttgaagattcctgaatggaaatgggaggaaatcggtatggatttcatcactggtctacccagaacgtcatcaggccatgactctatttgggtgatagtcgacagacttaccaaagtggctcatttcatcccagtaaagacaacctattccggaagtcggttggcggaattgtatatggcaaggattgtgtgtttgcatggcgtccctaagaaaatagtgtctaatcgaggcagtcagtttacctcaaatttttggaagaagcttcaggaagagatgggttctaagctgaactttagtactgcttatcatccgcagacagacggacaaaccgaaagggtgaatcagattttggaagacatgttgagagcttgtgctttagacttcggtggaagttgggataagaatctaccttatgcggaattctcgtacaacaacagttatcaagctagtcttcagatggctccgtacgaagcactgtatggtcgaaagtgccgcactccacttttgtgggatcaaacgggagaacgtcaggttttcgggacggatatcctgagggaagcagaagaaaaggtgaaaatcattcaagaaagattgcgtgtggcccagtctcgtcataagagttatgccgacaatcgccgcagagatttgagtttcgacgaaagagattatgtgtatcttcgtgtcacgcctcttcgaggagttcatcgttttcacaccaaaggaaaattggcaccgcgttttgtgggaccttataagattgtcagtagaagaggagaggttgcttattagttggagttacctcaatctttggcaggagtccataatgtgttccatgtgtcgcaattgaagaagtgtttaagggtacctaccgaagaagctaatcttgaacagatagaagtccaagaggatctgacctatgttgagaaaccaatccgtatcttggaaatagatgagagaagaaccagaaatcgagttatccgtttttgtaaagtccaatggagtaatcactcggaagaagaatcaacttgggaacgagaagatgaattgaagtcagctcatccgcatctgttcaccagttcttccgaatctcgaggacgagattctgtt

SEQ ID NO: 22882 - DNA, 5850 bp, Oryza sativa
  Clone ID: TF_OsC1528_2087
atggccaagaaccccaaggcggccaagaaccgccgccccacgacgcggagacctcgcgccgccgccgccgccgccaccgcctccgcctccgcggacatcgaggacctggcgccgccgtccgggtgcagggcagcagtggggctcaccacggccgccgcggcggtgcgcgcggagctgctgcggtggtacgacgccaaccggcgcgacctgccatggcggcgcgccgcggagccggcggggagcgggagcgggagcgggcgcggcgaggagaagagggcgtacgcggtgtgggtgtcggaggtgatgctgcagcatacgcgggtgcccgtggtggtcgactactactcccggtggatggcccgctggcccaccgtggacagcctcgccgctgccacgcaggaggaggtgaacgagatgtgggcggggctcgggtattaccggagggctcgatttcttctcgagggagcaaagcaaattgttgaaaaaggcgagttccctcgcacagcatcagcactccgtgaagttcgtggcattggggattacacagcaggagccattgcttccatagccttcaatgaggttgtccctgttgtggatggaaatgtccgagttatcagcaggctttacgctattcctgataacccaaaagaatcctcaactgtgaagagattctgcactcggcgtcagcaggacgccgagctcgccgcagcagaagagcgcaggcgagcaacggctcggaccggtgcagcagcagcgagggcggccagactggcggcagcggagttggcagcagccagggcggaggcggaggcggaggcggcggaagatgcggcacgtgcggcggaggtagaggttgagaccttgcgcagcagcatcaacggctccatcgccggcgacatcaccgccgacagggagcttgaggagctggcaagaggaagggcacgggagcgagcagagcggtgggtagcagcccacctccatggcggcggcggcggcccaagggaccgcgcgcccgccgacgggaacccaaacgggcgcgagcgtgctggcggtagcccggagcccgcacgcggccctcgcaggcagcacggctctctctcccctgaccggcgccatggtcaccacggcgtccagacggtggtcagggactttggtcccggcggtgggtggcctaccctcaccaaaaccaactacatcgagtgggccgcggtgatgagggtgaggctccaggtgcggcatgtgggaggcagtccgttctcgctttcccagaagcggactgccaaggaggcctgggacgccatcgctgcggcacgcatcggcagcgaccgcgcccgcaagtccacactgcaggcactccgcaaggagtgggagaacctggccttcaagccaggtgaggatgttgatgactttgctctccgtctcaacactctcttgcagaaaatggtgcagtacggtgacgacacctacgacgaggagagagctgtcgagaagctcttccgctgcgtccctgagaagtacaggcagatcgctcgctcgatcgaatctctgttggacctctccacgatgtcgatcgaggaggcgttaggtcgcctcaaggtcgtcgatggtgatgagccacagcctctctcggggcccatcaccatcggcgggaagctccatctcactcgggagcagtgggaggcctctcaaggtgacaggaggaagggggagtcatcttccccgacaggcggccgtaagccgcgcaaggcgcggggaggtgtccagctacgaggtgcccagggcgttgccaccggcaaccacaagccggcacgagacgacgcctgccgcaactgtggcaagcttggccattgggccaaagactgtcaacagccacgacgtggccaggcccacgtcgcacgggtggaggaagagccggctctgctcctggctcacgcaagcatcgagctacctccagcggcaccggccgcagcggctttcctccaccttgatgagccgaaggtactcgtctccctctgcaacggctccagcaacgacaaggctgatgggtggtacctcgacaccggcgccacccatcacatgaccggccgacgggagttcttcaccgagttcgactctagcgtccgaggctccgtcaagttcggggacgcctccggcgtggagatcaagggtgttggctccgtcaccttcaccgccaagtccggtgagcacaggctgctcactggagtctactacatccccgcattgaggaattctatcatcagcgtgggacagctggatgagaacggctcacgcgtgatggtcgaggacggactcatgaggatttgggatcgccgtcgtcgccttcttgccaaggtaaccagaggcactaatcgactctacatcctcagcgcgcaggtcgcacaaccagtttgcctcgccgctcgtcgggacgacgaggcgtggcagtggcacgagcgcttcgggcacctccacttcgaggccctgaagcagctcagtgccaaggagatggtgcgaggcatgccgtgccttgaccacgtggagcagctctgcgacgtctgcgtggtgacgaagcagcggcggctcccctttccccagcagacgagcttccgagccaaaaagcggctcgagctcgtgcacgaggacttgtgtggcccagtgacaccggccacaccaggaggacgacgttacttcctactgctcgtcgacgacctctcccgctacatgtgggtgatggtcctcggcagcaagggagaggctgcggacgccatcaggcatgcgcaggctgctgcagaggcagagtgcggccgcaagctgcgcgtgctgcgcaccgacaacggcggcgaattcacagcggctgaattcgcgtcgtactgcgctgatgagggcattcagcgccactacaccacgccgtacagcccgcagcagaacggcgtcgtcgagcggcgcaaccagacggttgtggggatggctcgggccctcctcaagcagagggggatgccggccatcttctggggggaggtggtggtgacggccgcctacatcctcaaccgctcgcctaccaaggccctcgatggcaggacaccgtacgaggcttggcatgggcgcaagccggcggtctcccacctgcgggtcttcggctgcctcgcgttcgctaaggagcttggccacatcggcaagctcgacgacaggagcaccccaggggtgttcatcggctatgcagagggctcgaaggcctaccgcatcctcgacccggagacacagcgtgtgcgcactgcgcgtgacgttgtgttcgatgaagggcgagggtgggtatgggacaaggcggtggacgatggttcgattccgacgtacgacgacttcaccgtcgagtacgtccacttcgagggagctgggggagtaggcagctcttcttcacctagcgtgtctaccctagcccctgaatctccaccgactccaacaccaacacaccctcgggccacgacttcgactacgacgagctcttcgtcgacaccaccccagccagtgactccacatgctccagtaccaacagccactcctccaagcacgtctactctgacgccagctcgtgttgagcgtagcccggtggagttcgctactccgctctcccacgacggggagcgcatcgacgcgtacaacgacggcgagcagctacggtaccgtacgatggaggatcttctcggcgaccagccggtgccgggactggtgcctcgcgacctagaggcgcagttgcaccttgcgtgcgacgacggtgagcctcggtcttttgcagaggccgagaaacacgcggcatggcgtgccgcgatgcagtcggagatggacgcggttcaggagaaccgcacctgggagcttgctgacctccctcgtggtcaccgcgcgatcacccttaagtgggtgttcaagctaaagagggatgaagccggagccatcatcaagcacaaggctcgcttggtggcacgcggtttcgtgcagcaggaggggatcgactacgacgatgccttcgctcccgtggcacggatggagtccgtgcgactccttcttgcgctggctgctcaggaaggctggggcgtccatcacatggacgtcaagtcggcgtttctaaacggcgacttgaaggaggaggtctacgtgcaccagccgccgggatttgtgatccccggcaaggagggcaaggtgctacgcctgcacaaggccctctacggcttgcagcaggcaccgagggcgtggaatgccaagttggattccacgctcaaggggatgggcttcgagcaaagcccgcacgaggcggccatctaccggcggggcaatggaggaaatgccttgctggtgggtgtctacgtcgacgacttagtgatcaccggcaccaaggatgcggaggtcgcggcgttcaaggaggagatgaaggccaccttccagatgagtgatcaggggcctctctccttctacctggggatcgaagtgcacaaggacaactccgggatcacgcttcgacagaccgcctacgccaagcgcgtcgttgagctggctgggctcaccgattgcaacccagctctcactccgatggaggagagactgaagctgagccgcgacagcacggcggaggaggtggatgctacacagtaccgacgtcttgtggggagccttcgctacctcacccacacacggccggacttggccttctccgtcggctacgtcagtcggttcatgcagcgaccgacgacggagcaccagcaggctgtgaagaggatcatccgctacgttgcggggactctcgaccacggtctctactacccaaggtgtcctggcaaggcacacttcgtcgggtacagcgacagcgaccacgccggcgacatcgacaccagcaagagcacgagcgggattctcttcttcctcggcaagtgcctcgttagctggcagtcggtcaagcagcaggtggtggccctgtccagctgcgaggccgagtacatggcggcctccgccgcttcgacccaggcgctctggcttgctcgactgcttagtgatctcctcggcagagacactggaacggtggagctcagggtggatagcaagtctgctctagccctggcaaaaaaccccgttttcacgaacggagcaagcacatccgggcagctcactggtgaactggtcgacccttctaggccaggagacttcaaccaagcaattatggaactaggagcaacactctgcagaaagacgaagcccggttgctcccagtgccctgtctccaaccactgccaagcactcacactttccaaccaaagtgcttccgtaaaagttacagactacccacgagtggttccaaaagccaagccacggtctgattttgctgctgtttgtgttgttcaaatcaatgataatctctttctattgatcaagaggccagaagagggcctgctcgctgggctctgggagttcccatctgttcttgtgagcgaagagaagactgatgtgctgaataggagaaaagagatggacaaatatttgaagcaggtccttagcatagatgttaaaaggagatccagtgtgatcctcagggaagatgttggccaacatgttcacattttctctcacattcgcctgacgatgtttgttgagctgatgattttgaacctcaaagatgatggggataaattatgcatggagggacaagataacagcaaactgagattcattgacgaaaatgcagtcgactcaataggattgatatcagggatccggaaggtgtacaacatggtcaaggccttcaaggagaagaggccgaaagagcagagccaagtaccatcgaggaaaaggagtagacggctgaagtag

SEQ ID NO: 22883 - DNA, 1781 bp, Oryza sativa
  Clone ID: TF_OsC359_7442
atggaggatgaaccgctgccggctgccctcgtcgccttctcgccggccccggtcgtcgtcgtcgtcgtcgtcctctcgtcgtcctcatcgtcgtggcgttcgtccctccgtcaagccgttctcgttcgtcgtcctcgcttcgtcaagtgctgcagccccgtcgtcgtcttcgtcctcggctccgcgtcgtcaagcctcgtgccggccgcgtctcgccttcgtccaaggatcgccgccgaagccgtcccctcgccgttcgtctccgttgtgcccgtctgtctccaccgcgcccgttcgtcgttgtcgttcccacgcctcgtcgcgtggtgggcaaatgaaggctacacgagctgcggcccggtagtcgagatgtcatggcacaggggctggtgtcctgctgctagggggctcaatcctgcctgcctgtcccgggggttccggccgtaggtggggttgggtcggtactcttgtttatggctaggatgggttgggaactatgtcacgtcttccgtccgtataccgtggtgatgtttaacagagaaaaaggaaagaatgtcagagggtatgcctccagtaactcaagttttcaactcaatccaccactggcctcaagagagttaaccagggcacacccttggtccattccaagcatgctgcttagttcccagctaccattggttggaagtcaagaccaaaatcagtatgtgtttgatcgagcatttgccacccagatcaatgagcttccaatgccagaagagcatgtccccttttgtcatgattgtagagaataaggacactatgccttgaattgtccatgggtatatgccaaagaagccccttcctttggtttaacagggcagacatcgctaaaccagcctcctcgcaccaagtcaagcttgcagcctagtgtgcaaagtagagagcccaatggagagaatccattgaatcccgggaattgctttcctcctagcctttcgtaccacgtggggtcacgtactaagcaagccaaaggcaagaagagtaagaatcagaagagaaaagcaccgatgcgaactgaagaagaagtacgtaagatgactattaccagcaccgaatggcctccagcagggataactattcctagacgtcaaagaggaaataccttccgaggtgcacgacagttgacccagcacctcctaagccatggtggcagagtatctgatagtgaagggtcagatcaagtctcctcggatgttgaagatgagtctccccgacatctcggcgaggaagagatggaatcaaaggcatgcacccgttgtggagaaattggacacattgctagcaggtgtctcacactctgccctcattgtgaagaagaccatccaccaggtgaatgtcccacccgcaaggtcacatgttttctgtgcgaaggtaccaaccatgtgcccaaggattgccaactcagtgtgttgttgaccaagaccgcagaaatccaacgaacaaccctacgattgtctcatcagctagtcagctccaacagcaacctcgacgatatcatccacagcaccaatgctcctcctgctgcacctgactctgcagtaaatcatagcaataataccttcaacaccaaccattctctgcaccgacggcctcagcaaagaattgtcgtcgatggaagaagttgtgtctctccccgacctactccaggccgagcgaagggcaatcaatctcaggagtgcgataccaagcagaagaccgttatctgcttcaaatagcaatcagaaggaagcttctcctgtgaa

SEQ ID NO: 22884 - DNA, 2391 bp, Oryza sativa; identical to SEQ ID NO: 15269
  Clone ID: TF_OsC1528_1824

SEQ ID NO: 22885 - DNA, 4702 bp, Oryza sativa
  Clone ID: TF_OsC1528_2130
cgacgtacgcgtcgaatggtccgaaaaattggctcctcacccttgcgcagatgcagcctccttttgcagttttgttttgctgcaaattcggattcgtttttgttttggaaacgttccgaaaaatccggtgcgtgcaaacggcgtggagtccggataagttacgcgcgacttatccggttcggttacgcgcagtagagattgtgcgggcgccctgatcaagcgacctttctctatataaaccgacctgccgtcttcacgcaacacaagcgaaatcaatctagggtttgcctcctactctgtactgcgccgtcgctcgtagactactccatccctctcgccggcgtgcaccggcgatcgggagagcaggtctccggaacctctgccttcgacgtcctgcaccaggagaaggcagcaataaggtttttgggaagcgcttcgcgcgactgctccctgtttgttcacgacggctcgccttcctcttcgctcgcgtgtttcgtgccttcgtagacacctgcgaaaagtttcgaccaagcagccggtctttccgtcacctcggtacgtgttcaatatgttgcgcatatttgatctgttcatgttatactgtgtagtttacatgtatagatctaatgatgcgttcatgctagttttcatctgtaatgttatgatttatttatggaatagattaaatcattatacgtctataatctcaacaatccaaaaaccttattataggcactgtgattttactatggctggttttgccgatgcactgaggccggataaattcaccggtgtgcattttaagagatggcagatcagggtcactctgtggctgacagctatgaaatgcttctgggtgagtactggcaaacctgaaggagttcttactgctgaacagcagaagcaattcgaggaagccactactctctttgtgggatgcattcttagcattcttggcgatcgtctggtcgaggtgtatatgcatatgaccgacgctaaggagttgtgggatgcactgaatactaaattcggtgctactgatgctagcaatgatctgtatatcatggagcagtttcatgactacaaaatggctgacaaccgttctgtagtcgaacaggctcatgagatacaaaccatggctaaggaactcgaactccttaagtgtgtcttacccgacaaatttgtggccgggtgcattattgcaaaactacctccatcttggaggagtttcggtactgcactcaaacacaagagacaggaatactccgttgaggggttgattgcgtctcttgatgttgaggagaaagctcggaaaaaagatgccgcgtctaagggcgatggtgggcagtccagtgccaatgttgtgcacaaggcccagaacaagagcaaggggaaatacaaagctcagcagaccaccaacttcaagaagcagaagaagaacaacaacaatcctaatcaggatgagaggacttgctttgtgtgtggccaagttggtcatctggttaggaagtgtccacagcgcaaggggatgaaggcacctgcagggcagacttctaagtctgctaatgtgaccattggcaacactggagatggaagcgggtatggtaatttacctactgttttttcagttaatcaatctactaattggtgggttgatactggggccaatgtacatgtttgtgctgacatctcattgttttcttcttatcaggtcgcacggggttccaccgtcctaatggggaatgggtcacatgcttctgttcatggtgttggcacggtagatctgaagtttacttcgggaaagatcgtgcagctgaagaacgtgcagcatgtcccttctatcgacaggaatcttgttagtggctcccgtctgactagagacggatttaagttggtttttgagtctaataaagtagtcgtgtctaaacatggatattttattggtaaaggttatgagtgcgaaggcctgttccgcttttccctttctgatttctgcaataagtctgtgaaccatatttgtggcagtgtggatgatgaggctaatgtttggcattcacgtttatgtcatattaattttggcttgatgtctcggctttccagcatgtgtttaattcctaagttttccattgtcaaaggttctaagtgccatagttgtgtgcaatcgaagcaacctcgcaagcctcacaaggctgccgaggagagaaacttggcaccactagaactcctacattcagatctttgtgaaatgaatggggtgttgacgaagggtggaaaacgatatttcatgacattgattgatgatgctactagattttgctatgtgtacttgttgaaaacgaaagacgaggctctagactattttaaaatttataaggcagaagttgaaaatcaacttgacagaaagataaaaaggcttaggtctgatcgtggtggagagtttttctcgaacgagtttgacttattctgtgaggaacatggcatcatacatgagaggacgcctccctattctcccgagtctaatgggattgctgaaaggaagaaccgcacactgactgacttggtgaatgccatgttggacaccgcgggactgcctaaggcatggtggggggaggcattgttgacctcaaatcatgtgttaaacagagttcctaacagaaataaggacaaaacaccatatgagatatggattggtagaaaaccatcactttcttatttgcgcacatgggggtgcttggcgaaagtcaatgtaccaataacgaagaagcgcaaacttggacctaagactgtggactgtgtttttctgggatatgctcatcatagcattgcctatagatttttaatagttaaatccgaggtaccggacatgcatgttggtacaattatggagtctcgtgatgctaccttctttgagagctttttcccaatgaaggatacacatagtggttcgaaccaaccctctgaaataattcccagttcaatcacaccaccagaacaaactgaacatacacatgaacttgtctctgaggaggatgtcagtgaagctcctcgaaggagtaagagacaaaggacggctaagtcttttggtgatgatttcactgtgtacctcgtggatgacactcctaagtcaatttcagaagcatatgcatctcctgatgcagactactggaaggaggctgtccgtagtgaaatggattccattatcgctaacgggacttgggaggtgacagagcgaccctatgggtgtaaacctgtggggtgcaagtgggtgttcaagaagaagcttaggcctgacggtactattgaaaagtacaaggctcggcttgttgctaagggctatactcagaaagaaggcgaagatttctttgacacttactcacctgttgctagattgaccacaattcgtgtgctactttccctagcagcctcacatggtcttctcgttcatcaaatggacgttaagacagcttttcttaatggagagctggatgaggagatctatatagatcaacctgatgggtttgtagttgaaggtcaagaaggcaaagtgtgcaaattgttgaagtctttgtatggtctgaaacaagctcctaagcaatggcatgagaaatttgacaaaacattgatatctgcaggctttgcagtcaatgaggcagataaatgtgtgtactatcgccatggtgggggtgagggagttattttgtgcttgtatgttgacgacatactgatatttgggacaaaccttgaggtgataaatgaggttaaatcattcttgtctcaaaattttgatatgaaagatttgggagtagctgatgttatcttaaacattaagctaattagaggtgagaatgggattacactcttgcagtcccattatgtggagaagatcttgaatcgctttggctacattgatagtaagccttctccaacaccttatgatcctagcttgttgcttcgcaagaacaagagaattgctaggaatcaactggaatactcccaaatcattggctcgttgatgtacctggctagtgcaactaggcctgatatctcctttgctggttatagtgattctaactggatctctgatgtggatgagatcaaagccactagtggatatgttttcacactgggtggtggtgctgtttcatggaagtcttgcaaacagacaattttgacgaggtcaaccatggaagcagagctaacggcactggatactgctactgttgaggcagaatggctgcgtgatctattaatggatctgcctgttgttgaaaaaccggtgccggctatccttatgaactgtgacaatcaaacgacatgtgaaaagacgattgaagtctgtcaggaaattaagaaactccggagttataacgttggattacatccaaacagcgagaaacctggcagatcccttcacgaagggactatcacgaaatgtgatagacaatgcatcgaaggagatgggtttgagacccattggcggcaaaggggaagggtggcggcggcgactggtggtgccaaaggggagggtggcatggttgagggagtagatcaaggaaggatatatcggcagcggccaaggggtgcaatggcgcggcttggtgccagtggcgcttggtggcaacagccgcggggagggggtggcttagtccagatcctacggcctcaaagacggcaacaacggatggcacagggaagccagtag

SEQ ID NO: 22886 - DNA, 2656 bp, Oryza sativa
  Clone ID: TF_OsC359_5530
atggatgaagtcgggggtcgatggacattctccagggcaaatgaaggctacacgagctgcggcccggtagtcgagatgtcatggcacagggttggtgccctgctgctaggggctcagtcctgcctgcctgtcccggaggttccggccgtaggtgggattgggtcggtactcttgtgtatggctaggatgggttggaaactatgtcacgtcttccgtctgtataccgtggtgatggataacactggtaacaaaggctatgggaatgatggatccgatgactcaagaacccaagccaatgggaatgagagaagcatcaacgaaacctcaccagagctaatccaagttgtggttaaccaaaccaacatgttggcaacagcctttcaactattacagaattggaacaacccagcaggggcaaccaacgttcaagtacctacagtccagcaacagtgcaagttatcagaatttctcaaaactgggcctccaacctttgccatggccgtcgatcctatggaagccagtgattggttgcgcacaatcgagaagaagctagggttgattcagtgcaccgaccaggagcgggttggcttcgcaactcatcagttggttggaccggcttcagagtggtgggatagctacgaagcatcacggccagaaggacataccatcacctggaacgagttttcatctgtattcaagagatcacatgttcccgcaggaatgatcacactaagaaaacgagagtttcgctacctgaagcaaggagatttgaccgtcacagagtacctgcacgagttctatcgtttggctcactatgcaccagaagatgtggaaacggatgaagacaaacaagagaagtttctccaggggttaaaagatgagcttgcagtgcaactacttctagaggattatgaaaattttgagaaacttgtggacaaagccatgcaactcgaaagtgagcataatcggatgacgaactgcaagagaaggattgtcaacatcccagtatttccatgtggaaaccaaggacagcgcactgagccacttcagatcaccggatcttctgttgcgcatcaagagtttccgccccaagaagatggacacaatgcagacaacaacattagcaatactaatgatgatgatgttaccaccaacaaccatgcttcttgccccaatagtgaccactcgaatcaagcgtgcaatgtcaacatcattcaccaagatgtcgacgatagtatcaatgatggcacccaaaatgacaaccctagtaattgggactctgggaaagactccgatggtgatagcaactatggtaccactgatgccaatgttagcaaggagttccagccaccaattccaactccaagtcagaatgactgtccccagacggatagctcagcaaagaagacgttgatttgctacaattgcaaagaaccagggcattactcgagggactgcctgcaaccaaggcaaagtcgacctccacattaccgccaatttacacgaagcagacatcccaatcgtattgtggtcactggagcaaacgccgtacccgtttcactgaaaggcagcaagccaaaggacctcatcgtccccagaagcgtccgcaatccacattaaagaataccacctgttagaggttgacgccaaagatatgaattatgagaagttctggaactgaagtcccatcttcaagtgccacaatccagtcgaagtcagctagaggtgcaaccagggaaaagtcaggtgaagagaagattccatctgcaacacccgcgcgcgcgccgctgacgggcgggcccgcccgccaccctcgctgacgggtggggcccacccgtcatcgcctacctcgcgccgcgcccgccgctcgcccgtgccctagcgccgccgccgccgccgaatccgccgcatcccgccgtccccgcgcgccataaagagggggaaatcactccccgtgattccctctcccttttcccccgtttttccctctctctctctccctcggattcgtttggaatctctcccgaaatcctcgccggcgtcattgatggagccgagatcgccgcgccggtttccctctcatccggccgccctctctccctcccgacgctatataatcgttccccgtgcctccctcctccgtttccgccgctcgccgctctctctctccgtcggaatcgtgcccgcgccgtcgtcctctctctccgccgtcgccgacgagctccggttcgccgccgccgtcgctccggacttcctcccctctcggcgtcgcctccttcggcttcgccgcgtcctcgtcgaccccgtccgctcctccgtttcgcccgccgaccgccggaacatcgccgtcctcgtcgatccgaaccgcgccgccgccttcctccgctccggtcgtcgtttccgccgtcctcgtcgtcccggggtgagccgaggaccgccgcttcgcttccctcttccctcccctctctcggccgccgctccgccgcgccgttggtcgccggcggcgaccatcggggcgcgggtgcgccgccttccgtcggccgtgccggcgaggccgccttcgggcgcgccccgcggctgccaggtgggcccggccgtcagccgcccgcgcccgcgggtgcggctgacgcgtgggacccacggcgccggccggcgt

SEQ ID NO: 22887 - DNA, 3177 bp, Oryza sativa
  Clone ID: TF_OsC359_5531
atggataatactggtaacaaaggctatgggaatgatggatccgatgactcaagaacccaagccaatgggaatgagagaagcatcaacgaaacctcaccagagctaatccaagttgtggttaaccaaaccaacatgttggcaacagcctttcaactattacagaattggaacaacccagcaggggcaaccaacgttcaagtgcctacagtccagcaacagtgcaagttatcagaatttctcaaaactgagcctccaacctttgccattgccgtcgatcctatggaagccagtgattggttgcgcacaatcgagaagaagctagggttgattcagtgcaccgaccaggagcgggttggcttcgcaactcatcagctggttggaccggcttcagagtggtgggatagctacgaggcatcacggccagaaggacataccatcacctggaacgagttttcctctgtattcaggagatcacatgttcccgcgggaatgatcacactaagaaaacgagagtttcgctacctgaagcaaggggatttgaccgtcacagagtacctgcacgagttctatcgtttggctcactatgcaccagaagatgtggaaacggatgaagacaaacaagagaagtttctccaggggttaaaagatgaacttgcagtgcaactactcctagaggattatgaagattttgagaaacttgtggacaaagccatgcaactcgaaagtgagcataatcgaatgacgaactgcaagagaaggattgtcaacatcccagtaattccatgtggtaaccaaaggcagcgcactgagccacttcagatcaccgggtcttctgttgtgcatcaagagttcctgctccaagaagacggacgcgatgcagacaacaacactagcaatactaatgatgatgataccaccaacaaccatggttcttgccccattagtgaccactcgaataaagcgtgcaatgtcagtagcattcaccaagatgtcaatgatagtatcaatgttggaacccagaatgacaaccttagcaattttgacactgagaaagactccaatggtgatagcaactatggtaccactgatgccaatgttagcaaggatttccaaccaccgattccaactccaagtcagaatgatcgtcctcagacggatagctcagcaaagaagacgttgatttgctacaattgcaaagaaccagggcattactcgagggactgcctgcaaccaaggcaaaatcgacctccacattaccgccaatttacaagaatcagacatcccaatcgtattgtggtcactggagcaaacaccgtacccgtttcactgaaaggcagcaagccaaaggacctcatcgtccccagaagcgtccgcaatccacgacatgaagtgggtaacttgtatgaggttgactccaaagatatgaactatgcaaagttctggaactgaatccccatcttcaagtgccgcaacccagtcgaagtcagctaaaggttcaaccagggataagtcaggtgaagagaagattccatctgcaccccgcgcgcgcgcgccgctgacaggcgggcccgcccgccactctcgctgacgggtgggacccacctgtcatctccctccccgcgccgcgcccgccgccgcccgtgccctagcgccgccgccgccgccgaatccgccgcttcccgccttccccgcgcgccataaagaggggcgaattactccccgcgtttccctctcccgattccccctcttttccctctctctctccctcggattcgtccgatttgaatcccgcaatcatcgccggcgtcttcaatggcggccgagatctccgcgcgcgattccttcctccccggccgccttctctcccttccgacgctataaaatcgtccctcgtgcttcgctcttccgtttccgccgctcgccgctcgctctcgccgtcggtttcgtgcccgcgccgtgctcctctctctccgccgtcgccgccgagctccgtttcgccgccgtcgtcgctccggtcctcctcccgactcggcgccacctccatcggcttcgccgagtggttgccgaccccgtccgccgctccgcttcgcccgccgaccgccggagcaccgtcgtcatcgtcatcccgaaccgcgccgccgctttcctccgctccggccgccgttctcgtcgtcgtcgttgtcccggggtgagccgaagaccgccgttcgctttcccccttccctccgctctctcgggcgccgctccaccgcgccgatggtcgccggcggtgaccatcggggcgcgggcgcgccgctcccgtcggccgtgccggcgaggccgccttcgggcgcgccctcgcggctgccaggtgggcccggccgtcagccgcccgcgcccgcgggtgcggctgacgcgcgggacccacggcgccgaccgccgccagccgcgtgcgcccggtccaccgtggaccgagcggctgacgcgtgggcccccacccccgtggacccgatgccgcgctacaagcctgagtacttgtttggtgttgaggggtttgtccaggagttgcgtacgatgtcctttgtcataggatttgggactgcccctttttatgcccagattcctcatgatcgtcacgaagaaaagtgccgagtcaaagtcaccctaaacagtaatagtgaagatatcccctcagtgatgttcgaagctggaggaagaaactacattcatgcatgtcaggaggtggcaaggatcgccataggagagctccgtgatcgctacagtgatcagttggccgacactgagtatcgctaccatccttgccaaccccagggaagtgaccgtggcagttaccttgagactgagggaattgagaatgatgctaccacaaggcatttggttgagatgctgtgggctatggatgaaacccgtgcggagattgtgttagcagctcaagatcgtgaagaccggaatcgtggtaagatttgcaagctagaggacaaagtggattgtttggagaaggaactagccgcattgaagggagaagcaccaccgcagaaggccaggattcgtcttaccgcaaggaagagagctctatttgtccctcgctaccaattggcgccaaaagtccgtgtggtggagaaagaagttaccccagccctagcggatcctccggtcatcaacataagtgatgattaa

SEQ ID NO: 22888 - DNA, 1648 bp, Oryza sativa
  Clone ID: TF_OsC359_5621
atggataatactggtaacaaaggctatgggaatgatggatccgatgactcaagaacccaagccaatgggaatgagagaagcaccaacgaaacctcaccagagctaatccaagttgtggttaaccaaaccaacatgttggcaacagcctttcaactattacagaattggaacaacccagcaggggcaaccaacgttcaagtgcctacagtccagcaacagtgcaagttatcagaatttctcaaaactgagcctccaacctttgccattgccgtcgatcctatggaagccagtgattggttgcgcacaatcgagaagaagctagggttgattcagtgcaccgaccaggagcgggttggcttcgcaactcatcagctggttggaccggcttcagagtggtgggatagctacgaggcatcacggccagaaggacataccatcacctggaacgagttttcctctgtattcaggagatcacatgttcccgcgggaatgatcacactaagaaaacgagagtttcgctacctgaagcaaggagatttgaccgtcacagagtacctgcacgagttctatcgtttggctcgctatgcaccagaagatgtggaaacggatgaagacaaacaagagaagtttctccaggggttaaaagatgaacttgcagtgcaactactcctagaggattatgaagattttgagaaacttgtggacaaagccatgcaactcgaaagtgagcataatcggatgacgaactgcaagagaaggattgtcaacatcccagtaattccatgtggtaaccaaagacagcgcactgagccacttcagatcaccggatcttctgttgtgcatcaagagttcctgccccaagaagacggacgcaatgcagacaacaacactagcaatactaatgatgatgataccaccaacaaccatggttcttgccccattagtgaccactcggataaagcgtgcaatgtcagtagcattcaccaagatgtcaacgatagtatcaatgttggaacccagaatgacaaccttagcaattttgacactgagaaagactccaatggtgatagcaattgtggtaccggtgatgccaatgttagcaaggatttccaaccaccaattccaactccaagtcggaatgatcgtccccagatggatagctcagcaaagaagacgttgatttgctacaattgcaaagaaccagggcattactcgagggactgcctgcaaccaaggcaaaatcgacctccacattaccgccaatttacacgaatcagacatcccaatcgtattgtggtcactggagcaaacgccgtacccgtttcaccgaagggcagcaagccaaaggacctcatcgtccccagaagcgtccgcaatccacattaaagaataccacctgttagaggttgactccgaagatatgaatcatgagaagttcggaaacggaagcatcactgaactaccgcaacctagtctgagtcagccaaaaggtgcaccctggtccaagtcaggtgaagagaagattccatccgcaacaggaggtcaagccaagcagttccgagtggtaaagttttgctggaagttcgtcaagacgcaacggaagaagtcagacaagaagagaagaccgcccaacctatcctcttgctag

SEQ ID NO: 22889 - DNA, 1350 bp, Oryza sativa; identical to SEQ ID NO: 15280
  Clone ID: TF_OsC359_5989

SEQ ID NO: 22890 - DNA, 1509 bp, Oryza sativa; identical to SEQ ID NO: 15285
  Clone ID: TF_OsC359_6507

SEQ ID NO: 22891 - DNA, 1617 bp, Oryza sativa; identical to SEQ ID NO: 15289
  Clone ID: TF_OsC359_6591

SEQ ID NO: 22892 - DNA, 2661 bp, Oryza sativa
  Clone ID: TF_OsC359_7474
ccccgccggaatcgagctcgcgctgtcgctctctctctccgcaatcgccgccgagctccggtccgctgccgtcgtcgccccggaccaccttccccctcggcgccgcctccttcggcttcgccgcatcctcgccgacctcgtccacccctccgtttcgctcgccgaccgccggagcaccgccgaccccgtccacccgagccgcgccgccgccttcctccgctccggtcgccgtttccgtcgtcgccgtcgacccggggtgagccgtggaccgccgcttcgtttccccccttccttcccctctctcggccgccgctccgccgtgcctatggccgctgccggcgaccataggggcgcgggcgcgccgcctcccgtcggctgtgccggcgtggccgccttcgggcgcgccccgcggctgccgcgtggggcccggccgtcagccgcccgcgccctcgggcgcggctgacgcgtggggcccacggcgccggccggtgcgagcccgtgtgcgcccggtccaccgtggacccacctcggccatataaggaccggtcttcgggcctctgttgcaaagcactaccgtacttccacatgtctagtgggacaaatgaaggctacacgagctgcggcccggtagtcgagatgtcatggcacagggccggtgtcctgctgctaggggctcagtcctgcctacctgtcccgggggttccggccgtacgtgggattgggtcgatgtacacctctgatcagagtaaatctattcgaatagccgagccctcggatatgggcaagcctagcaatgtacccaagtcagtgtttcaattcttaaaatttgctcaacaactaaaatgtggaatggttggcctgggttggcttgggacgagctgggacccagggtcgggttgccagttcggtctgaatcatcgtaggccttgggttaaggcaggcctgaagcgcctttgtaataatatggataatactggtaacaaaggctatgggaatgatggatccgatgactcaagaacccaagccaatgggaatgagagaagcaccaacgaaacctcaccagagctaatccaagttgtggttaaccaaaccaacatgttggcaacagcctttcaactattacagaattggagcagcccagcaggggcaaccaacgttcaagtgcctacagtccagcaacagtgcaagttatcagaatttctcaaaactgagcctccaatctttgccattgccgtcgatcctatggaagccagtgattggttgcgcacaatcgagaagaagctagggttgattcagtgcaccgaccaggagcgggttggcttcgcaactcatcagctggttggaccggcttcagagtggtgggatagctacgaggcatcacggccagaaggacataccatcacctggaacgagttttcctctgtattcaggagatcacatgttcccgcaggaatgatcacactaagaaaacgagaatttcgctacctgaagcaaggagatttgaccgtcacagagtacctgcacgagttctatcgtttggctcgctatgcaccagaagatgtggaaacggatgaagacaaacaagagaagtttctccaggggttaaaagatgagcttgcagtgcaactactcctagaggattatgaagattttgagaaacttgtggacaaagccatgcaactcgaaagtgagcataatcggatgacgaactgcaagagaaggattgtcaacatcccagtaattccatgtggtaaccaaagacagcgcactgagccacttcagatcaccggatcttctgttgtgcatcaagagttcctgccccaagaagacggacgcaatgcagacaacaacactagcaatactaatgatgatgataccaccaacaaccatggttcttgccccattagtgaccactcgaataaagcgtgcaatgtcagtagcattcaccaagatgtcaacgatagtatcaatgttggaacccagaatgacaaccttagcaattttgacactgagaaagactccaatggtgatagcaactatggtaccactgatgccaatgttagcaaggatttccaaccaccaattccaactccaagtcagaacgatcgtcctcagacggatagctcagcaaagaagacgttgatttgctacaattgcaaagaaccagggcattactcgagggactgcctgcaaccaaggcaaaatcgacctccacattaccgccaatttacacgaagcagacattccaattgtattgtggtcactggagcaaacgccgtacccgcaaagagtgaaatcttcaactcggtatcagatgctacacggagtgaaaagtgcaagcaccggttaccaggcaatgccatgacttgggaagatgatccaatgggaaagaacacatcaagtggtaacttgtctgaggttgactccgaagatatgaatcatgagaagttctggaacggaagcatcactgaactaccgcaacctagtctgagtcagccaaaaggtgcaccctggtccaagttaggtgaagagaagattccatccgcaacaggaggtcaagccaagcagttccgagtggtaaagttttgctggaagtttgtcaagacgcaacggaagaagtcagacaagaagagaagaccgcccaacctatcttcttgctag

SEQ ID NO: 22893 - DNA, 1520 bp, Oryza sativa; identical to SEQ ID NO: 15274
  Clone ID: TF_OsC359_8210

SEQ ID NO: 22894 - DNA, 795 bp, Oryza sativa; identical to SEQ ID NO: 15292
  Clone ID: TF_OsC1713_4581

SEQ ID NO: 22895 - DNA, 4635 bp, Oryza sativa
  Clone ID: TF_OsC1713_3911
ctaatcttgatgtgcctgctccaaacccatcttcttccggagttcaagaaaccgaactcgtccaacaggcttagtcagtatatctgcaagctgatcttctgttcgcacatactccacagcgatttgcttcttctccacacactccctgataaaatgaaatcgagtgtcaatgtgcttacttcgatcatggagtaccggattcttgcagagattgattgctgatttgttatcaactttcatcacagtttggccagggtcctctccaagtaattctgccaatagcctattgagccaaatcccttgacaagcaccagtagtagcagcaatatactcagcttcacatgacgacaaagctaccaccttttgtttctgagattgccagctgatcaaactgtctcccagcatatacagtacacctgtggtgctcttcctatcatccaaatccccagccatatcactgtcactgaacccaatcaatctgagttcacccttttcccttctcccaaaccagcagccaacatcaagagtacctgcaatgtatctcagaatatgcttcactgctgcccaatgttcagaagttggtttctccataaatctgctcacatacccgacagagtaagcaagatctggccttgtgttcaccaaatacctgagacttcccacagtgcttctatacatggttgaatcaactccttcccctccactctccctcttcagtttcaacctagcttccatgggaacttgagtagaattgcagccttccattcctgtcttttctaggatttttgctgcataagcagtttgtgacagaaacactccatcatccttttggacaacctccattcccagatagtaactcagcagacctaagtcactcatgcgaaatttcttcttcatctcctcatacactgcactctcagtttcagacttgatgaaattcagagaaatcaaagtgttgtgcagttttgcattccatgctcggggagcctgctttagcccatacaaagctttcttgagcctcaacacctggccttcttttcctttctcaataaaaccaggtggctgcacaacataaacttcctcttccaaatcaccattcaggaaagcagacttcacatccatgtgatgaatctcccatcctttgtttgcagctactgcaatcaggagcctcacagtttccattctagccactggggcaaacacttcctcaaaatcaattccttgttgttgcacatatccctttgctaccaaccttgctttgtgtttcaccacaactcctgatggatcctttttcaccttatagacccactttaacccaattgctttatgtccaacagggagctcagcaaagctccaagtctgattgtcttcaatggactttagctcctcttgcattgcctgcctccaacacaactgttgttcagcttctgcaagactcattggttcctcacttgccagcaagcattggtcgctataatcaaaatcaaggacaggttcagtagcagataggatatcctgcactcggcgatacctgatagggccttcatttgtccctggcgtgacagagtttggtggtgagcaaaactccacccccgccggcacttccggtggtgagggcggagtggccgtcgacgccgggtacgtgcctccctgcacaggcgtgctagcctgttcgcccaagtcggcaacaacagagtccacgggattcacaaagaaatccaccgtgaattcctcctcttcagtcgcctctgtctcaggatcacgccacgcccatgtcgccgcctcgtcgaagacgacatcacgcgacacgcaaacgcgccgcaccacagggtcatacatgcgatacgccttcgacccctgttcatagccaataaacaccatcctcgtacctcgatcgtcgagcttgcgcaggttcggcttcaccgtcttgacgtagcctacacagccaaacaccctcaagtgttcgaccgagggacgtcgcccatgccacgcctcatggggggtcacgccattcaatgccttcgtcggcgaccggttcagcacatacaccgccgccacaaccgcctccccccagaagcacgccggcatcccagccgccttaagcatggagcgcgccgccgcaaccacggtctgattccgccgctccacgactccgttctgctgaggggagtaaggagcagtgagctctcgcctcatcccatgatcggcgcagtagtccatgaactccacggaggtaaattcccccccacgatctgtcctcagagcccgcagctttcgcccggactccagctcaacgccgacttggaactgcttgatcgccgtcgccgcttcatgcttgccggagaggagccgtatccacatatgccggctcatatcgtcgacgaggagcaggaaatacttcctgccgcctggggtcgcaggcgtgatcggcccacacaagtcgccgtgcaccagttcgagcgcctcctgtgctctaaacttggcctcctccgggaacgggagtcgtcgttgcttgcccgcgagacaaccgtcgcacagttgatcagtgtgatcaatgatcggaagcccgcggaccatgttcccctgggccagcctccggagcgactggaagttcaagtgtccgaaacgcgcatgccaccgccatgccgtgtcgccaccgctcgccgccatgcagactggatttgcaatatgcagcttgagtatatagagataatttatgtctcgttttacctttgcgaggagaagaccatcgggatcacggagtgtgcagaccccgccccagatatgtgcgtcgtagccgcgcgcgtcgagacggccgacactgatgatgttcttgcgcagcttcgggatgtagtacaccgtgtcgagagaccgatgatcaccattcttgcatcggaacaccacggtcccgcgcccctggatttcaatcacagagccgtcgccaaacttcaccgtcccaacaacgccggtgtcgagctcggcgaacgccgaacgcactccagtcatgtggttggtggcgccggtatccagaaaccaatctcttgtcacctcctcctcaccaccatcctcgtggtccaggatcaccttcttctccgtgaggtgtacctcctgtccaccaggtgttcgtccgagtgtcgcctcgccagcaagtgacacccctacgacatgtgccataagcaacgtcggttcttcctcggcggcttgcaccaggttcgcctctccccggcgttggcgtcgtggcttgcggcactgccttgcatagtgaccaaattcatcacaattgaagcactttaccctcgagatgtcgcggctgctgttcgcaccagtggccgcctctttgccctttggcgacccaccgggcttgcctcggtgattctgcgtgccgggcgcgccgcggcccttattgccgctgttgccggagccctcctgctcccgctgcttcacacgtgcctgccattgttcctccgtgaggtacaattttccgccatcgcttccctcctcatcatcgctgtaagaatccactgttgacagccgcccaactagctcctccagcgccatggtcttcacatcgagcagctgctcgagagagatagccaccggcttatacttcttgggaacaacgcgcagcagcttcttgttgacgtgttcatcttccatgactccacccatgtcgcgaatgtccgcgacgacggcagtgagccgcatcgcaaactcctccggcgtctccctctccttgaatcgcatcgactcaaattgacgacggaagccctgctccttcgcctcacgcacacggtcaacgccgacccgcatggtcttgatggcgtcccacgccgccttcgccgtgtcatgctttgccagcccgcgcaacatctcacgcggcaccgcctgaaggattgccgagagagccgcccaatcttcacgaaactccgcgtagccgggatcgatcgccgtccacagcccctgcgcctgcaggttgacgcgcatcaggagcgcccaatccgggtagtttgtcctcgagaggactgggaggcgagcggtgtgcgatgcgtctctcccctgagacacgagcggaagtaatgcgccgtctgctccattccccccgccgctgccgcttgcgccgccgcggccgttgccgctccccccgccgccaccgccaccacgacggccaggcggtgtgtatgacatcgccggatcgttccagtactgcaccgacagcgccacgtcgccggcgtacggcagcaggatcttctggatcgactccccgaccctaccgtagtccaggctagcgagagccacgtcggcctcgccgacgacgagctccgcgccttggttgtagcagtggatctcggggaggccggagcaagggttgacggcgatgcggtcggcgagcgggaagaagtggttgagcaacgacggcaagccggcggcgaacgccgcgacgacgtcgtggaagccgccggcggaggtgggtgggttggggtagatgcagatcatggagacctggatggactgcgggaggaggtcgaggttggagacggcgaggacgtgcggccggagggactcgtcggaggcctgcacgagtcgccggctcacgacccgaacttgcagctcgccgccattgatgcaggtggccat

SEQ ID NO: 22896 - DNA, 4281 bp, Oryza sativa
  Clone ID: TF_OsC1713_4549
ctaatcttgatgtgcctgctccaaacccatcttcttccggagttcaagaaaccgaactcgtccaacaggcttagtcagtatatctgcaagctgatcttctgttcgcacatactccacagcgatttgcttcttctccacacactccctgataaaatgaaatcgagtgtcaatgtgcttacttcgatcatggagtaccggattcttgcagagattgattgctgatttgttatcaactttcatcacagtttggccagggtcctctccaagtaattctgccaatagcctattgagccaaatcccttgacaagcaccagtagtagcagcaatatactcagcttcacatgacgacaaagctaccaccttttgtttctgagattgccagctgatcaaactgtctcccagcatatacagtacacctgtggtgctcttcctatcatccaaatccccagccatatcactgtcactgaacccaatcaatctgagttcacccttttcccttctcccaaaccagcagccaacatcaagagtacctgcaatgtatctcagaatatgcttcactgctgcccaatgttcagaagttggtttctccataaatctgctcacatacccgacagagtaagcaagatctggccttgtgttcaccaaatacctgagacttcccacagtgcttctatacatggttgaatcaactccttcccctccactctccctcttcagtttcaacctagcttccatgggaacttgagtagaattgcagccttccattcctgtcttttctaggatttttgctgcataagcagtttgtgacagaaacactccatcatccttttggacaacctccattcccagatagtaactcagcagacctaagtcactcatgcgaaatttcttcttcatctcctccttgaaaaaatcaatttcacttgcttgagccccactgataatcagatcatccacatacactcccactatcaaccttgagcttcctgttcctctcacatacactgcactctcagtttcagacttgatgaaattcagagaaatcaaagtgttgtgcagttttgcattccatgctcggggagcctgctttagcccatacaaagctttcttgagcctcaacacctggccttcttttcctttctcaataaaaccaggtggctgcacaacataaacttcctcttccaaatcaccattcaggaaagcagacttcacatccatgtgatgaatctcccatcctttgtttgcagctactgcaatcaggagcctcacagtttccattctagccactggggcaaacacttcctcaaaatcaattccttgttgttgcacatatccctttgctaccaaccttgctttgtgtttcaccacaactcctgatggatcctttttcaccttatagacccactttaacccaattgctttatgtccaacagggagctcagcaaagctccaagtctgattgtcttcaatggactttagctcctcttgcattgcctgcctccaacacaactgttgttcagcttctgcaagactcattggttcctcacttgccagcaagcattggtcgctataatcaaaatcaaggacaggttcagtagcagataggatatcctgcactcggcgatacctgatagggccttcatttgtccctggcgtgacagagtttggtggtgagcaaaactccacccccgccggcacttccggtggtgagggcggagtggccgtcgacgccgggtacgtgcctccctgcacaggcgtgctagcctgttcgcccaagtcggcaacaacagagtccacgggattcacaaagaaatccaccgtgaattcctcctcttcagtcgcctctgtctcaggatcacgccacgcccatgtcgccgcctcgtcgaagacgacatcacgcgacacgcaaacgcgccgcgccacagggtcatacatgcgatacgccttcgacccctgttcatagccaataaacaccatcctcgtacctcgatcgtcgagcttgcgcaggttcggcttcaccgtcttgacgtagcctacacagccaaacaccctcaagtgttcgaccgagggacgtcgcccatgccacgcctcatggggggtcacgccattcaatgccttcgtcggcgaccggttcagcacatacaccgccgccacaaccgcctccccccagaagcacgccggcatcccagccgccttaagcatggagcgcgccgccgcaaccacggtctgattccgccgctccacgactccgttctgctgaggggagtaaggagcagtgagctctcgcctcatcccatgatcggcgcagtagtccatgaactccacggaggtaaattcccccccacgatctgtcctcagagcccgcagctttcgcccggactccagctcaacgccgacttggaactgcttgatcgccgtcgccgcttcatgcttgccggagaggagccgtatccacatatgccggctcatatcgtcgacgaggagcaggaaatacttcctgccgcctggggtcgcaggcgtgatcggcccacacaagtcgccgtgcaccagttcgagcgcctcctgtgctctaaacttggcctcctccgggaacgggagtcgtcgttgcttgcccgcgagacaaccgtcgcacagttgatcagtgtgatcaatgatcggaagcccgcggaccatgttcccctgggccagcctccggagcgactggaagttcaagtgtccgaaacgcgcatgccaccgccatgccatgtcgccaccgctcgccgccatgcagactggatttgcaatatgcagcttgagtatatagagataatttatgtctcgttttacctttgcgaggagaagaccatcgggatcacggagtgtgcagaccccgccccagatatgtgcgtcgtagccgcgcgcgtcgagacggccgacactgatgatgttcttgcgcagcttcgggatgtagtacaccgtgtcgagagaccgatgatcactattcttgcatcggaacaccacggtcccgcgcccctggatttcaatcacagagccgtcgccaaacttcaccgtcccaacaacgccggtgtcgagctcggcgaacgccgaacgcactccagtcatgtggttggtggcgccggtatccagaaaccaatctcttgtcacctcctcctcaccaccatcctcgtggtccaggatcaccttcttctccgtgaggtgtacctcctgtccaccaggtgttcgtccgagtgtcgcctcgccagcaagtgacacccctacgacatgtgccataagcaacgtcggttcttcctcggcggcttgcaccaggttcgcctctccccggcgttggcgtcgtggcttgcggcactgccttgcatagtgaccaaattcatcacaattgaagcactttaccctcgagatgtcgcggctgctgttcgcaccagtggccgcctctttgccctttggcgacccaccgggcttgcctcggtgattctgcgtgccgggcgcgccgcggcccttattgccgctgttgccggagccctcctgctcccgctgcttcacacgtgcctgccattgttcctccgtgaggtacaattttccgccatcgcttccctcctcatcatcgctgtaagaatccactgttgacagccgcccaactagctcctccagcgccatggtcttcacatcgagcagctgctcgagagagatagccaccggcttatacttcttgggaacaacgcgcagcagcttcttgttgacgtgttcatcttccatgactccacccatgtcgcgaatgtccgcgacgacggcagtgagccgcatcgcaaactcctccggcgtctccctctccttgaatcgcatcgactcaaattgacgacggaagcccttctccttcgcctcacgcacacggtcaacgccgacccgcatggtcttgatggcgtcccacgccgccttcgccgtgtcatgctttgccagcccgcgcaacatctcacgcggcaccgcctgaaggattgccgagagagccgcccgatcttcacgaaactccgcgtagccgggatcgatcgccgtccacagcccctgcgcctgcaggttgacgcgcatcaggagcgcccaatccgggtagtttgtcctcgagaggactgggaggcgagcggtgtgcgatgcgtctctcccctgagacacgagcggaagtaatgcgccgtctgctccattccccccgccgctgccgcttgcgccgccgcggccgttgccgctccccccgccgccaccgccaccacgacggccaggcggtgtgtatgacat

SEQ ID NO: 22897 - DNA, 1101 bp, Oryza sativa
  Clone ID: TF_OsC1713_5093
ctactgctgctttgaaactggtggctgagctgtaacacttgaggacgcaactggcactgcattggctcctgtgacgacaatgttgttgacttgaccttgcggctgctgatgcttcggcttcggacactttcttgcgaagtgacctggctcataacagttgaaacatacttgctgctcccttccactactgttattttcttgagactgatcctgctgaactggctccgatagagtagcttgcttgatgttaacttcattgcttgcattagtctctgaattgatctcaccaccgatgttcaactgttgcgattgttcttgagatgttagacttgattcaccaacttgggatggcttgatatgctgcctctggctactgccctgtgcctcctggaaaacagtcattcttctcttacggttgtccatcctgttcttcttatcttccagttgaattgctttgtcaaccagctcatgaaaatcagcatagtcatgagagatcaacgtaactgacagttcatccttcaggccttccaagatcttctcctgcctttcctcgtcagtacagacatcttctggagcataacgtgctagacggttgaactcataaagaaacttagtcacggtacgatccttttgcttcaatgtcctgaactcacgcttcttcaaagcaacaactcctgcaggtatgtgtgtcttcttcaatccttcggtaaactcttcccaagtgattggttgtccttctgctctgttcatccggaagtgatcccaccattctgaagcatatccatgcaactgatgtgaagcgaacacaactttctcttgatctgtgcactggagcaattccaacttcttctcaatagtgtgtagccaatcacctgcttccactaggttgatagtgctagaaaaggtaggcggcttcacacaaaggaaatcagctaacttgttctggggcggtggagcattgttgttcccttggttgagatggttctgcatctgctgcatcatcatgtttattaactgagtctgttgagccagaacttgagcaagggttgggttctcttcattgttattgtttccacttccactagcatgagtgttcaccat

SEQ ID NO: 22898 - DNA, 1494 bp, Oryza sativa; identical to SEQ ID NO: 15313
  Clone ID: TF_OsC359_6138

SEQ ID NO: 22899 - DNA, 1614 bp, Oryza sativa
  unsure (1)..(1614): unsure at all n locations
  Clone ID: TF_OsC359_7273
atggcacagggctggtgtcctgctgctagggggctcaatcctgcctgcctgtcccgggggttccggccatgtgccttttgtatcatgtttgttcggtgtaccccggcttttcctgggacggggattaatacactagcattcgggaaaagaataagtgaaacaaacaacacatcaacaagaagagttagttcctttaaggtcctgtccctagttctgatgtttaacagagaaaaaggaaagaatgtcagcgggtatgcctccagtaactcaagttttcaactcaatccaccactagcctcaagagagttaacaagggcacacccttggtccattccaagcatgctgcttagttcacagcgaccattggttggaagtcgagaccaaaatcagtatgtgtttgatcgagcatttgccacccaggtcaatgagcttccaatgccagaagagcatgtccccttttgtcatgattgtagagaacaaggacactatgcccttaattgtccatgggtatatgccaaagaagccccttcctttggtttagcagggcagacatcgctaaaccagcctcctcgcaccaagtcaagcttgcagcctagtgtacaaagaagagagcccattagagagaatccattgaatcccggaaaatgctttcctcctagcctttcgtaccacgtggggtcacgtactaagcaagccaaaggcaagaagagtaagaatcagaagagaaaagcaccgatgcgaactgaagaagaagtacgtaagatgactattaccagcaccgaatggcctccagcagggataactattcctagacgtcaaagaggaaataccttccgaggtgcacgacagttgacccagcacctcctaagccatggcggcagagtatctgatagtgaagggtcagatcaagtctcctcggattatgaagatgagtctctccgacatctcggcgaggaagagatggaatcaaaagcatgcccccgttgtggagaaattggacacgttgctagcatgtgtctcacactttgccctcattgtgaggaagaccatccaccaggtggatgtcccacccgcaaggtcacatgttttctatgcgaaggtacaaaccatgtgcccaaggattgccaactcagtgtgttgttgaccaagactgcagaaatccaacgaacaaccctacgattgtctcatcagctagtcagctccaacatcaacatcgacgatatcatccccagcaccaatgctcctcctgctgcacctgactctgcagtaaatcatagcaataataccttcaacaccaaccattctctgcaccgacggcctcagcaaagaattgtcgtcgatggaagaagttgtgtctctccccgacgagctgatctcgacgcatgacatgaagtgggtaacttgtatgaggttgactccaaagatatgaactatgcgaagttctggaactgaagccccatcttcaagtgccgcaacccagtcgaagtcagctatcttcttgctagcctcctcgaatctcggggacgagattcctgtaagggggggtggatttgtcacgtcaggggatcctctagagtcgacggcgtgcacaccaatgagatctcatnngcacgg

SEQ ID NO: 22900 - DNA, 1310 bp, Oryza sativa
  Clone ID: TF_OsC1713_5368
gcacgaggtctcgactcctcgtctcctgggccgccgccgccgccgccgccgagcagaggcgatctccacccgcgagcagcggcgccgtcgccggtgtgctgcttctcccgtcggaccctcgccgttcaagatgcctcgctatgatgaccgtgatcgctacgatgaccgttacggcggcaacacgaggctgtacgtaggtcgtctttcctcgcgcacccggacccgggaccttgaagaccttttcggcagatatgggagagtgcgatatgtggatatgaagcacgagtttgcatttgttgaatttagtgatgctcgggatgctgatgaggcaaggtacaacctggatggtcgggactttgatggaagccgcatgattgttgagtttgctaaaggggttccacgtggccctggaggatcacgtgaatatatgggcagaggaccaccacctggttctggccgctgctttaactgtgggattgatgggcactgggcccgtgactgcaaagctggagactggaaaaacagatgctatcggcgtggaagaagctactcaagatccccatcccctcgtcgtgggaggagccgtggtaggagctacagcaggagccgtagcaggagctacagccgctcccagtctccaaggagggatagccgtaatgaaaggagatcaaggagccctcgtgacagtcggagccctaggggaagcccccgtgacagtcgcagccctagggggagcccccgtgacagtcgcagccctaaggggagccctcgcgacacccagagccctaggggaagccctcgtgatagccgcagccctaggagaagtgcttcaccacccaacgggaggaaccgcagccctacccctaatgccagcaggagtcctgcaccaagggacagcaggagcccaatgagagctgacagccgtagccctgctgaccatgagcgccgtgacatgagtacagctgccaatggccggagcccaagccccagggattatgaagacaatggcaatcatcgggcctcgcctagaggaagcgcatccccttgaatgagaggaagcacatccccttaaatgagatgttaggggatgtatcagtcttaaagtttatgaatcaatttaaacctgttggagattttagtcatatctatgaacctgttgggatttgagtggatctgtatcctatttgttattgacgcctttcataagttgatagaccatgccatctgttggttgtactccgaactgcataaaatggaatttgcggcccaccgcggtttctggaacatatcggctattgcttgctcttgct

SEQ ID NO: 22901 - DNA, 577 bp, Oryza sativa
  Clone ID: TF_OsC81339_1
gcttttattgaatttgagacaaaggaggcttgtgagcgggcattcttcaagatggacaattgtttgattgatgatcgaagaatacatgttgactttagtcaaagtgtttcaaaactgtggggtcagttcagacaaagcaaaagaaatgcaaataaagatggatgcttcaagtgtggcgcccctgatcacatagccaaagactgtgaccagggcactgagcagaaaaacaaaggcccaagttatgtcctgaaagatgaaaacactcagcgtggtggaaataaccgtcgaagctatgatcttgtctttgatgaagatggtgaaaattatactgatcagcaagatcctggaagtactggccgaagaaagattcaaagaacagatgatcgcaaatcagggctgccacctcggggtgaccatgacaggattagccggagaggaactcacagtgatgagaatggtagagaaggtggtaaagaaggtgatagggaccgagggattcgtaagcacgaggactaccaccgttacaataaatctggtgaacggagctctagtagatacgatgatcgtggctacagca

SEQ ID NO: 22902 - DNA, 5638 bp, Oryza sativa
  Clone ID: TF_OsC11275_1
atggagggagtaccagctgctggagccaatgcttccagctcgccccaaccccgcccccggcgtcaccaccagcgccaccagcttccacgcctccactgccgccacgagagccgaaccacgcagacctaagccagagagatcgcgagagggagcctccgctccttcgcttagcggcggcggagaccatggcgagctccggggaggaagggcgggtggtggtggacctccgctcggcggcggagtcggcgggcggcggcggcgacgaggaaggcccacgccggcgccgctcgcacgagatcgagtccctttgcatgcgctgcggcgactacggcaccacgaggcttctgacgacgatggttccccgctaccgcgaggtggttatgatggcttgcgagtacccgcagagcggtgagaagaacaatgaggtgcaccttgcttgagagctccagccgaacggagattgtgaatcgattggagatctcgcgcgagctcaacgagatactgtaccgtcagcttgggaaatatgagtccgcaactattaagattccataattgaactgtgagttcccttcatacgctagccatggatccctttcaacatggcaagggagtattatgtggatctctcgacactcaccagcgaggatatcactgagcgtgtcaaggaggacatggacacatcgtctgctgacccgcctacacaccccaacccataatgtactcaatgttgtaacatgcagtgttttgcacgatagtagtagtgacaaaaaggggagcgatcctccaagcagtcgcaaggtggagctcgtcagcgacctcactcgtatcgcaagaaaagaggttttggtggcggcgtaggaggcgagaaagggaacaccaatcgggacacggcaccaaacagatgccacaattgtggccgtcttggccattgggccaaggactgtcgccagcccaagaaagaagccgctcacctagcccaaggtgatgacgatgacgacgtcctgctgctttcgcgggcatgcgagcttgaagatgacgatgccactttgttgatggcccacgcttgcgagctcaatgatggccccatcatcgcgccatctcctgtctccctcgttgaaccgcgagtgcaggtgagcctaggagccacggacgctgaggacaaggaggcgtggtaccttgacacaggagccaccaaccacatgacaggccgtggtgacgtctttgctgagctcgatcgaagcgtcaccggcaccgtcaaatttggagacagctccatcgtagacatcaagggtgccggtaacgtcatcttcaccggcaagaatggcgagcacaaggttctcagtggcgtctactacattccgcgcctcaagagctcaatcatcagcatcggtcagcttgatgaaagcgggacgcgtgtgctggtcgaggacggcatcatgcgtatctgggaccgccgccgccgccgccgtcttcttgccaagatcaagcggggacgaagccgtctatacgtcctccgcctcgaggttgctaggccgatttgcttggctacgcgacacgatgatgttgcctggcgctggcacgagcgcttcgggcacatccacttcggctcgctagagaagatgggccgacaagagctcgtgcgtggcctgcctcgactggagcatgtcgagcagctttgcgacacgtgtgtcatcaccaagcatcggcgcgctgcctttccaaaggcagccaagtaccgcgctcaggagccgctagatctcgtccatggcgacatctgtggccctatcacgccggcaacgccaggtggccggcgttacttcttgctgctggtcgacgatgccacacgatacatgtgggtggcgctcctagcagccaagagcaatgcacctgacgccatcaagagaattcagatggcagccgagactcactgtgggcgcaagctgtgtgtatttcgcacggacaacggcggcgagttcacgtcgcttgagttcgccacctactgcactgatgagggtatccaacgtcatttctccgcgccctacgccccacaacaaaatggcgtggtcgagcggcggaatcagacagtggtgtccatggcgcgcgcccttctcaaacagaggggaatgcctgcggagttttggggggaggctgtcagcacggctgtcttcctcctcaatcgtgcaccgtccaaaagcctcactggcaagacgccgtatgaagcttggcacggcaagaagccgatggtcagcttcctacgtaccttcgggtgcctggcgtacgtgaaggagctaaacgatgtgcgcaagctcgacgaccgcagcacacccggcgtcttcattggctatgaagaaggggtgaaggcatatcgtgtcctggatccaaggacacggcgtgtacgtctcgcccgtgatgtcatctttgacgagagccgcgggtgggactggacggcagcaagcggcacagatgctcgaccgagcagcgatttcgccatcgagtaccatgttgagaagaccactgggcatcctatccctagtgtggggggaggcgtggtgaccccatcagcatccccaacgccactacaagagacttcaccagcaacccctgccacaccagcaccaagtcctagcgttgccccaacagagttcgtgtcacctccctcacacgacgaggagaggatcgacgcggcgcactccaacacccctgtccgctaccgcacagtcgacaacttgatcggggagaatgccccggcaccagggattgcaaaacgggaactcgaggaggcgtctttgctcctcgctggacctggtgagcccatgctcgtttgcagagccggagggtgatgatgcatggcgagcagccatgcgtgaagagatggacgcggtgaatcgcaatgggatttgggagcttgttgatctcccacatggccatcgcccaattggactcaaatgggtctataaattgaagaagaacgaggccggaaaggtggtcaagcacaaagctcgtctcgtcgccaggggatttgtccagcaacctgggattgattttgacgaggtgtttgcgcccgtcgcgcgcatggagtcaattcgtctcctgcttgcggtcgccgcccaaaaagggtggcacgtccatcacatggacgtgaagtctgcctttctcaatggagatttggcagaggaggtgtatgtgaagcagccccctggttttgtcgtcgccggagaagaagacaaggtcctccgcctgcgcaaggctctttatggcctgcggcaggcgccaagagcctggaatgcgaagcttgattgtactctgaaggagctcggtttcgaccaaagcaagcatgagcacgccatgtaccgacgaaacaatggtggctctgctctactcgtcggggtctatgtagatgaccttgtgatcaccgggccatcgacaagagcaattgaacaattcaaggaagaaatgaaggcaaagtttcagatgagtgatcttggcttgctctctttctaccttggaattgaggtgaagcaaggagatgatggaatctccctgaaccaggggcgctatgctcagcgcattgtggagtcggctggcctcaaggactgcaacccttgcgccactccaatggaagaaaggctcaagctgagccgtgatagcacggcacctcccgttgatgcaacaaaatatcgacggctggttggtagccttcgctatcttgtgcacacacggccagacctagcatttgctgttgggttcgtgagtcgcttcatggagcggccaactgaggagcacatggtggccgtgaagcgcattctacgctatgtcgctggcacgatggagtacggacttcattacaaaagggagaaagaggagcagcggctgattggttacagcgacagcgacctcgccggcgacattgatacaaggagaagcacaagtggcatgttgtttttccttggttcaagcttggtgagttggcaatccatcaagcagagagtggtggctttatcttcctgtgaagcagaatatgttgcagccaccaatgctgccacacaaggaatctggttggctcgattgctcggcgaacttcttgggaagcaacctaaagcgatcgagctaaaggtggacagcaagtctgccttggcgctggcaaagaaccctgtcttccatgagcgcagcaagcatattgatttgcgctatcacttcatcagaagctgcttggaggaaggaagcatcagcgccagcttcatcaccaccatggaccagctcgctgacattctaacgaaggcattggggcgagttcgattccatgagcttgttgcaaggattggagtgatactgaaccgtcaggttgtgaaatctgattcagcaactattaagattccagaactggactttgagatccctccagaagctcaacgtggatcactttcaacagtggaagggattattatgcgagctgtggatgagctgcaggcacttcaagatgaaagaaagaaagtggatcctcaaaaggccgaagctattgataaatttttagcaaaattgagatctcttggattaggagaagctgctttcacctttgttcttgatgatcctgctggaaatagcttcattgaaaaccagaatgcaccttcatcagatcctttgttatctgtgagattctatgaaaggatgcgtgagcaacaggcagcacttggttttcttgttgaaccatccacagaagaacctggggatcagcctgttaatcatgcttcaactgtggaagggaactctgaggtgttgcaggagccccacggttcggttggagctgttgcaggtcgccgtgctatagctcaaggaaaccctgatgaagttgctgcagcgctgtgcagatattcagcaccagaagagtgtctggtctttgacctttggttagaaatcccatattttcgtgaggttattgttatggcaacaacatgcgacatgtgcggctatcgcaactcagagttgaagcctggtggtgaaatcccagccaaaggaaagaaaattacactacgtgtgcagaacggaaaagatcttacacgtgatgtcataaagtcagattcagctggcgtaaaagtacctgaactcgagttggagctagcaagtggaacattgggtggtattgttacaacagttgaaggtttaattgtgaaaatatgcgaggctctgcagagagtgcatggattccatttgggtgatagcacactggaatggaaaaagaagaaatgggaggatttcaacgatagattatccaagcttctaagtttacaagagccttggactttaattatcgatgatggattggcagcttcatttgttgctccagctaccgattctttagaagatgacaaccagctaaccattgaggagtatgtgaggagctgggagcagaatgaggagcttggcttgaatgacatggacacatcgtctgctgacgccgcctacaacaccaccaacccataatgtactcaatgttgtaacatgtgatattatcaaatatacttattgtgctccatgttgtagtaagttgcgatatttctcattttaaatcctcaagttttgtgttagccatagcttttgtttatgagacgatcgaagatattcagttgaccaaatttgcttt

SEQ ID NO: 22903 - DNA, 4602 bp, Oryza sativa
  Clone ID: TF_OsC11275_2
atggagggagtaccagctgctggagccaatgcttccaggtcgccacaacaccgcggccgccatcactcgttatcgccaacaccacggcgaggacgaggtcgaggcgctgctgttcgagaggttgttgtgcagcggactgtcagggaggttggcggcgctgctgctttccccaccctcacgcgaaccaactacaccgagtggtcgctgctgatgaaggtgatgctgcaagcccgtggcctttgggacgcggtggagcatggtgaatgcgatgagcaagaagacaggatggcaatggaggccatcctacgcgctgtccccagcgagatgatctcgctgctcgccaccaaggactccgcgaaggacgcctgggatgccatcaaagtgatgcgcgtcggcgtggaccgcgtgaggaaggcgaaggcgcaacagctgcaccgggagtatgaatccatctcgttccatgatggtgaatcgatcgacgacttcgccctacggctcacaagcctagtgtctcagcttgggacattaggagaacgaatcgaggagcagaacgtcatcgagaagttcttgcgcgtcgtcccagagcgattttcccaaatcgctgtgtcgattgagaccctgttggatctctcgacactcaccatcgaggacgtcactgggcgtctcaaggtggcggaggaacggcgaccagctccaacgtcgacgactactccagccggaggccagcttctcctcacggaggagcagtggctcgcacggcagaaggagcgacaaaaaggggagcgatcctccaagcagtcgcaaggtggagctcgtcagcgacctcgctcccatcgcaagaaaagaggttttggtggcggcgtaggaggcgagaaagggaacaccaatcgggacacggcaccaaacagatgccacaattgtggccgtcttggccattgggccaaggactgtcgccagcccaagaaagaagccgctcacctagcccaaggtgatgacgatgacgacgtcctgctgctttcgcgggcatgcgagcttgaagatgacgatgccactttgttgatggcccacgcttgcgagctcaatgatggccccatcatcgcgccatctcctgtctccctcgttgaaccgcgagtgcaggtgagcctaggagccacggacgctgaggacaaggaggcgtggtaccttgacacaggagccaccaaccacatgacgggccgtggtgacgtctttgctgagctcgatcgaagcatcaccggcaccgtcaaatttggagacagctccatcgtagacatcaagggtgccggtaacgtcatcttcaccggcaagaatggcgagcacaaggttctcagtggcgtctactacattccgcgcctcaagagctcaatcatcagcatcggtcagcttgatgaaagcgggacgcgtgtgctggtcgaggacggcatcatgcgtatctgggaccgccgccgccgccgccgtcttcttgccaagatcaagcggggacgaagccgtctatacgtcctccgcctcgaggttgctaggccgatttgcttggctacgcgacacgatgatgttgcctggcgctggcacgagcgcttcgggcacatccacttcggctcgctagagaagatgggccgacaagagctcgtgcgtggcctgcctcgactggagcatgtcgagcagctttgcgacacgtgtgtcatcaccaagcatcggcgcgctgcctttccaaaggcagccaagtaccgcgctcaggagccgctagatctcgtccatggcgacatctgtggccctatcacgccggcaacgccaagtggccggcgttacttcttgctgctggtcgacgatgccacacgatacatgtgggtggcgctcctagcagccaagagcaatgcacctgacgccatcaagaaaattcagatggcagccgagactcactgtgggcgcaagctgtgtgtatttcgcacggacaacggcggcgagttcacgtcgcttgagttcgccacctactgcactgatgagggtatccaacgtcatttctccgcgccctacgccccacaacaaaatggcgtggtcgagcggcggaatcagacagtggtgtccatggcgcgcgcccttctcaaacagaggggaatgcctgcggagttttggggggaggctgtcagcacggctgtcttcctcctcaatcgtgcaccaaccaaaagcctcactggcaagacgccgtatgaagcttggcacggcaagaagccgatggtcagcttcctacgtaccttcgggtgcctggcgtacgtgaaggagctaaacgatgtgcgcaagctcgacgaccgcagcacacccggcgtcttcattggctatgaagaaggggtgaaggcatatcgtgtcctggatccaaggacacggcgtgtacgtctcgcccgtgatgtcatctttgacgagagccgtgggtgggactggacggcagcaagcggcatagatgctcgaccgagcagcgatttcgccatcgagtaccatgttgagaagaccactgggcatcctatccctagtgtggggggaggcgtggtgaccccatcagcatccccaacgccactacaagagacttcaccagcaacccctgccacaccagcaccaagtcctagcgttgccccaacagagttcgtgtcacctccctcacacgacgaggagaggatcgacgcggcgcactccaacacccctgtccgctaccgcacagttgacaacttgatcggggagaatgccccggcaccagggattgcaaaacgggaactcgaggaggcgtctttgctcctcgctggacctggtgagccatgctcgtttgcagaggcggagggtgatgatgcatggcgagcagccatgcgtgaagagatggacgcggtgaatcgcaatgggatttgggagcttgttgatctcccacatggccatcgcccaattggactcaaatgggtctataaattgaagaagaacgaggccggaaaggtggtcaagcacaaagctcgtctcgtcgccaggggatttgtccagcaacctgggattgattttgacgaggtgtttgcgcccgtcgcgcgcatggagtcaattcgtctcctgcttgcggtcgccgcccaaaaagggtggcacgtccatcacatggacgtgaagtctgcctttctcaatggagatttggcagaggaggtgtatgtgaagcagccccctggttttgtcgtcgccggagaagaagacaaggtcctccgcctgcgcaaggctctttatggcctgcggcaggcgccaagagcctggaatgcgaagcttgattgtactctgaaggagctcggtttcgaccaaagcaagcatgagcacgccatgtaccgacgaaacaatggtggctctgctctactcgtcggggtctatgtagatgaccttgtgatcaccgggccatcgacaagagcaattgaacaattcaaggaagaaatgaaggcaaagtttcagatgagtgatcttggcttgctctctttctaccttggaattgaggtgaagcaaggagatgatggaatctccctgaaccaggggcgctatgctcagcgcattgtggagtcggctggcctcaaggactgcaacccttgcgccactccaatggaagaaaggctcaagctgagccgtgatagcacggcacctcccgttgatgcaacaaaatatcgacggctggttggtagccttcgctatcttgtgcacacacggccagacctagcatttgctgttgggttcgtgagtcgcttcatggagcggccaactgaggagcacatggtggccgtgaagcgcattctacgctatgtcgctggcacgatggagtacggacttcattacaaaagggagaaagaggagcagcggctgattggttacagcgacagcgacctcgccggcgacattgatacaaggagaagcacaagtggcatgttgtttttccttggttcaagcttggtgagttggcaatccatcaagcagagagtggtggctttatcttcctgtgaagcagaatatgttgcagccaccaatgctgccacacaaggaatctggttggctcgattgctcggcgaacttcttgggaagcaacctaaagcgatcgagctaaaggtggacagcaagtctgccttggcgctggcaaagaaccctgtcttccatgagcgcagcaagcatattgatttgcgctatcacttcatcagaagctgcttggaggaaggaagcatcagcgccagcttcatcaccaccatggaccagctcgctgacattctaacgaaggcattggggcgagttcgattccatgagcttgttgcaaggattggagtggtcaagattagttcagaatagaacagcatggactaaggggagattgttagtataatccttgttctagttagttatttggtttccttagacagtaagctataggctgcagctgttactcggttgtcagacagctgctattagtggtagtagtcaattttgattttacctctagcaggaacatagcagcagcagtattgtcggttcagcaaccgacctatccatgtactataaatatagctattgtgctaacataagtaagcttttcagctc

SEQ ID NO: 22904 - DNA, 1917 bp, Oryza sativa; identical to SEQ ID NO: 15365
  Clone ID: TF_OsC1713_4371

SEQ ID NO: 22905 - DNA, 3249 bp, Oryza sativa; identical to SEQ ID NO: 15364
  Clone ID: TF_OsC1713_4499

SEQ ID NO: 22906 - DNA, 2775 bp, Oryza sativa
  Clone ID: TF_OsC1713_4966
cacaagagacaagagttcagtgtttctgatctcattggctctttgggtgttgaggagaaggcgagggcaaaggacgtccggggcaaaaaggttgagggaggttctagtgccaatatggtacagaagaagaaccctcatgcatcccacgataacaagaaagttaagcctgatgtcaaatccaaggctacaaccaattttaagaagaaagacaagggaaaggcaaaggtagactgctttgtgtgtgacaagtctgggcattgggccaaggactgtcctgagcgcaaagacagaaagtctgccaacatggtcattagcgagggcggaggaacatcggggtacggtcgggagaggttcctccttgttgatgggaaacgggtcgcttgcggctgttcatggtgttggtacggtcgatctgaagtttacttcgggaaagaccgtgcagctgaagaacgtgcagcatgtcccttcaataaagaagaatctagttccaagtgccatacttgtgttcaatcgaaacaacctcgcaagcctcacaaggcatctgaggtgaggaatttggcacctctagaacttgttcattccgatttgtgcgaaatgaacggcgtgttgactaaagggggaaagaaatatttcatgacactgatagatgattgcactagattttgctatgtgtatctattgaaaactaaggatgaggcattgcatttctttaaaatctataaagctgaggtagaaaaccaacttgaaaggaaaatcaaacggttgaggtctgatagaggtggggagtatttttccaatgagtttgcatccttttgcgaagagtttggaattattcatgagatgacgcctccctattcaccccaatcaaatggggtggccgaaagaaagaaccgtactctaactgagatggtgaatgccatgttagacactgcggggctttccaaggaatggtggggtgaggcagttttgactgcgtgtcatgtcctgaataaaattccaatgaagcataaggaaataacaccattcgaggaatgggaaaggaagaaattaaatctctcatacctacgaacatggggctgtttggccaagcactttgcaccgatagaacacaatgatcaaacgcctgaggaaaatcctgagaaggacaacattgtagatactcgcaagagtaagagacaaagggttgcaaaatcctttggagatgactacattgtatacctcgtggatgacaccccaagaaccatagaagaggcatattcatctcctgacgctgactactggaaggaagcagtacgcagtgaaatggactcgattatgtctaatgatacttgggaagtcgttgagcgtccatatgggtgcaagcccgtaggatgcaaatgggttttcaagaaaaagcttaagcctgatggtacaatcgaaaagtacaaggcaaggcttgtggccaagggttatacccaaaaggaaggcgaggacttcttcgacacatactcactagttgctcgcttgaccacgattcgagtactacttgctctggcagcctctcatggtcttctcgtccatcagatggacgttaagacagctttcctaaacggagagctggaggaggagatctatatggatcaaccagacgggtatgtactagaaggtcaggagggaatggtgtgtaaactattgaaatccttgtatggcctcaagcaagcacctaagcaatggcatgagaagtttgacaccacacttacatctgcaggctttgttgtgaacgaagctgacaaatgtgtatactatcgctatggtgggggagaaggggtgatcttgtgcttatatgtcgatgacatactgatctttgggaccagccttaatgtgattgaggaggtcaaagactatctgtccaagagttttgaaatgaaagatttgggagaggctgatgttattcttaacatcaaactacaaagaggagatgagggtgggattacacttgtgcaatcccactatgtggacaaggttttgagtcgctttggatatagtgactgcaagccagctcctactccctatgatcccagcgtgctattaaggaaaaaccgaagaatagcaagggatcagctgagatactctcaaatcattggttcattgatgtacttggctagcgcaacgaggcctgacatctcatttgctgtaagcaagctgagccggtttgtctcaaatccgggagatgatcattggcaggctctggaaagagtaatgcgctatctaaagggtactatgagctatggaattcactataccgggtatccaaaagtactagaagggtatagtgactcaaactggatatctgatgctgatgagataaaagccacaagtggatatgtgttcacacttggaggtggcgatgtttcctggaagtcttgtaagcagaccatcttaacgaggtcaacaatggaagcagaacttacagcactagatactgcgacagttgaggccgagtggcttcgtgaactcctgatggatttgccggtggttgaaaaaccagtgccagctatcctaatgaactgcgataatcaaacaatgattattaaagtgaacagttcaaaggacaacatgaagtcatctagacacatcaagagaagactgaaatctgtcagaaagcagaaaaactccggagtgatagcattggactatgtccaaacggctagaaatctggcagatcagtttaccaaggggctaccacgtaatgtgatagacagtgcatcgagggaaatgggcttgatacccacctaa

SEQ ID NO: 22907 - DNA, 3156 bp, Oryza sativa; identical to SEQ ID NO: 15337
  Clone ID: TF_OsC1713_3871

SEQ ID NO: 22908 - DNA, 1894 bp, Oryza sativa
  Clone ID: TF_OsC359_6897
atgtcatggcacagggccggtgtcctgctgctagggggctcaatcctgcctgcctgtcccgggggttccggccgtaggtggggttgggtcggtactcttgtttatggctaggatgggttgggaactatgtcacgtcttccgtctgtataccgtggtgatgtttaacagagaaaaaggaaagaatgtcagcgggtatgcctcaagtaactcaagttttcaactcaatccaccactggcctcaagagagttaaccagggcacacccttggtccattccaagcatgccgcttagttcacagctaccattggttggaagtcaagaccaaaatcagtatgtgtttgatcgagcatttgccacccaggtcaatgagcttccaatgccagaagaggatgtccccttttgtcacgattgtagagaacaaggacactatgccctgaattgtccatgggtatatgccaaagaagccccttcctttggtttagcagggcagacatcactaaaccagcctcctcacaccaagacaagcttgcagcctagtgtgcaaagtagagagcccaatggagagaatccatggaatcccgggaattgctttcctcctagcctttcgtaccacgtggggtcacgtactaagcaagccaaaggcaagaagagtaagaatcagaagagaaaagcgccgatgcgaactgaagaagaagtacgtaagatggctattagcagcaccgaatggccttccgcagggataactattcctagacgtcaaagaggaaataccttccgaggtgcacgacagttgacccagcaccttctaagccatggtggcagagtatctgatagtgaagggtcagatcaagtctcctcggatgatgaagatgagtctccccgacatctcggtgaggaagagatggaatcaaaagcatgcacccgttgtggagaaattggacacgttgctagcatgtgtctcacactctgcgcttattgtgaagaagaccatccaccaggggagtgtcccacccgcaaggtcacatgttttgtgtgcgaaggtacaaaccatgtgcccaaggattgccaactcagtgtgttgttgaccaagaccgcagaaatccaacgaacgaccctacgattgtctcgtcagctagtcagctccaacagcaacatcgacgatatcatccacaacaccaatgctcctcctgctccacctaactctgcaataaatcatagcaataatatctttagcaccaaccattctctgcaccgacagcctcagcaaagaattgtcgtcgatggaagaagttgtgtctctccccgacgacatgaagttgataacttgtgttaggttgacgccgaagatatgaatcgtgagaagttctggatctgaagccccatcatcaagtgccacaacccagtcgaagtcagctaaaggttcaaccagagataagtcaggtgaagagaagattccatccgcaacaggagatcgagccaagcagtccagagtggaggagttcctccccgtgcttccctccttcgtttccgccgctcgccgccctctctccccgtcggaatcgagcccgcgccgtcgtcctctctctccgccgtcgccgccgagctccggttcgccgccgtcgtcgccccggacttcctcccgtctcggcgtcacctccatcggcttcgccgcgtcgtcgtcgacctcgtccgctcctccgtttcgcccgccgaccgccggagcaccgtcgtcctcgccgtcccgaaccgcgccgccgctttcctccactccggtcgtcgtttccgccgtcctcgtcgtcccggggtgagccgtggaccgcccctttcgcttccctctcttctccgctctctcgggcgccgctccgccgcgccggtggtcgccggcggtgaccat

SEQ ID NO: 22909 - DNA, 4301 bp, Oryza sativa
  Clone ID: TF_OsC1713_4599
atgtctggagttgccgccgccactgctggcggaggtggtacgccgccgccgccgacaggagctggatctggatctggatccggagctggtgcgccaggaggtgccgtgaacgacaacaacaacggaggcaattctgtctcaccatccagcggagggccattctcggggtataatcttctcctcctgctactgttgttagcgctatcgctatactatgtgcgctatgttgttgttcctgttctacatgatgcctctagcatattatcgcgttactggtatgttcctgtttctgacattcatgatgcgcatagtattctactggttatgttaagatcaccctacactgcttatgccatgatcattgtttcaatttcttggattaaaatatgccgattaatgactatatttccaacaatccaaaaacctgataggtctttttcggtagttggctttgctgctgcactgaaaccacatgcttttgatggttcaaactataagagatggaaagcacgtgcactattgtggttgacagcgatgcagtgcttctatgtttcacggggcaaacgaagtgaaccacctctttctcctgaggaagaggccaagttcgaggcttcggattgcctgttccatggagcattgatcagtgtacttgctgacaacatagtggacgtgtacatgcacatgccttctgggaaggacatgtgggatgcacttgaggccaagttcggagtctctgacgccggcagtgagctgtatgtcatggagcagttctatgactacaagatggtcgatgaccgttctgtagtagaacaagctcatgagattcagatgctggctaaggaacttgagaacaacaactgtgagttgccggacaagtttgtggcgggtggcattattgccaaactaccacattcttggtcggactttgccacttctctaaagcacaagagacaagagttcagtgttcctgatctcattggctctttggttgttgaggagaaggcgagggcaaaggacgtccggggcaaaaaggttgagggaggttctagtgccaatatggtacagaagaagaaccctcatgcatcccacaacaacaagaaagtcaagcctgatgtcaaacccaaggctgcaaccaattttaagaagaagggcaagggaaaggcaaagggagactgctttgtgtgtggcaagtctgggcattaggccaaggactgtcctgagcgcaaagacaggaagtctgccaacatgatcattagcgagggcggaggaacatcagggtacggtaaaatattacctacagttctctctgtttttcattcacctgattggtgggtggatactggtgctaatattcatgtatgtgctgacatttctctgttttcttcttatcaggtcgggagaggttcctccttgttgatgggaaacgggtcgcttgcggctgttcatggtgttggtacggtcgatctgaagtttacttcgggaaagaccgtgcagctgaagaacgtgcagcatgtcccttcaataaagaagaatctagttagcggctctctattgtgtagagaaggttttagacttgtgtttgagtccaataaatgtgtcgtatctaaatatgggacttttgttggaaaaggttatgacagctgaggcttgttccgcttttctttgaatgacatgtgtaataatcataatgctgtgaaccacattagtgagaatgatgagtctaatgtgtggcattcgcgactctgtcatgtgaatttcggttgtatgacgcgcttagctaacatgagtttaattccaaaattcactttggtcaaaggttccaagtgccatacttgtgttcaatcgaaacaacctcgcaagcctcacaaggcatctgaggcgaggaatttggcacctctagaacttgttcattccgatttgtgcgaaatgaacggcgtgttgactaaagggggaaagaaatatttcatgacactgatagatgattgcactagattttgctatgtgtatctattgaaaacaaaggatgaggcattgcattactttaaaatctataaagctgaggtagaaaaccaacttgaaaggaaaatcaaacggttgaggtctgatagaggtggggagtatttttctattgagtttgcatccttttgcgaagagtttggaatttttcatgagatgacgccaccctattcaccccaatcaaatggggtggccgaaagaaagaaccgtactctaactgagatggtgaatgcaatgttagacactgcggggctttccaaggaatggtggggtgaggcagttttgactgcgtgtcatgtcctgaataaaattccaatgaagcataaggaagtaacaccattcgaggaatgggaaaggaagaaattaaatctctcatacctacgaacatggggctgtttggccaaggtaaatgtacctatagccaaaaagcggaaacttggaccaaaaactgttgattgtgtgtttcttggttatgctatccacagtgtgggttatagattcttaatagtaaactctggagtacccgacatgcatgttggtacaattcttgagttcagagatgctacattctttgagaatgaatttcctataaaatatacacctagcacttctagtaaagaaactgtcatgccccatgagcactttgcaccgatagaacacagtgatcaaacgcctgaggaaaatcctgaggaggacaacattgtagatactcgcaagagtaagaaacaaagggttgcaaaatcctttggagatgactacattgtatacctcgtggatgacaccccaagaaccatagaagaggcatattcatctcctgacgctgactactggaaggaagcagtacgcagtgaaatggactcgattatgtctaatggtacttgggaagtcgttgagcgtccatatgggtgcaagcccgtaggatgcaaatgggttttcaagaaaaagcttaggcctgatggtacaatcgaaaagtacaaggcaaggcttgtggccaagggttatacccaaaaggaaggcgaggacttcttcgacacatactcaccagttgctcgcttgaccacgattcgagtattacttgctctagcagcctctcatggtcttctcgtccatcagatggacgttaagacagctttcttaaatggagagctggaggaggagatctatatggatcaaccagacgggtatgtactagaaggtcaggagggaatggtgtgtaaactattgaaatccttgtatggcctcaagcaagcacctaagcaatggcatgagaagtttgacaccacgcttacatctgcaggctttgttgtgaacgaagctgacaaatgtgtatactatcgctatggtgggggagaaggggtgatcttgtgcttatatgtcgatgacatactgatctttgggaccagccttaatgtgattgaggaggtcaaagactatctgtccaagagttttgaaatgaaggatttgggagaggttgatgttattcttaacatcaaactacaaagaggagatgagggtgggattacacttgtgcaatcccactatgtggacaaggttttgactcctactccttatgatcccagcgtgctattaaggaaaaaccgaagaatagcaagggatcaactgagatactctcaaatcattggttcattgatgtacttggctagcgtaacgaggcctgacatctcatttgctgtaagcaagctgagccggtttgtctcaaatccgggagatgatcattggcaggctctggaaagagtaatgcgctatctaaagggcactatgagctatggaattcactataccgggtacccaaaagtactagaagggtatagtgactcaaactggatatctgatgctgatgagataaaagccacaagtggatatgtgttcacacttggaggtggcgctgtttcctggaagtcttgcaagcagactatcttaacgaggtcaacaatggaagcagaacttacagcactagatactgcgacagttgaggccgagtggcttcgtgaactcctgatggatttgccagtggttgaaaaaccaatgccagctatcctaatgaactgcgataatcaaacagtgattattaaagtgaacagttcaaaggacaacatgaagtcatctagacacatcaagagaagactgaaatctgtcagaaaaactccggagtgatagcattggactatgtccaaacggctagaaatctggcagatcagtttaccaggaggctaccacgtaatgtgatagacagtgcatcgagggaaatgggcttgatacccacc

SEQ ID NO: 22910 - DNA, 1413 bp, Oryza sativa; identical to SEQ ID NO: 15350
  Clone ID: TF_OsC359_7479

SEQ ID NO: 22911 - DNA, 2718 bp, Oryza sativa
  Clone ID: TF_OsC359_8167
atgcgaactgaagaagaagtacgtaagatgactattaccagcaccgaatggcctccagctgggataactattcctagacgtcaaagaggaaatactttccgaggtgcacgacagttgacccagcacctcctaagccatgacggcagagtatctgatagtgaagggtcagatcaagtctcctcggattatgaagatgagtctctccgacatctcggcgaggaagagatggaatcaaaagcatgcccccgttgtggggaaattggacacattgctagcatgtgtctcacactctgcactcattgtgaagaagaccatccaccaggggagtgtctcacccgcaaggtcacatgttttctgtgcgaaggtacaaaccatgtgcccaaggattgccaactcagtgtgttgttgaccaagaccgtagaaatccaacgaacaaccctacgattgtctcatcagctagtcagctccaacagcaacatcgacgatatcatccacagcaccaatgctcctcctgctgcacctgactctgcagtaaatcatagcgataataccttcagcaccaaccattctctgcaccgacagcctcagcaaagaattgtcgtcgatggaagaagttgtgtctctccccgaccaggcaaagaagtaggtcgaaaggtgattgataagagaaatttgtatgaggttgactccaaagatacgagttataagaagttctggaactgaagccccatcttccaatgccgcatcccagtcgaagtcagctatcttcttgctagcctcctcgaatctcggggacgagattcttgtaaggggggtggatttgtcacgtcctgataaattcatcccgaaataaaaatcattccctaaaactccccgccgtcgtcccctctctcccgtgccgccggccgtcttcagccgcccctgccgccgcgttagcacgccggccggccgtgccgtcgcctcctccagcgtcgcagccgcctcctcttcgccggcctgcccctctgtttcccgcgaagacctccggccgtgcctcccccgccggcccccgtggcgttgccgcccctgttccgcctccggccgcctctgccgcgtcccctgtgcgccggccgacgtcgcccccccctctcccggccccggcccgccctcctcttcccccggccccgccccggcgtcgcccgtctttcgtcggctcgccgttgcgcgccccgcctctccctcggtctcgtcggccccccctccggccgccccttttgccgtgcccgtgcgccggccgcccctccgcgctccatcgtcgtcgtctccgttcatcctcgttgacgactcctccggtcggtcgttagtcctcgccggctcgtcgtctcgctgcgccgccaccctcgtcgtcatcgtaccggcgtgttccgcgccgtcctcgtctctgtgcagctgctgccgtctgccctcatcacctcctcgccggttcctgtcgtcgtcctctcgtcattcctggttgtcgtggcgttcgtccctccgtcaagccgttctcgtccgtcgtccgcgtccgtcaagtgtgccgctgcagccccgtcgtcgtcttcgtccttgcctccgcgtcgccaagcgttgcgccggccgcgtctcgctcgtgtaccggtgtcggtagtcgttcgcttgtgcgtgtggtgaccgtgttagtgtgcccgctcggtagccgcgtggtttccacgtgtgcagcccgtgtggtgtctagtggagtccgtttgtcggccactcgcctcggttgacacacgggatctgcttctgtcgaccagtggaccatctctgtgtactcggttttctttttatgtattgttattgcttctttataggcttgtagctttgcttgtgtgcttcgcgtagtcttcgtcgttccggaggttcccgaagcgtggtttgcggtcgtcgccgaaggttcggaaggccgttatctctctccccctctattcaaaacccccaaaatggttttaggctgggctcgaggtgcgtggttgggttttgttagtcgtacctcgagtactataaggattaagctcgggcctctgttgcaaagcactaccgtacttccacatgtctagtgggtaaggcttagtttgtggcttagtctggttataaacaaaagtacacggatggagatggacgaagtcgggggtcgatggacatctctaggacaaatgaaggctacacgagctgtggcccggtagtcgagatgtcatggcacagggctggtgtcctgctgctaggggctcggtcctacctacctgtctcggaggttccggccgtaggcggggctgggtcggtactcttgtctatggctaggatgggttcggaactatgtcacgtctttcgtccgtataccgtggtggtatgtggcacgtggttacatgtgaggaagatgtgtcttgtggcacttgtgggtgtgtcttgttgagtacggtggttgtactcagtcttgctcaatttttcccaaacccagaagaggagttcctggaagatgaaggcttcggtgtctagctcgtgcctgccgtcaagtgtctgtggtcgtcgccctagtcttccgctgtttctcgtttgtctttgtgtgtgctgggccttgcctcctgggacaaggattaatgcacgcacgtaaggaacgcccgttgggttatttccggtcgtgacaagttggtatttagcaagtgtgagttctggttgtccgaa

SEQ ID NO: 22912 - DNA, 4807 bp, Oryza sativa
  Clone ID: TF_OsC359_8335
aacagaatctcgtcctcgagattcggaagaactggcgaacagatgcggatgagctgacttcaattcatcttctcgttcccaagttgattcttcttccgaatgattactccattggactttacaaaaacggataactggattcctggttcttctctcatctatttccaaaatacggattggtctctcaacataggtcagatcctcttggacttctatttgttcaagattagcttcttcgataggtacccttaaacactttttcaactttgacacatggatcacattatgaacacctgccaaggattgaggtaactccaactgataagcaacctcacctctttgactgacaatcttataaggtcccacgaaacgtggtgccaattttcctttggtgtggaaacgatgaacccctcggagaggcgtgacacgaaggtacacatgatctccttcctcaaaacttaaatcactgcggcgattgtcggcataactcttatgacgagactgagctatacgcaatctttcttgaatgatctttaccttctcttctgcttccctcagaatatcagtcccgaaaacttgacgttctcccgtttgatcccacaaaagcggagtgcggcacttccgaccatacaacgcttcataaggagccatttgaagactagcttgataactgttgttgtacgagaattccgcgtaaggcagattcttatcccaacttccaccgaagtctaaagcacaagctcttaacatgtcttccaaaatctgatttaccctttcggtttgtccgtctatctgcggatgataagcggtactgaagttcaacttggaacccatctcttcctgaagcttcttccaaaactttgaagtaaactggctacctcgatcggatactattttcttaggaacgccatgcaaacacacaatccttgccatatacaattctgccaaacggcttccgaaatatgttgtcctcaccgggatgaaatgagccactttggtaagtctgtcgactatcacccaaatagagtcatggcccgatgacgttctgggtagaccagtgatgaaatccataccgatttcctcccacttccattctggtatcttcaaaggctgcaacaaacctgcgggtttctgatgttctgccttgactcgctgacaaacatcacacacagctacatactctgctatctcacacttcatacttcatacttgcccaccaaaatttttccttgagatcttggtacatcttggtactaccagggtaaatggagtataaagtgtcgtgagcttccttcagaattgcatctttcaactccttgttctctgggacacagattctctcacccaaccatacggttccttgctcatcttccaaatacccgatagcctttcctcttctcatattcttcttgatctcttgaatatcaggatcattgatttgagcttctctaacctggtcaatgagagtgggcttcgcttctaaagttgcaacaaaacctctactgacaattcccaaattcagtctttcaaattccttgcataattcccatggcaactgttgtccttccgtagcattgcaatagcctttcctgctgagagcatctgctacaacattagcctttccgtggtgattatgaattcccatgtcataatccttaatcaattccaaccatctccgttgtctcatgttcagattcggctgggtaaagatatacttcaaactcttgtgatccgtgtacacctctgtacgagtaccgaaaagataatgacgccaaatcttcaacgcatgaaccactgcagctaactcaagatcatgagtagggtagttctcatgcggacgtaactgacaagatgcataggaaaccaccttcccatcttgcatcagaacacaacctaacccaagcttagatgcgtcgcagtacacttggaaacccttcttaggatcaggcaaaatcaaaatgggtgctgatattaagcgacttttcagctcttgaaaactctgctcacattcttctgaccacttgtactttacgtctttctgaagcagtcgtgtcatgggcttaggaatcttggagaaattctctataaacctccggtaatagcctgcaagacccaggaaactacgaatctctgagactgtctttggttgtttccagttggttacggattccacattactaggatcaatggcaactcctccggctgagatgacgtgaccaagaaactttacttcggacaaccaaaattcacatttgctaaacttggcatacaattgatgctctcgtagcttctccaatgcaaggcgaagatgttcttcatgctcttctttggttcgggagtagataagaatgtcatcaataaagactaccacgaacttgtctaggtattccataaacaccttattcatcaagttcatgaagaaagcgggggcattggtaagtccaacagacataacagtacattcaaacaacccataccgagtggtaaaagccgtcttaggtatatcttcctctttgatcctcaactggtgataccttgatcgaagatcgatcttggagaaaacggtggcatctttaagctgatcaaacaagtcatcaattctaggcagagggtacttattcttgatagtcacatcatttagtgcacgatagtccacacacatcctctgggtatgatctttcttttccacaaaaatgaccggagctccccatggagacgagcttggtctgatgtatcctttctgaagcaaatcatctacttgcctcttgacctctgctaattcgttggctgccattctataaggtctcttatggattggagttgttcctggtaccagatctattctgaattctatatctctcttgggcggcataccaggtaaatcatccaggaacacatctgggtactcccgtactatgggaatctcttccaaagttatttggttcagacttgaccttaaaggcccgtaaggcaatgaatgaacagttacaacttgaccgtcattgctggtgagagttacttttctattggtacagtctatcacaccattatatttggctaaccagtccatccctaggatgacatcaaggtctttggattctaacagaataaggttggccagaaatggtacaccctgaatctctattctgacggaggggctacgttgcgatgagagtgcttggttactcggggtactaaccatcaaaggacgtctaagatcttctacctccatcccatgatttcccgcaaaactcatagataaaaaggaatgtgtagcaccagaatcgaaaagcactgttgcaggaactgagttaacagggaacgtacccaaaatcacatctggagcactttgagcttctgcagcagccacatgattgacatgagcctttgacgctggtgcggaggagttgttctgggcagggacaatcttcacgcggcggggcttcggacacttgtcagagtaatgtcctggttcaccacaattaaagcacactcctggcttgttcccttgctccctcttggcaggctgatgctgagttggagttgcaacaggacgtggagcttggctgcgattgttgttgctagcattgttgttgaataactgacgctgcggacgaacaacagacgaagaccctccttgtgacactgcctgaggtcccatagcaagacgcggcctctgactattcccctgctgagctttgaagtgagcaatccggtgtttcttcttctccatacggttgtacttgtcctcctggcgaatagccttatccaccaacttctggaaatcatgataatccccagtcattagtgggtaagaaagctcatcattcagtccttccaagaatttctcttggcgctcttcatcggtgcacacatcttccggagtatagcgaggcagacgattgaactcatccaagtatttagtgacaaagcgagatccctgagtgagcaccctgaactccttcttgagagacacaactcctgagggtatgtgcgttttccggaaagcagcggtgaactcaagccaagtgattggttcagcagtagtcctgttgaaacggaagtgatcccaccactcagaggcagggccatgaaggtgatgtgaagcaaaggagactttctcttgatcagtgcagttgacaaccggaggatccgctggggctggggcagcttctttttccaccacacgaaccttaggcgccaactggtagcgagggacaaaaagagctcccttccttgcggtaagacgaaccctggccttttgtggtggtgcttctcccttcaacgcggctagttccttctccaaacgatccaccttgtcctccagcttgcaaatcttaccacgattccggtcttcgcgatcttgagctgctaacacaatctcaacgcgggtctcatccatggcccacagcatctcaaccaaatgtctggtggtagcatcattctcaatccctgcaggttcaagatagctaccacggtcgtttccctggggttgacgaggatggtagcgatactcagtgtcggccaactgatcattgtagctttctcggagctctcctatggtgatccttgccacctcctgacaagcatgaatgtagcttccccctccagcctcgaacatcaccgatgggatatcttcacgattactgttcaaggtgactttgatacagcacttctcttcatcacgatcatgaggaatctgggcatacaaaggagcagtcccaaatcctatggcgaaggacatcgtacgcaactcctggacaaatccctcagtaccaaacaagtactcaggcttgtagcgcggcat

SEQ ID NO: 22913 - DNA, 1024 bp, Oryza sativa; identical to SEQ ID NO: 15442
  Clone ID: TF_OsC359_5811

SEQ ID NO: 22914 - DNA, 1410 bp, Oryza sativa
  Clone ID: TF_OsC359_7032
atgtcatggcacagggccggtgtcctgctgctagcggctcagtcctgcctacctgtcccgggggttccggccgtaggtggggttgggtcggtactcttgtctatggctaggatgggttggaaactatgtcacgtcttccgtctgtataccgtggtgatgtataacagagaaaaaggaaagaatgtcagcgggtatgcctcaagtaacttaagtttccaactcaatccaccactggcctcaagagagttaaccagggcacacccttggtccattccaagcatgctgcttagttcacagctaccattggttggaagtcaagaccaaaatcagtatgtgtttgatcgagcctttgccacccaggtcaatgagcttccaatgccagaagagcaggtccccttttgtcatgattgtagagagcaaggacactatgccctgaattgtccatgggtatatgtcaaagaagccccttcccttggtttagcagggcagacatcgctaaaccagcctcctcacaccaagtcaagcttgcagcctagtgtgcaaagtagagagctcaacggagagaatccattgaatcccgggaaatgctttcctcctagcctctcgtaccacgtggggtcacatactaagcaagccaaaggcaagaagagtaagaatcagaagagaaaagcaccgatgcgaactgaagaagaagtacgtaagatgactattaccagcaccgaatggcctccagcagggataactattcctagacgtcaaagaggaaatactttccgaggtgcacgacagttgacccagcacctcctaagtcatggtggcagagtatctgatagtgaagggtcagatcaagtctcctcggatgatgaagatgagtctccccgacatctcggcgaggaagagatggaatcaaaggcatgcacccgttgcggggaaattggacacgttgctagcatgtgtctcacactctgcactcattgtgaagaagaccatccaccaggggagtgtcccacccgcaaggtcacatgttttctgtgcgaaggtacaaaccatgtacccaaggattgccaactcagtgtgttgttgaccaagaccgcagaaatccaacgaacaaccctacgattgtctcatcagctagtcagctccaacagcaacatcgacgatatcatccccagcaccaatgctcctcctgctgcacctgactctgcaatgaatcatagcaataataccttcagcaccaaccattctctgcaccgacagcctcagcaaagaattgtcgtcgatggaagaagttgtgtctctccccgacctactccaggccgagcgaagggcaatcaacctcaggagggcgataccaagcagaagaccgttattcgcttcaaccagcaatcagaaggaagcttctcctgtgaa

SEQ ID NO: 22915 - DNA, 1878 bp, Oryza sativa
  Clone ID: TF_OsC359_8226
agaagtcaagaacccatttttgtgctttgttcctgcttgttatatggagtttattagagtaaaagccttttcttttccgttggtcgtgtagacgctgcagcttcggaagatccgcttttcgtggaagttgaagccgacgtttgggaaagcgagcaaggcaagtcgcatcatctccccctctattcaaaatcctcaaaatggttttaggctgggctcggggtgcatggtttagatagtagcacctcggccatataaggaccggtcttcgggcctctgttgcaaagcactaccgtacttccacatgtctagtgggtaaggcttagtttgtggctcagtccggttataaacaaaagtacacggatggagatggaagatgtcgggggtcgatggacatctgtcccgggggttccggccgtaggtgggattgggtcggtactcttgtctatggctaggatgggttggaaactatgtcacgtcttccgtccgtataccgtggtgctaaaatgtggaatggttggcctgggttggcttgggacgagctgggacccagggtcgggttgccagttcggtctgaatcatcgtaggccttgggttaaggcaggtttacccttttcttccttcttcaaatttcaactagtactagatggtcagatgtttaacagagaaaaaggaaagaatgtcagcgggtatgcctcaagtaactcaagttttcaactcaatccaccactggcctcaagagagttaaccagggcacacccttggtccattccgagcatgctgcttggttcacagctaccattggttggaagtcaagaccaaaatcagtatgtgtttgatcgagcatttgccacccaggtcgatgagcttccaatgccagaagaggatgtccccttttgtcacgattgtagagagcaaggacactatgccctgaattgtccatgggtatatgccaaagaagctccttcctttggtttagcagggcaggcatcgctaaaccagcctcctcgcaccaagtcaagcttgcagcctagtgtgccaagtagagagcccaatggagagaatccattgaatcccgagaattgctttcctcctagcctttcgtaccacgtggggtcacgtactaagcaagccaaaggcaagaagagtaagaatcagaagagaaaagcaccgatgcgaactgaagaagaagtacgtaagatgactattaccagcaccgaatggcctccagcagggataactattcctagacatcaaagaggaaataccttccgaggtgcacgacagttgacccagcacctcctaagccatggtggcagagtatctgatagtgaagggtcagatcaagtctcctcggatgatgaagatgagtctccccgacatctcggcgaggaagaaatggaatcaaaggcatgcacccgttgtggagaaattggacacgttgctagcatgtgtcttacactctgccctcattgtgaggaagaccatccaccaggtgaatgtcccacccgcaaggtgacatgttttctgtgcgaaggtacaaaccatgtgcccaaggattgccaactcagtgtgttgttgaccaagaccgcagaaatccaacgaacaaccctacggttgtctcatcagctagtcagctccaatagcaacatcgacaatatcatccacaacaccaatgctcctcctgctccacctgactctgcaataaatcatagcaataataccttcagcaccaaccattctctgcaccgacagcctcagcaaagaattgttgtcgatggaagaagttgtgtctctccccgacctactccaggccgagcaaagggcaatcaatctcaggagggcgataccaagcagaagaccgttctctgcttcaaatag

SEQ ID NO: 22916 - DNA, 4977 bp, Oryza sativa
  Clone ID: TF_OsC1713_5087
ttaccagttgccgaatagatgcgggtactccgtcctcaagaattcttcgccttcccaggtggcttcgtcctcagtgtgattactccattgtaccttgtacatacgccacactttgctcctagtcctcttttctgcttcatccaatatccggatcgggtgttctggatatgtgagatcattgctaatgtgaatctcttccagcggggcttgttcttccggcactcgtaagcatttctttaattgggacacatggaagactgggtgcacatcggcgatatattctggtagctgtaactgatatgcgacttctcctcgcctggcgatgatctggaatggccccacatatcttggtgccagttttcctttaaccttaaacctttttgttcccctcatcggagaaacctttagataaacgtaatctccttccttaaattccaggtttcttcttcgagtgtcggcgtaactcttttgtcgtgattgtgctacttttagacgatcacggatcaagcgaaccttttcttcggcttcttgaataatgtcaggtccaaataccgcccgttctccagtctcggaccacattagcggggtacgacatcgtcgaccaaacaatgcctcattgggtgacatctttaggcttgcttgaaagctgttgttgtaagagaattcggcgtagggcaaacacctctcccagtccttgctaaaatccagagcacaagccctcagcatgtcctccaggacctggttggttctctccgtctggccatctgtctgtggatgataagcggtgctaaatgcgaggtaacttcccagggcttcatggactttctcccagaaatgtgaggtaaactgtgtgcctcgatcagatataatcttcttaggtataccatgaagacacactatcctggtcatatacaactcggcgagttttgcactgctataatttgtcttaacgggaatgaatctcgccgtcttggtgagtcgatccacgattacccaaatggaatcatatcctgttgcggtcttgggcaatccaacaatgaaatccatacctatctcatcccatttccattcgggaatcctgagaggttgcaacaaacctgccggcctctggtgttcagccttcaccttctggcatacgtcgcagagtgctacgtattcggccacatctctcttcatgttgggccaccagtatccttccttcagatcttggtacatcttcgtacttccggggtgcaatgaatatgccgattcgtgagcttcctttaaaattaatcccctcagtccaccctgttcgggtacgtaaattctctttttataccatagaacatctttttcgtcggttgaaaattcctttgcacgtccggcagctaagcgttccttcacctctcggacttcctcattgtccttctgggcttcttctatttgggttctcaaaagaggttgaatatccagggtgtttatctgtccatggggtactatatgtaggttcagctgcgccatttcctccctaagctcagggaccatcccttccgttctcagatgattgcaatggctcttacgactcagagcgtcggctacgacgtttgctttgcctgggtgataatgaacctctaaatcatagtccttgattaattctaaccatcgcctttgcctcaagttgagatctgactgggtgaagatatactttagactcttgtggtcagtgtagatatcgcaatggtttccaatcagataatgtctccaaatctttagtgcatgaaccacagctgcgagttctaggtcatgggtagggtagttttcctcatgtggtcgcaattgtcgcgacgcataggccaccacttttccctcctgcatcagtacacctcctagtccttgcctcgacgcatcacaatatacaacaaagtctttcctgatgtcgggaagaactaaaataggtgctgaggtcagcttttctttgagctgctcaaagcttccttgacactgttccgaccatgcaaacttcttttccttcttgagtaattgtgtcattggtcgggctatcttagagaacccttcaatgaaccttcggtagtatccagccaagcctagaaaactccggatttcagtcaccgatttgggtgctttccattccgtgacagcctccactttagcagggtccactgctactccaccggctgagattacgtgacccagaaaagcgacttccttcaaccaaaattcgcacttgctgaattttgcgtataacttgtgctttcggagtttctggagaaccaatcttaagtgttccgcatgttcttcctcatctttggagtagattagaatgtcatcaatgaataccaccacaaacttatccaagtaatccatgaatactttgttcataagattcatgaagtatgctggggcattggttagaccaaacgacattactgtgaattcatacaacccatagcgtgttgaaaacgcggttttggggatatcctcggtcctaatcttcagttggtggtatcctgatcgaaggtctatctttgaaaacaccttagctcccttaagttggtcgaagaggtcatcaatccgtggtaggggatacttatttttgatagtcacttcgttcagtgatcggtagtctacacacattctcatgctaccgtctttctttttaacaaataacactggggctccccaaggtgacgaactggggcgtacaaatcccttctcttgcaactccctaatttgctttttaagttcttctaactcattgaccggcatccgatatggtctcttggatatgggggcagttccgggtatcaggtcaataatgaactctatgtcacgatctggtggcattccaggtaaatcttctgggaacacatcaggaaatcgctgcactactggcattccctttaggggtagcatggtaaatatacctccggcacgttcggttagcctaggatcttgatccatggttgctctcatatccgatccccagggtgtggtcagggtaacttctctacgtctacagtcaattactcctctatgctttgctaaccaatccatacccaaaatgacatcaagagtttggggtattagcaccataagattggagggaaataccacatccctaaggcggatgggtacgtcaatgcaagctgtatccactgctatctcacccccaggcgaatgtactaacattggttgtcttaatttaactctggttaaattgtgttgttgacttgctttcaaagatataaatgaatgcaatgctcctgaatcgaagagaactttaattggagtggagttgagtgaaaacatacccatcagtacgccttgatcttcctgggcctcttcagctcgaacatggttcacttgcccgcgcccaaatccagtggtggtcctgttcggttgcggagtcttgaataggcctcgcccgacagcaggggtagtagtgccgcgaacagtcattgcgttcgcgccagttcggacaggggttttgcgtggatgagggcagttgttagcgtagtgcccgtatttcccacagttgaagcagtccacattcttcttggccccaggggcagccaaagttggtgtaggggtgcggttctgaagtgcaactggcctgttgaagttgctaagtgcagcgggacggttggtcaccatgacagggggcttccatccggacggagtggctcccttaagtcgctgaggcattgtctgaggtgggcgactcatagcaagcctcctcttgcggttgtgttccaccgtcctttgatcgttctctagcctgacgaccttgttgatcaggctctggaaactctcgtgatcctgcccgatcataggtccacgcaattcatcattcagcccttctatgaacttgtcgatcttttcttcttcatccgccaggtctccaattgcgtagcgagccaactgagtgaacttgtttagatactcctgcaccgttgtattcccttgccgcagtcttctaaactcgttcttcttcatgcgcatcactgcagtaggtacgaaattctcgcgaaacgctgcagtgaactcctcccaggtgggttctccagcaccgtcttctcgggcctccttgtaggtatcccaccaatcaccagcgggtccttccagctggttcactgcgaagatcaccttgtcggcttcgcgtaccctgactagagtcagtttcttttctatgatgcggagtccccacggctcggaagtagtggcctctaaatctggcttgggcttcttgcccggaggtcgtgtgctcttgcgggcattgctgagggtacgagggcctccgatgaaggtaatgcgggggacaggagtcgcgtcctctgaaggatcagtgatgtccggctctatctctggctcggtgtcggtcccctctgtctcggagtcgacctgaatcggagtctctaaactggaccctggctggagctgtgccttcagcgagtctatctcgctgccccaagcctgatgctcctcctctagctgaagctgttgtgctgtgaggtcagttaccttggtctccaactctcccatacgcctctgctggtcgtcgatctccaacagggcctcctcgtagaagtcgtccacagcctcagcccatcgggacagtcgagtcaccatcgggttatagcagcaaggtatgtcctgaactgtgcagacagagttgctctcctcccgaaacggatggtgagcaaactcggtactcgctaactctgcccagtgaatagaactaagtcagaggaaggcctcccgggctgcgtcctgcatcgcggtctccggtaagtcacgacggtggcgtgtcgagaagctgtagtctgactctgaagggactcgcggatgaacctcaatccggccctcccaaaagggtccacattgtctcactcggtagatcggaaatctggggtaccgaaggcgcctcatcacccgatgtagctctatgacgtatccctctgagcggggtacgcccat

SEQ ID NO: 22917 - DNA, 3836 bp, Oryza sativa; identical to SEQ ID NO: 15552
  Clone ID: TF_OsC1528_1929

SEQ ID NO: 22918 - DNA, 1248 bp, Oryza sativa; identical to SEQ ID NO: 15562
  Clone ID: TF_OsC1713_4811

SEQ ID NO: 22919 - DNA, 2940 bp, Oryza sativa; identical to SEQ ID NO: 15570
  Clone ID: TF_OsC1713_3954

SEQ ID NO: 22920 - DNA, 2469 bp, Oryza sativa; identical to SEQ ID NO: 15581
  Clone ID: TF_OsC91_2446

SEQ ID NO: 22921 - DNA, 4932 bp, Oryza sativa
  Clone ID: TF_OsC1713_5219
ctattgagcgccatcgtctgcatcaccctcctggtaataggcatagggatcctccgaagcttcatctccggcctcggcggcggcggcccaaggcggcaacgctcggtaccacacctggcgcggcgcggtggcttcgaggcgacggcgcggcgcatgaaggcggcggcgcggcgcacaacggcggcggcccatggagaaggaggagaagggggaaaatggaaaggatgggtgtggggtggaaaaggggaggggccgggttttataagggcgtgggggaggggcggacggcctcatggcgacgcgacaggcggtgcgcggtgtggctggcggcgatggcgacgggcgggcggcgcggcgcggggctcggcgcgacggcgacggcgatgcaacgatgacgggcgagcggcgcggcagggtgcggggcgcgaggcggcgacgcgacgggcgagcggcgcgcggggcgcgtggcgcgaggcggcgacgcgacgggcgagcggcgataggacggccgacggcgacggcgcggcagcggcggcacggggcgcgagataacgcgacggcgacggcgacggcgatgacacgcggcgacgggcggcgacgtgacggcggcgcggggctcgaggcgatggaacggcagcgcggggctcggggcggccacgcgcggggcagagtgggaggggggttagggcggtcttcgaacagatgcgggtattctgtcttcaagaattcttcactttcccaagtggctttatcctcagtgtgattactcaattgtaccttgtacatatgccacactttggccctagtcctcttttctacttcatccagtatccgaactggatgctctgggtacgtgagatcattgctaatatgaatttcctccaacggagcttgctcctccggcactcgcaagcacttctttaattgggacacatggaagactggatgcacatcggcgatgttttctggtagctgtaactgatatgcaacttctcctcgtctagcgatgatttggaaaggtcccacatatcttggtgctagtttccctttaaccttaaacatttttgtacctctcatcggagaaaccttcagatatacataatccccttccttaaattctagatctcttctccgggtgtcagcgtaactcttttgtcgtgattgtgccacttttagacggtcacggattaggcgaaccttttcttcggcttcttggataatgtcaggtccaaataccgtccgttctccagtctcggaccacattagtggggtacgacatcgtcgaccaaataatgcctcatttggcgacatctttaggctcgcttggaaactgttgttgtaggagaattcggcgtagggcaaacatttctcccaatccttgctaaaatccaaagcacaagctctcaacatgtcctccaagacctggtttgttctctctgtctggccatctgtttgtgggtgataagctgtgctaaaagcaaggtaacttcctagggcttcatgtactttttcccagaaatgcgaggtaaactgtgtgcctcgatcggatataattctcttaggcacaccatgaagacatactatccttgtcatgtataactcagctagcttggctccgctataatttgtcttgacggggatgaaccttgcagtcttagtgagtcggtccacgattacccaaatggaatcgtaaccagttgcggtcttatgcaatccaacgataaagtccatacctatctcgtcccatttgcattctggaatcctaaggggttgcagcaaacctgccggtcgctggtgctcggccttcaccctctggcatacgtcgcagagtgctacgtattctgctacatcccttttcatgttgggccaccagtatccttccttcaggtcctggtacatcttcgtacttccggggtgtaatgaatatgctgattcgtgagcttcccttagaattaatcccctcagtccaccctgttcgggtacgtaaatcctcttcttataccatagtgtttccttctcatcaattgagaattctttcgcacaaccagcggctatgcgctccttcacctcttggatctctccgttgtccttctgggcttcctctatctgggtcctcaaaaggggctggatgtccaaggtgtttatttgaccataaggaactaaatgtaaattcagttgggctatttcctccttaagttcaggggttatcccttccatcctcagatgattgcaatggctctttcgacttaaagcgtcggccacaatgtttgctttgcctgggtgatagtgaacctctagatcataatccttgattagttccaaccatcgcctttgcctcaagttgagatctgactgggtgaaaatatacttcagactcttgtagtcagtgtagatatcgcaatggtttccaatcaaatagtgtctccaaatctttagctcatgaaccacgactgctagttctaggtcatgggtagggtaattttcctcgtgtggtcgcagttgtcgcgatgcataagccacgtcctttccttcttgcatcagtactcctccccagtctagaataggcgccgaggtcagcttttctttgagctgctcaaagctttcctgacactgttctgaccacacaaacttcttttccttcttgagtagttgtgtcattggtcgggttatcttagagaacccctcaatgaaccttcggtagtatccggccaagcctagaaaactccgaatttcagtcacagatttgggtgctttccattccgtaacagcctccactttagcaggatccactacaactccaccggctgagattacgtggcctagaaaggcgacttcttttaaccagaactcacatttactaaactttgcatataatttatgcttccgaagtttctcgagtaccaaccgcaagtgctccacatgctcttcctcgtctttggagtagattaaaatatcatcgatgaatactaccacaaatttgtccaagtaatccatgaacactttgttcataagattcataaagtatgccggggtgttggttaatccaaacgacattactgtgaactcatataatccatagcgtgttgagaacgcagtcttgggtacatccccggtcctaattttcaattggtggtatcctgatcgaaggtcaatcttagagaacaccttagctcctttaagttgatcgaaaagatcatcaatccgtggaagtggatacttgttaaatcccttctcttgcaactctctgatttgctttttaagttcctccaactcattgactggcatccgataaggtctcttggatatgggagcagttccgggtatcaggtcaataatgaactctatgtcacgatctggtggcattccaggtaaatcttctggaaacacatcgggaaatcgctgcactatgggcattcctttcaggggtagcatggtaaatatgcctccggcacgttcgattagtctaggatcttgatccatggttgctctcatatccgatctccagggtgtggtcagggtaacttttctacgtctacagtcgattactcctctgttcttcgtcaaccaatccatacccaatatgacatccagggtctgaggtatcaaaaccaaaaggttggagggaaacaccacatccctaagacgaataggtacgtctatgcaagcatgactcacagttatctcgcccccaggtgagtgtactatcataggctttctaagtcccactagggttaagttgtgcttttgactagccttccgagatatgaatgaatgcgatgcaccagaatcgaagagaactttaaccggggtggaattgatagagaacatacccattagtacgccctggtcttcctgggcctcttcagctcgaacatggttcacttgtccgcgtccaaatccggtagcggtcctgttagtttgcggagtcttgaatagacctcgtccggcagcaggggtagtagttccacgaacagtcattgcattagcgccagtacggacaggagttttgcgtggatgagggcagttgttggcgtagtgcccatactccccgcagttgaagcagtccacattcttcttggctccaggggcagccagagttggtgtaggggtgcggttctgaatcacaaccggcctgttgaaattactaggcgcggcgggacggttgggtgccacaatagggggcttccacccagacgaagtggctcccttgagtcgctgaggcactccctgaggtgggcgattcatagcaagcctcctcttgtggttgtgctctacagtcctttgatcgttctccagcctaacgactttgttgatcaggctctggaagctctcatggtcttgcccaatcataggtccgcgcaattcatcattcagcccttctatgaacttgtcgatcttttcctcttcatctgcgaggtctccaattgcatagcgggccaactgagtgaaccggttcagatattcctgcaccgttgtgttcccttgtcgcatccttctaaactcgttcttcttcatacgcattaccgcagcaggcacgaagttctcttgaaatgctgcagtgaactcttcccaagtgggttctccagcatcctcttcccgagcttccttgtaagtatcccacctatcaccagcgggtccctccagttggtttactgcgaagatcactttgtcggcttcgcgtacccggacaagagtcagtttcttctctatgatgcgtagccaatcttctgcctccatgggctcgtctgccgtagtgaacgtgggtggcttggtcctcataaactctccaaagcttgatcgtccgcggttgccttggttgtttgcaatggcttgcagaagttgggtttgagtggccataactccggccagggtggttaggtcaggtgtttgagtttcttcattgctgattgacgcccgacgtcggcttgccat

SEQ ID NO: 22922 - DNA, 5454 bp, Oryza sativa
  Clone ID: TF_OsC1713_5309
ttaccggttttcgaatagatgtgggtactctgtcctcaagaattcttcgctttcccatgtggcttcatcctcagtgtgattgctccattgtaccttgtacatacgccacactttgctcctagtcctcttttcggcttcatccaatatccggatcgggtgttctggatatgtgagatcattgctgatgtgaatttcttccagcggagcttgctcttctggcactcgtaaacatttctttagctgagatacatggaagactgggtgtacatccgcgatattctctggcaactgtaactgataggcaacttctcctcgcctggcaatgatctggaatggtcccacatatcttggtgccagttttcctttgaccttaaacctttttgttcccctcatcggagaaacctttagataaacgtaatctccttccttaaattccaggtctcttcttcgagtgtcggcgtaattcttttgtcgtgactgtgctactttcagacggtcacggatcaaacgaaccttttcttcggcttcttgaataatgtcaggtccaaataccgcccgttccccagtctcggaccacattagcggggtacgacatcgtcgaccaaacaatgcctcattgggtgacatctttaggcttgcttgaaagctgttgttgtaggagaattcggcgtagggcaaacatctctcccaatccttgctaaaatccagagcacaagccctcagcatgtcttccaggatctggttggttctctctgtctggccatctgtctgtggatgataggccgtgctaaatgcgaggtaactccctagggcttcatggactttctcccagaaatgtgaggtaaactgggtgcctcgatcagatataatcctcttaggtataccatgaagacacactatcctggtcatgtacaactcggctagcttagcactgctatagtttgtcttaacgggaatgaatctcgccgtcttggtgagtcgatccacgatcacccaaatggaatcatatcctgttgcggttttgggcaatccaacaataaaatccatacctatctcatcccatttccattcgggaatcctgagaggttgcaacaaacctgccggcctctggtgttcagccttcaccttctctcggacttccttgttgtccttctggacttcttctatttgggttctcagaagaggttgaatgtccagggtgtttatctgtccacggggtactatatgtaggttcagctgagctatttcctccctaagcttagggaccatcccttccattctcagatgattgcaatggctcttacgactcagagcatcggctacaacgtttgctttgcctgggtgatagtgaacctctaaatcatagtccttgattaattctaaccatcgcctttgcctcaagttgagatctgactgggtgaagatatactttagactcttgtggtcagtgtagatatcacaatggtttccaatcagataatgtctccaaatctttagcgcatgaaccacagctgcgagttctaggtcatgggtagggtagttttcctcatgtggtcgtaattgtcgcgacgcataggccacaacttttccgtcctgcatcagtactcctcctagtccttgcctcgacgcatcacaatatataacaaagtctttcctgatgtcgggaagaactaaaataggcgctgaggtcagcttttccttgagttgctcaaagctttcctgacactgttctgaccacacaaacttcttttccttcttgagtagttgtgtcattggtcgggctatcttagagaacccttcaatgaaccttcggtagtatccagccaagcctagaaaactccgaatttcagtcacagatttgggtgctttccattccgtgacagcctccactttagcaggatccactgctactccaccggccgagattacgtggcctagaaaagcgacttcttttaaccagaactcgcacttgctgaattttgcatataacttatgcttccgaagtttctggaaaaccaatcgtaagtgttccgcatgttcttcctcatctttggagtagatcagaatgtcatcgatgaataccaccacaaacttatccaagtaatccatgaatactttgttcataagattcatgaagtatgccggggcattggttagaccaaacgacattactgtgaattcatacaacccatagcgtgttgaaaacgcggttttgggaatatcctcggtcctaatcttcagttggtggtatcctgatcgaaggtcgatctttgagaacaccttagctcccttaagttggtcgaagaggtcatcaatccgtggtagtggatacttgtttttgatagttacttcgttcagtgatcggtagtctacacacattctcatgctaccatctttctttttaacaaacaacactggggctccccaaggtgacgaactggggcgtacaaatcccttctcttgcaactctttgatttgctttttaagttcttctaactcattgaccggcatccgatatggtctcttggatatgggggcagttccgggtatcaggtcaataatgaactctatgtcacgatctggtggcattccaggtaaatcttctgggaacacatcaggaaatcgctgtactacgggcattccctttaggggtagcatggtaaatatacccccagcacgttcggttagcctaggatcttgatccatggttgctctcatatccgatccccagggtgtggtcagggtaacctctctacgtctacagtcaattactcctctatgctttgctaaccaatccatacccagaatgacatcaagagtttggggtattagcaccataagattggagggaaataccacatccctaaggcgaattggtacgtctatgcaagcatgactcacagttatctcgcccccaggtgagtgtactatcataggctttctaagtcccacgagggtcaagttgtgcttttgactagccttcagagatataaatgaatgcgatgcaccagaatcgaagagaactttaaccggggtggaattgatagagaacatacccattagtacgccctgatcttcctgggcctcttcagctcggacatggttcacttgtccgcgcccaaatccagtggtggtcctgttcgattgcggagtcttgaataggcctcgcccgacagcaggggtagtagtgctgcgaacagtcattgcattcgcgccagttcggacaggggttttgcgtggatgagggcagttgttagcgtagtgcccgtattccccacagttgaagcagtccacattcttcttggctccaggggcagccaaagttggcgtaggggtgcggttctgaagtgcaactggcctgttgaagttgctaagtgcagcgggacggttggtcaccatgacagggggcttccatccggacggagtggcttccttaagtcgctgaggcactgtctgaggtgggcgactcatagcaagcctcctcttgcggttgtgttccaccgtcctttgatcgttctctagcctgacgaccttgttgatcaggctctggaaactctcgtgatcctgcccgatcataggtccacgcaattcatcattcagcccttctatgaacttgtcgatcttttcttcttcatctgccaggtctccaattgcgtagcgagccaactgagtgaacttgtttagatactcctgcactgttgtattcccttgccgcagtcttctaaactcgttcttcttcatgcgcatcactgcagcaggtacgaaattctcgcgaaacgctgcagtgaactcctcccaggtgggttctccagcaccgtcttctcgggcccccttgtaggtatcccaccaatcaccagcgggtccttccagctggttcactgcgaagatcaccttgtcggcttcgcgtaccctgactagagtcagtttcttttctatgatgcgtagccagtcttctgcttccatgggctcatcggccgtagcgaacgtgggcggcttggtcctcatgaactctccaaagcttgaccctccgcggttgccttggttgctcgcgatagcttgcagaagttgagtttgggtggccataattccggccagagcgtttaagtcgggtgtctgagtttcgtcattgctggttgttgcacgacgtcggcttgccatcataaataaccggagtccccacggctcagaggtagtggcctctggatctggcttgggcctcttgcccgggggtcgtgtgctcttgcgagcagtgctgagggtgcgagggcctccgaggaaggtgatacagggaacaggagcctcatcctctgaaggatcagtgatgtctggctcgatctctggctcggtgtcggtcccctctgtctcggagtcgacctggatcggagtctccaaattggaacccagctgcggagaaggtgtagggatcagtggagtgtgaaccaactccggaacaggtggctgtgtcgctgtagggtccactaggtagggcgctgactcagtagctagcatactagcctctcccagaagagcgtggaacgccggtgggtacggcggggtgaggaagaagtagcggtcacggcctaccgctgtggaagtagaagcccctgtagtgctgatcttggctgctcgaagctgctcctccagctggctgacgtgctcctgactctctctcagctgctcctcaagagtatccatcatcccgcggcgatcgttgtactggtcggataactgctggaactgatcgccgtggacctggagctgtgccttcagtgagtctatctcactgccccaagcctggtgctcctcctccaactgaagctgctgtgccgtgaggtcggtcacctcagtctctaactcccccacacgtctctggtggtcgtcaatctccaacagagcctcctcgtagtagtcatctactgcctcagcccatcgtgacaaccgagtcaccatcgggttgtagcagcagggcgtgtcctgaactgtgcaaactgagttgccctcctcccggaacgggtgatgagcaaactcggtactcgctaactcagctcggtggatagagctgagtcggaggaaggcctcccgggcagcatcctgcatcgcggtctctggcaggtctcggtggtgacgtgtctgaaagctgtagtccaactcggaagggactcgggggtgaatctcgacccgagcctcccaaactgagccacactgcctcactcggtaagacgggaacccagggtatcgcagacgcctcaacatccgatgcagctcaatgacatacccctctgattgaggtaagctcaactcccaggtagcgggtgaatccgaatctgccatcggtgagttcgccgcgtcgccctctacccgttggtgccctccgttcgcgtcgtcgagccgtcgttcgccggcgagcttgcgctcccgagccgccgccggtgctgacgtcatcgctgacgtcat

SEQ ID NO: 22923 - DNA, 6426 bp, Oryza sativa
  Clone ID: TF_OsC1713_5419
ttacaggttttcgaataggtgggggtattctgtcttcaagaattcttcgctttcccaagtggcttcatcctcagtgtgattactccattgtactttgtacatacgccacactttggttctagtcttctttttagcttcatccaatatccggactaggtgttctggatacgtgagatcattgctgatatgaatttcttccaacgtagcttgttcttccggcactcgcaagcacttctttaactgagacacatgaaagactgggtgcacatcggcgatattttctggtagctgtaactggtatgcaacttctcctcgtctagccgtgatttgaaaaggtctcacatatcttggcgctagttttcctttgaccttaaaccttttcgttcccctcatcggagaaacctttagataaacgtagtctccttccttcaattccaggtttcttcttcgggtgtcggcgtaactcttctgtcgtgattgtgccacttttagatggtctcgaatcaggcgaaccttttcttcggcttctttgataatgtcaagtccaaatatcgcccgttcacctgtctcggtccacattagtggggtacgacatcgtcgaccaaataatgcctcatttggcgacatctttaggctcgcttggaaactgttgttgtaggagaattcggcgtagggcaaacatctctcccagtctttgctaaaatccattgcacaaactctcagcatgtcctccaaaacctggttggttctctccgtctggccatctgtctgtggatgataagctgtgctaaacgcaaggtaacttcctagggcttcatgtactttctcccagaaatacgaggtaaactgtgtgcctcgatcagatataatcctcttaggtacaccatgaagacacactatcctggtcatgtacaactcggtgagtttagcactgttatagtttgtcttgacggggatgaatcttgccgtcttggtgagtcgatccacaatcacccagatggaatcgtaccctgttgcggtcttgggcaatccaacaataaaatccatacctatctcatcccatttccactcgggaatcctaaggggttgcagcaaacctgccggtcgctgatgctcagccttcaccttttggcacacgtcacagagtgctacgtattctgccacatctctcttcatgttgggccaccagtatccttccttcagatcctggtacatcttcgtacttccggggtgtaatgaatatgctgatttgtgagcttcctttagaattaatcctctcagtccaccctgttcaggtacataaatcctctttttataccataggacatccttctcgtcggttgaaaattcctttgcaaatcctgcaactagacgttccttcacctctcggatttcctcgttgtccttctgggcctcttctatttgggttctcaaaagaggttgaatgtccaggttgtttatctgtccatgaggtaccatatgtaggtttagttgggctatttcctccttaagctcaggagccatcccttccgtcctcagatgattgcaatggctcttccgactcaaagcgtcggccacaacgttggccttgccggggtgatagtgaacctctagatcatagtccttgattaattccagccatcgcctttgcctcaagttgagatctgactgggtgaaaatatacttcagactcttgtggtcagtgtagatatcgcaatggtttccaatcaaatagtgtctccaaatatttagcgcatgaaccacagctgcgagttctaggtcatgggtagggtagttttcctcatgtggtcgcaattgtcgtgatgcataggccacaacctttccgtcctgcatcagtactcctcctagtccctgccttgatgcatcacaatatataacaaagtctttccagatgtccggaagaactaaaataggcgacgaggtcagcttttctttgagctgctcaaagctttcctgacactgttctaaccacacaaacttcttttccttcttgagtagttgtgtcattggtcgggctatcttagagaatccttcaataaaccttcggtagtatccggctaagcctataaaactccgaatttcagtcacaaatttgggtgctttccattccgtaacggcctcaactttagcaggatccattgctactccaccggctgagattacgtggcctagaaaagcgacttcttttaaccagaactcacatttactaaactttgcatataatttatgcttccgaagtttctcgagtaccaatcgcaagtgttccgcatgttcgtcctcatctttggagtagattagaatatcatcaatgaatactaccacaaatttgtccaagtaatccatgaacactttgttcataagattcataaagtatgccggggcgttggttaacccaaacgacattactgtgaactcatacaatccatagcgtgttgaaaacgcggtcttgggtatatccccggtcctaattttcaattggtggtatcctgatcgaaggtcaatcttagagaacaccttagctcctttgagttgatcaaaaagatcatcaatccatggtagtggatacttgttcttgatagttacttcgtttagtgaacggtagtctacacacatcctcatgctaccatctttcttcttgacgaatagcactggggctccccaaggtgacgaactggggcgtacaaatcccttttcttgcaattctctgatttgctttttaagttcctccaactcattgactggcatccgataaggtctcttggatatgggagcagttccgggtatcagatcaataatgaactctatgtcacgatctggtggcatcccaggtaaatcttccctctgttctttgttaaccaatccatacccaatatgacacccacggtctggggtatcaaaaccataaggttggagggaaacaccacatccagttatctcgcccccaggtgagtgtactatcataggctttctaagtcccactagggttaagttgtgtttttgactagcttgtccgcgtccaaatctggtagcggtcctgttagtttgcggagtcttgaatagtcctcgtccggcagcaggggcagtagttccactaacagtcattgcattagcgccagtatggacaggagttttgcgtggatgagggcagttgttggcgtagtgcccatactccccgcaattgaagcagtccacattcttcttggctccaggggcagccagagttggtgtaggggtgcgattctgaatcgcaaccggcctgttgaaatttctaggtgcggcggggcggttggttgccacaatagggggcttccacccagacgaagtggctcccttgtgtcgctgaggcactccctgaggtgggcaattcatagcaagcctcctcttgcggttgtgccctacagtcctttgatcgttctccagcctaacgaccttgttgattaggctccggaaactctcatgatcttgcccaatcataggtccacgcaactcatcattcagcccttctatgaacttgtcgatcttttcttcttcatttgcgaggtctccaattgcatagcgggccaactgagtgaatcggtttagatattcctgcaccgttgtgttcccttgttgcagccttctaaactcgttcttcttcatacgcattaccgcagcaggcacgaagttctcatgaaatgctgcagtgaactcttcccaagtgggttctccagcatcctcttcccgagcttccttgtaagtatcccaccaatcaccagcgggtccctccagttggtttactacgaagatcactttgtcggcttcgcgtacccggacaagggtcagtttcttctctatgatacgtagccaatcttctgcctccataggcttgtctgccatagcgaatgtgggtggtttggtcctcataaactctccaaagctcgatccgccgcggttgccttggtcatttgcaatggcttgcagaagttgggtttgagtggccataactccggccagggtggttaggtcaggtgtctgagtttcttcattgttggttgacgcccgacgtcggcttgccatctgtgtaggccgattaagtaagtatcctaattttctaactagctcttgtggttttatcccattaagggagttgttttggtgtgaactgagtccccacggctcagaagtagtggcctctggatctggcttgggcttcttgcccgggggtcgtgtgctcttgcgggcagtgctgagggtgtgagggcgtccgaggaaggtgatgcggggaacaggggtctcatcctctgaaggatcagtgatgtctggctcgatctctgctcggtgtcggtcccctctgtctcggagtcgacctggatcggagtctccaaactcgaacctagtaccccaagcctggtgctcctcctctagctgaagctgctgcactgtgaggtcagtcacctcggtctctaactctcccacacgcctctgctggtcgttgatctctaacagagcctcctcgtaaaagtcgtctactgcctcagcccatcgtgacagtcgagtcactatcgggttgtagcagcaaggtgtgtcctgggccgtgcagacggagttgctctcctctcgaaacgggtggtgagcaaactcagtactcgccaactcagctcggtggatagagctaagtcggaggaaggcctcccgggctgcatcctgcatcgcggtctcaggtgaatcgtgatggtggcgtgtcgaaaagctgtagtctgcctctgaaggaactcgtggcctcatgtcagcttgtgcctcccatccaaatccacactgcctcactcggtaagtagggaacctcgagtatctcaaacacctcatcatacgcgatggcgacaccactgtagacacccgcctcgcggacgtggcgcggcactcggtgcggtgcggcgtcaccgaggtcggcggcgtggcggctcaaatgcggcggcgcgaaggcggtggcgtggtggcacaacggcgacacgggggtgacgcgacggtggcgcggcggcgcggggcgcgaggcggcgataggacgcgcgcgcggcgatggaacggcgacagcgacggcgcggcagtggcggcaaggggcgcgaggcggcgatggaacgcgcgcggcgacgggacatcgacggcgacggcgacaacggtggcgcgcggctcggggcgggacgcgacgtgcggcgacgcgacgggcggcgacacgagatcgaggcggcgacagcgacgggtgttacacttcagtcattcatcgatatcatcaatgacctccgagtacgtgggttgtcggggtatgaagtcgctgccgacttcattggtttgaacagcgaaaccgtggagcgccgtgttggccaggtgatgatgagcggccccacgatggcgagcaacgtccctgcccctctttgcgagaaaggggcagctgagggcgaagctgcaatcaacgctctccctctaactgacgtcatcgggccgctcgtggaccaccaggcggcggcatcgctgaaggaggacgtcgccaaggaagcgtccgatgttgcccccgttgctgccacgaccagtggcggcaccgttccgaagaaggggaggaagttttcctccgtgctcggtaaccgtcggaaagcacccactccatcggcctcggatgcgtctcccccacctccgcgacggcagaggctggtgacacttggcgagaagcggctcgtcttgatggccattacgggaatttttcatagggcggtgtgggcgaaggcggcacaagacgggtctggagggaactctagtgcgtctcctgcagtggccttgacagatgtcgtggtcgtgcccaggagccgtgaggcgacgcccagcggccctgccggcgaccttgtgcctgctcgaggcccacccgctgacgtcctcacctgggaggagctccaaatcgagatggggcgcatcctccaggctggcgctcgtggcataggtcgcgagattgcggcggcgagggcggcggcggcttcgtcggcgaacgaacgcgccgacaagttggcgcgttacctggcggaggttcgcgaggacctccagaagatgagggagctggtggccggcaacgagcggcaatggcaggggctcgagcaccgcatgtcgaagctcgagaacaacctgtcggacatccgtggctcgctgcgggttacctacaccggcctgcaccagctcaccggggagtgcagtgtcacgaccaccatcccggtgaatcccgatgagttctcgctgatgacttcgctcgcgaaactagcgatgatgatggaggcgatcccctccaagcatgcggccaggatcggggaggagacgtcaaacgggatctacaccgggacgtgtcacatcctcgcgtgcgtaaggttggcgcaccctgaactcgatctctag

SEQ ID NO: 22924 - DNA, 7249 bp, Oryza sativa
  Clone ID: TF_OsC359_6331
gtgacaagttggtatcagagccaccttgaccttaggataagccaaatgatgccgccccattcaccgagaaatttgatcaaggtgttaggattcgtcagggagctgaggttgatggcttttgaggtaggctatgaagttgctcctgagtatcgccggatttcccatgaccccgacgaggagaagtgtcgtgttcgtgtaacgttggctagtgatcgtgaagaccttccgtccattaagttcgaagctggaggaagatcgtacagccaggcttgtcaagaagcagctctggtggccattggagagttgcgtcaacgctttgaagaagagttggattcatcagctttccagtatcatcctcacaagcctcatggtcaagactatggaacctatacctgtcctgatggtgaagagagtgccactctgatgcatgcggtgcatatgcttagtgctatggatgcagtaagtgtggagcgagacaaagcagctcatgacagggaaaattggaatcgaggcaagatttgcaagttggagagcaaggtgtatcgtctacagaaggaattagctgaacttaaaggagaaacgccgcctccaacacccaagcttcacctcatcgcaagaaagagaacctgtccgccacctcgtctccagttagcttcgaagattcgcgtgatgggtgaagctgtgcccgatcgtgctgaacctgtcatcgacatcataagtgatgaggaagaagaggaagaccctgaagaaagagagccagctactccagaggaagaagatccatcgcttcgttccgacgcaaggcgcaccaccaatcccgtagaagcaggagattggctgcatgcggtggagaagaagttggacttgatccagtgtactgagcaggagaaagtttcttttgcttcgcatcaactgcatggacctgctgctgaatggtgggatcattttcgccaaggcagggctgaaggagagcctattacgtggcaggaattcacggccgctttcaagaagacgcacataccagcgggtgttgtagctctaaagaagagagaatttagagcactcaaccagggatctcgttcggtcaccgagtacctccatgatttcaaccgtttagctcgctatgctccagaagatgttcgttcagatgaagaacgtcaggagaagtttttagagggactgaatgatgagttgtcttatgctttgatgtctacggattttcgggatttccagcagttggtggacaaggcgattcgtcaggaagacaagtataaccggatggagcagaagaaacgcagggctgcccaattcaaggcacaacagggcagtaaccagaggccgcgtctcgttactggacctcaagctccatcgtaccctcaaggaggatcttcatcagttgtccgctcccaacgccagttctacaacaacaatactggtaatcgtggcaatgacaaccgcaacatggttgttcgtcctgcagcaactccagttcagaaccagcccgttaggaaggaacagggaagcaagccaggggtgtgcttcaattgtggtgatccaggacattatgctgataagtgtcctaagcctcggcgcgtgaagaacgttccagccccgaacaactccaatgctccagcaccaaaggcacgtgttaatcatgttgcagcagtagaagctcagaatgcaccagatgtggttttgggtacgtttcctgttaactctatacccgcaactgtgctttttgattccggtgctacacattcctttttgtctaaaagttttgcgagcaatcatgggatggaagttattagtcttgggagacctttactagttaataccccaggcaatcaagtgttttcgacacagtattgtccttccgttattataggaatagaagaagttcttttcccgtcctcccttatcttgctagaatccaaagatctagatgttatcttagggatggattggttatctcgtcacagaggagttatagattgtgccaaccgtaaggtgactttaaccagtagcaatggggaaacagtttctttctttgtgtcctctcctaaatctcatggggtgatcttaaaccaagttgctctacaagagatccccatagtacaagactacccagacgtgtttcccgaggatttgccaggtatgccacctaagagagacatagagtttcggatagacttggtacctggaaccaaccctatccataagagaccatacagaatggcagcaaatgagttagctgaggtgaagagacaggtggatgatttgcttcagaaaggatatatcagacccagtacttcgccatggggagcaccagtcatctttgtggagaagaaagatcatactcagagaatgtgtgtggattatcgagcgttgaatgaggttaccatcaagaataagtatcctctacccagaattgatgacctgtttgatcaactggaaggtgctacagttttctccaagatagatctccgttctggatatcatcaacttcgaatccatgaggaagatataccaaagaccgccttcacaactcggtatgatttattcgaatgtaccgttatgtcatttggactcactaatgccccagcctttttcatgaatctgatgaacaaggtgtttatggaatatctggataagtttgtcgtggtgtttattgatgacattcttatttactccaagacgaaggaagaacatgaagagcatcttcgtctagctttagagaaactacgtgagcatcaggtttatgccaagttcagtaaatgtgaattttggttgtccgaagtgaagtttcttggtcatgtcatctcgtctggaggagtggcagtagatccaagcaatgtggagtcagtgttaagttggaagcaacccaagacggtttcagaaattcgtagtttccttggacttgcggggtattaccgcaggtttattgagaacttttcaaagatcgccagaccaatgactcgtctgcttcagaaggaagtgaagtacaagtggacggagggttgtgaacaaagtttccaagaactgaagaaaaggctagtgactgcgcctgtgttagttttgcctgattcgaggaaaggtttccaagtgtattgtgatgcgtcccgacacggtttgggttgtgtgttgatgcaagaaggaaaggtggttgcctatgcatctaggcaattacgtcctcatgagaataactacccaacgcatgacctagagttggcagctgtggtgcatgcattgaagatttggcgtcattatcttttcggtaaccgtacagagatatatacggatcataaaagtttgaagtacattttcactcaacctgatttgaacatgcgtcagcgaagatggttagagttgattaaagactatgatatggaaatccactatcacccggggaaagcaaatgttgtagccgatgctcttagcaggaaaagctactgtaatatgtcagaaggtcgacgtttaccttgggagttatgccaagaatttgaaaagatgaacttgggaatagtcagcaaaggttttgtggctactttggaagctcaacctactctgtttgatcaagttagagaagctcaagtgaatgatcctgatatccaagaaataaagaacatcagaagccagccggtctgttacaaccattgaagattccagagtggaagtgggaagaaataggaatggattttataaccggtctacccagaacgtcggcagaaacaacttacacggggaataagcttgcagagttatacatggccagagtggtatgtttgcatggtgttcctaagaagatagtgtcagatagaggaagccagtttacttcgaagttttggcagaagttacaatcagaattgggtacccgtttgaatttcagtactgcttatcaccctcaaacagatggtcagacggaaagagtaaaccaaattttagaagatatgttgagagcttgtgttctagattttggtggaagttgggataagaatttgccgtatgcggaattctcatataaccatagttatcaagctagtttgcaaatgtctccgaatgaagcattatatggtcgaaagtgccgtacgccgctcctttgggatcaaaccggtgaacgtcaagtttttgggactgacatattgcgagaggcggaagaaaaagtgaagattatccaagaaaggttgcgcgttgcccagtcgcgtcagaagagctatgccgacaatcgtcgcagagatttggttttcgaagaaggagattatgtataccttcgggtcacgccgttacgaggtgttcatcgtttccaaaccaaagggaaattagcaccgcgttttgtaggaccttttaagatcgtgagtcgaagaggtgaagtagcttatcagttagagttgcctccgtcaatggcgggaatacatgacgtgttccatgtgtctcagttgaagaaatgtttacgagtacctacggaggaagcagatcctgatcgtatagagcttcaagaagatttaacttatgttgagaagccagttagaattttggaacgccgccgcgacgctctccaagtccgccgccgtcgccggccgtcttcagcaacgccgccgcgcatgcctcgccattcaccaagaaatttgatcgaggtgttaggattcgtcagggagctgaggttgatggcttttgaagtaggttatgaagttgctcccgagtatcgccagatttcccatgaccccgacgaggagaaatgtcgtgttcgtgtgacgttggctagtgatagtgaagaccttccgtcttttaagttcgaagctggaggaagatcgtactgccatgcttgtcaagaagcagctttggtggccattggagagttgcgtcaacactttgaagaagaattggattcatcagctttccagtatcatccccacaagcctcatggtcaagactatggaacctatacctgtcctgatggtgaagagagtgccactctgatgcatgcggtgcatatgcttagtgctatggatgcagtaagtgtggagcgagacaaagcagctcatgacagggaaaactggaatcgaggcaagatttgcaagttgaagagcaaggtgtaccgcctacagaaggaattagctgaacttaaaggagaaacgccgccgccaacatcctagcttcgcctcactgcaagaaagagaacctgtccgccccctcgtctccagttagcttcgaagattcgcgtgatgggtgaagctgtgcccgatcgtgttgagcctgtcatcgacatcatggtgaacacgcgcactggcactggaagtggaagtggaagtggagccaataacaatgaagagaacccaacgctagctcagattttggctcaacaaacacaactgatcaatctgttagtgcagcaggcacagaatcagcaggcaaataatcaaaaccagaatccacccccacctccccaaaacaagttggcagatttcttgcgtgtgagtccccctactttttcgagcaccaccaatccagtagaagcaggagattggttgcatgcggtggagaagaagttggacttgatccagtgtactgagcaggagaaagtttcttttgcttcgcatcagttgcatggacccgctgctgaatggtgggatcattttcgccaaggcagagcgggaggagaacctattacttggcaggaattcacaactgcttttaagaagacgcatataccaacgggtgttgtagctctaaagaagagagaatttagagcactcaaccagggatctcgttcggtcaccgagtacctccatgatttcaaccgtttagctcgctatgctccagaggatgttcgcactgatgaagaacgtcaggagaagtttttggagggactaaatgatgagttgtcttatgctttgatgtctacggatttccgggatttccaacaattggtggacaaggcgattcgtcaggaagacaatcgtggcaatgacaaccgcagtgtggttgctcgtcctgcagcaactccagttcagaaccagcccgttaggaaggagcaggggagcaaaccagtgatatgcttcaattgtggtgatccgggacattatgctgataagtgtccgaagcctcggcgtgtgaagaacgctccagccccgaacaactccagtgctccagcaccgaaggcccgtgtcaatcatgttgcagcagcagaagctcagaatgcaccagatgtggttttgggtacgtttcctgttaactctatacccgcaactgtgctttttgattccggtgctacacattcctttttgtctaaaagttttgcaagcaatcatgggatagaagttattagtcttgggagacctttactagttaataccccaggcaatcaagtattttcgacacagtattgtccttctgttactatagaaatagaagaagttcttttcccatcctctcttatcttgctagaatccaaagacctagatgttatcttagggatggattggttatctcgtcatagaggagttatagattgtgccaaccgtaaggtgactttaaccaatagcaatggggaaactgtttctttctttgcgtcctctcctaaatctcatggtgtggttttaaaccaagttgctctacaagagattcctatagtacaagactacccagatgtgtttcccgaggatttgccgggtatgccacctaagagagacatagagtttcggatagacttggtacctggaactaaccctatccataagagaccatatagaatggcagctaacgagttagcagaggtgaagaaacaggtggatgatttgcttcagaaaggatacattagacccagtacttcgccatggggagcaccagtcatctttgtggagaagaaagatcatactcaaagaatgtgcgtggattatcgagcgttgaatgaggttactatcaagaataaataccctttacctagaattgatgacctgtttgatcaattggaagagtttgtcgtggtgtttatcgatgacattctcatttactccaagacgaaagaagaacatgaagagcatcttcgtctagctttagagaaactacgtgagcatcagctttatgccaagttcagtaaatgtgaattttggttgtccgaagtgaagtttcttggtcatgtcatctcgtctggaggagtggcagtagatccaagcaatgtggagtcagtattaagttggaagcaacccaagacggtttcagaaattcgtagtttccttggacttgctgggtattt

SEQ ID NO: 22925 - DNA, 3735 bp, Oryza sativa; identical to SEQ ID NO: 15624
  Clone ID: TF_OsC359_6443

SEQ ID NO: 22926 - DNA, 3711 bp, Oryza sativa
  Clone ID: TF_OsC359_6551
gtgacaagttggtatcagagccaccttgaccttaggataagccaaatgatgccgccacattcaccgagaaatttgatcgaggtgttaggattcgtcagggagctgaggttgatggcttttgaggtaggctatgaagttgctcccgagtatcgccaaatttcccatgaccccgacgaagagaagtgtcgtgttcgtgtgacgttggctagtgatcgtgaagaccttctgtccattaagtttgaagctggaggaagatcgtacagccatgcttgtcaagaagtagctttggtggccattggagagttgcgtcaacgttttgaagaagagttggattcatcagctttccagtatcatcctcacaagcctcatggtcaagactatggaacctatatctgtcctgatggtgaagagagtgccactctgatgcatgcggtgcatatgcttagtgctatggatgcagtaagtgtggagcgagacaaagcagctcatgacagggaaaactggaatcgaggcaagatttgcaagttggagagcaaggtgtaccgtctacagaacgaattagctgaacttaaaggagaaacgccgccgccaacacccaagcttcgcgtcacactaagaaagagaacctgtccgccacctcgtctccagttagcttcgaagattcgcgtgatgggtgaagctgtgcccgatcgtgctgaacctgtcatcgacatcataagtgatgaggaagaggaggaagaccctgaagaaagagagccagctactccagaggaagaagatccatcgcttcgttccgacgcaaggcgcaccaccaatccagtagaagcaggagattggctgcatgcggtggagaagaagttggacttgatccagtgtactgagcaggagaaagtttcttttgcttcgcatcagttgcatggacctgctgctgaatggtgggatcattttcgccaaggcagggctgaaggagagcctattacgtggcaggagttcacggccgctttcaagaagacgcacataccagcgggtgtcgtagctctaaagaagagagaatttagagcactcaaccagagatctcgttcggtcactgagtacctccatgatttcaaccgtttagctcgttatgctccggaagatgttcgcaccgatgaagagcgtcaggagaagttcttggagggactaaatgatgagttgtcttatgctttgatgtctacggatttccgggatttccagcagttggtggacaaggcgattcgtcaggaagacaagtataaccggatggagcagaagaagcgcagggctgcccaattcaaggcacaacagggcagtaaccagagaccgcgactcgttactggacctcaagctccatcgtaccctcaagtaggatcttcatcagttgtccgtccccaacgccagttctacaacaacaatactggtaatcgtggcaatgacaaccgcaacatggttgctcgtcctgcagcaacttcagctcagaatcagcccgtcaggaaggaacagggaagcaagccagtgatatgcttcaattgtggtgacccaggacattatgctgataagtgtcctaagcctcggcgcgtgaagaacgctccagccccgaacaactccaatgttccagtaccgaaggcacgtgttaatcatgttgcagcagtagaagctcagaatgcaccagatgttgttttgggtacgtttcctgttaactctatacccgcaactgtgctttttgattccggtgctacacattcctttttgtctaaaagttttgcgagcaatcatgggatggaagttattagtcttgggagacctttactagttaataccccaggtaatcaagtattttcgacacagtattgtccttctgttactatagaaatagaagaagttcctttcccatcctcgcttatcttgctagaatccaaagatctagatgttatcctagggatggactggttatctcgtcacagaggagttatagattgtgccaaccgtaaggtgactttaaccagtagcaatggggaaactgtttctttctttgcgtcctctcctaaatctcatggtgtgaccttgaaccaagttgttctacaagagatacctatagtacaagactacccagacgtgtttcccgaggatttgccaggtatgccacctaagagagacatagagtttcggatagacttggtacctggaacaaaccctatccataagagaccatacagaatggcagctaatgagttagctgacgtgaagagacaggtggatgatttgcttcagaaaggatacattagacccagtacttcgccatggggagcaccagtcatctttgtggagaagaaagatcatacttagagaatgtgcgtggattatcgagcgttgaatgaggtcactatcaagaataaggatcctctacccagaattgatgacctgtttgatcaattgaaaggtgctacagttttctccaagatagatctccgttctggatatcatcaacttcgaatccgtgaggaagatataccaaagaccgccttcacaactcggtatggtttgttcgaatgtaccgttatgtcatttggactcactaatgccccagcctttttcatgaatctgatgaacaaggtgtttatggaatatctggataagtttgtcgtggtgtttattgatgacattcttatttactccaagacgaaggaagaacatgaagagcatcttcgtctagctttagagaaactacgtgagcatcagctttatgccaagttcagtaaatgtgaattttggttgtccgaagtgaagtttctttgtcatgtcatctcgtctggaggagtggcagtagatccaagcaatgtggagtcagtgttaagttggaagcaacccaagacggtttcagaatttcgtagtttccttggacttgctgggtattaccgcagttttattgagaacttttcaaagatcgccagaccaatgactcgtctgcttcagaaggaagtgaagtacaagtggacggatgattgtgaacaaagtttctaagaactgaagaaaaggctagtgactgcgcctgtgttaattttgcctgattcgaggaaaggtttccaagtgtattgtgatgcatcccgactcggtttgggttgtgtgttgatgcaagaaggaaaggtggttgcctatgcatctaggcaattacgtcctcatgagaataactatcctacgcatgacctagagttggcagctgtggtgcatgcattgaagatttggcgtcattatcttttcggtaaccgtacagagatgtatacggatcataaaagtttgaagtacattttcactcaacctgacttgaacatgcgtcagcgaagatggttagaattgattaaagactatgatatggaaatccactatcacccggggaaagcaaatgttgtagccgatgcccttagcaggaaaagctactgtaatatgtcagaaggtcgacgtttaccttgggagttatgccaagaatttgaaaacttgaacttgggaatagtcaacaaaggttttgtggccgctttacaagctaaacctactctgtttgatcaagttagatgtcacgcccggaaattcactagtaatttccgaactaaaggaatcgaatcgggaagaaatcgaactcggtttttttagggataaaacaaaacgagttcgattcggatccaaacctccacgattcgtttt

SEQ ID NO: 22927 - DNA, 4899 bp, Oryza sativa; identical to SEQ ID NO: 15620
  Clone ID: TF_OsC359_7191

SEQ ID NO: 22928 - DNA, 2290 bp, Oryza sativa; identical to SEQ ID NO: 15627
  Clone ID: TF_OsC359_7547

SEQ ID NO: 22929 - DNA, 5136 bp, Oryza sativa
  Clone ID: TF_OsC359_7557
atgatgccaccccattcaccgagaaatttgatcaaggtgttagggttcgtcagggagctgaggttgatggcttttgaggtaggctatgaagttgctcccgagtatcgccaaatttcccatgaccccgacgaggagaagtgtcgtgttcgtgtgacgttggctagtgatagtgatgaccttccgtcttttaagttcgaagctggaggaagatcgtacagccatgcttgtcaagaggcagctttggtggccattggagagttgcgtcaacgctttgaagaagagttggattcatcagctttccagtatcatcctcacaagcctcatggtcaagactatggaacctatacctgtcctgacggtgaagagagtgccactctgatgcatgcggtgcatatgcttagtgctatggatgcagtaagtgtggagcgagacaaagcagctcatgacagggaaaactggaatcgaggcaagatttgcaagttggagagcaaggtgtaccgtctacaaaaggaattagctgaacttaaaggagaaacgccgccgccaacacccaagcatcgcctcactcaaagaaaaagaacctgtccgccacctcgtctccagttagcttcgaagattcgcgtgatgggtgaagctgtgcccgatcgtgctgaacctgtcatcgacatcataagtgatgaggaagaggaggaagaccctgaagaaagagagccagctactccagaggaagaagatccatcgcttcgttccgacacaaggcggatggtgaacacgcgcaccggaagtggaagtggaagtggaagtggagctactaacaatggaggagatcccacgctagctcagattctggcccaacaaacacaactgatcaatctgttagtgcagcaggcacagaatcagcaggcaaacaatcagaaccagaatccacccccacctccccaaaacaagctggcagatttcttacgcgtgagaccccctaccttttccagcaccaccaatccagtagaagcaggagattggctgcatgcggtggagaagaagttggatttgatccagtgtactgagcaggagaaagtttcttttgcttcgcatcaactgcatggtcctgctgctgaatggtgggatcattttcgccaaggcagggctgaaggagagcctattacgtggcaggaattcacggccgctttcaggaagacacacataccgtcgggtgttgtagctctaaagaagagagaatttagggcactcaaccagggatctcgatcggtcaccgagtacctccatgatttcaaccgtttagctcgttatgctccggaagatgttcgcaccgatgaagagcgtcaggagaaattcttggagggactgaatgatgagttgtcttatgctttgatgtctacggatttccgggatttccagcagttggtggacaaggcgattcgtcaggaagacaagtataaccggatggagcagaagaagcgcagggctgcccaattcaaggcacaacagggcagtaaccagaggccgcgtctcgttactggacctcaagttccatcgtaccctcaaggaggatcttcatcagttgtccgtccccaacgccagttctacaacaacaatactagtaatcgtggcaatgacaaccgcaacgtggttgctcgtcctgcagcaacttcagctcagaaccagcctgtcaggaaggaacagggaagcaagccagtgatatgcttcaattgcggtgatccaggacattatgctgataagtgtcctaagcctcggcgcgtgaagaacgctccagccccgaacaactccaatgttccagcaccaaaggcacgtgttaatcatgttgcagcagcagaagctcagaatgcaccagatgtggttttgggtacgttccctgttaactctatacccgcaactgtgctttttgattccggtgctacacattcctttttgtctaaaagttttacgagcaatcatgggatggaagttattagtctcgagagacctttactagttaataccccaggcaatcaagtattttcgacacagtattgtccttccgctactatagaaatagaagaagttcctttcccatcctcgcttatcttgctagaatccaaagatctagatgttatcttagggatggattggttatcttgtcacagaggagttatagattgtgccaaccgtaaggtgactttaaccagtagcaatggggaaacagtttctttctttatgtcctctcctaaatctcatggtgtgatcttaaaccaagttgctctacaagagatccccatagtacaagactacccagacgtgtttcccgaggatttgccaggcatgccacctaagagagagatagagtttcggatagacttggtacctggaaccaaccctatccataagagaccatacagaatggcagctaatgagttagttgaggtgaagagacaggtggaagatttgcttcagaaaggatacatcagacccagtacttcgccatggggagcaccagtcatctttgtggagaagaaagatcatactcagagaatgtgcgtggattatcgagcgttgaatgaggttactatcaagaataagtatcctctacccagaattgatgacctatttgatcaattggaaggtgctacagttttctccaagatagatctccgttctggatatcatcaacttcgaatccgtgaggaagatataccaaagaccgccttcacaactcggtatggtttgttcgaatgtaccgttatgtcatttggactcactaatgccccagcctttttcatgaatctgatgaacaaggtgtttatggaatatctggataagttagtcgtggtgtttattgatgacattcttatttactccaagacgaaggaagaacatgaagagcatcttcgtctagctttagagaaactacgtgaacatcagctttatgccaagttcagtaaatgtgaattttggttgtccgaagtgaagtttcttggtcatgtcatctcgtctggaggagtggcagtagatccaagcaatgtggagtcagtgttaagttggaagcaacccaagacggtttcagaaattcgtagtttccttggacttgcggggtattaccgcaggtttattgagaacttttcaaagatcgccagaccaatgactcgtctgcttcagaaggaagtgaagtacaagtggacagaggattgtgaacaaagtttccaagaactgaagaaaaggctagcgactgcgctggtgttaattttgcctgattcgaggaaaggtttccaagtgtattgtgatgcatctcgactcggtttgggttgtgtgttgatgcaagaaggaaaggtggttgcctatgcatctaggcaattacgtcctcatgagaataactacccaacgcatgacctagagttggcagctgtggtgcatgcattgaagatttggcgtcattatcttttcggtaaccgtacagaggtgtatacggatcataaaagtttgaagtacattttcactcaacctgatttgaacatgcgtcagcgaagatggttagagttgattaaagattatgatatggaaatctactatcacccggggaaagcaaatgttgtagccgatgctcttagcaggaaaagctactgtaatatgtcagaaggtcgacgtttaccttgggagttatgccaagaatttgaaaagttgaacttgggaatagtcagcaatggttttgtggccgctttggaagctaaacctactctgtttgatcaagttagagaggctcaagtgaatgatcctgatatccaagaaataaagaagaacatgagaagaggaaaagccatcggttatgtagaagatgagcaaggtactgtgtggttgggagaaagaatttgcgtcccagaaaataaggagttgaaggataccatcatgaaagaagctcatgaaactttgtattccattcaccctggaagcactaagatgtaccaagacctaaagcaacaattctggtgggccagtatgcgacgtgagatagcagaatatgtggctctatgtgatgtatgtcagcgggtcaaggcagaacatcagaagccagccggtctgttacaaccgttgaagattccagagtggaagtgggaagaaataggaatggattttataaccggcctacccagaacgtcggcaggacatgattctatttgggtagtggttgataggttgacaaaagtcgctcacttcataccggtcaaaacaacctacacggggaataagcttgcagagttatacatggccagagtgaaattacaagtagagatgggtacccgtttgaatttcagtaccgcttatcacccgcaaacagatggtcagacggaaagagtaaaccaaattttagaagatatgttgagagcctgtgttctagattttggtggaagttgggataagaatttgccgtacgcggaattctcatataacaacagttatcaagctagtatgcaaatggctccgtatgaagcattatatggccgaaagtgccgtacgccgctcctttgggatcaaaccggtgaacgtcaagtttttgggacggacatattgcgagaggcagaagaaaaagtgaagattatccaagaaaggttgcgcgttgctcagtcacgtcagaagagctatgccgacaatcgtcgcagagatttggctttcgaagaaggagattatgtataccttcgggttacgccgttacgaggtgttcatcgtttccagaccaaagagaaattggcaccgcgtttcgtgggaccttttaagattgtgagtcgaagaggtgaggtagcttatcagttggaattgcctccgtcaatggcgggaatacatgacgtgttccacgtgtctcagttgaagaaatgtttacgtgtacctacggaggaagcagatcctgatcgtatagagcttcaagaagatttaacttatgttgagaagccagtcagaatcttggaagtaagcgagaggaataccaggaatcgtgttatacggttctgcaaggttcagtggagcaatcattcagaagaagaagccacttgggagcgagaagatgaattgaagtcagctcatcctcatctcttcgccagttcttctgaatctcgaggacgagattccgtttaa

SEQ ID NO: 22930 - DNA, 3942 bp, Oryza sativa
  Clone ID: TF_OsC6326_15
tgcgagtgaacctgcaggctcagggtctgtgggaagctgttgacaccggcgacgtgccctttcatgaagatcgtcaggctctttcggccatcctgcgagccgtgccggctgagatgctccggccgctcgcggagaaggacaatgccaaggacgcctgggatgcgctcaagtccatgcgagtgggcacggatcgcgtgagagaatcctgtgcgcagaagctacgccaagcgtttgagtccatgcaattcaagcccgacgaatcggtcgaggatttcagtcttcatcttcagtgggttgtcagcgacctccgtcttcttggtgacgacatcaccgaggaaaaaatcatgtgcaagtttctgcgtgttgtgccccgcaggtatcgtcagatggctctttcaattgaaaccttgattgacctcacaactctctccattgaggacctcactggccggcttctcaccgttgatgatcaccctgattccgacagtgaggacgcgggtcaggcactgttcggcaagaaggaggagcaggcgcgggccaacaaggggttaggccagtcctcatcccgtggcagcggtaccgggactggctcatcggagcggcgacaacgcggccgtggtgggtgcggtcgtgacggtgctggcggcaagcacaaacctggcgccaatcagggtggaggccgtgacgtgtccaaggacaagtgtcgctactgcggcgaattgggccattgggccaaagactgccgcaaggctaaacgcgaccgcgacaagcttgcgcatgcccatttgcttggggatgacgagcccacactgctgatggcccaggtgtgcgagctcgttcccactacggagcctgagcttatcaacggcgaggtgaatttgaataaggagcgcgcgcttgtctctctccgcgaagaaggggagccggtcgaccccgactggatcctggacatggccgcctccaaccacatgactgggcttgacaccaccatgcgtggtacggtcaagttcggcgacacctctgcggatcgagggacgcggcactatgctgttcgcctgcaagaacggtgactactgcgggcttattggtgtctacttcatccccaagcttcgcagcaacatggtcagcctcgggcagctcaacaaggtcgggtgcaagacggtgatcgaggatggcgctctaaccctgcgtgacccacggtggcgcttgttgtgccgtgttcgccgtgggagagagcgcctgtatgtgcttcaggtggagctggcccagctggtgtctctcgcagcaaggagctccgaagacgcgtggctctagcatgccaggtttgggcatctcaacttcgactccctgcgcacactctacgcccatggcttggcgcatgggttgccgaagctggagcgtgtcaggcaagtctgcgacgggtgtctcatcagcaagcagcgtcgagtgccgttccccacagcggcgacgttccgagccacgagtcggctcgaccttgttcatggcaacatctgcgttcccatctcgcctcccacgcacggtggtaaaaagtattttttgttgctgattgatgacatgtctcgctatatgtggctatttctgctgacatccaaaagtgaggctccggcaaccatcaagcggttcaaagcgggagtggaggtggagactgcctgcaagctgcgcgttctccgcactaatcgtgggggggagttcacctccattgagttcggcttgtattgcgcgaacgagggcgtggctcggcaactaacggcgccgtactcgcctcaacaaaatggcgtcatcaagcgccgcaaccaaacggttgtgtccatggcaagatgcatgatgaaggcgaagcacatgcccaggaagttctggggagaagcggtgaggaccgccgtcttcatcctcaaccggtcgcccacgaaagctgtccccaacaagaccccttacaaggcgtggcacggacgaacgcctgccgtgccattacttcaagacctttggctgcgtcgttcacatcaaggaggtgaagcctcatctcaagaagcttgaagaccgcagcaagatgatggtttttctcggctatgagccgggaaccaagggctaccgtgtctatgacccggatgccaaccgtgtcgtcatcacacgcgacgccgtctttgatgaagtaacgtcgtggccatggggggaacccgttgaacatggagaggcatccacagacgactcgttcaccgtctactatgaggtggcctcaagcatcgtggcggcaagtcggcctcctagcgtcgaggccatgtcacccacaccctccgcgcagctcgcaacgcctccagacacaccctctgtggagttcgtgtcgccgccgagctcgacgccagacgtcgacgacgaccagggcgcgccgcgtcgctaccggagcatggcgaacatcctcgacacgacggcgccggtggagctcgattcggacgagctctacctggcagccgcggaggagccggcgaacctctctgaagcagagcaggatgaacactggcggcaagcgatgcttgatgaaatcaaatccattgaggagaacagcccttggatactcactgagctcccggccggccagcgtccaatcggcctcaagcgggtgttcaagttgaacaacaacgagaccggccccgtgatccggcacgaggcccggctcgtggcaaagggctacgtccagcgccatggaatcgactttgatgaagtcttcgccccggttgcgcggatggaatccgtgcgacttctcctcgccgtcgcagcttatctcgggtggactgtgcatcacatggacatcaaatcggcgttccttaacagagagctggaggaggaggtatacgtctcgcagccgccgggcttcattgacgacaagcatccaagtcaggtcttgcacctgaaccgagctctgtatggccttcgtcaagcccgacgaacctggaacgcgtagctggacactcgccttcatgaactaggcttcaagcggagcgccaccgagcacgcggtgtacacacgtggcgagggatccaagcggctaatcattggcgtcgatctcggattgctcagctactacctcaggatcgaggtgcgtcaaggcagtgacgacatcaccatcaactagtcagcatacgcacagaagctactcaagatcggtgggctggtggactgcaactcaacttgtgtccccatggagcctagactgaagctgatgaagaacagcgataggccggccatcgacgccactctgtatcgcagcctcgtgggtagcctgcgttaccttgtgcacacgtggcctgactttgcctttgccgtcggctctgtgagccgattcatggaatcgccacgcgatgatcatctgttggtggtgaagcacatcctgcggtatgtagctggtactcagaactttggatgttgtttggcaagatcaggggaaacgggaatttgtctgctgggtttttcagacagtgatttggggggagacattgatgatcggaagagcacctcaggggctttgttctttctcggctccagtccaattgcttggcaatctcagaagcagaaggtggtggccctttcctcttgtgaagcagaatacattgccgccacaggagcggcttgcctcggcatttggctagcgcgtttgctggctgaagtgctgggcactgaaccagagatggccatcctcaaggtcgacaacaagtcggtgatctcactgtgcaagaatcctgtgttccacgatagaagcaaacatatcgacactcgatatcacttatcaggcagtgcatagaggagaagaaagatgatgttgagttcatccccacggacgaacaggtggcggacattctgaccaagccactcgtgtgcatcaagttccaagaatttcgcaacaaggcgggcgtggtccagattgtcacttgg

SEQ ID NO: 22931 - DNA, 4899 bp, Oryza sativa; identical to SEQ ID NO: 15655
  Clone ID: TF_OsC359_5740

SEQ ID NO: 22932 - DNA, 1991 bp, Oryza sativa
  Clone ID: TF_OsC359_5990
ctcctggtttggaatggtgtattcctggtttggagatagaactgtgcagccgggatggttgttcagaacgattgggcctatgcaacaggatgccgcgctacaagcctgagtacttgttcggtactgaaggatttgtccaggagttgcgtacgatgtccttcctcatagggtttggaattgcccctttgtatgcccagatcccgcatgatcgtgatgaagaaaaatgcggagtcaaagtcaccttgaatagcaaccgtgaagatattccatcagtgatgttcgaggctggaggaggaagctacattcatgcttgtcaggaggtggcaaggatcgccataggagaactccgggaaagctataatgatcggttggccgacaccgagtaccgctaccatcctcgtcaaccccagggaagtgattgtggcagctactttgaaccggctgggatcgagaacgacgctaccacaaggcatttggttgagatgctatgggctatggatgaaacccgcgctgagattgtaatagccgctcaagatcgtgaagaccggaatagggggaagatctgcaagctagaagacaaggtggatcatttggagaaggagctagccgcgttgaagggagaagcaccaccgcagaaggccagagtccgtctaccgcaaggaagagagctctattcgtccctcgctatcagttggcaccaaaggttcgtctggtggaaaaagaagctaccccagcggatcctccggttgtcaatcactactaatcccgtcgaagctggtgattggttgcacgccatagagaagaagttggatctgctccagtgcacagaccaggagaaggtctccttcgcatcacaccagctgcatggccctgcttcggaatggtgggatcacttccgcctcaacaggactacccctgaacctatctcttggcttgaattcaacgctgctttccggaagacgcatataccctcgggagtggtgtctctcaagaagaaggaattcaggtcactcacacaaggttcccgcactgtcaccgagtatctgcacgagttcaatcgtctggctcgttatgctccggaagaggtgcgcactgatgaagagcgtcaggagaggttcttaaaaggacttaatgatgaactttcctacccacttatgactggagattatcatgatttccagaagttagtggataaagctattcgccaggaggacaaatacaaccgcatggagcagaagaaacgccggattgctcatttcaaggcacagcaggggaatagtcaaaggccacgccttactttgggaccccagtccatgccacagggagctccacgccctgttgcatctccaacacagcaacagcctgccaagagggagcaaggcagtaagcccggggtgtgcttcaactgtggagacccaggacattacgctgacaagtgtccgaagccccgccgcgtgaaggtcgtccctgcccagaacaacccctccgcacccgcagccaaggctcgtgtcaaccatgttgctgctgcagaagctcaaggtgctccagatgtgattttgggtacattccctgttaactcagttcctgcaaccgtgctttttgattctggtgctatgcattcatttttatccatgagttttgcgggaaatcaagggatggaggtaaaggaacttagacgtcctttgatggttagtactccgagtaaccaagcactctcctcacaacgtagcccctctgtcagaatagagatccaaggtgtacctttcctggccaaccttattctgttagaatccaaagaccttgatgtcatcctagggatggactggttagccagatataaaggtgtgatagattgtgctaatagaaaagtaactctcaccagtaatgatggtcgagttgtaactgttcatgcattatcttctgagtctataaggtcacgtctgaaccaattgactttggaagagattcctatagtccgggagtatcccgat

SEQ ID NO: 22933 - DNA, 4924 bp, Oryza sativa; identical to SEQ ID NO: 15657
  Clone ID: TF_OsC359_6290

SEQ ID NO: 22934 - DNA, 6593 bp, Oryza sativa
  Clone ID: TF_OsC359_6530
acttattccggaagtcggttggcggaattgtatatggcaaggattgtgtgtttgcatggcgtccctaaaaaaatagtgtctgatcgaggcagtcagtttacttcaaatttttggaagaagcttcaagaagagatgggttctaagctgaactttagtactgcttatcatccacaggcagacggacaaaccgaaagggtgaatcagattttggaagatatgttgagagcttgtgctttagacttcggtggaagttgggataagaatctaccttatgcagaactttcgtataacaacagttatcaagctagtcttcagatggctccttacgaagcactgtatggtcggaagtgccgcactccgcttttgtgggatcaaaagggagaacgtcaggttttcgggactgatatcctaagggaagcagaagagaaggttaagatcattccagaaagattgcgtgtggcccagtctcgtcataagagttatgccgacaatcgccgcagagatttgagttttgaagaaggagattatgtgtaccttcgtgtcacgcctgttcgaggagttcatcgtgttcacaccaaaggaaaattggcaccgcgttttgtgggaccttataagattgtcagtagaagaggagaggttgcttatcagttagagttacctcaatctttggccggagtccctaatgtgtgtccatggtgtccgcaattgaaaaagtgtttaagggtacctaccgaagaagcctaatcttgaccagatagaagtcccagaggatctgacctatgttgagaaaccaatccgtattttggaaatagatgagagaagaacccgaaatcgagttatccgtttttgccaagtccaatggagtaatcactccgaagaagaatcaacttgggaacgagaagatgaattgaattctggattcgaggtcgaatcggatcgatctctttcctccgaaccccaatgtttctttcgcgtcgccggtcgccgtgggccttcgccgctgcctccttgcccctataaaaggatccccggtgtcgccgctacccgccaccaccattgtcttcgtctctcgccgtcggaagcgccctagcgccccgtgcttcgccgtcgttccggtcgtcgtcatcgctcggggaggtcgccatcgtggtcgccaagtcgccgccgtccttgtccgcccctttgccgtcgctgtagaccgccggagcaccgccgttgttgtcaagccgaaggtctccgccgcttcttttttgtcgccgccgccgtccgttcatcttccgccgacgttttggtcatcgcgccgtcgttcgccggcgagcaagcgcgcccgaaccggtgaaccccccaaccgccgccggaggtgacgttcccgctgacgtcatgggggccgtctgccattccgacgtttccggagagtccgttttcgcaggagaagaatttgaatagttccaaggccagcaaggcaactcctggtttggaatggtatattcctggtttggagatagatctgtacagccgggtatggttgttcaggatggttgggcctgagcagcatgatgccgcgctacaagcctgagtacttgtttggtgttgagggatttgtccaggagttgcgtacgatgtcctttgccataggatttgggactgcccctttttatgcccagattcctcatgatcgtcacgaagagaagtgccgagtcaaagtcaccttgaacagtaatagtgaagatatctcctcagtgatgttcgaagctggaggaggaaactacatccatgcatgtcaggaggtggcaaggatcgccataggagagcttcgcgatcgctacagtgatcagttggccgacactgagtatcgctaccatcctcgccaaccacagggaagtgaccgtggcagctaccttgagactgagggaattgagaatgatgctaccacaaggcatttggttgagatgctgtgggctatggataaaactcgtgcggagactgtgttagcggctcaagatcgtgaagaccggaatcgtggtaagatttgcaagttagaggacaaagtggatcgtttggagaaggaactagccgcattgaagggagaagcaccaccgcagaaggccaggattcgtcttaccgcaaggaagagagctctatttgtccctcgctaccaattagcgctaaagatggtgctcactcgcagcaacgggaatggccccaacaacaacaataacaacaacaacaatggagagaatcccacacttgcccaagtcctggctcaacaggcacagcttatgaacatgatgatgcagcaactccagaaccagcagaaccagggaaataaccatgcacctccccagaacaagttagcagaatttcttcgtgtgaggccgcccactttctctagcaccactaatcatgttgaagctggtgattggctgcatgccatagaaaagaagttggatttgcttcagtgcactgattaggagaaggtctcatttgcatcacaccagctgcatggccctgcctctgaatggtgggatcacttccgcctgaacaggactactgctgaacctatcacttggcttgaattcaccgctgctttccggaagacgcatataccatcgggagtggtgtctctcaagaagaaggaattcaggtcgctcactcaggggtctcgctctgttactgagtatctgcacgagttcaatcgtctggctcgttatgctccggaagatgtgcgcactgatgaagagcgctaggagaggttcttggaaggacttaatgatgagctttcttacccactcatgactggggattatcatgatttccagaagttagtggataaggctattcgccaggaggacaagtacaatcgcatggagcagaagaaacgccggattgctcacttcaaggcacaacaggggaatagtcagaggccgcgtcttactttaggaccccagtccatgccacagggagtttcttcgtctgttgttcgtctgcagcgtcagttcttcaacaacaatgctggcaacaacatccgcaatcaagctccacgccctgttgcagcttcgacacagcaacagcctgccaagaaggagcaaggcagcaagcccggggtgtgcttcaactgtggagacccaggacattacgctgacaagtgtccgaagccccgacgcgtgaaggttgtccctgcccagagcaactctaccgcaccagcatcaaaggctcgtgtcaatcatgttgctgctgcagaagctcaaggtgctccagatgtgattttgggtacgttccttgttaacttagttcctgcaacattgcttttcgattctggtgctatacattcattcttatctatgagttttgcgggaaatcatgggatggaagtagaagatcttagacgtcctttgatggttagtaccccaagtaatcaagcactctctttgcaacatagcccctctgtcaggatagaaattcaaggagtaccatttctggccaatcttatcctgttagaatccaaagaccttgatgtcatcctagggatggactggttagccagatataaaggtgtgatagactgtgccaacagaaaagtaattctcaccaacaatgatggtcgagttgtaactgttcatgcattgtcttctgagtctttaaggtcaagtctgaaccaaataactttgaaagagattcctatagtccgggagtatcccgatgtgttcccagacgatttacctggtatgccgtctaaaagggatatagagttcagaatagatttggtaccaggaacaactccgatccataagagaccttatagaatggcagccaatgagttggtagaagtcaagaggcaagtagacgatttgcttcagaaaggatacatcagaccgagttcatctccatggagagctccggttatttttgtggaaaagaaagatcatacccagaggatgtgtgtggactatcgtgcactaaatgatgtgactatcaagaataagtatccgctgcccagaattgatgatttgtttgatcagcttaaaggtgccaccgttttctccaagatagatcttcgatcagggtatcaccagttgagaatcaaagaggaagatatacctaagacagcttttaccactaggtatgggttgttcgaatgtactgttatgtcttttggacttaccaatgcccccgctttcttcatgaacttgatgaataaggtgtttatggaatacctagacaagttcatggtggtctttattgatgacattcttatctactcccgaaccaaagaagagcatgaagaacatcttcgccttgcactagagaagctacgagaacatcaactgtatgccaagtttagcaagtgtgaattttggttgtctgaagtgaatttccttggtcacgtcatctcagcaggaggagttgccgtcgatcctagtaatgtggaatccgtaaccaactggaaacaaccaaagacagtttcagagattcacagtttcctaggcctcgcaggatattatcggaggtttatagagaatttttccaagattgctaagcccatgacacgactgcttcagaaagatgtgaagtacaagtggtcagaagaatgtgagcagagttttcaagagttgaagaatcgcttaatatcagctcctattttgattttacctgatccaaagaagggtttccaagtgtattgcgatgcatccaaacttgggttaggttgtgttctgatgcaagatgggaaggtggttgcctatgcatctcgtcagttacgtccgcatgagaagaactaccctactcatgatcttgagttagctgcagtggttcatgcgttgaaaatttggcgtcattatcttttcggtactcgtacagaggtgtacaccgatcacaagagtttaaagtatatctttactcagccggatctgaacatgagacaacggagatggttagaattaattaaggattatgacatgggaatttattatcacccgggaaaggctaatgttgtagcagacgctcttagcaggaaaggctattgcaatgctacggaaggacgacagttgccattagaattatgcaaggaatttgaaagattaaatttgggaatggtcagtagaggtttcgttgcagccttagaagcaaagcccactctaattgatgaagttagagaagcccaaattaatgatcctgatattcaagaaatcaagaagaatatgagaagaggaaaagctatcggtttcttggaggatgagcaaggaacggtatggttgggtgagagaatctgcgtccccgacaacaaagatttaaaagatgcaattctgaaagaagctcatgatactttatactccattcaccctggtagtaccaaaatgtaccaggatctcaaggaaagattttggtgggcaagtatgaagcgtgaaatcgcagaatacgtagcagtatgtgatgtttgtcagcgagtcaaggcagaacatcagaaacccgctggtttgctacagcctttgaagattcctgaatggaagtgggaggaaatcggtatggatttcatcactggtctacccagaacgtcatcaggccatgactctatttgggtgatagtcgacagacttaccaaagtggctcatttcatcccagtaaagacaacctattctggaagtcggttggcggaattgtatatggcaaggattgtgtgtttgcatggcgtccctaagaaaatagtatctgatcgaggcagtcagtttacttcaaagttttggaagaagcttcaggaagagatgggttctaagctgaactttagtactgcttatcatccgcagacagacggacaaaccgaaagggtgaatcagattttggaagacatgttgagagcttgtgctttagacttcggtggaagttgggataagaatctaccttatgcagaattttcgtacaacaacagttatcaagctagtcttcagatggctccttacgaagcactgtatggtcgtaagtgccgcactccgcttttgtgggatcaaacgggagaacgtcaggtcttcgggacggatatcctgagggaagcagaagaaaaggtgaaaatcattcaagaaagattgcgtgtggcccagtctcgtcataagagttatgccgacaatcgtcgtagagaactaagttttgacgaaggagattatgtgtaccttcgtgtcacgcctcttcgaggagttcatcgttttcacaccaaaggaaaattggcaccgcattttgtgggaccttataagattgtcagtagaagaggagaggttgcttatcagttggagttaccttaatctttggcaggagtccataatgtgttccatgtgtcgcaattgaaaaagtgtttaagggtacctaccgaagaaaccaatcttgaacagatagaagtccaagaggatctgacctatcttgagaaaccaatccgtatcttggaaatagatgagagaagaaccagaaatcgagttatccgtttttgcaaagtccaatggagtaatcactcggaagaagaatcaacttgggaacgagaagatgaattgaagtcagctcatccgcatctgttcgccagtttttctgaatctcgaggacgagattctgtt

SEQ ID NO: 22935 - DNA, 3363 bp, Oryza sativa; identical to SEQ ID NO: 15653
  Clone ID: TF_OsC359_6754

SEQ ID NO: 22936 - DNA, 1521 bp, Oryza sativa
  Clone ID: TF_OsC359_7433
atggcatttgaagtaggttacgaggttgcccccgagtattgccagattccctatgaccccaatgaggagaagtgtcgtgttcgcgtgacgttgactagtgatcgtgaagaccttccgtcgataaagtttgaagctgggggaagaaagtacagccatgcttgtcaggaagcagccttggtggccattggagagctacgtcatcgctttgatgaggagttagagtcatcagctttccagtatcacccacacaagcctcatggtcaagactatggaacttacaactgtcccgaaggtgaaggtagtgccactgtgatgcacgccgtgtatatgcttagcgccatggatgcagtaggcgtggagcgggagaaagcagctcatgatagggaaaactggaaccgtggcaggatttgtaagttggagagcaaggtgtaccgtctgcagaaggaactagctgagcttaagggagaagcaccaccgccagcacccaagctacgcctcaccgcaaggaagagaacccgtccaccacctcgtctccagttagcttcgaagactggtgtggtgggagacgctgtgcctgatcatgctaaacctgtcatccatgtcttaagtgatgaggaagaagaggaagacctagaagaaagagagccagctactccagaggaggaagatccatctcttcattctgacgcaaggcgagacatgttgcttacatcaatggtgggatgtaactacatgagtttagttcttttgcttgtcagagactcgttatgccccagaagatgtcgcactgatgaagaacatcaggagaagtttttagagggattgaatgatgagttgtcttatgcattgatggctatggattactgggatttccagcagttgatggacaaggcgattcgccaagaagacaagtataataggatggaacagaaaaagcgtagggctgctcatttcaaggcacaacagggtagtagccagaggccgcacattgctttgggacctcaagctgcaccatacccacagggaggatcctcttcagttgctcgccctcaacgccagttctacaacaacaacactggtaatcgcagcaacgataatcgtaatatggtcactcgtcctgtagcagctccaactcagaatcatcctgtcaggaaggaacagggaagcaagccaggggtgtgcttcaattgtggtgatccaggacattatgctgataagtgtcccaagcctcggcgtgtgaagaatgctcctgttcagaacaactccaatgctccagcaccgaaggctcgtgttaatcatgttgcagccgcagaagcccagaatacacctgatgtggttttggaggaggagtgcttcaatgaagtggctaaacagccgggcccacatgtcagtgactcggcggcaagagaagcagaggcagcaggagagcaacggcgaccaacagcgttcgtggcggcgtattggcttcatcatatgtgggcgtcgttctgctgggacctaggcgatgtcagtggcgcaatg

SEQ ID NO: 22937 - DNA, 4422 bp, Oryza sativa; identical to SEQ ID NO: 15651
  Clone ID: TF_OsC359_7456

SEQ ID NO: 22938 - DNA, 6596 bp, Oryza sativa
  Clone ID: TF_OsC359_7538
aggtttcgttgcagccttagaagagaagcccactctaattgatcaagttagacaagcccaaattaatgatcctgatattcaagaaatcaagaagaatatgagaagaggaaaagctatcggtttcttggaggatgagcaaggaactgtatggttgggtgagagaatctgcgtccccgacaacaaagatttaaaagatgcaattctgaaagaagctcatgatactttatactccattcaccctggtagtaccaaaatgtaccaggatctcaaggaaagattttggtgggcaagtatgaagcgtgaaatcgcggaatacgtagcagtatgtgatgtttgtcagcgagtcaaggcagaacatcagaaacccgccggtttgctacagcctttgaagattcccgaatggaagtgggaggaaatcggtatggatttcatcactggtctacccagaacgtcatcaggccatgactctatttgggtgatagtcgacagacttaccaaagtggctcatttcatcccagtaaagacaacttattctggaaatcggttggcggaattgtatatggcaaggattgtgtgtttgcatggcgtccctaagaaaatagtgtctgatcgaggcagtcagtttacttcaaagttttggaagaagcttcaggaagagatgggttctaagctgaactttagtactgcttatcattcgcagacagacggacaaaccgaaagggtaaatcagattttggaagacatgttgagagcttgtgctttagacttcggtggaagttgggataagaatctaccttatgcagaattttcgtacaacaacagttatcaagctagtcttcagatggctccttacgaagcactgtatggtcggaagtgccgcactccgcttttgtgggatcaaacgggagaacgtcaggttttcgggatggatatcctgatggaagcagaagaaaaggtgaaaatcattcaagaaagattgcgtgtggcccagtctcgtcataagagttatgccgacaatcgccgcagagatttgagttttgaagaaggagattatgtgtatcttcgtgtcacgcctcttcgaggagttcatcgtttccacactaaaggaaaattggcaccgcattttgtgggaccttataaggttgtcagtagaagaggagaggtcgcttatcagttggagttacctcaatctttggcaggagtccataatgtgttccatgtgtcgcaattgaaaaagtgtttaagggtacctactgaagaagctaatcttgaacagatagaagtccaagaggatctgacctatattgagaaaccaatccgtattttggaaatagatgagagaagaaccaggaatcgagttatccgtttttgcaaagtccaatggagtaatcactcggaagaagaatcaacttgggaacgagaagatgaattgaaccgtggattcgagttcgattcggatcggtctctttcctccgagccttaactttccttctcgtcgccggtcaccgtgggccttcgccgcagccttccaacccctataaaaggatccccaagcccgccgctacccgtcgccaccctcgccttcatctctcgtcgctggtagagtcctagcctcccgtgcttcgtcgttgttccagtcatcgccgtcgctcgggaaggtcgccatcgtggtcgccgtcgcgtcgccttcctcgtccaccccttcgccgtcgcggaagaccgccggagcatcgccgtcgtcgtcaagccaaaggactccgccgccttttcctcgacgccgccgccgtccgttcattttccgccgctgttttggtcatcggtgagttcgccgcgtcgctctctacgtcgttcgccggtgagcatgcgcgcccgagccgccgccggaggtgacgtcaccgctgacgtcatcgtggccgtctgccattccgacgtttccggagagtccgttttcgcaggggaagattttgaagagttccaaggccagcaaggcaactcctggtttggaatggtatattcctggtttggagatagatctgtatagccggatgccgcgctacaagcctgagtacttgtttggtgttgagggatttgtccaagagttgcgtacgatgtcctttgccataggatttgggactgcccctttttatgcccagattcctcatgatcgtcacgaagagaagtgccgagtcaaagtcaccttgaacagtaatagtgaagatatcccctcagtgatgttcgaagctggaggaagaaactacatccatacatgtcaggaggtggcaaggatcgccataggggagctccgcgatcgctacagtgatcagttggccgacactgagtatcgctaccatcctcgtcaaccactgggaagtgaccgtggcagctaccttgagactaagggaattaagaatgatgctaccacaaggcatttggttaagatgctgtgggctatggatgaaacccgtgcggagactgtgttagcggctcaagatcgtgaagaccggaatcgtggcaagatttgcaagttagaggacaaagtggatcgtttggagaaggaactagctgcattgaagggagaagcaccaccgcagaaggccaggattcgtcttactgcaaggaagagagctctatttgtccctcgctaccaattggcaccaaaggtccgtgtggtggaaaaagaagttaccccagccctagcggatcctccggtcgtcaacatggtgctcactcgcaacaacgggaatgaccccaacaacaataataacaacagcaatggagagaatcccacacttgcccaagtcctggctcaacaggcacagcttatgaacatgatgatgcagcaactccagaaccagcagaaccagggaaataaccatgcacctccccagaacaagttagcagaatttcttcgtgtgaggccgcccactttctctagtaccactaatccagttgaagctggtgattggctgcatgccatagagaagaagttggatttgcttcagtgcgccgatcaggagaaggtctcatttgcatcacaccagctgcatggccctgcctctgaatggtgggatcactttcgccttaacaggactactgctgaacctatcacttggcttgaattcaccgctgctttccggaagacgcatataccatcgggagtggtgtctctcaagaagaaggaattcaggtcgctcactcaggggtctcgctctgttaccgagtatctgcacgagttcaatcgtctggctcgttatgctccggaagatgtgcgcactgatgaagagcgccaggagaagttcttggaaggacttaatgatgagctttcttatccactcatgactggggattatcctgatttccagaagttagtggataaggctattcgccaggaggacaagtacaatcacatggagcagaagaaacgccggattgctcacttcaaggcacaacaggggaatagtcagaggccgagtcttactttaggaccccagtccatgccacagggaggttcttcgtttgttgttcgtccgcagcatcagttcttcaacaacaatgctggcaacaacatccgcaatcaagctccacgccctgttgcagcttcgacacagcaacaacctgccaagaaggagcaaggcagcaagtccggggtgtgcttcaattgtggagacccaggacattacgctgacaagtgtccgaagccccgacgcgtgaaggttgtccctgcccagagcaactctaccgtaccagcatcaaaggcccgtgtcaatcatgttgctgctgcagaagctcaagatgctccagatgtgattttgggtacgtttcttgttaacttagttcctacaacagtgcttttcgattctggtgctacacattcattcttatctatgagttttgcgggaaatcatgggatggaagtagaagatcttagacatcctttgatggttagtaccccaagtaatcaggcactctctttgcaacgtagcccctctgtcagaatagaaattcagggagtaccatttctggccaatcttatcctgttagaatccaaagacattgatgtcatcttagggatagactggttagccagatataaaggtgtgatagactgtgccaacagaaaagtaactctcaccagcaatgatggtcgagttgtaactgttcatgcattgtcttctgagtctttaaggtcaagactgaaccaaataactttggaagagattcctgtagtccgggagtatcccgatgtgttcccagacgatttacctggtatgccgcctaaaagggatatagagttcagaatagatttggtaccaggaacaactccgatccataagagaccttatagaatggcagccaatgagttggcagaagtcaagaggcaagtagacgatttgcttcagaaaggatacatcagaccgagttcatctccatggggagctccagttatttttgtggaaaagaaagaccatacccagaggatgtgtgtggactatcgtgcactaaatgatgtgactatcaagaataagtatccgttgcccagaattgatgatttgtttgatcagcttaaaggtgccaccgttttctccaagatagatcttcgatcaggatatcaccagttgagaatcaaagaggaagatatacctaagacagcttttaccactaggtatggattgttcgaatgtactgttatgtcttttggacttaccaatgcccccgctttcttcatgaacttgatgaataaggtgtttatggaatacctagacaagttcgtggtggtctttattgatgacattcttatctactcccgaaccaaagaagagcatgaagaacatcttcgccttgcactagagaagctacgagaacatcaactgtatgctaagtttagcaagtgtgaattttggttgtctgaagtgaagttccttggtcacgtcatctcagcaggaggagttgccgtcgatcctagtaatgtggaatccgtaaccaactggaaacaaccaaagacagtttcagagattcgcagtttcctaggcctcgcaggatattatcggaggtttatagagaatttttccaagattgctaagcctatgacacggctgcttcagaaagatgtgaagtacaagtggtcagaagaatgtgagcagagttttcaagagttgaagaatcgtttaatatcagctcctattttgattttacctgatccaaagaagggtttccaagtgtattgcgatgcatccaaacttgggttaggttgtgttctgatgcaagatgggaaggtggttgcctatgcatctcgtcagttacgtccgcatgagaagaactaccctactcatgatcttgagttagctgcagtggttcatgcgttgaagatttggcgtcattatcttttcggtactcgtacagaggtgtataccgatcacaagagtttaaaatatatctttactcagccggatctgaacatgagacaacggagatggttggaattaattaaggattatgacatgggaattcattatcacccgggaaaggctaatgttgtagcagacgctcttagcaggaaaggctattgcaatgctacggaaggacgacagttgccattggagttatgcaaggaatttgaaagattaaatttgggaatggtcagaagaggtttcgttgcagccttagaagcaaagcccactctaattgatcaagttagagaagcccaaattaatgatcctgatattcaagaaatcaagaagaatatgagaagaggaaaagctatcggtttcttggaggatgagcaaggaactgtatggttgggtgagagaatctgcgtccccgacaacaaagatttaaaagatgcaattctgaaagaagctcatgatactttatactccattcaccctggtagtaccaaaatgtaccaggatcttaaggaaagattttggtgggcaagtatgaagcgtgaaatcgcggaacacgtagcagtatgtgatgtttgtcagcgagtcaaggcagaacatcagaaacccgccggtttgctgcagcctttgaagattcccgaatggaagtgggaggaaatcggtatggatttcatcactggtctacccagaacgtcatcaggtcatgactctatttgggtgatagtcgacagacttaccaaagtggctcatttcatcccagtaaagacaacttattctggaagtcggttggcggaattgtatatggcaaggattacagacggacaaaccaaaagggtaaatcagattttggaagacatgttgagagcttgtgctttagacttcggtggaagttgggataagaatctaccttatgcagaattttcgtacaacaacagttatcaagctagtcttcagatggctccttacgaagtactgtatggtcggaagtgccgcactccgcttttgtgggatcaaacgggagaacgtcaggttttcgggatggatatcctgagggaagcagaagaaaaggtgaaaatcattcaagaaagattgcgtgtggcccagtctcgtcataagagttatgccgacaatcgtcgtagagatctaagttttgacgaaggagattatgtgtaccttcgtgtcacgcctctttga

SEQ ID NO: 22939 - DNA, 3795 bp, Oryza sativa
  Clone ID: TF_OsC359_7558
atggctgctgtccgaatgaccctccgatgggatgggtcataccaacctccactccgccggaagcagatgccgcgctacaagcctgagtacttgtttggtgttgagggatttgtccaggagttgcgtacgatgtcctttgccataggatttgggactgcccctttttatgcccagattcctcatgatcgccacgaagagaagtgccgagtcaaagtcaccttgaacagtaatagtgaagatatcccctcagtgatgttcgaagctggaggaagaaactacatccatgcatgtcaggaggtggcaaggatcgccataggagagctccgcgatcgctattgtgatcagttggccgacactgagtatcgctaccatcctcgtcaaccacagggaagtgaccgtggcagctaccttgagactgaaggaattgagaatgatgctaccacaaagcatttggttgagatgctgtgggctatggatgaaacccgtgcggagactgtgttagcagctcaagatcgtgaagaccggaatcgtggtaagatttgcaagctagaggacaaagtggatcgtttggagaaggaactagccgcgttgaagggagaagcaccaccgcagaaggccaggattcgtcttactgcaaggaagagagctctatttgtccctcgctaccaattggcgccaaaggtccgtgtggtggagaaagaagttaccccagccctagcggatcctccggtcgtcaataataagttagcagaatttcttcgtgtgaggccgcccactttctctagcaccactaatcctgttgaagctggtgattggctgcatgccatagaaaagaagttggatttgcttcagtgcactgatcaggagaaggtctcatttgcatcacatcagctgcatggccctgcctctgaatggtgggatcatttccgccttaacaggactactgctgaacctatcacttggcttgaattcaccgctgctttccggaagacgcatataccatcgggagtggtatctctcaagaagaaggaattcaggtcgctcactcaggggtctcgctctgtcactgagtatctgcacgagttcaatcgtctggcccgttatgctccggaagatgtgcgcactgatgaagagcgccaggagaagttcttggaaggacttaatgatgagctttcttacccactcatgactggggattatcctgatttccagaagttagtggataaggctattcgccaggaggacaagtacaaccgcatggaacagaagaaacgccggattgcttacttcaaggcacaacaggggaatagtcagaggccgcgtcttactttaggaccccagtccatgccacagggaggttcttcgtctgttgttcgtccgcagcgtcagttcttcaacaacaatgctggaaacaacatccgcaatcaagctccacgccctgttgcagctccaacacagcaacagcctgccaagaaggagcaaggcagcaagcccggggtgtgtttcaattgtggagacccaggacattacgctgacaagtgtccgaagccccgacgcgtgaaggttgtccctgcccagagcaactctaccataccagcatcaaaggcccgtgtcaatcatgttgctgctgcagaagctcaagatgctccagatatgattttgggtacgtttcttgttaacttagttcctgcaacagtgcttttcgattctggtgctacacattcattcttatctatgagttttgcgggaaatcataggatggaagtagaagatcttagacgtcctttgatggttagtaccccaagtaatcaggcactctctttgcaacgtagcccctctatcagaatagaaattcaaggagtaccatttctggccaatcttatcttgttagaatccaaagaccttgatgtcatactagggatggactggttagccagatataaaggtgtgatagactgtgccaacagaaaagtaactctcaccagtaatgatggtcgagttgtaactgttcatgcattgtcttctgagtctttaaggtcaagtctgaaccaaataactttggaagagattcctgtagttcgagagtatcccgatgtgttcccagacgatttacctggtatgccgcctaaaagggatatagagttcagaatagatttagtaccaggaacaactccgatccataagagaccttatagaatggcagccaatgagttggcagaagtcaagagacaagtagacgatttgcttcagaaaggatacatcagaccgagttcatctccatggggagctccggttatttttgtggaaaagaaagaccatacccagaggatgtgtgtggactatcgtgcactaaatgatgtgactatcaagaataagtatccgctgcccagaattgatgatttgtttgatcagcttaaaggtgccaccgttttctccaagatagatcttcgatcagggtatcaccagttgagaatcaaagaggaagatatacctaagacagcttttaccactaggtatgggttgtttgaatgtactgttatgtcttttggacttaccaatgcccctgctttcttcatgaatttgatgaataaggtgtttatggaatacctagacaagttcgtggtggtctttattgatgacattcttatctactcccgaaccaaagaagagcatgaagaacatcttcgccttgcactagagaagctacgagaacatcaactgtatgctaagtttagcaagtgtgaattttggttgtctgaagtgaagttccttggtcacgtcatctcagcaggaggagttgccgtcgatcctagtaatgtggaatccgtaaccaactggaaacaaccaaagacagtttcagagatttgcagtttcctaggcctcgcaggatattatcggaggtttatagagaatttttccaagattgctaagcccatgacacgactgcttcaggaagagatgggttctaagctgaactttagtactgcttatcatccacagacagacggacaaaccgaaagggtgaatcagattttggaagatatgttgagagcttgtgctttagacttcggtggaagttgggataagaatctaccttatgcagaattttcgtacaacaacagttatcaagctagtcttcagatggctccttacgaagcactgtatggtcggaagtgccgcactccgcttttgtgggatcaaacgggagaacgtcaggttttcgggacggatatcttgagggaagcagaagaaaaggtgaaaatcattcaagaaatattgcgtgtggcccagtctcgccataagagttatgccgacaatcgtcgtagagatctaagttttgacgaaggagattatgtgtaccttcgtgtcacgcctcttcgaggagttcatcgttttcacaccaaaggaaaattggcaccgcgttttgtgggaccctataagattgtcagtagaagaggagaggttgcttatcagttggagttacctcaatctttggcaggagtccataatgtgttccatgtgtcgcaattgaaaaagtgtttaagggtacctaccgaagaaactaatcttgaacagatagaagtccaagaggatctgacctatgttgagaaaccaatccgtatcttggaaatagatgagagaagaaccaggaatcgagttatccgtttttgcaaagttcaatggagtaatcactcggaagaagaatcaacttgggaacgagaagatgaattgaagtcaactcatccgcatctgttcgccagttcttccgaatctcgaggacgagattctgtttaa

SEQ ID NO: 22940 - DNA, 3681 bp, Oryza sativa
  Clone ID: TF_OsC359_7854
atggtgctcactcgcagcaacgggaatggccccaacaacaacaacaacaacaacaatggagagaatcccacacttgcccaagtcctggctcaacaggcacagcttatgaacatgatgatgcagcaactccagaaccagcagaaccagggaaataaccatgcacctccccagaacaagttagcagaatttcttcgtgtgaggccgcccactttctctagtaccactaatcctgttgaagctggtgattggctgcatgccatagaaaagaagttggatttgcttcagtgcaccgatcaggagaaggtctcatttgcatcacatcagttgcatggccctgcctctgaatggtgggatcacttccgccttaacaggacaactgctgaacctatcacttggcttgaattcaccgctgctttccggaagacgcatataccatcgggagtggtgtctctcaaaaagaaggaattcaggtcgctcactcaggggtctcgctctgttaccgagtatctgcacgagttcaatcgtctggctcgttatgctccggaagatgtgcgcactgatgaagagcgtcaggagaagttcttggaaggacttaatgatgagctttcttacccactcatgactggggaacagaagaaatgccggattgctcacttcaaggcacaacaggggaatacttcgacaccgcaacaacctgccaagagggagcaaggcagcaagcccggggtgtgcttcaattgtggagacccaggacattacgctgacaagtgtccgaagccccgacgtgtgaaggttgtccctgaccagagcaactctaccgtaccagcatcaaaggcccgtgtcaatcatgttgttgctgcagaagctcaagatgctccagatgtgattttggaaaagaaagatcatacccagaggatgtgtgtggactatcgtgcactaaatgatgtgactatcaagaataagtatccgctgcccagaattgatgatttgtttgatcagcttaaagccgaggggagggggcgcgcggaccgggtccacgggagtggggcccacgcggcagcctcacggtccacggtggaccggccactcggcgcgcccgagggcggccaagccggcgcagccggcgggaggcggcgcgcctgtgccccgatggtcgccgccggctaccaccagcgcgacggagcggcgcccgagagaggggagggaaagggggaaacgaagcggcggtccacggctcaccacgggtcgacggcgacgatggaaacggcgaccggagcggaggaaggcggtggcgcggctcgggtcgacggggtcgacggcgttccggcggtcggcgagcgaaacggaggggtggacgaggtcggtgaggatgcggcgaagccgaaggaggcggcgtcgaggtgggaggtggtccggggcgacaacggcggcggaccggagctcggcagcgacggcggagagagagagcgacggcgcgagctcgattccggcggggagagagggcggcgagtggcggaaacggtggtggggagctcggggagggtttatatagggttgggagtgagagagggtggccggaggagggggaaatgggcgcgggagacccggccgccattaatggcgccggcgagcaagtgtgaattttggttgtctgaagtgaagttccttggtcacgtcatctcagcaggaggagttgccgtcgatcctagtaatgtggaatccgtaaccaactggaaacaaccaaagacagtttcagagattcgccgtttcctaggcctcgcaggatattatcggaggtttatagagaatttttccaagattgctaagcccatgacacgactgcttcagaaagatgtgaagtacaagtgcctcgcgacgccgtcgtcaccgttgctccagccgtgctccgccatcgctccagtcatcgccgtcgctcggggaggtcgccatcgtggtcgccgttgcgtcgccgtcctcgtccgccccttcgccgttgctgtcgaccgccggaacaccgccgccgtcgtcaagccgaaggtcgccgccgcttcttccttgacgccgtcgccgtccgttgatcttccgccgccgttttggtcaccggtgagttcgccgcgtcaccctctacgtgctggtgccctccgttcgcgtcgtcgcgccgtcgttcgccggcgagtttgcaagcccgagccgccgccggtggtgacgtcaccgctgacgtcatcgtcgtcgtctctcgtggtccggccgtggaccggagaagattttgaagagttccaaggccagcaaggcaatttgttattatgtgcctcggctgatttctggacgaggatttacacacatatgccgcgcttcaagcctgagtacttgttcggtactgagggatttgtccaggagttgcgtacgttgtcctttgccataggattcgggactgcccctttgtatgcccagattcctcatgatcatgatgaagagaagtgccatgtcaaagtcaccttgaacagtaatcgtgaagatatcccatcggtgatgttcgaggctggagggggaagctacattcatgcttgtcaggaggtggcaaggatcaccataggagagctccgcgaaagctacaatgatcagttggccgacactgagtatcgctatcatcctcgccaaccccagggaagtgaccgtggcagctaccttgaacctgcagggattgagaatgatgctaccaccaggcatttggttgagatgctgtgggccatggatgagacctgcgctgagattatgttagcagctcaagatcgcgaaggccggaatcgtggtaagatttgcaagctggaagacaaggtggatcgtttggagaaggaactagccgcattgaagggagaagcaccaccacaaaaagctagggttcgtcttaccgcaaggaagagagctctatttgtccctcgctaccagttggcgccaaaggttcgtgtggtggaaaaagaagccgcctcagccccagcggatcctccgatcgtcaacatggtgtttactcgcagcaatgggaatggccccaacaacaacaacaccaccaacaacaataatggagagaatcccacgcttgcccaagtcctggctcaacaggcacaggttatgaatatgatgatgcagcaactccagaaccaacagaaccagggaaacaaccatgcacctccccagaacaagttagcagaatttcttcgtgtgaggccgcccactttttctagcactaccaatccagttgaggctggtgattggctgcatgccatagaaaagaagttggacctgcttcagtgcaccgatcaagaaaaagtctccttcgcgtcacatcagcttcatggccctacctctgagtggtgggatcatttccgtctaaataggactaccgtggaaccaatcacttggcttgagttcactgctgctttccggaagacgcacataccatcgggagtggtgtctctcaagaagaaggaattcagggcactcactcagggatctcgctctgtcaccgaatacttgcatgaattcaatcgtctggctcgctatgcttcggaagatgtgtgcaccgatgaagagcgtcaagagaagttcttggaaggactgaatgatgagctctcttacccattaatgactggggattatcatgattttccagaagttggtggataa

SEQ ID NO: 22941 - DNA, 4411 bp, Oryza sativa
  Clone ID: TF_OsC359_8131
gtcgccctcttttgtttgccccctttcccgagctctctagtgccccgtggagtcgccgccgcgccgccctagtcgccgccatcgccggccgccgctcagccgcgccgcgccgccgcttgcgtcgtcgccgccgccttttctcgccgccgttaggtgcgcgtgagggagagctagctcggccgccccctctccgctgtcgtcggtcgccgtgaagccgccgccaccgttgaccgatccgccgccgccacataacctggtcgccggccaccatccgtcgtcgttcgtcgcgttggtgagtaccgttgagatcgcgtcttcgccctctacgcgtaggtgccctccaatagtccggccgagcctccgtagcgccggcgaggtcgtgccggctttatcttttgtatagcatgattcattatagtgtgctagactgtgaagcggcgagaagtccgtgggggtcgctggggagtccattgcctctggttttgagggggagattatgatccaggaacggtgcactgtgatgccgccccattcaccgagaaatttgatcaaggtgttaggattcgtcagggagctgaggttgatggcttttgagtatcatcctcacaagcctcatggtcaagattatggaacttacacctatcctgatggtgaggagagtgccactctgatgcaggcggtgcatatgcttagttctatgtatgcagtaagtgtggagcgagacaaagccgctcatgacagggaaaactggaatcgaggcaagatttgcaagttggagagtaaggtgtaccgtctacagaaggaattagctgagcttaaaggagagacgccgccgccaacacccaagcttcacctcaccgcaaggaagagaacctgtccaccacctcgtctccagttagcttcgaagcttcgcgtgatgggagatgctgtgccagatcgtgctgaacctgtcatccacgtcttaagtgatgaggaagaagaggaatacccagaagaaagaatggtgaacacgcgcactggaagtggaagtggagctgctaacaatggaggagattccacgctagctcagattttggcccaacaaacacaactgatcaatctgttagtgcagcaggcacagaatcagcaggcaaacaaccagaaccagaatcaacccccacctccccaaaacaagttggcagatttcttacgtctgcatggtcccgctgctgaatggtgggatcactttcgccaagccagggctgaaggagaacctatcacttggcaggaattcacggccgctttcaagaacacgcacataatgacaggtgttgtagctctgaagaagagagaatttagagcgctcaaccagggatctcgttcggtcactgagtacctccatgatttcaatcgtttagctcgctatgctccaaaatatgttcgcaccgatgaagaacgtcaggagaagtttttggagggactgaatgatgagttgtcttatgctttgatgtctacggatttccgggatttccagcagttagtggacaaggctattcgtcaggaagacaagtacaatcgaatagagcagaagaagcgcagggctgcccaatttaaggctcaacagggcagtaaccagaggtcgcgtctcgttacgggacctcaagctacatcataccctcaaggaggatcttcgtcagttgctcgccctcaacgccagttctacaacaacaatactggtaatcgtggcaatgacaaccgcaacgtggtcgctcgtcctgcagcaactccagctaagaaccagcctgtcaggaaggaacagggaagcaagccaggggtgtgcttcaattgtggtgatccagggcactatgctgataagtgtcctaagcctcggcgtgtgaagaacgctccagccccgaacaactctaatactccagcaccgaaggcacgtgttaatcatgttgtagcggcagaagctcagaatgcaccagatgtggttttgggtatgccacctaagagagacatagagttccggatagacttggtccctggaaccaaccctatccataagagaccttacagaatggcagctaatgagttagctgagataaagaggcaggtggatgatttgcttcagaaaggatatatcaggcccagtacttcgccgtggggagcaccagtcatctttgtggagaagaaagatcatactcagagagtgtttatggaatatctggataagtttgtcgtggtgtttattgatgacattcttatttactccaagacaaaagaagaacatgaagagcatcttcgtctagctttagagaaactacgtgagcatcagctctatgccaagttcagtaaatgtgaattttggttgtctgaagtgaagtttcttggtcatgtcatctcatccggaggagtggcagtagatccaagcaatgtggagtcagtgttaaattggaagcaacccaagacggtttcagaaattcgtagtttccttggacttgcggggtactaccgcaggtttattgagaacttctcaaagatcgccagaccaatgactcgtctgcttcagaaggatgtgaagtataagtggacagaagattgcgagcaaagtttccaagaactgaagaaaaggctagtgactgcgcctgtgttaattctgcctgattcaaggaaaggttttcatgtgtattgtgatgcatcccgactcggtttgggttgtgttttgatgcaagaaggaatggtggttgcctatgcatctaagcaattacgtcctcatgagaataactacccgacgcatgacctagagttggcagctgtagtgcatgcattgaagatttggcgtcattatcttttcggtaaccgtacagagatgtatacggatcataaaagtttgaaatggttagagttgattaaagattatgatatggaaatccattatcacccgggtaaagcaaatgttgtagccgatgccctcagcaggaaaagctattgtaatatgtcagaaggtcgacatctaccttgggagttatgccaagaatttgaaaagctgaatttggggatagtcagcaaaggttttgtggctgctttagaagctcaacctaccttgtttgatcaagttagagaagctcaagggaatgatcctgacatccaagaaatcaaaaagaacatgagaagaggaaaagccatcggttatgtagaagatgagcaaggaactgtgtggttaggagaaagaatttgggtacctgataacaaggagttgaaggataccatcgtgaaagaagctcatgaaactttgtattccattcaccctagaagcactaagatgtaccaagacctaaagcaacaattctggtgggctagtatgcgacgtgagatagcagaatatgtggctctatgtgatgtatgtcagcgagtcaaggctgaacatcagaagccagccggtctgttgcaaccattgaagattccagagtggaagtgggaagaaatagagctatacatggccagagtggtatgtttgcatggagttcccaagaagatagtgtcagatagaggtagtcagtttacctcgaagttttggcagaagctacaagtagagatgggtacccgtttgaatttcagtaccgcttatcaccctcaaacagacggtcagacagaaagagtaaaccaaattttagaagacatgttgagaccatgtgttctagattttggtagaagttgggataagaatttgccgtacgcggaattctcatataacaacagttatcaagctagtttgcaaatggctccgtatgaagcattatatggccgaaagtgtcgtacgccgctcttgtgggatcaaaccggtgagcgtcaagtttttgggacagacatattgcgagaggcagaagaaaaagtgaagattatccaagaaaggttgcgcgttgctcagtcacgtcagaagagctatgccgacaatcgtcgcagagatttgactttcgaaggagattatgtgtaccttcgggttacgccgttacgaggtgttcatcgtttccagaccaaagggaaattggcaccgcgtttcgtgggaccttttaagatcgtaagtcgaagaggtgaagtagcttatcagctagagttgcctccgtcaatggcgggaatacacgacgtgttccacgtgtcacagttgaagaaatgtttgcgtgtacctacggaggaagcagatccggaacatatagagcttcaagaagatttaacctatgttgagaagccagtcagaatcttggaagtaagtgagaggaataccaggaatcgcgttatacggttctgtaaggttcagtggagcaatcattcagaagaagaagccacttgggagcgagaagatgaattaaagtcagctcaccctcatctcttcgccggttcttctgaatctcgaggacgagattccgtttaa

SEQ ID NO: 22942 - DNA, 6981 bp, Oryza sativa
  Clone ID: TF_OsC359_8471
cagatctcaggcgaaggtgtggttccgccaaatcttcaatgcatgcaccacagctgccaattctaggtcatgcgttgggtagttattctcatgaggacgtaattgcctagatgcataggcaaccacctttccttcttgcatcaacacacaacccaaaccgagtcgggatgcatcacaatacacttggaaacctttcctcgaatcaggcaaaattaatacaggcgcagtcactagccttttcttcaattcttggaaactttgttcacaatcctctgtccacttgtacttcacttccttctgaagcagacgagtcattggtctggcgatctttgaaaagttctcaataaacctgcggtaataccctgcaagtccaaggaaactacgaatttcggaaaccgtcttgggttgcttccaacttaacactgactccacattgcttggatctactgccactccaccagacgagatgacatgaccaagaaacttcacttcggacaaccaaaattcacatttactgaacttggcataaagctgatgctcacgtagtttctctaaagctagacgaagatgctcttcatgttcttcctttgtcttggagtaaataagaatgtcatcaataaacaccacgacaaacttatccagatattccataaacaccttgttcatcagattcatgaaaaaggctggggcattagtgagtccaaatgacataacggtacattcgaacaaaccataccgagttgtgaaggcggtctttggtatatcttcctcacggattcgaagttaataatatccagaacggagatctatcttggagaaaactgtagcaccttccagttgatcaaacaggtcatcaattctgggtagaggatacttattcttgatagtaacctcattcaacgctcgataatccacgcacattctctaagtatgatctttcttctccacaaagatgactggtgctccccatggcgaagtactgggtctgatgtatcctttctgaagcaaatcatccacctgtctcttcacctcagctaactcattagctgccattctgtacggtctcttatggatagggttggttccaggtaccaagtctatccgaaactctatgtctctcttaggtggcatacctggcaaatcctcgggaaacacgtctgggtagtcttgtactatggggatctcttgtagagcaacttggtttaagatcacaccatgagatttaggagaggacacaaagaaagaaactgtttccccattgctattggttaaagtcaccttacggttggcacaatctataactcctctgtgacgagataaccagtccatccctaagataacatctagatctttggattctagcaagataagcgaggatgggaaaggaacttcttctatttctatagtagcggaaggacaatactgtgtcgaaaatacttgattgcctggggtattaactagtaaaggtctcccaagactaataacttccatcccatgattgctcgcaaaacttttagacaaaaaagaatgcgtagcaccggaatcaaaaagcacagatgcgggtatagagttaacaggaaacgtacccaaaaccacatctggtgcattctgagcttctgctgctgcaacatgattaacacgtgcctttggtgctggagcattggagttattcggggctggagcgttcttcacgcgccgaggcttaggacacttatcagcataatgtcctggatcaccacaattgaagcacacccctggcttgcttccctgttccttcctgacgggctggttctgagctggagttgctgcaggacgagcaaccatgttgcggttgtcattaccacgattaccagtattgttgttgtagaactggcgttgggggcggacaactgatgaagatcctccttgagggtacgatggagcttgaggtcccgtaacgagacgcggcctctggttactgccctgttgtgccttgaattgggcagccctgcgcttcttctgctccatccggttatacttgtcttcctgacgaatcgccttgtccaccaactgctggaaatcccggaaatccgtagacatcaaggcataagacaactcatcattcagtccctccaagaacttctcctgacgctcttcatcggtgcgaacatcttccggagcataacgagctaaacggttgaaatcatggaggtactcggtgaccgaacgagatccttggttgagtgctctaaattctctcttctttagagctacaacacccgttggtatatgtgtctttttgaaagcggccgtgaattcctgccacgtaataggctctccttcagccctgccttggcgaaaatgatcccaccattcagcagcaggtccatgcagttgatgcgaagcaaaagaaactttctcctgctcagtacactggatcaagtccaacttcttctccaccgcatgcagccaatctcctgcttctactggattggtagtgcgccttgcgtcggaacgaagcgatggatcttcttcctctggagtagctggctctctttcttcagggtcttcctcctcttcctcatcacttatgatgtcgatgacaggttcagcacgatcgggcacagcttcacccatcacgcgaatcttcgaagctaactggagacgaggtggcggacaggttctctttcttgcagtgaggcgaagcttgggtgttggcggcggcgtttctcctttaagttcagctaattccttctgtagacggtacaccttgctctccaacttgcaaatcttgcctcgattccagttttccctgtcatgagctgctttggctcgctccacacttactgcatccatagcactaagcatatgcaccgcatgcatcagagtggcactctcttcaccatcaggacaggtataggttccatagtcttgaccatgaggcttgtgaggatgatactggaaagctgatgaatccaactcttcttatttatttcttctgattattattatcatcacattcacggagaaagcagcatccaaacatgatagatgctactagcaaatatcgataattaattatccagtaacccggataactaattaaataattaattaagcaaaggcctaattaattaattactaaggaagttaatccatgccacccccaaacatggggcagccaaagaaaccagtgtgctgcaggttgcaccggccgtagtccgccatcgtgctcgccgtcctcaccgtcgcggcagcggcggcgggctacggcggctacggcgacgtcggcgagtactgccgcgtggggaaggcggtgtcccggaacccggtcccatcgtgccggaactacatcgcgcggtggtgcgccgtcgccgggggccgcctggactccggcaagcagccgccgcggcagctcctggagccgtgctgccgggagctcgccgcagtgccgatgcagtgccggtgcgacgcgttgagcgtgctggtgcgtggcgtggtcacggaggagggcgaccgcgtcgccgggatgatctcgcagcacgcggcgcccgggtgcgacgccgcgacgatcgccgggatggcgagcgcgctgacggactacggccggtgcaacctgcagcacactggtttctttggctgccccatgtttgggggtggcatggattaacttccttagtaattaattaattaggcctttgcttaattaattatttaattagttatccgggttactggataattaattatcgatatttgctagtagcatctatcatgtttggatgctgctttctccgtgaatgtgatgataataataatcagaagaaataaataagaagagttggattcatcagctttccagtatcatcctcacaagcctcgtggtcaagactatggaacctatacctgtcctgatggtgaagagagtgccactctgatgcatgcggtgcatatgcttagtgctatggatgcagtaagtgtggagcgagacaaagcagctcatgacagggaaaattggaatcgaggcaagatttgcaagttggagagcaaggtgtaccatctacagaaggaattagctgaacttaaaggagaaacgccgctgccaacacccaagcttctcctcaccgcaagaaagagaacctgtccgccacctcgtctccagttagcttcaaagattcgcgtgatgggtgaagttgtgcccgatcgtgctgaacttgtcatcgacatcatggtgaacacgcgaactggaagtggaagtggaagtggaagtggagctgctaacaatggaggagatcccacgctagctcagattctggcccaacaaacacaactgatcaatctgttagtgcagcaggcacagaatcagcaggcaaacaatcagaaccagaatccacccccacctccccaaaacaagctggcagatttcttacgtcagttggtggacaaggcgattcgtcaggaagacaagtataaccggatggagcagaagaagcgcagggctgcccaattcaaggcacaacagggcagtaaccagaggccgcgtctcgttacggaacctcaagctccatcgtaccctcaaggaggatcttcatcagttgtccgcccccaacgccagttctacaacaacaatactggtaatcgtggcaatgacaaccgcaacatggttgctcgtcctgcagcaactccagctcagaaccagcccgtcaggaaggaacagggaagcaagccaggggtgtgcttcaattgtggtgatccaggacattatgctgataagtgtcctaagcctcggcgcgtgaagaacgctccagccccgaacaactccaatgctccagcaccgaaggcacgtgttaatcatgttgcagcagcagaagctcagaatgcaccagatgtggttttgggtacgtttcctgttaactctatacccgcatctgtgctttttgattccggtgctacacattcctttttgtctaaaagttttgcgagcaatcatgagatggaagttattagtcttgggagacctttactagttaataccccaggcaatcaagtatcttcgacacagtattgtccttccgctactatagaaatagaagaagttcctttcccatcctcacttatcttgctagaatccaaagatctagatgttatcttagggatggattggttatctcgtcacagaggagttatagattgtgccaaccgaaaggtgaccttaacctgtagcgatggggaaaccgtttctttctttgtgtcctctcctaaatctcatggtgtgaccttaaaccaagtcgctctacaagaaatcccagtagtacaagactactcagatgtgtttcccgaggatttgccaggtatgccacctaagagagacatagagttccggatagacttggtccctggaaccaaccctatccataagagaccttacagaatggcagctaatgagttagctgagataaagaggcaggtggatgatttgcttcagaaaggatatatcaggcccagtacttcgccgtggggagcaccagtcatctttgtggagaagaaagatcatactcagagagtgtttatggaatatctggataagtttgtcgtggtgtttattgatgacattcttatttactccaagacaaaagaagaacatgaagagcatcttcgtctagctttagagaaactacgtgagcatcagctctatgccaagttcagtaaatgtgaattttggttgtctgaagtgaagtttcttggtcatgtcatctcatccggaggagtggcagtagatccaagcaatgtggagtcagtgttaaattggaagcaacccaagacggtttcagaaattcgtagtttccttggacttgcggggtactaccgcaggtttattgagaacttctcaaagatcgccagaccaatgactcgtctgcttcagaaggatgtgaagtataagtggacagaagattgcgagcaaagtttccaagaactgaagaaaaggctagtgactgcgcctgtgttaattctgcctgattcaaggaaaggttttcatgtgtattgtgatgcatcccgactcggtttgggttgtgttttgatgcaagaaggaatggtggttgcctatgcatctaagcaattacgtcctcatgagaataactacccgacgcatgacctagagttggcagctgtagtgcatgcattgaagatttggcgtcattatcttttcggtaaccgtacagagatgtatacggatcataaaagtttgaaatggttagagttgattaaagattatgatatggaaatccattatcacccgggtaaagcaaatgttgtagccgatgccctcagcaggaaaagctattgtaatatgtcagaaggtcgacatctaccttgggagttatgccaagaatttgaaaagctgaatttggggatagtcagcaaaggttttgtggctgctttagaagctcaacctaccttgtttgatcaagttagagaagctcaagggaatgatcctgacatccaagaaatcaaaaagaacatgagaagaggaaaagccatcggttatgtagaagatgagcaaggaactgtgtggttaggagaaagaatttgcgtacctgataacaaggagttgaaggataccatcgtgaaagaagctcatgaaactttgtattccattcaccctagaagcactaagatgtaccaagacctaaagcaacaattctggtgggctagtatgcgacgtgagatagcagaatatgtggctctatgtgatgtatgtcagcgagtcaaggctgaacatcagaagccagccggtctgttgcaaccattgaagattccagagtggaagtgggaagaaataggtatggattttataaccggtctacccagaacgtcggcaggacatgattctatttgggtagtggttgacagattgactaaagtcgctcatttcatacctgtcaaactgtcaaaacaacctacacggggaataaacttgcagagctatacatggccagagtg

SEQ ID NO: 22943 - DNA, 4631 bp, Oryza sativa
  Clone ID: TF_OsC1528_2065
atttgaagcatgtgtggtggagagaagaggggaaacacacacgcgctcgtctcgcctagcagggcgggcggcgtgcgtgcacgacgtacgtgtcgaatggtccgcaaaattggctcctcacccttgcgcagatgcagactccttttgcagttttgttttgctacgggaaattcggatttgttttgttttggaaacattccaaaaaatccggtacgtgaaaacggcatggagtccggataggttacgcgtgacttatccggttcggtcgaaatcaatctagggtttgcctcctactctgtactgcgccgtcgctcgtagactactccatcccgctcgccggcgtgcaccggcgatcgggagagcaggtctctggaacctctgccttcgacgtcctgcaccgggagaaggcggcaataagattaaatcattatatgtctataatctcaacaatccaaaaaccttattataggcactgtgattttactatggctggttttgccgatgcactgaggccggataaattcaccggtgtgcattttaagagatggcagatcagggtcactctgtggctgacagctatgaaatgcttctgggtgagtactggcaaacctgaaggagttcttactgctgaacagcagaagcaattcgaggaagccactactctctttgtgggatgcattcttagcgttcttggcgatcgtctggtcgaggtgtatatgcatatgaccgacgctaaggagttgtgggatgcactgaatactaaattcggtgctactgatgctagcaatgatctgtatatcatggagcagtttcatgactacaagatggctgacaaccgttctgtagtcgaacaggctcatgagatacaaaccatggctaaggaactcgaactccttaagtgtgtcttacccgacaaatttgtggccgggtgtattattgcaaaactacctccatcttggagaagtttcggtactgcactcaaacacaagagacaggaatactccgttgaggggttgatagcgtctcttgatgttgaggagaaagctcgggaaaaagatgccgcgtctaagggcgatggtgggcagtccagtgccaatgttgtgcacaaggcccagaacaagagcaaggggaaatacaaagctcagcagaccaccaacttcaagaagcagaagaagaacaacatcaatcctaatcaggatgagaggacttgctttgtgtgtggccaagttggtcatctggctaggaagtgtctacagtgcaaggggatgaaggcacctgcagggcagacttctaagtctgctaatgtgaccattggcaacactggagatggaagcgggtatggtaatttacctactgttttttcagttaatcaatctactaattggtgggttgatactggggccaatgtacatgtttgtgctgacatctcattgttttcttcttatcaggtcgcacggggttccaccgtcctaatggggaatgggtcacatgcttctgttcatggtgttggcacggtagatctgaagtttacttcgggaaagatcgtgcagctgaagaacgtgcagcatgtcccttctatcgataggaatcttgttagtggctcccgtctgactagagacggatttaagttggtttttgagtctaataaagtagtcgtgtctaaacatggatattttattggtaaaggttatgagtgcggaggcctgttccgcttttccctttctgatttctgcaataagtctgtgaaccatatttgtggcagtgtggatgatgaggctaatgtttggcattcacgtttatgtcatattaattttggcttgatgtctcggctttccagcatgtgtttaattcctaagttttccattgtcaaaggttctaagtgccatagttgtgtgcaatcgaagcaacctcgcaagcctcacaaggctgccgaggagagaaacttggcaccactagaactcctacattcagatctttgtgaaatgaatggggtgttgacgaagggtggaaaacgatatttcatgacattgattgatgatgctactagattttgctatgtgtacttgttgaaaacgaaagacgaggctctagactattttaaaatttataaggcagaagttgaaaatcaacttgacagaaagataaaaaggcttaggtctgatcgtggtggagagtttttctcgaacgagtttgacttattctgtgaggaacatggcatcatacatgagaggacgcctccctattctcccgagtctaatgggattgctgaaaggaagaaccgcacactgactgacttggtgaatgccatgttggacaccgcgggactgcctaagacatggtggggggaggcattgttgacctcaaatcatgtgttaaacagagttcctaacagaaataaggacaaaacaccatatgagatatggattggtagaaaaccatcactttcttatttacgcacatgggggtgcttggcgaaagtcaatgtaccaataacgaagaagcgcaaacttggacctaagactgtggactgtgtttttctgggatatgctcatcatagcattgcctatagatttttaatagttaaatccgaggtaccggacatgcatgttggtacaattatggagtctcgtgatgctaccttctttgagagctttttcccaatgaaggatacacatagtggttcgaaccaaccctctgaaataattcccaattcaatcacaccaccagaacaaactgaacatacacatgaacttgtctctgaggaggatgtcagtgaagctcctcgaaggagtaagagacaaaggacggctaagtcttttggtggtgatttcactgtgtacctcgtggatgacactcctaagtcaatttcagaagcatatgcatctcctgatgcagactactggaaggaggctgtccgtagtgaaatggattccattatcgctaacgggacttgggaggtgacagagcgaccctatgggtgtaaacctgtggggtgcaagtgggtgttcaagaagaagcttaggcctgacggtactattgaaaaatacaaggctcggcttgttgctaagggctatactcagaaagaaggcgaagatttctttgacacttactcacctgttgctagattgaccacaattcgtgtgctactttccctagcagcctcacatggtcttctcgttcatcaaatggacgttaagacagcttttcttaatggagagctggatgaggagatctatatgtatcaacctgatgggtttgtagttgaaggtcaagaaggcaaagtgtgcaaattgttgaagtctttgtatggtctgaaacaagctattaagcaatggcatgagaaatttgacaaaacattgacatctgcaggctttgcagtcaatgaggcagataaatgtgtgtactatcgctatggtgggggtgagggagttattttgtgcttgtatgttgacgacatactgatatttgggacaaaccttgaggtgataaatgaggttaaatcattcttgtctcaaaattttgatatgaaggatttgggagtagctgatgttatcttaaacattaagctaattagaggtgagaatgggattacactcttgcagtcccattatgtggagaagatcttgaatcgttttggctacattgatagtaagccttctccaacaccttatgatcctagcttgttgcttcgcaagaacaagagaattgctaggaatcaactggaatactcccaaatcattggctcgttgatgtacctggctagtgcaactaggcctgatatctcctttgctgtgagcaagttgagccgatttacctctaatccgggagatgatcactggcgtgcgcttgagcgagtaatgcgctatctgaaaggtactgtggaattggggcttcactatactgggtatcctgcggtactggagggttatagtgattctaactggatctctgatgtggatgagatcaaagccactagtggatatgttttcacactgggtggtggtgctgtttcatggaggtcttgcaaacagaccattttgacgaggtcaaccatggaagcagagctaacggtactggatactgctactgttgaggcagaatggctgcgtgatctattaatggatctgcctgttgttgaaaaaccggtgccggctattcttatgaactgtgacaatcaaacgacatgtgaaaagacgattgaagtctgtcaggaaattaagaaactccggagttataacgttggattacatccaaacagcgagaaacctggcagatcccttcacgaagggactatcacgaaatgtgatagacaatgcatcgaaggagatgggtttgagacccatattaaatcattatatgtctataatctcaacaccctctcctcatcgtcctccttctccggcaccggcggcccgccgcgcatcgacgatatcgtcgccgccgccacgatgacgacgccacgcgatcataagcttaaggtggtgaccaagcctggcggcggcgcgcagcgcgttgcggccatggagacgctgccgcgggagacgttctcgccgcgcttccgttgcggcggcggcgccgccgccgccgtggcgtcggccattgttggtagaagctaccttggtggtaaatga

SEQ ID NO: 22944 - DNA, 4797 bp, Oryza sativa; identical to SEQ ID NO: 15701
  unsure (1)..(4797): unsure at all n locations
  Clone ID: TF_OsC359_7669

SEQ ID NO: 22945 - DNA, 6338 bp, Oryza sativa
  Clone ID: TF_OsC359_7848
atggtgaacactcgcagcaacaggaatggtcccaatctcaacaaccccaataacaataacaatggagagaatccaacccttgctcaagttcttgctcaacagactcagcttatgaacatgatgatgcagcaacttcagaaccagcagaaccaaggaaataaccatgcaccccctcagaataagttagcagaatttcttcgtgtaaggccgcctgttttctctagtaccactaatcctgttgaagctggcgattggttgcatgccatagagaagaagttggatttgcttcagtgcactgatcaggagaaggtctcatttgcatcacatcagttgcatggccctgcctctgaatggtgggatcacttccgcctgaataggactactgctgaacctatcacttggcttgaattcaccgctgctttccggaagacacatataccatcgggagtggtgtctctcaagaagaaggagttcaggtcgctcactcaaggatctcgctctgttacggagtatttgcacgagttcaatcgtctagctcgttatgctccggaagatgtacgcaatgatgaagagcgtcaagagaagttcttggaaggacttaatgatgagctttcttacccactcatgactggagattatcatgatttccagaagttagtggataaggctattcgtcaggaggacaagtataaccgcatggagcagaagaaacgccggattgctcacttcaaggcacaacaggggagtagtcagaagccgcgtcttactttaggaccccagtccatgccacaaggagcttcgacacagcaacaacctgccaagagggagcaaggcagcaagcctatggtatgcttcaactgtggagacccaggacattatgctgacaagtgtccgaagccccgacgcgtgaaggttgtccctgcccagagcaactctgctgtaccagcatcaaaggcccgtgtcaatcatgttgcagctgcagaagctcaagatgctccagatgtgattttggtccgggagtatcctgatgtgttcccagatgatttacctgaaaggatacatcagaccgagttcatctccatggggagctccgtgaagttccttggtcacgtcatctcagcaggaggagttgccgttgatcctagtaatgtggaatccgtaaccaactggaaacaaccaaagacagtttcagagatccgcagtttcctaggcctcgcaggatattatcggaggtttatagagaatttttccaagattgctaagcccatgacacgactgcttcagaaagatgtgaagtacaagtggtcagaagaatccgtcgccgtcgctcgggaaggacgtcatcgtggtcgccaagtcgtcgccgtcctcgtccgccgcttcgccatcgtcggagaccgccggagcatcgtcgccgtcgtcaagccgaagaactccgccgtttcctcttcgtcgccggcgccgtccgttgcttctccgccgtcgttttggtcgtcgctcctggtttggaatggtatattcctggtttggagatagaactgtgcagccgggatggttgttcagaatggttgggcctatgcaacaggattcgtcatgatcgtcatgaagagaagtgccgagtcaaagttaccttgaacagtaacagtgaagatatcccatcagtgatgttcgaagctggaggaaggaactacatccatgcatgtcaggaagtggcaaggatcgccataggagagctccgtgatcgctacagtgatcagttggccgacactgagtatcgttaccatcctcgtcaaccgcagggaagtgaccgtggcagttaccttgagactgaaggaattgagaatgatgctaccacaagacatttggttgagatgctatgggctatggatgaaagtcgtgcggagactgtgttagcagctcaagatcgtgaagatcggaatcgtggtaagatttgcgagctagaagacaaggtggatcgtttggagaaggaactagccgcattgaagggagaagcaccgccgcagaaggccaggattcgtcttaccgcaaggaagagagctctatttgtccctcgctatcaattggcgccaaaggtccgtgtggtggagaaagaagttgccccagcagatcctccgatcatcatcataagtagtgatgaagaagaagaatccaagcgcaaccattccaagattgagtgggtagcaactcaagatgatgaagacgagccgaacgagccttcaatcgaccttcgatgctcggaagaacaagattttcccccggtttctcttcttgtgccctatccatgccagatggtgaacactcgcagcaacaggaatggtcccaatctcaacaaccccaataacaataacaatggagagaatccaacccttgctcaagttcttgctcaacagactcagcttatgaacatgatgatgcagcaacttcagaaccagcagaaccaaggaaataaccatgcaccccctcagaataagttagcagaatttcttcgtgtaaggccgcctgttttctctagtaccactaatcctgttgaagctggcgattggttgcatgccatagagaagaagttggatttgcttcagtgcactgatcaggagaaggtctcatttgcatcacatcagttgcatggccctgcctctgaatggtgggatcacttccgcctgaataggactactgctgaacctatcacttggcttgaattcaccgctgctttccggaagacacatataccatcgggagtggtgtctctcaagaagaaggagttcaggtcgctcactcaaggatctcgctctgttacggagtatttgcacgagttcaatcgtctagctcgttatgctccggaagatgtacgcaatgatgaagagcgtcaagagaagttcttggaaggacttaatgatgagctttcttacccactcatgactggagattatcatgatttccagaagttagtggataaggctattcgtcaggaggacaagtataaccgcatggagcagaagaaacgccggattgctcacttcaaggcacaacaggggagtagtcagaagccgcgtcttactttaggaccccagtccatgccacaaggagcttcgacacagcaacaacctgccaagagggagcaaggcagcaagcctatggtatgcttcaactgtggagacccaggacattatgctgacaagtgtccgaagccccgacgcgtgaaggttgtccctgcccagagcaactctgctgtaccagcatcaaaggcccgtgtcaatcatgttgcagctgcagaagctcaagatgctccagatgtgattttgggtacgttccttgttaactcagttcctgcaacagtacttttcgattctggtgctacacattcatttctatctatgagttttgcgggaaatcatgggatggaagtagaagatcttagacgtcctttgatggttagtaccccaagcaatcaagcactctctttgcaacgtagcccctatgtcagaatagaaattcaaggggtaccatttctggccaatcttatattgttagaatccaaagaccttgatgtcattctagggatggactggttagctagacataaaggtgtgatagactgtgctaacagaaaagtaactctcaccagcaatgatggtcgagttgtaactgttcatgcattgtcttctgagtttttaaggtcaagactgaaccagataactttggaagagattcctatagtccgggagtatcctgatgtgttcccagatgatttacctggtatgccgcctaaaagggatatagagttcagaatagatttggtacctggaacaactccgatccataagagaccttatagaatggtagccaatgagttggcagaagtcaagaggcaagtagatgatttgcttcagaaaggatacatcagaccgagttcatctccatggggagctccggttattttttgtggaaaagaaagatcatacccagaggatcttaaaggtgccaccgttttctccaagatagatcttcgatcagggtatcaccagttgaggatcaaagaggaagatatacctaagacagcttttaccactaggtacaggttgttcgaatgtactgttatgtcttttggacttaccaatgcccccgctttcttcatgaacttgatgaataaagtgtttatggaatacctagacaagtttgtggtggtctttattgatgacattcttatctactctaagaccaaagaagagcatgaagaacatcttcgccttgcattggaaaacaagtgtgaattttggttgtctgaagtgaagttccttggtcacgtcatctcagcaggaggagttgccgttgatcctagtaatgtggaatccgtaaccaactggaaacaaccaaagacagtttcagagatccgcagtttcctaggcctcgcaggatattatcggaggtttatagagaatttttccaagattgctaagcccatgacacgactgcttcagaaagatgtgaagtacaagtggtcagaagaatgtgagcagagttttcaagagttgaaaagtcgcttgatatcagctcctattttgattttgcctgatccaaagaagggtttccaagtgtattgcgatgcatccaaacttgggttaggttgtgttctgatgcaagatgggaaggtggttgcctatgcatctcgtcagttacgtccgcatgagaaaaactaccctactcatgatcttgaattggctgcagtagttcatgcgttgaagatttggcgtcattatcttttcggtactcgtacagaggtatatatcgatcacaagagcttaaagtatatctttactcagtcggatctgaacatgagacaaaggagatggttggaattaattaaggattatgacatgggaattcattatcacccgggaaaggctaatgtagtagcagacgctcttagcaggaaaggctattgcaatgctacggaaggacgacagttgccattggaattatgcaaggaatttgaaagattgaatttgggaattgtcagtataggtttcgttgcagccttagaagcgaagcccactctaattgatcaagttagagaagctcaaactaatgatcctgatatccaagaaattaagaagaatatgagaagaggaaaagctattggtttcttggaggatgagcacggaactcgagtcaaggcagaacatcagaaacccgccggtttgttgcagccttcaaagattcctgaatggaaatgggaagaaatcggtatggattttatcactggtttgcccagaacgtcattaggccaggactctatttgggtgatagtcgatagacttactaaagtggcacacttcattccggtaaagacaacttattccggaagtcgcttagcggaattgtatatggcaaggattgtgtgtttgcatggcgttcctaagaagatagtgtctgatcgaggtagtcaatttacttcaaatttttggaagaaacttcaggaagagatgggttctaagctgaactttagtactgcttatcatccgcagacagacggacaaactgaaagggtgaatcagattttggaagacatgttgagagcttgtgctttagatttcggtggaagttgggataagaatctaccttatgcagaattttcatacaacaacagttatcaagctagtcttcagatggctccttacgaagcactgtatggtcggaagtgccgcactccgcttttgtgggatcaaacgggagaacgtcaggttttcgggacggatatcgtaagggaagcagaagaaaaggtaaagatcattcaagaaagattgcgtgtggctcagtcgcgtcataagagttatgccgacaatcgccgcagagatttgagttttgaagaaggagattatgtgtatcttcgtgtcacgcctctacggggagttcatcgttttcataccaaaggaaaattggcactgcgttttgtgggaccttataagattgtcagtagaagaggagaggttgcttatcagttagagttacctcaatctttggcaggagtccataatgtgttccatgtgtcgcaattgaaaaagtgtttaagggtacctaccgaagaagctaatcttgaacagatagaagtccaagaggatctgacctatgtggagaaaccaatccgtatcttggaaacaaatgagagaaaaaccaggaatcgagttatccgtttttgcaaagtccagtggagtaatcactcggaagaagagtcaacttgggaacgagaagatgaattgaagtcagctcatccgtatctgttcgccagttcttccgaatctcgaggacgagattctgtttaa

SEQ ID NO: 22946 - DNA, 5205 bp, Oryza sativa
  Clone ID: TF_OsC1528_2390
cccttgcgcagatgcagcctccttttgcagttttgttttgctgcgggaaattcggatttgttttgttttgccttttgcagttttgttttggttttgttttgctgcgggaaattcggatttgttttgttttgccttttgcagttttgttttgctacgggaaattcggatttgttttattttggaaacattccgaaaaatccggtgcgtgaaaacggcatggagtccggataggttacgcgcgacttatccggttcggtttacgcgggcgccctgatcaggcgatcgtctggtcgaggtgtatatgcatatgaccgatgctaaggagttgtgggatgtactgaatactaaattcggtgctactgatgctagcaatgatctatatatcatggagcagtttcatgactacaagatgactgacaaccgttctgtagtcgaacaggctcatgagatataaaccatggctaaggaactcgaactccttaagtgtgtcttacccgacaaatttgtggccgggtacattattgcgaaactacctccatcatggagaagtttcggtactgcactcaaacacaagagacaggaatactccgttaaggggttgatagcatctcttgatgttgaggagaaagctcgggaaaaagacgtcgtgtctaagggcgatggtgggcagtccaatgccaatgttgtgcacaaggcccagaacaagagcaaggggaaatacaaagctcaacagaccaccaacttcaagaagcagaagaagaaaaacaacaatcctaaccaggatgagaggacttgctttgtgtatgggcaacctggtcatctggctagaaagtgtccacagcgtaaggggatgaaggcaccttcagggcagacttctaagtctgctaatgtgaccattggcaacactggagatggaagcgggtatggtaatttacctactgttttttttgttaatcagtctactaattggtgggttgatactggggctaatgtacatgtttgtgctggcatctcattgttttcttcttatcaggtcgcacggggttccaccatcctaatggggaatggtgttggcacggtagatctgaagtttacttcgggaaagatcgtgcagctgaagaacgtgcagcatgtcccttctatcgacaggaatcttgttagtggctcccgtctgactagagacggatttaagttggtttttgagtctaataaaatagtcgtgtctaaacatggatattttattggtaaaggttatgagtgcggagacctgttccgcttttccgtttctgatttctgcaataaatctgtgaaccatatttgtgctagtgtggatgatgaggctaatgtttgacactcacgtttatgtcatattaattttggcttgatgtcttggctttccagcatgtgtttaattcctaagttttccattgtcaaaggttctaagtgccatagttgtgtgcaatcgaagcaacctcgcaagcctcacaaggttgccgaggagataaacttggcaccagtagaactcctacattcagatctttgtgaaatgaatggggtgttgacgaagggtggaaaacgatatttcatgacattgattgatgatgctactagattttgctatgtgtacttgttgaaaatgaaagacgagactctagactattttaaaatttataaggcagaagttgaaaatcaacttgacagaaagataaaaaggcttaggtctaatcgtggtggagagtttttctcgaacgagtttgacttattttgtgaggaacatggcatcatacatgagaggacgcctccctattctcccgaatctaatgggattgttgaaaggaagaaccgcacactgactgacttggtgaatgccatgttagacaccgcgggactacctaaggcatggtggggggagggattgttgatctcgaatcatatgttaaacagagttcctaacagaaatagagaccaaacaccatatgagatatggattgggagaaaaccatcactttcttatttgcgcacatgggggtgtttggcgaaagtcaatgtaccaataacgaagaagcgcaaacttggacctaagactgtggactgtgtctttctgaaatatgctcatcacaacattgcctatagatttttaatagttaaatccgaggtacctgacatgcatgttggtacaattatggagtctcgtgatgctaccttctttgagagctttttcccaatgaaggatacacatagtggttcgagccaaccctctgaaataattcccagttcaatcacaccaccagaacaaattgaacatacacatgaacatgtctctgaggaggatgttagtgaagctcctcgaaggagtaagagacaaaggacggctaagtcctttggtgatgatttcactgtgtacctcgtggataacactcctaagtcaatttcagaagcatatgcatctcctgatgcagactactggaacgaggctgtccgtagtgaaacgggacttgggagattgaccacaattcgtgtgctactttccctagcagcctcatattgtcttcttgttcatcaaatggacgttaagacagcttttcttaatggagagctggatgaggagatctatatggatcaacctgatgggtttgtagttgaaggtcaagaaggcaaagtgtgcaaattgttgaagtctttgtatggtctgaaacaagctcctaagcaatggcatgagaaatttgacaaaccattgacatctacaggctttgcagtcaatgaggcagataaatgtgtgtactatcgccatggtgggggtgagggaattattctgtgcttgtatgttgacgacatacagatatttgggacaaatcttgaggtgataaatgaggttaaatcattcttgtctcaaaattttgatatgaaggatttgggagtagttgatcttatcttaaacattaagctaattagaggtgagaatgggattacactcttgcagtcccattatgtggagaagatcttgaatcgctttggctacattgatagtaagccttctccaacaccttatgatcctagcttgttgcttcgcaagaacaaaagaattgctaggaatcaactggaatactcccaaatcattggctcgctgatgtacctggctagtgcaactaggcctgatatctcctttgctgtgagcaagttgagccggtatcctgtggtactggagggatatagtgattctaactggatctttgatgtggatgagatcaaagccactagtggatatgtcttcacactgggtggtggtgctgtttcgtggaggtcttgcaaacagaccattttgacgaggtcaaccatgaaagcagagctgacggcactggatactgctactgctgaggcagaatggctgcgtgatctattaatggatctgcctattgttgaaaaaccagtgccggctatccttatgaactatgataatcaaacgggtttgcttgctgctctgtactgcgccgtcgctcgtagattactccatcccgcttgccggcgtgcaccggcgatcgggagagcaggtcttcagaacctctgccttcgacgtcctgcaccgggagaaggcggcagtaaggtttttgggaagcgcttcgcgcgactgctccctgttcgtccgcgacggctcgcctacctctccgctcgcgtgctgcgcgccttcgtcgacgcccacaaccacgatgctttgtattggtgggatgattggaagctccgcatccttgtccttggaagcaacacgatacagttgttcctctttatatatggaggtgtccgctggcatcgtatctcgctgtggttcaggctatgcatctggcttgcatacatcggcggtgactccctggcgatctacgcccttgccaccctcttcaaccgtcacaagcatgaggctcctgcagcgtcggagctggaggtgctgtgggcgcccatcctcctgattcacctctctggccaagatatgatagcctcctacagcatccaggacaactatctatgatggcgccaagtcgtcaccttgaagatccttctgaaagctgcggttcttctgttcattgttggcatcctcaagttttgtgccaagccctgggctctcaagagggccattataagaagcatagcaaggcaccctcctagtgtgccccgaaggaagaagctgattggatctggtggaggacagttggcagactactggaggtcatgcactactggctttatacctacagtcacaatgtttgtggtctctcgagaacttcgtgagcggccgcaacccaatgacgaaacggaagccgtcaaacaaggagaaagaaaggaaggtgggcaattccatgagaacttagaaaggtccaccgtaaaaactgccatcgaaccagtagtagaccaccaaaaaaaggaagaggaggaggaggaggaggaaaaagaagaagaagaagaagaagaagaagacctcatcaacctcaacgagtatgtggagagggctaaggagatcatgaatcgtcagggacaattgagtaaaccaactttgcgtcggctgcagtccgtgcttcagccagagttattcatggcagacgcctttgtcacctattccaaacgcctcaagatcctccaatttctgatggcaatcaacactaattacagttatagggtgattcgtgctgggctctttgatgtatatatccggctatataccagggtgagggtgaccattacgcccattgcctcttggctccggttgctttccattttactagcaacgaccgcagccggcctctacgcaagaagccacaaagacatgtacaacaaacatgatatcaccgtgacatacatcctcttcttcagtactgcgctgctggagctgatctcctccgtcaccctatgccgcttgttttttccgcttgcggtgtggccggctactgacaggaggaaccaaatggtggaccagcagagtgtgatctggtgcgctgcacggatgacgaagaagcccaactgtctcctctggctctccgcttgcatctattgcgatgcccttgtcaaccagcggtggtacatcaagcaaacaccttccatggatcggatatttgaggcagtgaagcatcatgtcattttctatggctggtccaagtacataaagagtgctgcaagctacaggaggttcaattgcatgaggggccagttggccttgaagaa

SEQ ID NO: 22947 - DNA, 5946 bp, Oryza sativa; identical to SEQ ID NO: 13706
  Clone ID: TF_OsC251248_2

SEQ ID NO: 22948 - DNA, 1389 bp, Oryza sativa
  Clone ID: TF_OsC1528_1699
ttactgtggctctgctcttgcctgtggaacctgttcttctcctgctccttcaacttgctcgagattcccaacttttccgtttgtttctacttgcacatggttcagacgaccttgtccaacgggcggtgaggtcaacgaggcagaaccactgtttggtgactttgaactttttggtccagatacgttgggaaggcttgttgttggttggactcgttttgacttgactttctgagggcagcaccatgaatagtgtcccatctcatggcagatgaaacattcgactcctgccttataaccacgtctttttgaaggtgtagggcatggtacggagttgcttccttcatggctattactgttgatcattgtggcttgctgaccaggttctgacatagtcgaacgagacgtagaaccggaactagttgaatgctgagatgctttctgatagtattgtgctggcgagtttgtttttcgacacaaatcttcttttgcttgaatctctagggacattactttgcgtctcttgtattcttgcatctctttcttttcttggatgtcttggcacatgtcgcaggatgcttttgctcttttgtcatcagggaaggttgaacgtactgcattaacatttggcgaatttgggcttccttggggatagaagggcatccttgaggtgctcatattagcttgtagtggtgcatccatatagggtttttgggggcagtgtctcatgtaatggccaattttgtggcaaatgaagcatatgaatccgggaacgtgtctgatcttctttgatttgagggtgggggacttgggtaagttttggcaagattgcattgtctgacattgtgggacatcttgcatgtcaacttctgatggcaaggtctttcttttgtgacaacttccttctttaatcatgctattttctcgcgatacggatttattgattgagttctgaaggttggggcaattattagctcgaagtggggttttcatccctgtaatcatcacatttaagaattctttgttcttctctttatgggtatcagtgccttctactgattgtgttccttgtatttctgcggcctcattcttactcttgtctggattcaccttgggctgtggtagtagcagttgttgttgtatagaagccaaattttgagctatttcttgtagcatctgagtctgattggctagaatctgataaatatccattgaggagtgttgatttctggttgcaacttccttgtttggtccaggaacagtattatcagtcttggcaacttggttggtgacttgttcagctagttgatttggattttctgacaaagctgggtcttccttagaaccaaggtagttgcggacacaagtctgacaggttggttgaggtgccat

SEQ ID NO: 22949 - DNA, 1263 bp, Oryza sativa
  Clone ID: TF_OsC1528_2064
ctgtggctctgctcttgcctgtggaacctgttcttctcctgctccttcaacttgctcgagattcacaacttttccgtttgtttctacttgcacatggttcagacgaccttgtccgacgggcggtgaggtcaacgaggcagaaccactgtttggtgactttgaactttttggtccagatacgttgggaaggcttgttgttggttggactcgttttgacttgactttctgagggcagcaccatgaatagtgtcccatctcatggcagatgaaacattcgactcctgccttataaccacgtctttttgaaggtgtagggcatggtacggagttgcttccttcatggctattactgttgatcattgtggcttgctgaccaggttctgacatagtcgaacgagacgtagaaccggaactagttgaatgctgagatgctttctgatagtattgtgctggcgagtttgtttttcgacacaaatcttcttttgcttgaatctctagggacattactttgcgtctcttgtattcttgcatctctttcttttcttggatgtcttggcacatgtcgcaggatgcttttgctcttttgtcatcagggaaggttgaacgtactgcattaacatttggcgaatttgggcttccttggggatagaagggcatccttgaggtgctcatattagcttgtagtggtgcatccatatagggtttttgggggcagtgtctcatgtaatggccaattttgtggcaaatgaagcatatgaatccgggaacgtgtctgatcttctttgatttgagggtgggggacttgggtaagttttggcaagattgcattgtctgacattgtgggacatcttgcatgtcaacttctgatggcaaggtctttcttttgtgacaacttccttctttaatcatgctattttctcgcgatacggatttattgattgagttctgaaggttggggcaattattagctcgaagtggggttttcatccctgtaatcatcacatttaagaattctttgttcttctctttatgggtatcagtgccttctactgattgtgttccttgtatttctgcggcctcattcttactcttgtctggattcaccttgggttccttgtttggtccaggaacagtattatcagtcttggcaacttggttggtgacttgttcagctagttgatttggattttctgacaaagctgggtcttccttagaaccaaggtagttgcggacacaagtctgacaggttggttgaggtgccat

SEQ ID NO: 22950 - DNA, 2760 bp, Oryza sativa; identical to SEQ ID NO: 13729
  Clone ID: TF_OsC1528_1627

SEQ ID NO: 22951 - DNA, 2700 bp, Oryza sativa; identical to SEQ ID NO: 13737
  Clone ID: TF_OsC1528_1670

SEQ ID NO: 22952 - DNA, 3750 bp, Oryza sativa
  Clone ID: TF_OsC1528_2109
atgaaatgcttctgggtgagtactggcaaacctgaaggaattcttactgctgatcagcagaagcaattcgaggaagccactactctctttgtgggatgcattcttagcgttcttggcgaacgtctggtcgaggtgtatatgcacatgactgacgctaaggagttgtgggatgcactgaatactaaattcgttgctactaatgctagcaatgatctatacatcatggagcagtttcatgactataggatagctgacaaccgttctatagtcgaacaggctcatgagatacaaaccatagctaaggaactcgaactccttaagtgtgtcttacccgacaaatttgtggccgggtgcattattgcgaaactacctccatcttcgagaagtttcggtactgcactcaaacacaagagacaggaatactccgttgaggggttggtagcatctcttaatggtgaggagaaagctcggaaaaagacgccgcgtctaagggcgatgaacaagagcaaggggaaatacaaagctcaacagaacaccaacttcaagaagcagaagaagaacaacaacaatcctaatcaggatgagaggacttgctttgtgtgtggccaacctggtcatctggctaggaagtatccacagcgcaagggtatgaaggcacctgcagggcagacttctaagtctgctaatgtgaccattggcaacactggagatggaagcgggtatagtaatttacctactgttttttcagttaatcaatctactaattggtgggttgatactgcggccaatgtcgcacggagttccaccgtcctaatggggaatgggtcacatgcttctgttcatggtgttggcacagtagatctgaagtttactttgggaaagatcgtgcagctgaagaacgtgcagcatgtcccttctatcgataggaatcttgttagtggctcccgtctaactagagacggatttaagttggtttttgagtctaataaagtagtcgtgtctaaacatggatattttattggtaaaggttatgagtgcggaggcctgttccgcttttccctttctgatttctgcaataagtctgtcaaccatatttgtggcagtgtggatgatgaggctaatgtttggcattcacgtttatgtcatattaattttggcttgatgtctcggctttccagcatgtgtttaattcctaagttttccattgtcaaaggttctaagtgccatagttgtgtgcaatcgaagcaacctcgcaagcctcacaaggctgccgaggagagaaacttggcaccactagaactcctacattcagatctttgtgaaatgaatggggtgttgacgaagggtggaaaacgatatttcatgacattgattgatgatgctactagattttgctatgtgtacttgttgaaaacgaaagacgaggctttagactattttaaaatttataaggcagaagttgaaaatcaacttgacagaaagataaaaaggcttaggtctgatcgtggtggagagtttttctcgaacgagtttgacttattctgtgaggaacatggcatcatacatgagaggacgcctccctattctcccgagtctaatgggattgctgaaaggaagaaccgcacactgactgacttggtgaatgccatgttggacaccgcgggactgcctaaggcatggtggggggaggcattgttgacctcaaatcatgtgttaaacagagttcctaacagaaataaggacaaaacaccatatgagatatggattggtagaaaaccatcactttcttatttgcgcacatgggggtgcttggcgaaagtcaatgtaccaataacgaagaagcgcaaacttggacctaagactgtggactgtgtttttctgggatatgctcatcatagcattgcctatagatttttaatagttaaatccgaggtaccggacatgcatgttggtacaattatggagtctcgtgatgctaccttctttgagagcttttttccaatgaaggatacacatagtggttcgaaccaaccctctgaaataattcccagttcaatcacaccaccagaacaaactgaacatacacatgaacttgtctctgaggaggatgtcagtgaagctcctcgaaggagtaagagacaaaggacggctaagtcttttggtgatgatttcactgtgtacctcgtggatgacactcctaagtcaatttcagaagcatatgcatctcctgatgcagactactggaaggaggctgtccgtagtgaaatggattccattatcgctaacgggacttgggaggtgacagagcgaccctatgggtgtaaacctgtggggtgcaagtgggtgttcaagaagaagcttaggcctgacggtactattgaaaagtacaaggctcggcttgttgctaagggctatactcagaaagaaggcgaagatttctttgacacttactcacctgttgctagattgaccacaattcgtgtgctactttccctagcagcctcacatggtcttctcgttcatcaaatggacgttaagacaacttttcttaatggagagctggatgaggagatctatatggatcaacctgatgggtttgtagttgaaggtcaagaaggcaaagtgtgcaaattgttgaagtctttgtatggtctgaaacaagctcctaagcaatggcatgagaaatttaacaaaacattgacatctgcaggctttgcagtcaatgaggcagataaatgtgtgtactatcgccatggtgggggtgagggagttattttgtgcttgtatgttgacgacatactgatatttgggacaaaccttgagcgtgataaatgaggttaaatcattcttgtctcaaatttttgatatgaaagatttgggagtagctgatgttatcttaaacattaagctaattagaggtgagaatgggattactctcttgcagtcccattatgtggagaagatcttgaatcgctttggctacattgatagtaagccttctccaacaccttatgatcctagcttgttgcttcgcaagaacaagagaattgctaggaatcaactggaatactcccaaatcatggctcgttgatgtacctggctagtgcaactaggcctgatatctcctttgctgtgagcaagttgagccgatttacttctaatccgggagatgatcactggcgtgcgcttgagcgagtaatgcgctatctgaaaggtactgtggaattgggacttcactatactgggtatcctgcggtactggagggttatagtgattctaactggatctctgatgtggatgagatcaaagccactagtggatatgttttcacactgggtggtggtgctgtttcatggaggtcttgcaaacagacaattttgacgaggtcaaccatggaagcagaactaacggcactggatactgctactgttgaggcagaatggctgcgtgatctattaatggatctgcctgttgttgaaaaaccgacatgtgaaaagacgattgaagtctgtcaggaaattaagaaactccggagttataacgttggattacatccaaacagcgagaaacctggcagatcccttcacgaagggactatcacgaaatgtgatagacaatgcatcgaaggagatgggtttgagacccatagcattcttgaaggaactcacctttgtgagcttgactgttggtcgcagtctatgaagattttgggtgaatcttctaggaagcttactaaagacctaggagta

SEQ ID NO: 22953 - DNA, 3438 bp, Oryza sativa
  Clone ID: TF_OsC1528_2282
tcagtagaccccgatgctttgctgtggcgtcgcccctggaacgtagattacatttgaaggaggtacctggacacgacccttggtcacagaagcagtcgccaatactgttgcagcacgattcttcaaaaagagcaggaaatctccaaacgtcaggtacaaaaccatgatcaaagatcgtatcttccaggaataaaccctacgcttctctttccccaccctcacgccgccgcccaccacgccgtcgtcgtcgtcctcctgccttccctcaccatccacagccccctcggatctcaccgccccttccgcctccccctccgctcctctcgccactcctccgttctccccccttcgacaatctcgccggcgtcccaactccggcgggaacggcggcggcagcaaggtggtggaaagatcggttgctcggcaggaactactcgcggttgcgagcgtcgacgaaaacgcgaagcacgcgagcggagaggaaggcgagccgtcgcggacaaacagggagcagtcgcgcgaagcgcttcccaaaaaccttattgccgccttctcccggtgtaggacgtcgaaggtagaggtttcggagacctgctctcccgatcgccggtgcacgccggtgagcgggatggagtagtccccgtccccagcgggcaacgggcagtcccctctcatgcctaggtgaatccggaagcgacagaggccgtcgcagggcccgccccgctccatcacgcccacccttgcctggatgcgtcggaatataggatcaacatgttcaagtgacaagcatgacttgccttgctctgctgctggaggaacctcggcaactatttcgaagtacaccggagcgtcggaggaaccggaatcgtggaccgggaccacgcgggtggtccaccgccggtccacggaaccgacggcccagatcgccctcggggtcgatcggacgggcggcggcgacccggctcggctcaaggctggccaagcggccacggcgacggcgacggcgcgcgcacgcgcgttgccgatgacggcaaccgacggcggcgacggcggcgcaaaggcggcgccgaagggcggtggtgcgagggtggccggcgcggaggaagacgacggtgaacggcgacggcaagtcacgggaggacgacggccactggcggacgggattcggggtgcccggagcgcaaggggatgcgaattccggcgacgaaactcgacggggaaggggcggccggggtggagcttagccttgcgaacccgacggcgaagacggcgcggtgcggcggcgaccctagcggcggctagcggcggccggagtagcaaaaacggcggcggcgggtggttgcacggcgcgggagtgatggggagctcgggagaggtcggcgaaatggggaaaaagcgagagggagcgacggggaaggtggtcgacgtggcccggaggaggcggaggcgtggacgcggcggcggttgcgggtgcggcggttgcgggtgcggcgtcggctggaggtgggggaaggacccgacaggtgggccccacctgtcggcgaccccgggagaggagggcggcggggcggcctggttgggccctcggccactatgtgtatccttcattgggaaaaagctctcaaagaaggtagcatcatgagactccataattgtaccaacatgcatgtcaggtacctcggatttaactattaaaaatctataggcaatgctgtgatgagcatatcccagaaagacacagtccacagtcttaggtccaagtttgcgcttcttcgttattggtacattgactttcgccaagcacccccatgtgcgcaaataagaaagtgatggttttctcccaatccatatctcatatggtgttttgtccttatttctgttaggaactctgtttaacacatgattcgaagtcaacaatgcctccccccaccatgccttaggtagtcccgccgtgtccaacatggcattcaccaagtcagtcaatgtgcggttcttcctttcagcaatcccattagactcgggagaatagggaggcgtcctctcatgtatgatgccatgttcctcatagaataagtcaaactcatttgagaaaaactctccaccacgatcagacttaagccattttatctttctgtcaagttgattttcaacttctgccttataaattttaaaatagtctagagcctcgtctttcgttttcaacaagtacacatagcaaaatctagtagcatcatcaatcaacgtcatgaaatatcgttttccacccttcgtcaacaccccattcatttcacaaagatctgaatgtaggagttctagtggtgccaagtttctctcctcggcagccttgtgaggcatgcgaggttgcttcgattgcacacaactatggcacttagaacctttgaaaatggaaaacttaggaattaaacacatgctggaaagccgagacatcaagccaaaattaatatgacataaacgtgagtgccaaacattagcctcatcatccacactgccacaaatatggttcacagacttattgcagaaatcagaaagggaaaagcggaacaggcctccgcactcataaccatacccgcttccatctccagtattgccaatggtcacattagcagacttagaagtctgccctgcaggtgccttcatccccttgcgctgtggatacttcctagccagatgaccaggttgcccacacacaaagcaagtcctctcatcctggttaggattgatgttgttcttcttctgcttcttgaagttggtggtctgttgagctttgtatttccccttgctcttgttctgggccttgtgcacaacattggcactggactgcccaccatcgccctgagacgcggcgtctttttcccgagctttctcctcaacatcaagagacgctatcaacccctcaacggagtattccggtctcttgtgtttgagtgcagtaccgaaacttctccatgatggaggtagtttcgcaataatgcacccggccacaaatttatcgggtaagacacacttaaggagttcgagttcgttagccatggtttgtatctcatgagcctgttcgactacagaacggttgtcagccatcttgtagtcatgaaactgctccatgatatacagatcattgctagcatcagtagcaccgaatttagtattcagtgcatcccacaactccttagcgtcggtcatatgcatatacacctcgaccagacgatcgccaagaacgctaagaatgcatcccacaaagagagtagtggcttcctcgaattgcttctgctgatcagcagtaagaattccttcaggtttgccattactcacccagaagcatttcatagccgtcagccacagagtgaccctgatctgccatctcttaaagtgcacaccggtgaatttatccaacctcagtgcatcggcaaaaccagccat

SEQ ID NO: 22954 - DNA, 3379 bp, Oryza sativa
  Clone ID: TF_OsC359_7024
ttaccagcggctgcggtatggtaggaagatggtgacgacgacagcgcggctcccggcggcggcacggagcaacggcggcggcggctgctcacggtggagatggcggcggctttgaaaaaggggggaaaaggggcggtggccgacggtatttatagaggaaggagtaactagggttagggcgcacggcgcaagctttggaaaggcggcagctccgaatttggcggcgcggcttgcgggatttggtggcgcggccggcgcgggctcggtcggcggcggcttgggccggcgacacagagaggaggagaaggccgggccggggcggcacgtgggcttggggcttggcttccccaggccacggcggagaaataatgatgaagagaggcttggtaagctgaaattcaccattccaaagtttgatggtggatctgatctagaggcttatcttatgtgggagttgaaggttgataaaatatttcacatccataattattccgaagagaagaaattggcaatggcttcacttgagtttgaggattatgctctaatttggagtcgagatatccaatgcttcaagtgtggaggccgtgggcatgttgttagagaatgtccaaacaatcgtgccattattgtgattgaacatggagagtttgattcagctagtgaggatgctgaaaatggacaaagaaacaatctttttcagacccgagctaaagtgggaggaaaggtgtgcaaggtcatcgttgatggaggtagctgccataatcttgcaagtaaggatatgtgtgacaagcttggtctgaagttgttgcgacacccacatccatatcatgtccaatggctaaatgatagtggagatatcaagattgggcatcgggtgaaagtttcttttaagattggtgaatatgaagatgaggttttgtgtgatgttgtgcctatgacagtgtgtcacttgctgctgggaaggccatggcaatttgatcgatcatcacggcattgtggtcgaacaaatcaattctctatcaagtggaaaggaaggaattttgtgcttaagcccatgacacctcaacaaatcatggctgagcatatgcaaaagagttctgaagttaggatagaaagtgagaaagaaagagagcaaaataaatttagtgacatccacaaatcggtgagcaagagccacaagccaaatatgagtgataaaaagaaaagagagggtgagaactttgtgatgttagccaccaaatcagaaatgagagatgagtatgaagatgtttttccaatggaaacacctgctggacttcctccattgcgtggcatagaacatcaaattgatctcattcctggggctgcactacccaaccgagcaccataccgcaccaacccacaagaaacaaacgaaatacaaaggcaagtacaagagcttttagataaaggttatgtgcgtgaaagtttaagtccttgtgttgtccctgtgattttggtgcccaagaaagatggatcttggaggatgtgtgttgattgtagagccctcaataatatcactgttcgatatcgccatcccattccaaggatagatgatatgcttgatgagttgagtggttctatgatattttctaaaattgatttgagaagtgggtatcatcaaataagaatgaaaattggagatgaatggaaagctgtttttaaaacaaaattcggtttatatgaatggttagttatgccttttggtttgactagtgaaccaagtactttcatgagattgatgaaccatgttttgagaacattcattggaaaatttgttgtggtttactttgatgatattctgatttactccaagtctttgagtgaacatgctagtcacataaaacaagttttggatgtgctaagaaaggagaaattatttgctaacattgagaagtgcacattttgtacagagaaggttgtctttcttggttttgtcatttcaggacagggagttgaagttgatgaatcgaaagtggaggcaatcaaggattggccaacccctgtgaatgtaagtcaggtgagaacttttcatggtcttgctggtttttatagaagatttgtgaaagatttcagcaccatagctgcacccttgaacgagttgacaaaaaaaggtattgagtttcattggggtgaatcacaaaaggatgctttccaaaaattaaaaagatgtttgactgaagctcctttgttggtttggcctgatttcactaaaacttttgaaattgaatgtgatgctaatggaattggtataggagctgttttaatgcaagataaaaagcatgttgcttactttagtgagaaattgggaggagctcaattgaattattctgtttctgacaaagaattatatgttttggtgagagttcttgaaacttggcaacattatttatggccaaaagaatttgtcattcactctgatcatgaagctttgaagtacttgaaaggacaagccaagctgaaccgtcgccaagccaaatgggtagaatttattgaaacatttccctatgttgttaagtataagaaagatggtcaaactgaagttgtgaaccgtacactatcaacgttgctgcgtatgatgatcaagaaaaatttaaaagagtgggaggattgcttgccacttgtggagtttgcatacaacagggcagaaagaactaacatggatgcttcgaagcgtgctgcatatgtgaagaagattcatgaaaagaccaaggaagaaattgaaaagaaggcgcgcagtaatactgcaaaggtgaacaagcatagaaagaaagtggtctacgaaacaggagatcttgtttgggttcatctacagttcaggacgactccttttcaagagggggaggatgatgtgccccaacccctgtcacatgatgatgagcacatcccagctacacctgacgtaaacaagggtgatgtaaacaatggtgatggttcacatcataagtcacatgaggaaaatgaagatgacgtaaatcatgttgatggattatgtctcaacaagaacgatcaagcatatcatggtccaattacgcgcagccgtgctaggaaaatacaacaagaggtgaactcgctctttgctcaacttaatccaaatttttgtgagaattttatactacctaaatgctctacatttttattgctcaggtttacacccgaggagatcatcactacaccaagaaggatgggttacattgaggatgataagggttacgttgaggacgataaaggttacgacgaggaagaaccagcccatcccaaaccagtagctgtctacgccaacaagaagatggtttactctgcaaaagactcaacttccaaggcttgtgtgacccaaccagtcaactttctccatgcttaa

SEQ ID NO: 22955 - DNA, 1689 bp, Oryza sativa; identical to SEQ ID NO: 13738
  Clone ID: TF_OsC91_2124

SEQ ID NO: 22956 - DNA, 6339 bp, Oryza sativa
  Clone ID: TF_OsC91_2130
atgaagatgcatttgaagtctattaacccatatatttggagaatagtcgaaaaaggctatgttttgcaaaatcccgaagatcccaccaaggaggacgacgagaacgagcacaagaacgctcaagccgctaatgcaatacttagcgccttgagtggaagtgagttcaaccgtgtggatggcattgagagtgccaaagtgatttgggacacgcttcggaacttgcatgaaggcacggatagtgttcgtgagtccaaggggcaatttgagagatttgtgatgttagatggtgagagcccaagcgacatgtatgaccggttgagcaagatcgtcaatgagatcaagggacttggctccaaggacatgaccgatgaggttgtggtcaagaagatgcgtccggactacaagactctcacacctcatgatttgcttggacgcatccttgcctatgacatgctcgtgcaagagtccaaggatgtcatccaatacatcaaccaaagctcaaccgcaagcatcaagaaggaagacttggctttgaaggcaaaggaagaagaagaagagaaccgcaagagcaagagcaaggcggagattgatgatgaagagatggctctcttcgtcaagaagttcggcaagttcaagaggcgaagcggcttcttcaagggaggatcttccaagcactactccaacaagtcaagtggaagacactccgcaagagtgtgctacgtttgcaaagagcctgggcacttcattgcggattgcccccacctcaaggatggttcccacatcaaggaagataagaagaagagtgagaagaaggatgagaagaaggagaagcacaagcatagcaagagggaacattatggccaagctcaccttgggatgatcttcggcttcaactccgagtcaagctcaagtgatgaagaaggagtcgccacgtttgccgtcaagccttcatcaccaccgagactcttcgactactcaagtgatgaggatgctcccgtttgcctcatggcaaaggagcctaaggtaccttctcctcacaagtcatttaatgttgatcttgttagtgatgaggaggatgaggttgaggatgaggttatggatgatgaattgttcaagtccataactaaggaatccctaccacacttgagtgagttgcttgggagaattgaggaccaatatgcaactcttaagaggcaagagactttgctcattcgtgagaaagagcggtctcataaactcaagagtgagcttgctaaggagagagagaaaaatgaggcattggtacggctttacaagcaaaccaaagagtctcatgctaatcttgaggtggcgaacgctcaacttcaagagagagtggatggcttggacaaagcatacctcactcttgaagagaagttcgaaaccttaaaaaatagtgtctctctccctagcgagccatcttgttccaaaattgtcccaagcaatgaaccatgtgtgagatgcaaagatattgatattgaagcttgtgctactaactctatttccttgagtactttgcaaaagcaaaatgagaagcttatgggactccttcacaatggcctacttaagtgccatatgggtagtaaggccctaaaggactacctaggctatcaaagggacaacttcaaccatgagggtcttgggtatattcctccaccaaaaggaaaggtggacaaaagtgtgatgatcaagaggccccaaggtcttagcaattttgttaaggccaaaagtatccttcctaatgattatgcttcacattgttcttttgatgcatcttatattcttaggaagaatactagtggtcgtgttgttgctaagtatgtaggcccaaggggcaagaatatttctatcaagagagtactttgggtgcctaaggcacttgttactaacatgagaggacccaagcaagaatatgtctccggtggaagaagttgggtgattgatagtggatgcacaaatcacatgaccggagaagaatcaatgttttcaactcttgatccaaatggcacttcacaagataacatagttttcggggacgatggaaagggaaaggttatgggattgggtaagattgcaatctctaatgatctttccattgccaatgttctcttggtaaaatctctaaactacaatcttttgtccgtttctcaattatgttctatgggttacaattgtctttttaccgatgttggtgtgaccgtctatagaaggaatgattcctcggtagtctttgagggtgtcctcaagggaaagctttaccttgtggatttttcctcaagtacagccaaacatgagacatgcatagtggctaagtccaacacggggtggctttggcatcggaggctagcccatgttggtatgaggaatcttcacaagattctaaagcacgatcacatccttggactaacaaatgttcaatttgagaaagatagggtgtgtagcgcatgtcaagccggcaaacaaattggagcacatcaccccgtcaagaatgtgatgaccactacaagaccattggagcttctccacatggacatcttcagaccaattgcttatctaagcattggaggtaacaaatatggtcttgttattgttgatgacttttcacgcttcacgtgggtgttctttttgcatgacaagagtgagatacaagctatcttcaagaagtttgcaagaagagcacaaaacgagttcgacctcaagatcatgaacattcgaagcgacaacggcaaggagtttaagaacacgtgcatcgagagtttccttgatgaagaaggtatcaagcacgagttctcggctccatattcacctcaacaaaatggagtagccgagaggaagaataggactctcattaagatggcgaggaccatgttggatgagtacaagacatcggaccgtttttgggccgaagccgtcaacaccgcatgccatgccatcaaccgcctttatcttcaccgccttcttaagaagattccctatgagctttttactggtaacaaaccaaatgtctcttactttcatgttttcggtagtaagtgttacattcttaataggaaggctagatcctctaagttcgctcctaaagtggatgagggattcttgcttgggtatgggtcaaatgaatgcgcataccgcgttttcaacaaatcctccggtattgttgagatcgcgcgtgatgtgacatttgacgaaactaatggttctcaagtagagcaagttgactcacatgtgttaggtgaagaggaggatccgagcgaagcaatcaaaagattggctcttggggacgtacgtcctagggagccacaacaaggagcctcttcctcaacacaagtggagccacctacatcaacccaaaccgacgatccctctatctcaagcttggatcaaggtgaagaaggcgagcaagtgccaccctcaccgatcaagttagctcgcccaagaatccaccaaagtatccaaagagatcatcccaccgacaacatcttagagacatcaacaagggtggaacaagctcttaatgatccggattgggtgatggcgatgcaagaggagttgaacaatttcacccggaatgaagtgtggactttggtggagcgacctcggcaaaatgtgattggcacaaagtggatcttccgcaacaagcaagacgaggccggggtcataataaggaacaaggtgaggttagtggcgcaagggttcacccaaatcgaaggattagatttcggtgaaacttttgcgccggtagctagacttgagtcgattcgcatattgcttgcttttgctactaacctcaattttaagctatatcaaatggatgtcaaaagcgccttcctcaacgggcctatcaacgagttggtatacgtggaggaaccaccgggcttcgaggatccgaagtatcccaaccacgtgtacaagctccacgaggcactctacgggcttaagcaagcccctagagcttggtatgagtgtcttcgcaattttcttgtgaaaaacggctttgaaatcgggaaagccgattcaaccctttttactaaaagacatgataatgatatttttgtgtgccaaatatatgtcgatgacattatatttggttctactaacaagtcttttagtgaagagtttagtaggatgatgaccaaacgttttgagatgttcatgatgggtgaattgaagttcttcctcggccttcaaatcaagcaactcaaggaaggaactttcatttgccaaacaaagtatttgaaggacatgcttaagaagtttgggatggagaacgccaagccaatccacactcccatgccatcaaatagccacctcaacctcaacgcgcaaggtaaagacgtcgatcaaaaggtataccgttctatcattggctcacttctttacctttgtgcatctaggcccgatattatgcttagtgtgtgcatgtgtgcaagatttcaagccgctccgaaggagtgtcaccttgtggccgtgaagagaattcttagatatttagtgcacacacctaaccttggtctttggtatcctaagggagcgaggtttgatctcattggctatgccgatgcggattatgccgggtgcaaagtggataggaaaagcacatcgggatttttcggactttccgaaaaattttcggacatatccgaaaaacatcagaaccgtgcgcaacccttctggatcctttcggacatatccgaaaattttcggaaatatcagaaaatctcggagtccttatatatcaccccgtggactcccttctctctcctttccactctttttccccacggattgactccctcctccctccccaccggcgaccccccggcgaccacctcttctccggcgacctcccgcggctcccctcctctccaacctcgtgggagcacgtttggggccctccttgggacctacattgtcgatcttcaccgcgttcttctagtgttcttcacgttcttgaggatgcctccccgcaagcaaacctcccacatgtccaggagcccgagggaccgctctcccactccatcctctcatgatgattcggacagtgattggaccggtggagaggatgcgattcctcagggtgcgcgggtggctcggggcggcaacctccctcctcggcgatcctctcatggtggtggtggtgatggtgagggctcctctcgtcaaccgcaaacgccgccgcaccaacccaatgtcctcattgggcctctccgccttcatacccccgagagggatccggcggtgattcgccaagtgtatgattggaggcgcaagtctgaggcgcacaatgatcccgtgatagactctgtgattgcaaattgtgatctcatgggtattcgctccttcatgaccttgcagcaaaattggtgcaacgagatcattgctcagttttatgccaccgtctactttgatcgttatcgtgccatgcactggatgactcaggggtcctggttttctgtttcttatcaacagttggctgagatttggggctttcgtcttcgttctttgctcaaccttgataaccttcataatcttcaaattcctgccaacacagaattgctccctctttacactccaaatgatcctaatgtggtgttgggcaaggtcgacggcctcaagctgtactttgcctacttgaactggatgtttcgccggtcctttgtgcttaaggatggtgatgctagcagcattaaccacatctctaggaccgtgcttcttaggtttgatccccctcctcatcgctttcatgtttatcactttgtgtgggaggagatccgcatggcttccatccagtacaagaaggggttggtctatgcccctcacattatgcggatgatcgagactgtgactcagctccagtttcgccatgatgtgactcattctcagcttcacttgcgccttattaaggccccccgctcctcagctgctcgggacatcccctcctcttccactcagccgcctcctgctcctgagcgccctgcctctgtggctcgtcgtgagccatctcccttattccgtattttgcggagtctttttggtctttgctctacggaggccaaaaagaaccgccgattgcggaattcggtgaagaaaacggctcgtgatgtcaagttcctcaaggcaaggtattatgaggaccaccacattgatatccctccttctcctccgggtttcgaggccgagcccgatgagccagaggatgaagagattgaggatccctttgctgggttgcctcctgactttgacttctttggttatggccctggctatggctatcctcctccaccacctccagaggatcctcctcaggcgcccttcgcttga

SEQ ID NO: 22957 - DNA, 807 bp, Oryza sativa
  Clone ID: TF_OsC1713_5433
ttaaagaaagctactgctgctttggaactgatggctgagctgtatcccttgagacgcaaccggcactgcatttgctcctgtgaggacaatgttgttgacttggccttgtggctgttgacgcttcggcttcggacactcttttacgaagtgacctggctcataacaattgaaacacacccgatgctcccttccattactgttatcttcttgagactgatcctgctgaaatgacactgattgagtagcttgctcatcattgtcttcattgcttgcattagtctctgagttgatctcaccactgatgcccaactgttgtgactgttgttgtgactgttcttgacctgcagaaaaagattcaccaatttggagtggcttgatacgctgcctctggctactaccttgtgcctcctgggatacagtcattttccttttacggttatccatcttgttcttcttgtcttccagtcgaattgctttatcaaccaactcctgaaaatcctcatagtcatgagagatcaacataactgacagttcatccttcggaccttccaagaatttctcttgcctttcctcgtcagtacgcacatcttctggagcatagcgagccagacgattgaactcatgaagatactctgccacggtacgatccttttgcttcaaagccctaaactcacgcttcttcaaagcaacaactcctacaggtacgtgtcttcttgaatccttcggtaaactcttcccaagtgattggttgtcgttctgctttgacttgcagaagttgacaacatcgacgtcttcgagtttctccat

SEQ ID NO: 22958 - DNA, 5092 bp, Oryza sativa
  Clone ID: TF_OsC1713_5186
accacgaagcctccgcacgcccccttcgtcaaggggtgggcaaggcgggagccggcccacggagagaactacccaagccttgatcactagggtagttcttccttcactccgaaggtggtgaactccaaaccactcacaaactggcaccgagcctcctccacaatcttctcggagaggtcaccgggcaacttctccacaagccgtctaggaggcggcaacctcattatgtagggagcataatagattccttgtccaatagtcccctttgagatggcaatctccttcatcataaggttgataacatcaaaccgacgaccatccataatggcatcaataacatgccaagcaactccgcgtatgtcatcattgttgccgcatcttgggaggatggtggcccttactctgcggttgatcacacttgggagagccctcaaacccgccacctttccatatgtgtaccctcccccttcttcataaaactgagaaaagtgatcaatggggaaggggttgtgggtgtgctcatcatgaaggtcatccccgttattgaagcgaatgtgcaagagctccttgaattcacggcggttgatagagcatcggagggtccccgacatccacttcattgcatcacaatcgccggacacccatacagtggcatagaattgccggatgagatcttcatcaaaaggttgcttcatggtgacaatcctatcaatcccaacggtccggaacatctcttgcaaattctcaaactccggtgtctcaccaatgtgcctccaagaaatccacttgtgttcggcgaaggctttgttggcatacacttgttcatacacggacttttggaaccgtgtatgaaatcttggatcattacaatcgttaggcctccggaattgatcatgatgatggaggatagtgtattgttgagcattcctcaaatttagcacaaattggatggtggaatcgagaggactcccatcatcacttgcctcatcatcttcactattgccactcccattgtcatcaccatcatcacttacatccaactcattaccctcaacattttccatattgtcctcatcactttgaacatactcatctccgctcgattcctcattcttactaacgggatcgggcgtgggctcacgacgaccatgccgagtgtggggaggcatagcaagcatttggcaactaccggatgtgctctttctatccactttgcaaccggcataatccgaatcggaatagccaacaagcttaaatttagcaccttttgggtaagccactaagtgacactccttaggagcggcttgaaaccgtgcacacatgcaaacactaaacatgatatccggcctagatgcggtaaggtaaagcaagctaccaatcatagaacgataaagttttaaatctaccggtttacctccctcatcaaggtcgagatgcccgttggttgccataggtgtcttgatgggcttcgcatcctccaagccaaacctcttgagtagatccttgatgtacttggtttggctcacgaacgtcccatccttgagttgcttgatttgaagtccaaggaagaagctcaattctccaatcatggacatctcaaattccctagacatcatatcaccaaattccttgcaaaatacctcattagtagaaccgaatatgatgtcatcaacataaatttgacacacaaagaaatcatcaccaatgatttttgtgaaaagagtggtgtcaacttttccaattttgaaatcctttgacaaaagaaaatctctcaatctttcataccaagccctaggagcttgttttaaaccataaagagcttttgagagtttgtaaacatggttaggattttcaggatcttcaaaaccgggaggttgttcaacaaagacaagttcggcaatttcaccatttagaaaagcacttttcacatccatttgaaatagttttatatcaaagtatgatgcaaatgcaagaaggatgcgaatagcctcaagtcttgccacgggggcaaaagtttcaccaaagtctaaaccttcaacttgtgtgaaaccttgcgccaccaaccttgccttgtttctcaccaccaatccgttctcatcttgtttgttcctaaagatccactttgtccctatgacattgtggtctctaggtctttcaaccaaagtccacaccttgtttcttgcaaagttgttgagctcttcatgcatagcattcatccaatccggatcacaaagagcttcatctacatgttttggctcaagacaagaaacaaacgagtaatgttcacaaatcgaagcgacacgagatcgagtttgaacacccttactaatgtcacccaacacttggtcaattgggtgatccttggaaagagcggtgtgtattcttggaggtataggtggatcttgtgccttctcctcctccacttcaacttgagcttgacttggcgaagcggaagtagatggctcatcttgagtggaggtggatggcttgtcttccacttcaataggcttgacatctccaatagacatgttcttcatagctctcatcaagccttcatcacctttgttcttgttgtagacccggtatgccttgctatttgaggcataacctagaagaaacccttcatcacaccgactttcaaatttggttagtctaacaccctttcggtaaatatagcacttgcaaccaaaaactcgaaaataggcaacatttggcttcctcccaacaattagctcataggaagtctttttcaagagacgatacaaataaagcctattggttgcatggcaagcgatgtttatggcttccgcccaaaaggaatcggaaacaccatattcatctagcatagtccttgccatctcaatcaatgtacgatttttcctttccactacaccattttgttgaggtgagtaggtagcggaaagctcgtgtttgataccaagatcatcacaatagtcctcgatattggaattcttaaattcggaaccattgtcacttctaattttcacaagagtgcaactaaattcattttgggccctttttgcaaactttttgaaaagttcggcaacaatagacttatcatgcaaaaagaatacccaagtatagtgagaataatccaaacttgtttgggtccttggaggttagagaccaaagctttgggcacccaaatggtattctttttaccaccgagtataggggaacccacatatctagcaacaatgctaccatcatgagccttcctaagcatataatgagaatcaaacatgcatgtcttaggaggcttaccaccggggcaatcattcaccaaatgcccaacctcacgacacttggagcaatacttaccattgctcttgacaaaacgagtggcacggtgagaaggtttcttacccttctttggaataaatccaagtccctccttgttaaggatgcaccgttgctcactcaaaatcttgtcaagagtgttcttacccttgaagcacctctccaagctcttgttgagcttagccacttgctccttaagctcattgttctcaacaacaagtgaggcatcacaaatagatacacaagagctagagctagagctagacatatccacaagatcatcacaagaggtagaaatgctagatgatgcaacatgagcaatatggcaagtagtactatcatcaagcaaatcacaagatatgccaacatcaatgagagctccatgttgagtagtggaaaggaggttgtcatgagcttccttaagcttctcatgagaaatggtgagtctctcatgagaagtctttagctcctcatacaagacctccaaaaaagcatgatccttctttagggccttgaacttgacaatctccttctcactataagcatggagctcctcaaacatactcacaagctcatcataggaaacatcatcacaatcatcatcactctcactatcactaagagatgttaccttagaggagccctttgccatgagacaaagtggagcgaagagtgatggagcctccttgatggcaacaacggccatcttcttcttcttggagcttgcattatcactatcttcttcctcggacccggatgaggcggagctctcctcatttgagtcccattccccgatgaaggcctcaatcttcttgccttccttcttgagcttcttcatgagcttgtagcctccactcttcttcttagatgacttgtctccatcatcatccttggaagggcacttggaagcaaagtatcccttctcaccacactcaaagcacctcaagttggagagagtcttgttgggtcttctatttcttctcctatttgagttggagccctttcctctctcctttctccttcccaagaaatcattgaaccttctagcaagaagggcaatctcttcttccaagttctcattgacttcattcaccttgcccttgcccttgtcttcaacttcggcttggagagcaatgcacttcttggaaggtgaggcttcctccatttcctttttcttcaacttatacatgtcattggtgttgatcttccccaagaggcttgccggtgtcatccttgacatgtcggagttgatgagcatggtgacaagggtctcatacttctccggtagagccctaagcatcttttgggcaacctcgagatcggtgtagtttgccccaagccccttgagatcattcacaatgacattgagcctcccatacatgtcattcacactctcatgaggcaacatggagaatgtctcatattggatcttgaggaagtgaagcttggcatccttgtactcacttgtgccctcatggatctccgccaacttgttccaaatctcatatgcggtctcaaggttgctcactctatcaaactcctcttggctcaaagagttgaacaaagcattcatggcttgggcattgagttggaggttgcggtgatcaatctccgtcaagggcgtgccggtgattgcaaagcctacatccacaatactccaaatatggaagctcatagctttgaggtgagtagacattttaattttccaagtggaatagtttgtgccattaaacatgggagccttccctacgtggttcacctcgttcgacat

SEQ ID NO: 22959 - DNA, 2719 bp, Oryza sativa
  Clone ID: TF_OsC783_9
tacctccgacaactccattttgcccctttcccccttctcttcccctttgaatcaagtcaccaccgtctccacccatgccggccggaggtgagcccttaccgtcgccgttccggccttatctctcactccttctaccagccaacggcctccccaggtgcgtggagctagggaacaccacccgccgccggcgtcgccgccatccagccaccggagcaccggcgccccacctccctccctcttctctgttgccggctagaaagagaagaagaaaggaacgggaggaagaaggagagaaggaaaaagaagaagaaaaagaaaagcctgacagagtctattatcttttggatggcaacttgtgatgttttgaggatcggataattaggttgcctatcttggatttgtttgcggtggagcatcaaatcggagttggcatgaaggcgctaggtccgtttgaagtcagtgctgtctccggaggccgagctggacttggacttggaattatcattggagcgtgtgaagttatgagcatatccgacgaagtgatgtcctcatcatcctccccttcttgaattggagtcgtcctcgactcaatcccatcttcttgattatgtgcactctctcgtccattggccatccttggaggtatctcatcgtgaaaaacatcctcatattcctgcaaaaggttagtaatagcgggtggcaaagaatataaagtactaggagcagtagccaatgtgagtataggatctttgcaaaatagagcatagcaacaagaatctggctcatctagtgcacaaatattatatttagaagccaacaaagcacccttcaacttaatttcattctttgtggtacttggttctattttactagttgaagcaggatgtttagcaataatctgattttcacttttcgctttcttttcacattcaagtcttgcaagatcatctttcaaagcagcggctggagtcatagaatgcaaaacaactcttttaccatcgaacataaatttatatgtattagtcctaccatcaaaaacaacttctctatcatattgccatggtcgccccaaaataacagaacaagcttgcatatgtacaacatcacattcaatttgatcatggtaggagcctatagaaaaaggtattttaaccaagcgggttaccttcatcttaccacatgtatgaaaccactgaatatgatacggatgtggatgtggatgggtagtcaagccaagcttcttgaccatctcttcacttgctaaattgttgcaactcccactatcaataatcattttgacggtatggcctttcacaagaactttgctttggaacaaattgtgacgttggttttgctcttcacacttctctttagcactaagtgctagcttgacaattaggctaggatactgatctagggactctggatgcaaatggacttcctcgatgtcctcatcatcttgtcctcctgcgtggtcagtggcagctaaagcatattcatcatcacaatcactagcagaagtatactcaccatcagcattcacaaatagagctcgccgatttggacagtcgcgggcaatatgtccaatgccatggcacctatgacatgtaatatcacgtgtacgtccagtggaatctactgaagttgcactcttggctggagtctgaactgaagcgtttttgcttgtttcttgagcatgggatggcgtggaggtaggtggacgaacaacagtagtagattgacgtggtgttgactgtcgtgtggaagtagcacctgcaagagaactcctatgcttgttgcgtccctgcacttctctttcagctttgcaagcaaaatggaataatctattcatggtattgtattctttatattcaagaatatcccgaatctctctattaagacctccatagaacctagaaattctagcatcctcagtttcttgcaaattacatcgtgacaaagcaatcatcatctcttgatagtatgtttctacagaattggaaccttgtcttaaaagttgcagtttatttaacatgtcacgagcatagtaagaaggaacaaatctagacctcattgtacgtttcatatcatcccaggttctaggtctaagtcctctaccacatatatcattccaccatagagatgcaaaggaggtaaattcactactggcagctttaactttcttattatcaggaaaatcatagcaagagaatttttgctcaacagctagctcccagtctagataaacagaaggttcaaacttaccatcaaaagaaggcatagtaaattttaccttagataaaggatcatctttgtccctaattcgacatcgtcttctatttccaacactctcgtcttcctcctcatcatcagcaacagattgctcttcatcttcatcatcatatctttggtgtcgatgagcagtggcacctacaccttcttcacctacagcctcaagtaaaccaatgcgtcgcacaatattttcatgtccaatatttatattctgaatgttttcagttaattgtttatgtgatcgattcatttgctcaatttgatccactactttcaccaggctttcacttaaggtttttaaatgtttatctgtgctttccttgtatgatttactattacgcatcaactcttcataccaattttccatgcccttcagtttatgcgctagattctccagtgttggttcgtcggaacttgtacctgacat

SEQ ID NO: 22960 - DNA, 2577 bp, Oryza sativa
  Clone ID: TF_OsC1528_1875
atgagaccagactactccatcccgctcgccagcgtgcaccggcgatcgggagagcaggtctccggaacctctgccttcgacgtcctgcaccgggagaaggcggcaataaggcactgtgattttactatggctggttttgccgatgcactgaggctggataaattcaccggtgtgcattttaagagatggcagatcagggtcactctgtggctgatagctatgaaatgcttctgggtgagtactggcaaacctgaaggagttcttactgctgaacagcagaagcaattcgaggaagccactactctctttgtgcgatgcattcttagcgttcttggcgatcgtctggtcgaggtgtatatgcatatgaccgacactaaggagttgtggaatgcactgaatactaaattcggtgctactgatgctagcaatgatctgtatatcatggagcagtttcatgactacaagatggctgacaaccgttctgtagtcgaacagactcatgagatacaaacaatggctaaggaactcgaactccttaagtgtgtcttacccgacaaatttgtagccgggtgcattattgcgaaactacctacatcttggagaagtttcggtactgcactcaaacacaagagacaggaatactctgttgaggggttgatagtgtctcttgatgttgaggagaaagctcgggaaaaagatgccgcgtctaagggcgatggtgggcagtccagtgctaatgttgtgcacaaggcccagaacaagagtaaggggaaatacaaagctcagcagaccaccaacttcaagaatcagaagaagaacaacaacaatcttaatcaggatgagaggacttgctttgtgtgtggccaagttagtcatctggctaggaagtgtccacagcgcaaggggatgaaggcatctgcagggcagacttctaagtctgctaatgtgaccattggcaacactagagatggaagcgggtatggtaatttacctactgtcgcacggggttccaccgtcctaatggggaatgggtcacatgcttctgttcatggtgttggcacggtagatctgaagtttacttcgagaaagatcgtgcagctgaagaacgtgcagcatgtcccttctatcgacaggaatcttgttagtggctcccgtctgactagagacggatttaagttggtttttgagtctaataaagtagtcgtgtctaaacatggatattttattggtaaaggttatgagtgcggaggcctgttccgcttttccctttctgatttctgcaataagtctgtgaaccatatttgtggcagtgtggatgatgaggctaatgtttggcactcacactactggaaggaggctgtccgtagtgaaatggattccattatcgctaacgggacttgggaggtgacagagcgaccctatgggtgtaaacctgtggggtgcaagtgggtgttcaagaagaagcttaggcctgatgcctcacatggtcttctcgttcatcaaatggacgttaagacagctttttttaatggagagctggatgaggagatctatatggatcaacctgatgggtttgtagttgaaggtcaagaaggcaaagtgtgcaaattgttgaagtttttgtatggtctgaaacaagctcctaagcaatggcatgagaaatttgacaaaacattgacatctgcaggctttgcagtcaatgaggcagataaatgtgtgtactatcaccatggtgggggtgagggagttagtctgtgcttgtatgttgatgacatactgatatttgggacaaatcttgaagtaataaatgaggttaaatcattcttgtctcaaaattttgatatgaaggatttgggagtagctgatgttatcttaaacattaagctaattagaggtgagaatgggattaccctcttgcagtcccattatgtggagatgatcttgaatcgctttggctacattgatagtaagccttctccaacaccttatgatcctagcttgttgcttcgcaagaacaagagaattgctaggaatcaactggaatattcccaaatcattggctcgcttatgtacctggctagtgcaactaggcctgacatctcctttgctggatatagtgattctaactggatctctgatgtggatgagatcaaagccactagtggatatgttttcacactaggtggtggtgctgcttcgtggagctcttacaaacagaccattttgacgaggtcaacaatgaaaactgagctgacagcattggatactgctactgttaagacagaatggttgcgtgatctattaatggatctacctattgttgaaaaaccggagccggctattcatatgaactgtgacaatcaaatggttgtcaaagtgaacagttctaaggataacatgaaatcgtctagacatgtgaaaagacgattgaagtctgtcaggaaattgagaaactccaaggttataacattgcattacatccaaacagctagaaacctagtagatcccttcacgaagggactatcacgaaatgtgatagacagtgcatcgaaggagattggtttgagacccatgtga

SEQ ID NO: 22961 - DNA, 3060 bp, Oryza sativa
  Clone ID: TF_OsC1713_5366
ttaggtcggtatcaagcccatttccctcgatgcactgtctatcacattacgtggtagccccttggtaaactgatctgccagatttttagccgtttggacatagtccaatgctatcactccggagtttttctgctttctgacagatttcagtcttctcttgatatgcctagatgacttcatgttgtcctttgaactgttcactttaataatcactgtttgattatcacagttcattaggatagctggcactggtttttcaaccaccggcaaatccatcaggagttcacgaagccactcggcctcaactgttgcaatatctagtgctgtaagttctgcttccattgttgacctcgttaagatggtctgcttgcaagacttccaggaaccagcgccacctccaagtgtgaacatatatccacttatggcttttatctcatcagcatcagatatccagtttgagtcactatacctttccagtacttttgggtacccggtatagtgaattccatagctcatagtgccctttagatagcgcattattctttccagagcctgccaatgatcatctcccggatttgagacaaaccggctcagcttgcttacagcaaatgagatgtcaggcctcgttgcacttaccaagtacatcaatgaaccaatgatttgggagtatctcagttgatcccttgctattcttcggtttttccttaatagcacgctgggatcataaggagtaggagctggcttgcagtcactatatccaaagcgactcaaaaccttgtccacatagtgggattgcacaagtgtaatcccaccctcatctcctctcaatagcttaatgttaagaataacatcagcctctcccaaatccttcatttcaaaactcttggacaaaaagtccttgacctcctcaatcacattgaggccgtctggttgatccatatagatctcctcctccaactctccgtttaggaaagctgtcttaacgtccatctgatggacgagaagaccatgagaggctgccagagcaagtagtactcgaatcgtggtcaaacgggcaactggtgagtaggtgtcgaaaaaatcctcgccttctttttgggtataacccttggccacaaggcttgccttgtacttttcaattgtaccatcaggcctaagctttttcttgaaaacccatttgcatcctacaggcttgcacccatatggacgctcaacgacttcccaagtaccattagacataattgagtccatctcactgcgtactgcttccttccagtagtcagtgtcaggaggtgaatatgcctcttctatggttcttggagtgtcatccacgaggtatacaatgtagtcatctacaaaggattttacaacccttagtttcttactcttatgagtatctacaatgttatcctcctcaggatttccctcaggcgtttgatcattgtgttctatcagtgcaaagtgcttatggggtatgacagtttcttgactagaagtgctaggtgtatttttcatgggaaattcattctcaaagaatgtagcatctctagactcaataattgtactaacacgcatgtcgagtactctagagtttactattaagaatctataacccacgctgtgaatagcagcataaccaaggaacacacaatcaacagtattcggtccaagtttacgctttttggctataggtacatttacctttgccaaacagccccatgttcgtaggtatgagagatttaatttcttcctttcccattcctcgaatggtgttacttctttatgcttcattggaattttattcaggacatgacacgcagtcaaaactgcctcaccccaccattccttggaaagtccaacaccatgaacaaccgcaagtgactcgtttcccatcaacaaggaggaacctctcccgacatgaatattagcaccagtatcaacccaccaatcaggtgaatgaaaaacagagagaactgtaggtaataatttatcgtaccccgatgttcctccgccctcgctaatgaccatgttggcaaacttcctgtctttgtgctcaagacaatccttggcccaatgcccaaacttgccacacacaaaacagtctccatttgccttttccttacctttcttcttaaaattggctgtagccttggctttgacatcaggcttgactttcttgttgttgtgggatgcatgagggttcttcttctgtaccatattggcactagaacctctctcaacctttatgcccccaatgtcctttgccctcgccttctcttcaacacccaaagagccaatgagatcagaaacactgaactcttgtctcttgtgctttagagaagtgccaaagtccgaccaagaaggtggcaatttggcaataatgccacccgccacaaacttgtccggcaactcacagttgttgttctcaagttccttagccagcatctgaatctcatgagcttgttctactacagaacggtcattgaccatcttgtagtcatagtactgttccatgacatacagctcattgccggcgtcgggaactccgaacttggcctcaagtgcatcccacatgtccttccaaacggcgccgggcttccaccacaatctcctcggagaggtcaccgggcaacacctacacaagccgtctaggaggcggcaacctccaagagtaacaagtctaggatgcttgccgaggatgatcaagtgccacactagcgtccacggctcggtcagaccgccgtcggctcggtctgaccggttgcggctctggcggctcttcatgatctccatgttctcaatataaatgtgactcttatcatttttactttcatatccaaatgagattttgtacagcggctctagtaaaccaactcgagttagttcatgtaccaaggacatgcacttcccagctgaaggagctgatgatgggggatcaccttccagtagtgtgctcgtctcacacgcccagacttctgctgtagctgtggctggaacctcgcagtatttggtgccagcagttgttgcggggccgcacattggaatgagtagttgtcccat

SEQ ID NO: 22962 - DNA, 3597 bp, Oryza sativa
  Clone ID: TF_OsC1528_2017
atggctggttttgccgatgcactgaggccggataaattcaccggtgtgcattttaagagatggcagatcagggtcactctgtggctgacagctatgaaatgcttctgggtgagtactggcaaacctgaaggagttcttactgctgaacagcagaagcaattcgaggaagccactactctctttgtgggatgcattcttagcgttcttggcgatcgtctggtcgagtttcatgactacaagatggctgacaaccgttctgtagtcgaacaggctcatgagatacaaaccatggctaaggaactcgaactccttaaatgtgtcttacccgacaaatttgtggccgggtgcattattgcaaaactacctccatcttggagaagtttcggtactgcactcaaacacaagagacaggaatactccgttgaggggttgatagcgtctcttgatgttgaggagaaagctcgggaaaaagatgccgcgtctaagggcgatggtgggcagtccagtgccaatgttgtgcacaaggcccagaacaagagcaaggggaaatacaaagctcagcagaccaccaacttcaagaagcagaagaagaacaacaacaatcctaatcaggatgagaggacttgctttgtgtgtggccaagttggtcatctggataggaagtgtccacagcgcaaggggatgaaggcacctgcagggcagacttctaagtctgctaatgtgaccattggcaacactggagatggaagcgggtatggtaatttacctactgttttttcagttaatcaatctactaattggtgggttgatactggggccaatgtagcacggggttccaccgtcctaatggggaatgggtcacatgcttctgttcatggtgttagcacggtagatctgaagtttacttcgggaaagatcgtgcagctgaagaacgtgcagcatgtcccttctatcgacaggaatcttgttagtggctcccgtctgactagagacggatttaagttggtttttgagtctaataaagtagtcgtgtctaaacatggatattttattggtaaaggttctaagtgccatagttgtgtgcaatcaaagcaacctcgcaagcctcacaaggctgtcgaggagagaaacttggcaccactagaactcctacattcagatctttgtgaaatgaatggggtgttgacgaagggtggaaaacgatatttcatgacattcattgatgatgctactagattttgctatgtgtacttgttgaaaacgaaagacgaggctctagactattttaaaatttataaggcagaagttgaaaatcaacttgacagaaagataaaaaggcttaggtctgatcgtggtggagagtttttctcgaacgagtttgacttattctgtgaggaacatggcatcatacatgagaggacgcctccctattctcccgagtctaatgggattgctgaaaggaagaatcgcacactgactgacttggtgaatgccatgttggacaccgcgggactgcctaaggcatggtggggggaggcattgttgacctcaaatcatgtgttaaacagagttcctaacagaaataaggacaaaacaccatatgagatatggattggtagaaaaccatcactttcttatttgcgcacatgggggtgcttggcgaaagtcaatgtaccaataacgaagaagcgcaaacttggacctaagactgtggactgtgtttttctgggatatgcttatcatagcattgcctatagatttttaatagttaaatccgaggtaccggacatgaatgttggtacaattatggagtctcgtgatgctatcttctttgagagctttttcccaatgaaggatacacatagtggttcgaaccaaccatctgaaataattcccagttcaatcacaccaccagaacaaactgaacatacacatgaacttgtctctgaggaggatgtcagtgaagctcctcgaaggagtaagagacaaaggacggctaagtcttttggtgatgatttcactgtgtacctcgtggatgatactcctaagtcaatttcagaagcatatgcatctcctgatgcagactactggaaggaggctgtccgtagtgaaatggattccattatcgctaacgggacttgggaggtgacagagcgaccctatgggtgtaaacctgtggggtgcaagtgggtgttcaagaagaagcttaggcctgacggtactattgaaaagtacaaggctcggcttgttgctaagggctatactcagaaagaaggcgaagatttctttgacacttactcacctgttgctagattgaccataattcgtgtgctactttccctagcagcctcacatggtcttctcgttcatcaaatggacgttaagacagcttttcttaatggagagctggatgaggagatctatatggatcaacctgatgggtttgtagttgaaggtcaagaaggcaaagtgtgcaaattgttgaagtctttgtatggtctgaaacaagctcctaagcaatggcatgagaaatttgacaaaacattgacatctgcaggctttgcagtcaatgaggcagataaatgtgtgtactatcgccatggtgggggtgagggagttattttgtgcttgtatgttgacgacatactgatatttgggacaaaccttgaggtgataaatgaggttaaatcattcttgtctcaaaattttgatatgaaggatttgggagtagctgatgttatcttaaacattaagctaattagaggtgagaatgggattacactcttgcagtcccattatgtggagaagatcttgaatcgctttggctacattgatagtaagccttctccaacaccttatgatcctagcttgttgcttcgcaagaacaagagaattgctaggaatcaactggaatactcccaaatcattggctcgttgatgtacctggctagtgcaactaggcctgatatctcctttgctgtgagcaagttgagccgatttacctctaatccgggagatgatcactggcgtgcgcttgagcgagtaatgcgctatctgaaaggtactgtggaattggggcttcactatactgggtatcctgcggtactggagggttatagtgattctaactggatctctgatgtggatgagatcaaagccactagtgcatatgttttcacactgggtggtggtgctgtttcatggaggtcttgcaaacagaccattttgacgaggtcaaccatggaagcagagttgacggcactagatactgctactgtttaggcagaatggctgcgtgatctattaatggatctgcctattgttgaaaaaccgacatgtgaaaagacaattgaagtctgtcaggaatttgagaaactccggagttataacgttggattacatccaaatagctagaaacctggcatatcccttcacgaagggactatcacgaaatgtgatagacaatgcatcgaaggagatgggtttgagacccatagcattcttgaaagaactcacctttgtgagcttgactgttggtcgcagtctgtagagattttgggtgaatcttctaggaagcttactaaagacctaggagta

SEQ ID NO: 22963 - DNA, 5950 bp, Oryza sativa
  Clone ID: TF_OsC359_7939
ctaaccccttttatcatgtccgctaggtggttccggagaccgtccaccgttcgtcgtcgcctcccactcattcctcgccgccgttcgccgtcgcccctccgtgccggccgaatcctcggtgagaaccccgtcgtccttcccctcccctcctagcgctgccgcccctcgccgctcggggtcgcgccgccgccgctcgccgtcggtcaccgccgtttgctgccgccgccccgcggtagcgccgccgtgcggcatggccaccgtgccggcttgagccgcccgtgcgcgccagccgcgcgctcccgccgccgtctgatataccctcgggtagatcggggccgtcggttcggccgcccgcgtggctgccacgtggccgccacgtgtgcgccacgtcgacgccacatcagtgccacgtggtgcgccgctccttccccggtccgtggacccggtccaccgcagaccgccacccgagtcattctttgtcttctctagatggccgaccacccacccaaccaccgtggagaaggcatggatgattttgtggcagagttggctcgcatgaccctggtggtgggctaccccaacgcgccggagtactcgaccgttccgccgctcagtggcgagcttccccaccgtgttcgtctggaggttcatggctttgtgggcacctgcctcgctaacatggtggttgaggcctctggaggcacagtagatcacacttgtcaggaggcagcatacctgatgatggccaggcttcgtgatcgccacagctaaatcttctgcaacacggcgtaccgcttccaccctcgccgagcaagtggcgacgacgtcagcaccttccgcccgacggccagtgagaatgacaccaccttcagccacatgtgtgccgtgatgaggggaatggacacgatgcactctgacctgcacaaggcatccaaggcctcgaatgatgggaagcttgtgaggatcatagctctgaaggatgagatagcacgccagaagaaggagaacgctcagctgaagggtctccccgctcccggaggagtccggatccgcaccacgcctcgcaagtcaacgactgcacccgtgcgcattcagcttgcgcccaggaacccacctcctcccgcagctcctccagcacctcccacagttcccgcagcgcccgcagttccagctccagtcccagcttccgttccagtgtcagctcccgcgtccgctctctccttcgctctagcgtcagccgccaggggtccagccattggcaacggaggttggttgcctgctactcacagtggcagccacgaccacagcagcagcagttccagtggctcagagccgggcaacggcgagacgtatctgccagactccaggagccgctcagagggacctggcctcttccttcagatggtcaacaccaggaatggcagccatgcagcaggtgaaggcagcaacggcgaagaacgcaccgacggtggatatcccaacagcgcctctggcaacagtccaccaccgctccccaagaacccgactcttgcacaagtgatggcccatcagacttagatgatggcggccatgatgcagctgatgcagcaccagccctagcagatgcaccagaggatgcagcagcaagccgagcagcagcagcagcagtttggtccccctccccctcagtccaagctgccggaatttctacgcgtcaggccacccaccttctctagcaccaccaaccccatggaggcaaatgactggttccatgccatagagaagaagctcaatcttctgcagtgcaacgatcaggagaaggtcgccttcgccacacaccagctccagggtcccacgtcagcttggtgggataaccacatggctacccgcccgccaggcacagaagttacttgtgcagagttctgtcgcagcttccagaaggcgcaagtactagacggggtcgtggcacaaaagaagagagaattccaggcactccaccagggcaacaggatagtgactgagtacctccatgagttcaattgcctagcgcgatatgcaccggaggatgtccacattgacacattgaaacaggagaagttcctagcaggtctggatgacgagctgaccaaccagttgatctccggggattacactgacttcgagaagctggtagacaaggcaatccgccaggaggatcagcgcaacaaaatggacaggaagaggaggtttcgacagttccggtccaaccaaggaagtcaccagcgaccgcgcttcactcctggacagcagggtgggcctaccaccatgattgttcgacagcatcgcccttacaacccaagcaacttccaccccggcagcagtggcagccatcatggccaaggtcagcacaaccgcagcgcagccccacgcccgccaatggcgccagttcagcaaactgcacccgttcccccaaagaaggacaccggaggcaagccaggagcctgcttcaactgtggtgagtccggtcacttcgccgacaagtgcccgaagcccaggcgtgctggacccaagtttgtccaggctcgggttaaccacgcgtccgcagaagaggcgcaagtagcaccagaggtcgtactgggtacgtttcctgttaactcaatccctgcaacagtacttttcgattctggtgcaacgcattcattcatttcaaagaagtttgttggggtacatgggttaataagagaagaacttagtacaccaatgcgggttcagacccccgggaatagctccacctcgattcaattcagcccttgtgtaacaatagaaatccaaagatcaccatttctagccaacctcatccttctcgaatccaaagacctagatgtcattcttgggatggattggctgaccaagttcaagggtgtcattgattgtgtgaatcgcacggtcaccttgaccaatgagaaaggggaaacagtggtgtacaagtcaccagtcgtactgaagcagggaatctccttaaatcagattgaggtggaaaatccgatggtcaccgaggagaagagttcgaggaaattggaagatatccctatagtcggcgagtatccagaggtgttccctgaggacctcactaccatgccacccaagagggagatcgaattccagattgatttggcaccggggactgccccaatttacaagaggccgtacagaatggcagccaacgagctagcagaggtcaagaagcaggttgatgagcagttgcagaaagggtacattcgaccaagtacttcaccttggggtgctccggtcatttttgtggagaagaaggacaagacgaagagaatgtgcgtcgattatcgcacactcaatgaggtcaccatcaagaacaaatatcctttgccgcggattgatgatctgtttgatcagctgaaaggagccaaggtgttttctaaaacagacctgcgatcaggctatcaccaattgagaattcaggaagaggatattcccaagatggccttcaccactcggtatgggttgtatgagtgcacggttatgtattttggacttacgaatgcaccggccttcttcatgaacctgatgaacaaagtgttcatggaatttctggataagtttgttgtggtattcattgatgacattctaatctattccaagtcggaagaagagcatgagcaacatcttcgtctggtactcgagaagttgcaggagcaccagctttatgccaagttcagcaaatgcgacttttggttatcagaggtcaaattcttgggtcacgtcattacagctcagggcgtggcagtctatccatcgaatgtggagtcagttaccaagtggaccccacctaagaccgtgtcacagattcggagttttcttggacttgcgggttattaccgtcggttcattgaaaatttctccagaattgccagacctatgactcagttgcttaagaaagacgagaaattcaggtggacagccgagtgtgacaagagttttgaggagctcaagaagaaattagtacctgctccagttctgattctgcccgatcagacgaaagacttccaagtctattgcgacacgtcccgtcacgggcttggatgcgttctaaagcaagagagcagagtggtcgcttatgcctcgcggcagttgcgtccgcatgaaggaaactatccaacacatggcagcggtggttcatgctttgaaaatctggaggcactatctgattggcaaccgctgtgaagtatatacggatcacaagagtttgaaatatatcttcacccaacctgatctgaatctccgacagcgaagatggttggagttaatcaaagattatgacatgagcattcactaccatccaggcaaagccaatgtggtggcaaatgcattaagcaggaagagctactgcaatgctttgtgcaccgaaggcatgtgtaaggaattgcagcaggagcttgaacatctcaacttgggaatcgtagaacacgggtttgtggctgctctaaaggcacggcctacgctcgtggatcaagtaagagcagctcaagtaaatgatcctgagatagctgaactgaaaaagaatatgagggtcggaaaagcccgggatttacttgaagatgaacatggcacaatctggctgggagaaagattgtgcatacctgatgacaaagagctgaaagatctgatactcaccaaggctcatcagactcagtactccattcatccaggcagtaccaagatgtaccaagatcttaaagaaaaattttggtaggccagcatgagaagggaaatagctgaattcgtcgcactctgcgatgtttgtcagcgggtcaaggcagaacaccagaggcccataggattgttacaacctcttcaaatcccagaatggaaatgggaagagattggaatggatttcataacaggcctgcccacgacatcatcaggccacgattcaatctgggtagtcgtggatcgacttaccaaagttgctcatttcattccagtgcatactacttatacaggcaaaaggttggcagagctctatctctcaagaatcatgtgtttgcatggagtacccaaaaagatagtatctgatcgagggagtcaattcacctcaaaattttggcagaagttgcaagaggaattgggtacccgttcgaatttcagcacagcttaccatccgcagacagatggccaaaccgagagggtcaatcagatcttggaggataagttgcgagcctgtgcgctcgattttggcggagcttgggataaaagtctgccttatgctgaattctcttacaacaacagctatcaggccagtctacaaatggcaccgttcgaagcgctgtatggccggaagtgccgcatacctctcttctgggatcaaataggcgaacgtcaactgttcggaacagaagtgctaacggaagcagaggagaaagtcagaaccgtcagagagaggctgagaattgcacagtctcgacagaaaagctacgcagacaaccgccgaagagagctcacttttgaagcaggagattatatgtacctccgtgtcactccgctccggggagtacaccgtttccagacgaaaggcaagttggcaccacgcttcgtgggaccatacaaaatcttggaacgaagaggagaagttgcctatcagctagaacttccatccaacatgatcggtatccatgacgtgttccatgtgtcccagttaaagaagtgtttgagtttacccgaagaacaagccaattcggagcacattgacatccaagaagatctgacttatgtggagaagccagttcgcatccttgataccagtgaaaggaggactagaaacaaggtcaccaggttctgtagggttcagtggagccaccactcagaggaagaagcaacctgggaaagggaagatgagttgaaggccgcccatccgcacctcttcaccagctcttccgaatctcggggtcaagattccgtt

SEQ ID NO: 22964 - DNA, 9253 bp, Oryza sativa
  Clone ID: TF_OsC359_8456
atggccgaacgggcagtggtgcacagcctctctccgaacgctagcggtgacgacggggagcagaacccgcgccgtcgggctcgcaccccaccgtccccctctcgccgaaatcttgggcggggggaggcgctcggggaggtcggaggatccgcgacttcgccgcccgcgggcgacgggggaggacggcgagacggggcgcgtcgccgcctcgtctacggcgatggcggcatgccccagggcgcgctccaggctgcgggcgcgctcctgcgtcacccgcccgtcgtccccgatccagagactccggcccgacgttggctggatgacgtggctgacttggtcatgacggcgcagcagcgcctaggcgccggcgggcggtcctccgccaccgaggcctctggcgctgccgccgccggctccatgtcgtcgaggcggagggcgcggcgagcggcggccgttacccgccgttcgtccgccgttccctcgtcaacgcctccgacccaagaagatgtgcgtggggggccggatgcccgcctcgatatcgagcgccggcgcgacgatcgtcgcgccgccgacgcaacggagggcgcttcctcgtccggagcgccacttcggtccgggcacgggggccggccccccgtgtccccggttggcggtgccggctgtcgagcctttgtggcgagccttcggaacgtccgttggcccccaaggttctggtccaccatcaccgaaaaatacgacggaagcgtcaaccccgctgagtttctccagatctacacgaccgggatcgaggccgccgggggtgacgacagggtcatggcgaatttcttccccatggccctgaagggtcaggcgcggggttggctaatgaacttgccacccgcgtcggtctactcttgggaggatttgtgccagcagttcaccacgaacttccagggcacatatccgcgcccaggcgaagaagcggacttgcatgcggtacagcgaagggacgatgagcctcttcgctcgtacattcagcggttctgtcaagtccgcaacaccataccgtgtatccccgcacacgcggtgatctacgtgttcagggggggcgtgcggcacaaccgcatgctcgagaagatcgcctccaaggagccccagaccaccgcgcagctttttgagctcgcggaccgtgtggctcgcaaggaggaggcctggacctggaactcctccggttctggtgtggcagctctggccgcccccgggtccgccgctcggtcagagcggcgggacaggaggaggaagaagaagtcggcccgttccgacgacgagggtcatgtcctcgccgtcgagggcgcttcgcgggccccacgaaaggggaggcctgcgagcgacaaaaagaaggaggccggcgctcccagcagggagcgcccgaccggcaagtggtgtaccgtgcacaacaccaccctccacgatctcgcggactgccgcgcggtcaaaagtttggctgagcggacgaggaaatgggaggaggagaagaggcaggagcgccgtgagggcaaggccccggcggctcccgccggcaaccggcgaggtgaggccaagcagaaggccaccgccgaggacatcgacgatggcgacgatgacctggggttccaggagcctgaggccaccgtcgccaccgtcgatgggggagcgtgcgctcacgtttctcgccggagcctcaaggccatgaagcgcgagcttctggccgcggcccctacccatgaggcgacacggcgggcgcggtggtcggaggttgccctcaccttcgaccagaccgaccacccgccgtgcgttgcctggggaggacagatcgcgatggtggtttcccccaccgtttgcaatgtgaagttggggcgtgtcctcatagacgggggtgcagccctcaacatcctttcccccgcagcctttgacgccatcaaggccccggggatggtgctccggccatcccagccgatcatcggtgtgacgccggggcacacctggccgctgggtcatatcgacctcccggtcaccttcggtggttccgccaacttccgcacggagcgggtggacttcgatgtggcggacctcagtctgccctacaacgcggtcctggggaggcccgtgttggtgaagttcatggcggcggtccactacgcctatcaccagatgaagatgccgggccccggtggccccatcaccgtccatggcgacctcaaagtcgcgcttgcttgtatggagcagcgcgcggaccacctcgccgcggcgtccaagcccgcgggtggcgacgagaggctcagtacctccgtcccggccgccccaaggcagcggatggtcacgtgcgacgaggtcccggtcaaggaggttgccctgagcgacggcccgtccaagaccacacgaatcggtggtcttctggacgacaaataggataacggcacccagttcactagtgtcgcgtctcaaaacgactctaaaatacatcctcgaaattatgcctagaataattaaaatccatgtgaaagcctctggaattttcagagcacaaataataattattaagaaataaacgaagttaaaatggttttataaaaagaaaagctctaaaaagtccttttttccccctccccctcttgggccagctcggcccatctctttccctctctctcctcttccccgcggcccattcggcctcctccccgcgcgcgcgccgctgacgggcgggcccgcccgccaccctcgctgacgggtggggcccacccgtcatccccttcctcccgccgctcccgccgccccgcccgcgccctagcgccgccgctgccgccgcgaatcccgccgcccccgtccgccccgcgtgcaatcaagagaggggaaatattccccgggatcccctccctctttccccccatttttccctctctctctccctcggattcatttggaaactttccccctaacctcgccggcgccattaatggcggccgggactcccgcgcccgtttccccctcctccggccaccccttccctctcttaaccctatataaaccctccccgtgcctccctccaccgtttccgccactcgccgctctctctccccgccggaatcgagctcgcgccgtcgctctctctctccgccgtcgccgccgagctccggtccgccgccgttgtcgccccggaccacctctcccctcggcgccgcctccttcggcttcgccgcatcctcgccgacctcgtccacccctccgtttcgcacgccgaccgccggagcaccgtcgaccccgtccacccgagccgcgccgccgccttcctcagctccggtcgccgttcccgtcgtcgccatcgacccggggtgagccgtggaccgccgattcgtttcccccttccctcccctctctcggccgccgctccgccgtacctatggccgccaccggcgaccataggggcgcgggcgcgccgcctcccgtcggctgtgccggcgtggccgcctttgggcacgccccgcggctgccgtgtggggcccggctgtcagccgcccgcgcccttaggtgcggctgacgcgtgggacccacggcgccggccggtgcgaccccgggtgcgcccggtccaccgtgggccgtggggctgccacgtgggccccactcccgtggacccagtccgcgcgcccctcccctcggctgacgcaataaatccattttaaattaaaatttaaatgaagaaattcgcaaatattcatttaaagagcatataaacttcaaatggccataacttggccatttgaactcggaattagaccgttcaagtctctaatttttccttaagaagtcaagaacccatttttgtgctttgtttctgcttgttatatggagtttattagagtaaaagccttttcttttccgttggtcgtgtagacgctgcagcttcggaagatccgctcttcgtggaggttgaagccgacgtttgggaaagcgagcaaggcaagtcacatcatctttgaacatattgaatcccagtttataaaattatgttgctttaaattattgcattatcgctttatttaaattcccgcgttatcactgttttatctagccatgcctattttcctttgttatgaccttattattgttattgttattatttccttgttcaccctagaataaacaaaaccccaactagtggacactctactcatggtaccactagtatgattttaggtagatgcttcgctatttaattaggtaacattaggtggtttttcaactctagactttgggatattcgtatcacctggacactatggattggtttgattattgtggaattggattcacacctccccctctattcaaaaccctcaaaatagttttaggctgggctcggggtgcatggttttgatagtagcacctcggccatataaggaccggtcttcgggcctctgttgcaaagcactaccgtacttccacatgtctagtgggtaaggcttagtttgtggctcagtctggttataaacaaaagtacacggatggagatggacgaagtcgggggtcgatggacatctctaggacaaatgaaggctacacgagctgcggcccggtagtcgagatgtcatggcacagggccggtgtcctgctgctaggggctcagtcctgcctacctgtcccgggggttgcggccgtaggtgggattgggtcggtactcttgtctatggctaggatgggttggaaactatgtcacgtcttccgtctgtataccgtggtggtatgtggcacgtggttgcacgtgaggaagatgtgtcttgtgggtaaagatgtacacctctgatcagagtataatctattcgaatagccgcgccctcggttatgggcaagccgagcaatgtacccaaattccggcaatggtccgccaccacttcccgagaatccgacccttgcccaagttatggcacatcagactcagatgatggcagccatgatacagcagatgcagcagcagcaccagcagatgcaccagaggatgatgcagcacgtcgaacagcagcaccagcagtttggtccccctccccctcagtccaagttgccagagtttctacgcgtcaggccacccaccttctccagcaccaccaaccccatggaggcgaatgactggctccatgccatagagaagaagctgaatctcctgcagtgcaatgatcaggagaaagtcgctttcgccacacaccagcttcagggtcccgcgtcagcttggtgggacaatcacatggccacccgcccaccaggtactgaagtcacatgggcagagttctgccgtagcttaaggaaggcgcaggtgccagacggggtcgtggcacaaaagaagagggaattccgggcactccatcagggcaacaggactgtgacacagtacctccacgagttcaatcgcctcgcgcgatatgcaccagaggatgtccgcaccgacgccgagaagcaggagaagttcatggcgggtctggatgatgagctgaccaaccaactgatatccggggactacgctgactttgagaggctggttgacaaggcaatccgccaggaggatcaacgcaacaagatggacaggaagaggaaggccgcacagttcagggcacctcagggaagtcaccagaggccgcgcttcgctcctgggcagcagggtggacctaccaccatgatcgttcgtcagcaccgcccgttcaaccctagcaactttccccagggcgccagtggcagtcagaaccaccatggaggtcagtccaaccgcggtgcagcttcacgcccaccaatggcaccggcacagtcaggccagcccgcgcaagccaagaaggagactggagcaaaaccagggtcctgcttcaactgtggcaagcttggccacttcgctgacaaatgcccgaagcctaggcgtgccgggccaaggtttatccaggctcgtgtcaaccacgcatctgcggaggaggcacaagcagcaccagaggtcgtactgggtacgtttcctgttaactcaatccctgcaacagtactttttgattctggtgcaacgcattctttcatttcaaagaaatttgtcgggatgcatgggttaataagagaggaacttagcacaccaatgcgggttcataccccagggaatagctccacttcggttcaattcagcccttctataacaatagaaattcaaagatcaccatttctagccaacctcattcttctcgaatccaaagacctagatgtcattcttgggatggattggctgaccaagtttaagggggtcatcgattgtgcaaatcgcacagtcaccttgaccaacgagaagggagaaaccgtggtgtacaaatctctagtctcgccaaagaaaggggtctctttgaatcagattgaagcggaaatcccagtggacaccgtagagaagaactcgagaaaattggaagatatacccatagtctgcgagtatccagaagtgttccccgaagacctcactaccatgccacccaagagagagattgaattccggattgacttggcaccgggaactgctccaatctataagagaccgtacaggatggcggccaacgaactagcagaggtcaagaagcaggttgataagcagctgcagaaagggtacattcgaccaagtacttcaccttggggtgctccggtcatttttgtggagaaaaaggataagacgaagaggatgtgcgttgattaccgcgcactcaacgagttgagaattcgggaagaggatattccgaagacggccttcaccactcggtacgggctatatgagtgcacggttatgtctttcggacttaccaacgcacccgcattcttcatgaatctgatgaacaaagtgttcatggaatttctggacaagtttgttgtggtgttcatcgacgacattcttatctattcaaagtccgaagaagaacatgaacaacatctccgtctggtactcgagaagttgagggagcaccagctatacgccaagttcagcaagtgtgacttctggttgacggaagtcaaatttctgggccatgtcattacagctcagggtgtggcagtcgacccatcgaacgtggagtcagttaccaaatggaccccaccgaagaccgtgtcgcagattcgaagttttcttggacttgcaggttattaccgtcgattcatcgaaaatttctccagaatcgcccgacccatgactcagttgcttaagaaggatgagaagtttaaatggacagccgagtgcgataagagcttcgaggagctcaagaagaaattagtatccgcaccagttttgattctgcccgacccgatgaaagacttccaagtctattgtgatgcatcccgtcacggacttggatgtgtcctaatgcaagaggacagagtggttgcgtatgcctcgcggcagttgcgtccacacgaagggaattatccaactcatgacttggaattggcagcagtggttcatgctttgaagatctggaggcactatctgattggcaaccgctgcgaagtatatacggaccataagagtctgaaatacatcttcacccaaccggacctaaatctccgacaacgaagatggttggaactaatcaaagactatgacatgagtattcactaccacccgggtaaagccaatgtggtggcagacgctttaagccggaaaagttactgcactgccctatgcatcgagggcatgtgtgaggaattgcggcaggagtttgagcatctcaacgtgggaattgttgaactcgggttcgtagccgctctggaggcacggcctacgctcgtggatcaagtcagagcagctcaagcaaatgattctgaaatagcagagctgaaaaagaacatgagagtcggaaaagcccgggatttccacgaagatgagcatggcacaatctggttgggagaaagattgtgtgtacctgacgacaaggaactgaaggatctgatactcaccgaggctcatcagacccagtactccattcacccaggcagcactaaaatgtatcaagacctcaaagaaaagttttggtgggtcagcatgaggagagaaatagctgaattcgtcgcactctgcgatgtttgccaacgagtgaaggcagagcaccaaagaccagcaggtttactccaacctcttcaaatcccggaatggaaatgggaggagattggaatggactttataacaggactgccccggacatcatcgggtcacgatttgatctgggtagtcgtggatcgactcactaaggttgctcacttcataccagtacataccacatatacgggcaaaaggttggcggagctttacctttcgagaatcatgtgcctacatggagtacccaaaaagattgtatctgaccgagggagtcagttcacctcaaaattctggcagaagctacaggaagaactggggacccgtttaaatttcagcacggcctatcacccgcaaactgatggtcagaccgagcgagtcaatcaaatcttggaagatatgttgagagcttgtgctcttgattttggtggagcttgggacaaaagcttgccatatgcggaattctcgtacaacaacagctaccaggccagtctacagatggcaccgtttgaagctttatacggccggaagtgccgcacacctctcttctgggatcagacaggcgaacgtcaactgttcggaacagaagtattagcggaagcagaagagaaagtcagaatcatcagggaaagattgaggattgctcagtctcgacagaagagctacgcggataaccgtcgaagggagctcacttttgaggcaggagattacgtgtatcttcgtgtcactccgctccggggagtacaccggtttcagacgaaaggcaagttggcaccacgcttcgtgggaccatacaaaatcttggaacgaaggggagaagttgcttatcagttagaacttccatccaatatgatcggcatccatgacgtgttccatgtgtcccaattaaagaagtgcttaagggtacctgaagaacaggctgattcgaagcacattgatatccaggaggacctaacatatgtggagaagccggttcgtatacttgataccagcgaaagaagaactagaaataaggtcaccaggttttgccgagttcagtggagtcatcattcagaagaggaagcaacctgggaaagggaagatgagttgaaagccgcccatccgcacctcttcaccagctcctccgaatctcggggccgagattccgtttaa

SEQ ID NO: 22965 - DNA, 1350 bp, Oryza sativa; identical to SEQ ID NO: 13752
  Clone ID: TF_OsC1211_18

SEQ ID NO: 22966 - DNA, 5223 bp, Oryza sativa
  Clone ID: TF_OsC359_7638
gtgacaagttggtatcagagccaccttgaccttaggacaagccaaatggtaaacccccatccgccgaaaaacttgatcgaggtgctaggattcgtcagggagctgagaatgatggcatttgaagtaggttacgaggttgcccccgagtatcgccagattccccatgaccccaacgaggagaagtgtcgtgttcgcgtgacgttgactagtgatcgtgaagaccttccgtcgataaagtttgaagctgagggaaaaaagtacagccatgtttgtcaggaaacagccttggtggccattggagagctacgtcatcgctttgatgaggagttagagtcatcagctttccagtatcacccacacaagccacatggtcaagactatagaacttacaactgtcccgaaggtgaaggtagcgccactgtgatgcacgccgtgtatatgcttagcgccatggatgcagtaggcgtggagcgagagaaagcagctcatgatagggaaaactggaaccgtggcaggatttgtaagttggagagcaaggtgtaccgtctgcagaaggaactagctgagcttaagggagaagcaccaccgccagcacccaagcttcgcctcaccgcaaggaagagaaccagtctaccacctcgtctccagttagcttcgaagactcgtgtggtgggagacgctgtgcctgatcatgctgaacctgtcatccatgtcttaagtgatgaggaagaagaggaagacccaaaagaaagagagccagctactccagaggaggaagatccatctcttcgttccgacgcaaggcgcaccactaacccagtagaggcaggtgattggctgcatgctgtgggaaagaagttagatttgtttcagtacaccgagcaggagaaggtttcctttgcttcacatcagttgcatggtcctgctgctgagcggtgtgaccactttcttctaaacagagccgagggacagcctatcacttggcgggagtttactgctgctttcaagaagacacacataccatcaagtgttgtggcccttaagaagagagagttcagagcactcaactagggatcccgttctgtcagagagtacctccatgactttaatcgcttagctcgttatgccccagaagatgttcgcactgatgaagaacgtcaggagatgtttttagagggactgaatgatgagttgtcttttgcattgatggctatggattaccgggatttccagtagttggtggacaaggcgattcgccaagaagacaagtataataggatggaacagaaaaagcgtagtagccagaggccgcgcattgctttgggacctcaagctgcaccatacccacagggaggatcctcttcagttgctcgccctcaacgccagttctacaacaacaacactagtaatcacagcaacgataatcgtaatatggtcactcgtcatgtagcagctccaactcagaatcatcctgtcaggaaggaacagggaagcaagccaggggtgtgcttcaattgtggtgatccaggacattatgctgataagtgtccaatgcctcggcgtgtgaagaatgcacctgttcagaacaactccaatgctccagcaccgaaggctcgtgttaatcatgttgcagccgcagaagcccagaatgcacctgatgtggttttgggtacgtttcctattaactctatacccgcaactgtgttttttgattccggtgctacacattcctttttgtctaaaagttttgcgggcaatcatgggatggaagttattagtcttgggagacctttactagttaataccctaggcaatcaagtatcctcaacgcagtactgtccttccgttactatagaaatagaagaaatacctttcccatcctcacttatctttctagaatccaatgatcttgatgttatcttagggatggactggctaacccatcacataggagttatagattgtgctaaccgtaatgtgactttaacaagtagcaatgggcaaacagtgtctttctttgtgtcatcccctaaatctcacggtttgacattaaatcaagttgctttgcaagagatcccaatagtacgagactatccagatgtgttccctgaggatttgccaggtatgccacctaagagagacatagagttctggatagacttagtacctggaaccaaccctatccataagagaccatacagaatggcagctaatgagttagcagaggtaaagagacaggtggatgatttgcttcaggaaggatatatcagacccagtacttcaccgtggggagcaccagttatcttcgtggagaagaaagatcatacccaaagaatgtgtgtggattatcgagcgttgaatgaggtcactatcaagaataagtatcctctacctaggattgatgacttgtttgatcaactggaaggtgctacagttttctccaagatagatcttcgttccggatatcaccaacttcgaatccgtgaggaggtatacctaagaccgcttttacaacacggtttggtttgctcgagtgtaccgttatgtcgtttggactcactaatgccccggcctttttcatgaacttgatgaaccaagtgtttatggaatatctggataagtttgtcgtggtgtttattgatgatatccttatctactccaagaataaagaagagcatgaagagcatcttcgtcttgctttagagaaactacatgagcatcagctctatgccaagtttagtaaatgcgaattttggttgcccgaagtgaagttccttggtcatgtcatctcaactggaggagttgccgtggatccaagcaatgtggagtcagtgctaaattggaagcaacccaagacggtttcagagattcgtagtttccttggtcttgcggggtactaccgcaggtttattgagaacttctcaaagattgctagaccaatgactcgactgcttcagaaggatgtgaagtataagtggacggaagagtgtgaacagagtttccaagaattgaagaaaaggctagcggctgcgccagtgttagtcttgcctgatccaaggaaaggttttcaggtgtattgtgatgcttctagacatggtttggggttgtgttttgatgcaagatgggaaggtgattgcctatgcatctagacagttacgcccccacgagaataactatccaacacatgacctagagttggcatctgtagttcatgcattgaagatttggcgtcattacctttttggtaaccgtacggagatgtatacggatcacaaaagtttgaagtacattttcactcaacctgatttgaacatgcgtcaacgacggtggttagagttgatcaaggattatcatccaggtaaagcaaatgttgtagcagatgctctcagcaagaaaagctactgtaagatgttagaaggtcgacacctaccttgggagttatgtgaggaatttgaaaagttgaacttgggaatagtcaacaaaggttttgttgccgctttagaagctcagcctactctttttgatcaagttagagaggctcaaatgaatgatcctgatatccaagaaatcaaaaagaacatgagaagaggtaaagccatcggctatatagaggatgagcaaggaactgtgtggctaggagaaagaaattgcgtgcccgataataaggagctaaaggatactatcatgaaagaagcccatgaaactttgtattccattcatcccgggagcactaagatgtatcaagacctgaagcaacaattctagtgggccagcatgcgacgagagatagcagaatatgtggctctatgcgatgtgtgtcagcgagtcaaggcggagcatcagaagccagccggtctgctgcaaccgttgaagattccagagtggaaatgggaggaaataggaatggattttatcaccggtctacccagaacatcggtaggacatgattctatttgggtagtggttgacaggcgtactaaagttgctcatttcatacccgtcaaaacaacctacatgggaaataagctcgcagagctatatatggcaagagttgtatgtttacatggcgttcccaagaaaatagtgttagacagaggtagtcagtttacttcgaagttttggcagaacttacaagaagggatgggtactcgtttgaatttcagtgctgcctatcaccctcaaactgacggtcagacaaaaagagtaaattaaattctagaagacatgttgagagcctgtgttctagatgtcggtggaagttgggataagaatctgtcgtatgctgaattctcgtataacaacagttatcaagctagtcttcaaatggctccatacaaagcattgtatggtcgtaagtgccgtacaccgctcctttgggatcaaactggtgagcgtcaagtttttgggacagatgtattgcgagaggcagaagaaaaagtgaagattatccaagaaaggttgcgagttgctcagtcgcgtcaaaagagctatgcagacaatcgtcgtagggatttgactttcgaagaaggggattatgtatacctacgggttacgccgctgcggggagttcatcgttttcagaccaaagagaaattggcaccgcgttttgtgggaccttttaagattgtgagtcggagaggtgaagtagcttatcaagtagagttgcctctgtcaatggagggaatacatgatcgtttcccatgtgtcgcagttgaagaaatgtttgagtgtacctaccgaggaagcagatcctgagcgtttagagattcaagaagatttaacttatgttgagaagccagtcagaattttggagtttccgacattccggaggagagcgtttacgctgaggaaggttcagaaccgcccctgccgcgccgctcaggtgcgggccggccgcgccgtctcctccttcggcgtcgccgcgtcgacctccaccccggcctgccctctgattcgtccggagaccaccgccgtgtcgccaccaacccctccacccgcctcgccggagtcctccggccgcccgttcctcctcgccggaatttccccggtcgaccgcgtcgccgtcttctccggcatcgcagcggcaaggtcgtcctcggcatcgcttcccctccatccaaacccctctgcggtccatcgtcgtcgcctccgttcgttctcgtcgtcgacgtcccgtcggtcacccggctcgtcgtctcgcagcgccgcctccgtcgtcggcat

SEQ ID NO: 22967 - DNA, 5790 bp, Oryza sativa
  Clone ID: TF_OsC359_5825
atgccgggggtacccagggaggtgattgagcacaaactcatggtgcgacccgatgccaagccaataaagcaaaaactgcggagatttgcaccatatcgaaaacaagccatacgagaagagctcgacaagcttctcaaagccgaccaactggtggactcaacagccggttgcgagttgttgagcttcctcgacgcttactccggttaccaccaaataagcatggcaaaagaggacgaggataagacagcattcatcacgccgttcggggtattctgctacgttaagatgccattcggactaataaccacaggaaacactttccagcgcacggtccaaggtgcacttagtgaccagctcggaaacaatgtcgaggcttacgtcgatgacattgttgtcaagaccaagacaagcgactcattgattgacgatctgcgggaaacgttcgacaacctccgacgatatcgccttatgctcaatccagagaagtgcacgttcggagtaccatcgggcaagaccccccgagctctcctctacccgtcgcccccttcgccttcgcctctcgtcgtcggagaagccctagcgccgtgcgccctagctcagccgtcgccgccgtcgctccagccgtgcgccgccgccgttccagccgtcaccgtcgctcgggaaggccaccgtcgggatcgccaagtcgccgccgtcctcgtccgttgcttcgccgccgtcggagaccgctggagcaccatcgccgtcgtcgaaccgaagagctccgccgcttcttcttcgtcgccgccgccgtccgttgggtttccgccgtcgttttggtcgccgatgccgcgctacaagcctgagtacttgtttggtgttgagggttttgtccaggagttgcgtacaatgtcctttgtcattggatttgggactgcccctttttatgcccagattcctcatgatcgtcatgaagagaagtgccgagtcaaagtcaccttgaacagtaatagtgaagatatcccctcagtgatgttcgaagctggaggaagaaactacatccatgcaagtcaggaggtggcaaggatcgccataggagagctccgcgatcgttacagtgatcagttggccgatactgagtatcgctatcatcctcgtcaaccccagggaagtgaccgtggcagctaccttgagactgaaggaattgagaatgatgctaccacaaggcatttggttgagatgctgtgggctatggatgaaagtcgtgcggagactgtgttagcggctcaagatcgtgaagatcggaatcgtggtaagatttgcaagctagaagacaaggtggatcgtttggagaaggaactagccgcattgaagggagaagcaccaccgcagaaggccaggattcgtcttaccgcaaggaagagagctctatttgtccctcgctatcaattggcgccaaaggttcgtgtggtggagaaagaagttgccccaactctagcagatcctccggtcaacatcataagtgatgatgaggaagaagaatccaagcgcaaccattccaagattgagtgggtagcaactcaagatgatgaagatgagccgaaagagccttcaatcgacctccgatgctcggaagaactagacaagatggtgaatactcgcagcaatgggaatggccccaacaatcccaataataataacaatgaagggaacccaactcttgcccaagtcctggctcaacaggtgcaacttatgaacatgatgatgcagcaacttcagaatcagcagaaccaaggaaataaccatgcacctccgcagaacaggttaactgattttcttcgtgtgaggccacctaccttttctagcactaccaacccagtggaagcaggtgattggttgcatgccatagagaagaagttggatttgcttcaatgcactgatcaggagaaggtctcatttgcatcgcatcagttgcatggccctgcctctgaatggtgggatcatttccgccttaacagaactactgctgaacctatcacttggcttgaatttaccgctgctttccggaagacgcatataccatcgggagtggtgtctctcaagaagaaggaattcaggtcgctcacccagggatcacgctctgttacggagtatctgcacgagttcaatcgtcttgctcgttatgctccggaagatgtgcgcaatgacgaagagcgtcaggagaagttcttagaaggacttaatgatgagctttcttattcactcatgattggagattatcctgatttccagaagctagtggataaggctattcgccaggagaacaagtacaattgcatggagcagaagaaacgccggattgctcaattcaagacacaacaggggaataatcagaagccgcgtcttactttaggaccccagtccataccacatggaagttcttcgtccgttgttcgtccgcagcgtcagttcttcaacaacaatgctggcaacaacatacgtaatcaagttccgcgtcctgttgcagctccaacacagcaacaacctatcaagagggagcaaggcagcaagcccgcggtgtgtttcaactgtggagatccaggacattatgctgacaagtgtccgaagccccgacgcgtgaaggttgtccctgctcagaacaactctactgtaccagtatcaaaggcccgtgtcaatcatgttgctgctgcagaagctcaagatgctccagatgtgattttggtccgggagtatcccgatgtgttcccagatgatttacctgaaaagatacatcagaccaagttcatcaccatggggagctccgacaagttcgtggtggtctttattgatgacattcttatctactcccgaactgaagaagagcatgaagaacatcttcgccttgcactagagaagctaagagaacatcggttgtatgctaagtttagcaagtgtgaattttggttgtctgaagtgaagttccttggtcacgtcatctcagcaggaggagttgccgtcgatcctagtaatgtggaatccgtaaccaattggaagcaaccaaagacagtttcagagattcgcagtttcctaggcctcgcaggatattatcgaaggtttatagagaatttttccaagattgctaagcctatgacacgactgcttcagaaagatgtgaagtacaagtggtcggaagaatccttagaagcgaagcccactctaattgatcaagttagagaagcccaaattaatgatcctgatattcaagagatcaagaagaatatgagaagaggaaaagctatcggtttcttggaggatgagcaaggaactccgtcgccgccgtcgctccagccgtgcgccgccgccgttccagccgtcaccgtcgctcgggaaggccaccgtcgggatcgccaagtcgccgccgtcctcgtccgttgcttcgccgccgtcggagaccgctggagcaccatcgccgtcgtcgaaccgaagagctccgccgcttcttcttcgtcgccgccgccgtccgttgggtttccgccgtcgttttggtcgccgagcaccaggttgagaagtggcggagataagcccacgggggtcgctggggagtccattacctctggttttgagggggagattatgatccaggaacggtgcactgtagtggattgtgttgtgcgagagaggaatagaagcaaatcccgagaagatcatggtaatcgagaacatgaggtcgcctacaagactcaaggaagtacagaagctaaccggatgcatggcagcactaagcaggaggccgaagaggcattcattgcattcaagcgctacctatcaaatccacatgtacttgttgcccctcaacctaatgaagaattatttctctatattgccgccacgccatattccgttagcactatcattgttgttgagagagagaaggtgcaactaccagtctactatgtcagcgaagctctccacgacgtaatgacaagatatccacagatccaaaaactgctctacgcagtaatcatgacatcaagaaagctatgccagtacttccaagcccacagggtcacagttgtctcctccttccctctcggtgaagtcatgagaaataaagatgttgtcagccgcattgccaaatgggtagtcgagctaagccaatttgatatccacttcgtgccacgaacagccatcaagtcccaggtactcgccgatttcgtagccgattggaccatgcccgataacaggtcagacaaccaaatcgacaatgaaacgtggaccatggcattcgacggcgcactcaacagcaagggagcaggggcaggattcatcttgacatcaccttcgggagatcaattcaagcatgcaattcacctcaacttcagggcaaccaataacacagccgaatatgaaggactactcgcggggataagagttgcagctgcgctcgtagtcaggaagctggagaaaaggttcgatgggatcgaggtccgacatgtataccgcaaagacaacatcgaaccagatgatctagcacgacgtgcgtccaggcgagagccactcgaacctggcacctttctggacgtcctaaccaggccatcagtgaaagaggcaagcggcgaagatagcccggtcgcccccgacatcagctcgggggctatagaggcagagcgcaccgttgccgatatcgagaccacggacgactggcgcaccccactcattaaattcataggcagcgaagagttgcccgaggacgacgcagaagtcgagaaaatatcccgtaaagcaaaagtctactgtatgatcggcaatgatctatacaagaaggcaccaaacggggtactcctaaaatgcatcttgtccgacgacggcagacacctcctcctcgacatacatgaagagatctgtgggtcacatgccgccggtcggacattagtcggaaaagctttccaacaagggtttttctggccaaacgccctcaaagacgcctgcgacatggttcaacagtgtgaagcctgtcaattccacagtaaacacacaaagctgccagcgcaagcactccagactatccctttcacttggccgttatcgtgctgggggctagatatactcaggccattcccacgaggacagggcggctacaggttcctattcgtggcgatcgacaaattcaccaagtggattgaagcgacacccacgggggaaatcaaggccgacaacgccatcaaattcatcaaagggatattctgcaaattcggattgccccaccagcaattgacaagtcgagagggcaacggcataatactacaaggaatcaagacccgcgtctacgacaggctcatgtcacacgacaagaattgggtcgaggaacttccatcagtactatgggccgtgcgtaccacaccgacaacgtccaacaaggagacacccttcttcctcgtgtacggctcagaggcgatgctccccaccgagctacgacatcaaagtacacgagtacagaagtattccgatgaggatcaggaagagcagcgatacgacgatgtgaatctactcgaggaacatcgcgaacgagttgccgttcgagcagccagctaccaacaagcccttcgccgttaccacgagaagcgcatccgagcacgcatgctttcgatcggcgactacgtcctccgacgggttcaaagccaagcagggcgcaacaagctctcacccaaatgggaaggaccgtacacgatcacgcaagttttgcggccaggtcaaaggtccaagagccttatcttccgagaagaattctccgatgacaaggctggaggctag

SEQ ID NO: 22968 - DNA, 2845 bp, Oryza sativa
  Clone ID: TF_OsC1528_1606
tcagagccacactttcctgtaggctaaacatctcttgttccaccccttcccaagctcgattgagctctcagccagcagcagcagcagcaccggttgctcctccttcccctttcccttccccctctccacgcagcagccccccggaggtgcgccatgtccgacgctcggtctcggcgttcggtcgcctcgagcactcggcgtcagcaggacgccgagctcgccgcagcagaagagcgcaggtgagcaacagctcataccgctgcagcagcagcgagggcggccagactggcggcagcggagttggcagcagccagggcggaggcggaggcggcggaagatgcggcacgtgcggcggaggtagaggttgagaccttgcgcagcagcatcaacggctccatcgccggcgacatcaccgccgacagggagcttgaggagctggcaagaggaagggcacgggagcgagcagagcggtgggcagcagcccacctccacggcggcgacggcggcccaagggaccgcgcgcccgccgacgggaacccagacgggcgcgggcttgctggcgggcgcgggcttgctggcggcagcccggagcccgcacgcggccctcgcaggcagcacggctctctctcccctgaccggcgtcatggtcaccacggcgtccagatggtggtcagggactttggtcccggcggtgggtggcctaccctcaccaaaaccaactacatcgagtgggccgcggtgatgagggtgaggctccaggtgcggcacatgtgggatgcagtccggtacggtgacgtcgactacgacgaggatcggcgggcactggatgccctcatcgctgcagtcccgcccgagatgcagttctcgctttcccagaagcggactgccaaggaggcctaggacgccatcgctgcggcacgcatcggcagcgaccgcgcccgcaagtccacactgcaggcactccgcaaggagtgggagaacctggctttcaagccaggtgaggatgttgatgacttgcagaaaatggtgcagtacggcgacgacacctacgatgaggagagagctgtcgagaagctcttccgctgcgtccctgagaagtacaggcagatcgctcgctcgatcgaatctctgctggacctctccacgatgtcgatcgaggaggcgttaggtcgcctcaaggtcgtcgatggtgatgagccacagcctctctcggggcccatcaccatcggcgggaagctccatctcactcaggagcagtgggaggcctctcagggtgatgggaggaagggggagtcatcttccccgacaggcggccataagccgcgcaaggcgcggggaggtgtccagctatggtgggcgcgaagacgtgccgagggtggcgcccgcagaggcgcccagggcgttgccaccggcaaccacaagccggcacgagacgacgcctgccgcaactgtgacaagcttggccattgggccaaagactgtcgacaaccacgacgtggccaggcccacgtcgcacgggtggaggaagagccggctctgctcctggctcacgcaagcatcgagctacctccagcggcaccggccgcagcagctttcctccaccttgatgagccgaaggtactcgtctccctctgcaacggctccagcaacgacaaagctgatgggtggtacctcgacaccggcgccacccatcacatgaccggccgacgggagttcttcaccgagttcgactccagcgtccgaggctccatcaagttcggggacgcctccggcgtggagatcaagggtgttggcttcgtcaccttcaccgccaagtccggtgagcacaggctgctcacccgagtctactacatccccgcgttgaggaattctatcatcagcgtgggacaactggatgagaacggctcacgcgtgttggtcgaggatggactcatgaggatttgggatcgccgtcgtcgccttcttgccaaggtaaccagaggcactaatcgactctacatcctcagcgcgcaggttgcacaaccagtttgcctcgccgctcgtcgggacgacgaggcgtggcagtggcacgagcgcttcgggcacctccacttcgaggccctgaagcagctcagtgccaaggagatggtgtgaggcatgctgtgccttgaccacgtggagcagctctgcgacgtctgcgtggtgacgaagcagcggcggctcccctttccccagcagacgagcttccgagccaacgagcggctcgagctcgtgcacggggacttgtgtggcccagtgacaccggccacaccaggaggacgacgttacttcctgctgctcgtcgacgacctctcccgctacatgtgggtgatggtcctcggcagcaagggagaggctacggacgccatcaggcatgagcaggctgctgcagaggcggagtgcggccgcaagctgtgcgtgctgcgcaccgacaacggcggcgaattcacagcggctgaattcgcgtcgtactgcgctgatgagggcattcagcgccactacaccacgccgtacagcccgcagtagaacggcgtcgtcgaacggcgcaaccagacagttatggggatggctcgggccctcctcaagcagagggggatgccggtcatcttctggggggaggcggtggtgacggccgcctacatcctcaaccgctcgcctaccaaggccctcgatggcaggacaccgtacgaggcttggcatgggcgcaagccggcggtctcccacctgcgggtcttcggctgcctcgcgttcgccaaggagcttggccacatcggcaatggtcagtatagatatagacattcgttctgttttgcatatgctatgaaag

SEQ ID NO: 22969 - DNA, 2855 bp, Oryza sativa
  Clone ID: TF_OsC359_8244
acttttccccctttgttccaatcttgatgaaatagactggtgatgacaattgtcacgtcctgataaattcatcccgaaataaaattcattttctatctctccccgccgccctcctctctctcccacgctgccggccgcctccagccgcctgtgccgcctcgaccgtgcgccggccggccgcgccgtcgcctcctccagcgtcgccgctaccccctccaccccggcctgccctccgtttcccgcggagacccccggagctacgtttccgccgtcgtccagtggcgtcgcccaccacttctccgtctccggccggctgctgttcgtcgccggtacgccgaccgacgtcgccgtctcctccgttgacgtcgcagcgtcgccctccaccccggcctgccctcggtttcaccggaacgtcgccgcgaacatctccgtccgcctcgccggagttgtttggccgcccgtccctcctcgcccgtgcaccggtcggccacccctccgcggtccatcatcgtcgtctccgatcgttctcgtcgtcgacgtcccatcggtcgcccggctcgtcgtctcgcggcgccgcctccgtcgtcggcaccgcagcggcgtggtcctcgccgtcctcgtccccgtgcagccgctgccggctgtcctcgtcgcctcctcgccggtcccggtcgtcgtcgtcgtcgtcgtcctctcgtcgttcccggtcgtcgtggcgttcgtccctccgtcgagccgttctcgtccgtcgtccgcgttcgtcaagcgagccgccgcagccccatcatcgtcttcgtcctcggctccgcgtcgtcaagtctcgtgccggccgtgtctcgcccgtgtatcggtgtcggcagtcgttcgcttgtgcgtgtggtgaccgtgttagtgtgtccgctcggtagccgcgtggtttccacgtgtgcaacccgtgtggtgtctagtggagtccgtttgtcggccactcgcctcggttgacacacggggtccgcttccgtcgacccgtggaccgtctctgtgtacccggttttctttttatgtattgttattgcttctttataggcttgtagctttgcttgtgtgcttcgcgtagctttcgtcgttccggaggttcccgaagcgtggtttgcggtcgtcgccgaaggttcggaaggccgttctctctctcttcctctttcaaaacccctaaaacctgttttcggtggggtttgggtgcatgccagttgtgggaagtagcaccccggccactataaggattaagctcgggcctctgttgcaaagcactaccgtacttccacatgtctagtgggtaaggcttagtttgtggctcagtctggttataaacaaaagtacacggattggagatggatgaagtcgggggtcgatggacattctctaggacaaatgaaggctacacgagctgcggcccggtagtcgagatgtcatggcacagggttggtgccctgctgctgggggctcagtcctgcctgcctgtcccggaggttccggccgtaggtgggattgggtcggtactcttgtctatggctaggatgggttggaaactatgtcacgtcttccgtctgtataccgtggtgatgtttaacagagaaaaaggaaagaatgtcagcgggcatgcctccagtaactcaagttttcaactcaatccaccactggcctcaagagagttaacaagggcacacccttggtccattccaagcatgctgcttagttcacagctaccattggttggaagtcaagaccaaaatcaatatgtgtttgatcgagcatttgccacccaggtcaatgagcttccaatgccagaagagcatgtccccttttgtcatgattgtagagaacaaggacactatgccttgaattgtccatgggtatatgtcaaagaagccccttcctttggtttagcagggcagacatcgctaaaccagcctcctcgcaccaagtcaagcttgcagcctagtgtgcaaagtgaagagcccaatgaagacaatccattgaatcctagaaaatgctttcctcctagcctttcgcaccacgtggggtcacgtactaagcaagccaaaggcaagaagagtaagaatcagaagagaaaagcaccgatgcgaactgaagaagaagtacgtaagatgactattaccagcaccgaatggcctccagcagggataactattcctagacgtcaaagaggaaataccttccgaggtgcacgacagttgacccagcacctcctaagccatggtggcagagtatctgatagtgaagggtcagatcaagtctcctcggatgttgaagatgagtctccccgacatctcggcgaggaagagatggaatcaaaggcatgcacccgttgtggagaaattggacacgttgctagcaggtgtctcacactctgccctcattgtgaagaagaccatccaccaggtgaatgtcccacccgcaaggtcacatgttttctgtgcgaaggtaccaaccatgtgcccaaggattgccaactcagtgtgttgttgaccaagaccgcagaaatccaacgaacaaccctacgattgtctcatcagctagtcagctccaacagcaacctcgacgatatcatccacagcaccaatgctcctcctgctgcacctgactctgcaataaatcatagcaataataccttcagcaccaaccattctctacaccgacagcctcagcaaagaattgtcatcgatagaagaagttgtgtctctccccgacctactccaggccgagcaaagggcaatcaacctcaggagggcgataccaagcagaagaccgttatccgcttcaaccagcaatcagaaggaagcttcccctgtgaatga

SEQ ID NO: 22970 - DNA, 1660 bp, Oryza sativa
  Clone ID: TF_OsC359_7480
atggatgaagtcgggggtcgatggacattctccagggcaaatgaaggctacacgagctgcggcccggtagtcgagatgtcatggcagagggttggtgccctgctgctaggggctcagtctcgcctgcctgtcccgggggttccggccgtaggcgggattgggtcgatgtacacctctgatcagagtataatctattcgaatagccgcgccctcggttatgggcaagccgagcaatgtacccaagtcagtgtttcaattcttaaaatttgctcaacaactaaaatgtggagtggttggcctgggttggcttgggacgagctgggacccagggtcgggttgccagttcggtctgaatcatcgtaggccttgggttaaggcaggccttaagtgcctttgtaataatatgtttaacagagaaaaaggaaagaatgtcagcgggtatgcctcaagtaactcaagttttcaactcaatccaccactggcctcaagagagttaaccagggcacacccttggtccattccaagcatgctgcttagttcacagctaccattggttggaagtcaagaccaaaatcaatatgtgtttgatcgagcatttgccacccaggtcaatgagcttccaatgccagaagaggatgtccccttttgtcatgattgcagagagcaaggacactatgccctgaattgtccatgggtatatgtcaaagaagccccttcccttggtttagcagggcagacatcgctaaaccagcctcctcacaccaagtcaagcttgcagcctagtgtgcaaagtagagagctcaacggagagaatccattgaatcccgggaaatgctttcctcctagcctctcgtaccacgtggggtcacatactaagcaagccaaaggcaagaagagtaagaatcagaagagaaaagcaccgatgcgaactgaagcagaagtacgtaagatgactattaccagcaccgaatggcctccagcagggataactattcctagacgtcaaagaggaaatactttccgaggtgcacaacagttgacccagcacctcctaagccatgatggcagagtatctgatagtgaagggtcagatcaagtctcctcggattatgaagatgagtctccccgacatctcggcgaggaagagatggaatcaaaggcatgcacccgttgcggggaaattggacacgttgctagcatgtgtctcacactctgcactcattgtgaagaagaccatccaccaggggagtgtctcacccgcaaggtcacatgttttctgtgcgaaggtgcaaaccatgtgcccaaggattgccaactcagtgtgttgttgaccaagaccgtagaaatccaacgaacaaccctacgattgtctcatcagctagtcagctccaacagcaacatcgacgatatcatccccagcaccaatgctcctcctgctgcacctgactttgcaataaatcatagcgataataccttcaacaccaaccattctctgcaccgacagcctcagcaaagaattgtcgtcgatgaaagaagttgtgtctctccccgacctactccaggccaagcaaagggcaatcaacctccggagggcgataccgagcagaagaccgttattcgcctcaaccagcaatcagaaggaaacttctccggtgaataa

SEQ ID NO: 22971 - DNA, 4902 bp, Oryza sativa; identical to SEQ ID NO: 13771
  Clone ID: TF_OsC359_7526

SEQ ID NO: 22972 - DNA, 8958 bp, Oryza sativa
  Clone ID: TF_OsC359_8132
atgttcgaagctggaggaggaaactacatccatgcatgtcaggaggtggcaaggattgccataggagagctccgcgatcgctacagtgatcagttggccgacactgagtatcgctaccatcctcgccaaccccagggaagtgaccgtggcagctaccttgagactgagaggattgagaatgatgctaccacaaggcatttggttgagatgctgtgggctatggatgagacccgcgcggagactgtgttagcagctcaagatcgtgaagaccggaatcgtggtaagatttgcaagctagaggacaaggtggatcgtttggagaaggaactagccgcgttgaagggagaagcaccaccgcagaaggccaggattcgtcttacggcaaggaagagagctctatttgtccctcgctaccaaatggcgccaaaggtccgtgtggcggagaaagaagttaccctagccctagcggatcctccggtcgtcaatatggtgctcactcgcagcaacgggaatagccccaacatcaacaataacaacaacaacaatggagagaatcccacacttgcccaagtcctggctcaacaggcacagcttatgaacatgatgatgcagcaactccagaaccagcagaaccagggaaataaccatgcacctccccagaacaagttagcagaatttcttcgtgtgaggccgcccactttctctagcaccactagtcctgttgaacctggtgattggctgcatgccatagagaagaagttggatttgcttcagtgcactgatcaggagaaggtctcatttgcatcacaccaactgcatggccctgcctctgagtggtgggaccacttccgccttaacaggactactgttgaacctatcacttggcttgaattcaccgctgctttccggaagatgcatataccatcgggagtgttgtctctcaagaagaaggaattcaggtcgctcactcaggggtctcgctctgttactgagtatctgcacgagttcaatcgtctggctcgttatgctccggaagatgtgcgcactgataaacagcgccaggagaggttcttggaaggacttaatgatgagctttcttacccactcatgactggggattatcatgatttccagaagttagtggataaggctattcgtcaggaggacaatcagaggccgcatcttactttaggaccccagtccctgccacagggaggttcttcgtctgttgttcgtccgcagcgtcagttcttcaacaacaatgctggcaacaacatccgcaatcaagctccacgccctgttgcagctccaacacagcaacagcctgccaagagggagcaaggcagcaagcccggggtgtgcttcaactgtggagacccaggacattactctgacaagtgtccgaagccccgacgcgtgaaggttgtccctgcccagagcaactctaccgcaccagcattaaaggcccgtgtcaatcatgttgccgctgcagaagctcaaggtgctccagatgtgattttggaatccaaagaccttgatgtcatcctagggatggactggttagccagatataaaggtgtgatagactgtgccaacagaaaagtaactctcaccagcaatgatggtcaagttgtaattgttcatgcattgtcttctgagtctttaaggtcaagtctgaaccaaatgactttggaagagattcctatagtccgggagtatcccgatgtgttcccagacgatttacctggtatgccacctaaaagggatatagagttcagaatagatttagtactaggaacaattccgatccataagagaccttatagaatggcagccaatgagttggcagaagtcaagaggcaagtagacgatttgcttcagaaaggatacatcagaccaagttcatctccatggggagctccggttatttttgtggaaaagaaagatcatacccagaggatgtgtgtggactatcgtgcactaaatgacgtgactatcaagaataagtacccgctgcccagaattgatgatttgtttgatcagcttaaaggtgccaccgttttctccaagatagatcttcgatcagggtatcaccagttgagaatcaaagaggaagatatacctaagacagcttttaccactaggtatgggttgtttgaatgtactgttatatcttttggacttaccaatgcccccgctttcttcatgaacttgatgaataaggtgtttatggaatacctagacaagtgcgtggtggtctttattgatgacattcttatctactcccgaaccaaagaagagcatgaagaacatcttcgccttgcactaaagaagctacgagaacatcaactgtatgccaagtttagcaagtgtgaattttggttgtctgaagtaaagttccttggtcacgtcatctcagcaggaggagttgctgtcgatcctagtaatgtggaatccgtaaccaactggaaacaaccaaagacagtttcagagattcgcagtttcctaggcctcgcaggatattatcggaggtttatagagaatttttccaagattgctaagcccatgacacggttacttcaaaaggacgtaaagtacaagtggtcagaagaatatgagcagagttttcaagagttgaagaatcgcttaatattagctcctattttgattttacctgatccaaagaagagtttccaagtgtattgcgatgcatccaaaattgggttaggttgtgttctgatgcaagatgggaaggtggttgcctatgcatctcgtcagttacgtccgcatgagaagaactaccctactcatgatcttgagttaactgcagtggttcatgcgttgaaaatttggcgtcactatcttttcggtactcgtacagaggtgtacaccgatcacaagagtttaaagtatatctttactcagccagatctgaacatgagacaacggagatggttggaattaattaaggattatgatatgggaattcattatcacccgggaaaggctaatgttgtagcagatgctcttagcaggaaaggctattgcaatgctacggaaggacgactgccattggagttatgcaaggaatttgaaagattaaatttgggaattgtcagtagaggtttcgttgcagccttagaagcaaagcccactctaatcgatcaggttagagaagcccaaattaatgatcctgatattcaagaaatcaagaagaatatgagaagaggaaaagctatcggtttcttggaagatgagcaaggaactgtatggttgggcgagagaatctgcgtccccgacaacaaagatttaaaagatgcaattctgagagaagctcatgatactttatactccattcaccctggtagtaccaagatgtaccaggatctcaaggaaagattttggtgggcaagtatgaagcgtgaaatcgcagaatacgtagcagtatgtgatgtttgtcagcgagtcaaggcagaacatcagaaacccgcaggtttgctgcagcctttgaagattcctgaatggaagtgggaggaaatcgacggacaaaccgaaagggtaaataagattttggaagacatgttgagagcttgtgctttagacttcggtggaagttgggataagaatctaccttatgcggaattctcgtacaacaacagttatcaagctagtcttcagatggctccttacgaagcactgtatggtcggaagtgccgcactccgcttttgtgggatcaaacgggagaacgtcaggttttcgggatggatatcctgagggaagcagaagaaaaggtgaaaatcattcaagaaagattgcgtgtggcccagtctcgtcataagagttatgccgacaatcgtcgtagagatctaagttttgaagaaggagatcatgtgtaccttcgtgtcacgcctcttcgaggagttcatcgttttcacaccaaaggaaaattggcaccgcgttttgtgggaccttataagattgtcagtagaagaggagaggttgcttatcagttggagttacctcaatctttggcaggagtccataatgtgttccatgtgtcgcaattgaaaaagtgtttaagggtacctaccgaagaagctaatcttgaatagatagaagtccaagaggatttaacctatgttgagaacccaatccgtatcttggaaatagatgagagaagacccaggaatcgagttatccatttttgcaaagtccaatggagtaatctctcggaagaagaatcaacttgggaacgagaaggggaattgaaccgtggattcgagttcgattcggatcgatctctctcctccgaaccctaaaccttcctttccgtcgccggtcaccgtgggccttcgccgccgcctccttgcccctataaaaggacccccgagcttccctctacccgtcgccacccttgccttcgtctctcgtcgtccgtagcgccctagccccgtgagacctcgtgccgctgtcgtcgcagccgctccagccgtgtgccgccgtcgctccagtcgtcgccatcgctcggggaggtcgccatcgtggtcgccgtcgcgtcgccgccctcgtccacccctccgtcgttgctgtagatcgccggagcaccgccgtcgtcatcaagccgatcttctccgccgccttttcctcgacgccgtcgccgtccgttgatcttccgccgccgttttggtcaccggtgagttcgccgcgtcgctctctacgtgctggtgccctccgttcgtgccgtcgcgccgtcgttcgccggcgagcttgcgccgtccgagccgccgccggtggtgacgtcaccgctgacgtcatcgtcgtcgtccatccgtgagccgcggtggatccgatggatcttggccgtccgttttggatggatcaatctcggccgttcgtttccgtgagccgcttttgtataatatggttcattgcggagcaccagactgagaagtggcggagataagcccacgggggtcgctggggagtccatgcctctggtttttgagggggtgattatgatccaggaatggtgcactgtgtggtacacctctggccagagtaaaactattcgaatagccatgcccgcggttatgggcgagttgagcaataccgcaacctcgacgacttcgactaagactttgaagataactacacgcctctctacttcggcatcttcatggctgaaaacgagacggaagaacagcgtaaagcccgagaagcagaagaacaacgcgtgcaacaggaagccgaacgaccctgactggaagaggagcgccaagcacaagagcgagaacggctgcagcgtgagcaacaggagtgcgaacgggctgcaaaagaggctgaggaccggcgacagcacgccttggatgtcgggcgacgagcacgagaacttatcgggcagcaagacgttgagggaacggctgtttttcgcacccctcaacagaacgcggttgcagcgatcaccctcctcgacaccctcctcaaggaagacgcgccccgtcgatcttcgcgatactatcaaccagcgctgcgcggcaagagaatacgcttcccaccattcactagatcgctacgacaacgacgtggatggagttgctgccttcacaagcaaattgcgtcgagtggattggccagccggcttcaagccgactggaatcgagaagtatgacggcaccactaacccggagtcttggctcaccatctacggtctcgctattcgcgcagcaggacgagatagcaaagtcatggcaaactatttgcctgtggccctagcggactctgcccggtcctggcttcacggcttaccccgtggcacaatcggatcttgggcagaacttcgcgaccacttcatcgccaacttccagggtacctttgaatgccctgcctcccaggacggtcaagcagaagatgtcattaccgcgtccaagcagtcgggcaccacttggaagccgaagaaagatacgccaactacaggggggagtggaagtaccaatcacaaggatcgcaagcgtaaacccaaggaacttgtggcaactactacaccatcctcccgacaacgttcacgggtcaacacttctgacaagatcatgaactcccaatgtccgcatcatccaaactccaatcacgcggccaaagattgcttcgtctataaacagtttgcagaacaatacgccaagaatgcacgcaaggcctctgacggagatcaaagcacgttaaagaaggatgatgaagttgacgccccgactggttttcaagaccatcgcaaggaactcaaccacatctttggcggacccctgtcctatgaatccaagagaaagcaaaagctaaccgaacgggagatcaacgctattcagcccgacacgccccaatatcttcggtggtcagagacaacaattatgtttgaccgcttggatcatccttaccgtgtggtccacccagggcggtaccccctggtactagacccagtggttcgcaacgtcaagcttcgcagatccctcatcgatggtggcagtgcactcaacatccttttcgtcaagactctggacgacatgcagatccctcgcatggaattaaagccgagtaatgcgccctttcacggagtcatctcagggctatctgctacaccactcagccagatcactcttcccattactttcggcacttgggagaacttccacacagagaacatttgttttgaggacagcgtatcacgccatactcggacgcccgatatgcctggtcctcaaggagtcatatccctgcggagtgacatcaagcaagccgtcacgtgtgacaaggaaagctgcgagatggcccagttccgcgagatcacgctcgaccgagaagaaatccgactggctgcgtccacagcaagcgaaggagaagtgcctgcgaccaagatgccaaagagcggggcaagcgacaccaagaccaagaagattcctctagatccttctgatcctactaagactgctgataggaaggatgcgatcaaggtagaattgaccaagctgttagcagcgggcttcatcaaggaagtccttcatcccgactggctggccaacccagtcctggttcagaagaagacggggcaatggcgcatgtgtgttgattacaccgacctcaacaagtcttgtcccaaagatccttttgggttacctcgcattgaccaggtagttgactcaacggccggctatcggccgcaacgtgaagcttatgtggatgacatagtcgtcaagacaaagcagaaggatgatttgattgtggatctagaagagacctttgagagcatccgcgctttcaggatgaaattaaaccctgaaaagtgcatcttcggagtaccgtcagggaagctgcttggatttatggtgtcccatagaggcatacaagccaacccggagaaaatcaatgccatcctcaaaatgaaactgccgagctcccagaaagacgtccaaaagttaactggctgcatggcggcgctcagccgtggggacccacgaaaagcctttgaagacttcaaaaaacttctcactactccaccagtcttagcttcaccacatccgcaagagcaactgttgttatacgtgtcggcaacttcccaggttgtaagcacagtcctggttgttgaacgtgaagaagaaggccatgttcaaaaagtccaacgaccaatctacttcgttagcgagattttggctgactccaagacaagataccctcaggttcaaaagctattatatggtgttttagttaccgtaaggaaattatctcactacttccaagtcatgaaagagtggtcctgccttgatgataacataaccgcttaccggcaagaggtacgcaagttggaagacaaattcgatagacttgagctcacccatgttcttcgacacaataatgaggcagccgatagactggctaattttggttcaaaacgagaagcagctccttccgacgtgttttgtgaacatctctacgagccaaccgtaccaaggaaagaaacaatcgaggccatggacactcaagacataagcatgattgaagccgactggagagagcccctcataagatttttgacaaaacaagaactccctcaagataaagatgaagccgagcggatctccaggcgcagcagactttatgtcatacatgagaccgagctgtacaaaaaaagtccatcaggaatcctacaacgctgtatgtctttggaggagggaagacaattggtaaaggatatacactcaggaatctgcgacaatcacgctgccacacgaaccatcgttggcaaggcttaccagcaaggttttttctggcccacagccgtgtctgacgctgacaaaattgtgcgaacatgtgagggttgtcaatttttcgcccgacaaactcatctaccggctcaggagttgcaaaccatcccgttgtcttggccgttcgcggtttgggggctcgacatggtcggcccatttaaaaaggcagtaggtggttatactcatctctttgtagctgttgacaagttttccaagtggattgaagccaaacaagttataacaatcgcggcagacaaggctagagatttcttcatcaacattgtgcaccggtttggggtacccaatcggatcatcactgataacggcactcaattcacaggcagagtatttaaagatttatgtgaggactttggcatcaaaatttgttatgcctccgtagcgcatcccatgagtaatggacaagttgaacgcgccaatggtatggtacttcaaggaataaaagcacgagtttttgatcgactgcgtccctatgctggcaaatgcgtagaacagttgccatctgtactttggtccctgcgcaccactccgagtcgggctacgggccagtcgccgtttttcctagtctatggagtggaagcgatgttgccaagtgaggtggaatttgaatcgctacggagaagaccgagtagatga

SEQ ID NO: 22973 - DNA, 2547 bp, Oryza sativa
  Clone ID: TF_OsC359_8240
atgccgcgctacaagcctgagtacttgtttggtgttgagggatttgtccaggagttgcgtacgatgtcctttgccataggatttgggactgcccctttgtatgcccagattcctcatgatcgtcacgaagagaagtgccgagtcaaagtcaccttgaacagtaatagtgaagatatcccatcagtgatgttcgaagctggaggaggaaactacatccatgcatgtcaggaggtggcaaggatcgccataggagagctccgcgatcgctacagtgatcagttggccgacactgagtatcgctaccatcctcgccaaccccagggaagtgaccgtggcggctaccttgagactgaggagattgagaatgatgctaccacaaggcatttggttgagatgctgtgggctatggatgaaacccgcgcggaggttgtgctagcagctcaagatcgtgaagaccggaatcgtggtaagatttgcaggctagaggacaaggtggatcgtttggaaaaggaactagccgcgttgaagggagaagcaccaccgcagaaggccaggattcgtcttaccgcaaggaagagagctctatttgtccctcgctaccaattggcgccaaaggtccgtgtggtggagaaagaagttaccccagccctagcggatcctccggtcgtcaatcacactaatcctggtgaagctggtgattggctgcatgccatagagaagaagttggatttgcttcagtgcattgatcaggagaaggtctcatttgcatcacaccagctgcatggccctgcctctgagtggtgggatcacttccgccttaacagaactactgctgaacctatcacttggcttgaattcaccgctgcgttccggaagacgcatataccatcgggagtggtgtctctcaagaagaaggaattcaggtcgctcacccagggatctcgcacggtcaccgagtatctgcacgagttcaatcgtctggctcgttatgctccggaagatgtgcgcactgatgaagagcgccaggagaggttcttggaaggacttaatgatgagctttcttacccactcatgactggggattatcatgatttccagaagttagtggataaggctattcgccaggaggacaagtacaaccgcatggagcagaagaaacgccggattgctcacttcaaggcacaacaggggaatagtcagaggccgcgtcttactttaggaccccagtccatgccacagggaggttcttcgtctgttgttcgtccgcagcatcagttcttcaacaacaatgctggcaacaacatccgcaatcaagctccacgccctgttgcagctccaacacagcaacagcctgccaagagggagcaaggcagcaagcccggggtgtgcttcaactgtggagacccaggacattactctgacaagtgtccgaagccccgacgcgtgaaggttgtccctgcccagaacaactctaccgcaccagcatcaaaggcccgtgtcaatcatgttgctgctgcagaagctcaaggtgctccagatgtgattttgggtacgttccttgtcaactcagttcctgcaacagtgcttttcgattctggtgctacacattcatttttatctatgagttttgcgggaaatcatgggatggaagtagaagatcttagacgtcctttgatggttagtaccccaagtaataattgtactctattatcaatttgttattgtgtgcctcggctgattcctggacgagggttcacacacatgtaagcgtttggaattttggatagaaattccgggcgtgacatgccgcccgctctcggagaccgcctctcgtcgccggacctccacggcgcctccccatcccatccgacgccacaaacgggatccctaagtcctagagatgctcccacccctttgaatcgaactcccgttgccccggtgagatttccccttctctccgccggcgatggccgccgccgcaatccaccaccgtcggctcctttcgctccgattcctctcgctgccacgctcccggggatccccttgacctccccctggctgccccaaggccgccggccttctcctttgtctccgcgtcgtgtcgccgtttccgccgccgcataacaacgccgcgcgtgcatcgccggtgaccatcgggtcccgcgtcaccgcgtgcgcatcacggtcgcgtaccgtttcggctaggcccgagtttgcgcccccttgtcccttcccttgcgcgaccacatccccgatccgacaagcttggtcaccgccgccagccactcctctagctgccggcggtagccgctcgctccggttagccaccgctcgccggaacgcctcacgcgttgtcggccgtctgatcccgggcgcctcctcctcctcctcctcccctttcacccctgcccgcgtggccgaccacgtggcagccacctcagccctgggcccgcttgaccggtgcgccgcgcccgaaccgcgcgcatccgaaaccctagcgcccgcccccgcgtgcgccctccccaccgtgaacccaaccaccgccat

SEQ ID NO: 22974 - DNA, 1323 bp, Oryza sativa
  Clone ID: TF_OsC359_6056
atggatgaagtcgggggtcgatggacattctccagggcaaatgaaggctacacgagctgcggcccgatgtttaacagagaaaaaggaaagaatgtcagcgggtatgcctcaagtaacccaagttttcaactcaatccaccactggcctcaagagagttaaccagggcatacccttggtccattccaagcatgctgcttagttcacagctaccattagttggaagtcaagaccaaaatcagtatgtgtttgatcgagcatttgccacccaggtcaatgagcttccaatgctagaagaggatgtccccttttgtcacgattgtagagagcaaggacactatgccctgaattgtccatgggtatatgccaaagaagccccttcctttggtttagcagggcagacatcgctaaaccagcctcctcgcaccaagtcaagcttgcagcctagtgtacaaaggagagagcctaatggagagaatccattgaatcccgggaattgctttcctcctagcccttcgtaccacgtggggtcacgtgctaagcaagccaaaggcaagaagagtaagaatcagaagagaaaagcaccgatgcgaactgaagaagaagtacgtaagatgactattaccagcaccgaatggcctccagcagggataactattcctagacgtcaaagaggaaataccttccgaggtgcacgacagttgacccagcacctcctaagccatggtggcagagtatctgatagtgaagggtcagatcaagtctcctcggattatgaagatgagtctctccgacatctcggcgaggaagagatggaatcaaaagcatgcccccgttgtggagaaattggacacgttgctagcctgtgtttcacactctgcccttattgtgaggaagaccatccaccaggtaaatgtcccacccgcaaggtcacatgttttctgtgcgaaggtaccaaccatgtgcccaaggattgccaactcagtgtgttgttgaccaagaccgcagaaatccaacgaacaaccctacgattgtctcatcagctagtcagctccaacatcaacatcgacgatatcatccccagcaccaatgctcctcctgctgcacctgactctgcagtaaatcatagcaataataccttcaacaccaaccattctctgcaccgacggcctcagcaaagaattgtcgtcgatggaagaagttgtgtctctccccgacctactccaggccgagcgaagggcaatcaatctcaggagtgcgataccaagcagaagaccgttattcgcctcaatcagcaatcagaaggaaacttctcttgtgaatga

SEQ ID NO: 22975 - DNA, 7581 bp, Oryza sativa
  unsure (1)..(7581): unsure at all n locations
  Clone ID: TF_OsC1517_1374
ttagagaatgtccttgtttggtccccaatcaacttcttcaatcatccatgcatttcttatgctcggtctcttttctttcgcccaagcaagtaactcttttgggtaccgcaagccaataattgaggaatactttaaatatcttagaattcttttcacggccactaagtgacactccttgggagcggcttgaaaccgtgcacacttgcaaacattaaacatgatatccgacctagatgcggtaaggtaaagcaagctaccaatcatagaacgataaagctttaaatctatcggtttacctccctcatcaaggtcgcgatgctcgttggttgccattggtgtcttgatgggcttcgcatcctccaagccaaacctcttgagttgattcttgatgtacttggtttggctcatgaacgtcccatccttgagttgcttgatatgaagttcaaggaagaagctcaactttccaatcatggacatctcaaattccctagacatcatatcaccaccaaattccttacaaaatacctcattagtagaaccgaatatgatatcatcaacataaatttgacaaacaaagaagtcatcaccaatgatatttgtgaaaagtgtggtgtcaacttttccagttttgaaatcatggttaggatttttaggatcttcaaaaccgggaggttgttcaacaaagacaagttcggcaatttcaccatttagaaaagcacttttcacatctatttgaaatagttctatatcaaagcatgatgcaaatgcaagaatgatgcgaatagcctcaacttgtgtgaaaccttgtgccaccaagcttatcttgtttctcaccaccaacccgttctcatcttgtttgctcctaaagacccactttgtccctatggcattgtgatctctaggtctttcaaccaaagtccacaccttgtttcttacaaagttgctgagctcttcatgcatagcattaatccaatctggatcataaagagcttcatctatatgttttggctcaaaacaaaaaacaaacgagtaatgctcacaaatcgaaacaacatgagatcgtgtttggacacccttactaatgtcacccaaaacttggtcaattgggtgattcttggaaagagcggtgtgtatccttgggggcataggtggatcttgtgccttctcctcttccacttccacttgagcttgacttggcgcagcggaagtagatggctcaccttgagtggaggtggatggcttgtcttccacttcaataggcttgacatctccaatagacatattcttcatagctctcatcaagccttcatcacctacatcatccaaattctcgtgcccctcttgggaaccattagtttcatcaaattgaacatcaacagtttcttccacaatacctttgttcttattgtagacccggtatgccttgctatttgaggcataacttgccatctcaaccaatgtatgatttttcctctccactacaccattttgttgaggtgagtaggtagcggaaagctcatgtttgataccaagatcatcacaatagtccttgatattggtatttttatactcggaaccattgtcacttctaattttcacaagagtgcaactaaattcattttgggccctttttgcaaactttttgaaaagctcggcaacaatagactctttgataaatcctgctgtgataagcctatctacctccgcaatgacttgatcttggaattctggtcgtaggcgacgtggcggctgctttacaggccgaaattgtgggtcgatggcaagtttgtgtgttgcaacacggggatcaagacccggcatctccttatatgtccaagcaaagcaatctcggtactccatcaggaagcttcgataactctcttgttcttcggctgaaagcgcggcactaacaaatgtagggcggggatcatccatggtgcctaaattaatttccacaagatcgtcaatggtgggttgcttctcctctttgagttcatcaagcatgaagggatcttctaattctccctcttgctctgtgatcatgctagcgtaaatatagccggtggcggcggcattcgcctgttttgttgaacgttgatcccagccttttccaataaaggaattaatttggcatctaccttcatagtggtagccacttcttcttgaattgttgcgagccctgattgtgattactgtcggcgcatcgttgctgatatctagcaacttgcggccttggaccattgcaacatttctggttagcaagatttcttttgatgagggagcctgtaaatcaaccggaactctcgccacagacgtttgtgtagttggagtccgtgatgatgtccctgctttcaacaacagaggtgtgaaagtcggtgacgtaagagcagtatcnttctccactggaaccacgacaccggacattccggctcccgtatacggcttattctcatactgtgcactcatgaatgagtggtggcgagcgttatttctgcgattacgggttgaggaccctgtcgcaccagcaagtggtcctgctgtgatgagccgtcttatctctggggtaggtgtgcgtccaggcgcgattaggagatccgctgccggagttgttcgaccaagagtttgatcagaatcgtcaactggaaaatagtactttgcatcggcatgatgcgattcttgggtagtgtatggagagaggttgccgacgatcctctgttgcgtcccactaccatctaggaactttaagcattggtgtagcgtcgaaggcaccacacgatacttgtgaatccgtggtctactgtcacgccccgaactagtcccgaccggaactagcccgtgacgctccaaattaaccttagtgagtcgatccacaactacccagatcgattcgtgacccgatgatgtccggggcagtcctgttataaagtccattccaatctcctcccatttccattccgggatttgaagaggttgaagtaaacctgctggtctttggtgctctgccttcactcgttggcaaacatcgcagagtgcgacgaattcagctatttctctcctcatgctgacccaccaaaacttttctttgaggtcttgatacattttagtgctgcctgggtgaatggagtactgggtctgatgagcctcggtgagtatcagatccttcagttccttgtcgtcaggtacacacaatctttctcccaaccagattgtgccatgctcatcttcgtggaaatcccgggcttttccgacactcatgttctttttcagctctgctatttcagaatcatttgcttgagcgtaggccgtgcctccagagcggatgccctcgatgcatagggcagtgcagtaacttttccggcttaaagcgtctgccaccacattggctttacccgggtggtagtgaatactcatgtcatagtctttgattagttccaaccatcttcgttgtcggagatttaggtccggttgggtgaagatgtatttcagactcttatggtccgtatatacttcgcagcggttgccaatcagatagtgcctccagatcttcaaagcatgaaccactgctgccaattccaagtcatgagttggataattcccttcgtgtggacgcaactgccgtgaggcatacgcaaccactctgccctcttgcattaggacacatccaagtccgtgacgggatgcatcacaatagacttggaagtctttcatcgggtcgggcagaatcaaaacgggtgcggatactaatttcttcttgagctcctcgaagctcttatcgcactcggctgtccatttaaacttctcatccttcttaagcaactgagtcatgggtcgggcgattctggagaaattttcgatgaatcgacggtaataaccctgagctgtaatgacatggcccaaaaatttgacttccgtcaaccagaagtcacacttgctgaacttggcatatagctggtgctccctcaacttctcgagtaccagacggaaatgttgttcatgtttttcttcggactttgaatagataagaatgtcgtcgatgaacaccacaacaaacttgtccagaaattccatgaacactttgttcatcagattcatgaagaatgcgggtgcgttggtgagtccgaaagacataaccgtgcactcatatagcccgtaccgagtggtgaaggccgtcttcggaatatcctcttcccgaattctcaactggtggtagcctgatcgcaggtctatcttagaaaacactttagctcctttcagttgatcaaacaaatcatcgattcgcggcaaaggatatttgttcttgattgtgacctcgttgagtgcgtggtaatcaacgcacatcctcttcgtcttatcctttttctccacaaaaatgaccggagcacccaaaggtgaagtacttggtcgaatgtaccctttctgcagctgctcatcaacctgtttcttgacctctgctagttcgttggccgccatcctgtatggtctcttatagattggagcagttcccggtgccaagtcaatccggaattcaatctctctcttgggtggcatggtagtgaggtcttcggggaacacttctggatactcgcagactatgggtatatcttccaattttctcgagttcttctctacggtgtccactgggatttccgcttcaatctgattcaaagagacccctttctttggcgagactagagatttgtacaccacgntttctcccttctcgttgatcaaggtgactgtgcgattcgcacaatcgatgacccccttaaacttggtcagccaatccatcccaagaatgacatctaggtcagaatcaaaaagtactgttgcagggattgagttaacagggaacgtacccagtacgacctctggtgctgcttgtgcctcctccgcagatgcgtggttgacacgagcctggataaaccttggcccggcacgcctaggcttcgggcatttgtcagcgaagtggccaagctcgccacagttgaagcaggaccctggttttgctccagtctccttcttggcttgcgcgggcgggcctgactgtgccggtgccattggtgggcgtgaagctgcaccgcggttggactgacctccatggtggttctgactgccactggcgccctggggaaagttgctagggttgaacgggcggtgctgacgaacgatcatggtggtaggtccaccctgctgcccaggagcgaagcgcggcctctggtgacttccctgaggtgccctgaactgtgcggccttcctcttcctgtccatcttgttgcgttgatcctcctggcggattgccttgtcaaccaacctctcaaagtcagcgtagtccccggatatcagttggttggtcagctcatcatccagacccgccatgaacttctcctgcttctcggcgtcggtgcggacatcctctggtgcatatcgcgcgaggcgattgaactcgtggaggtactctgtcacagtcctgttgccctgatggagtgcccggaattccctcttcttttgtgccacgaccccgtctggcacctgcgccttccagaagctacggcagaactctgcccatgtgacttcagtacctggtgggcgggtggccatgtgattgtcccaccaagctgacgcgggaccctgaagctggtgtgtggcgaaagcgaccttctcctgatcattgcactgcaggcgattcagcttcttctctatggcatggagccagtcattcgcctccatggggttggtggtgcttgagaaggtgggtggcctgacgcgtagaaactctggcaacttggactgagggggagggggaccaaactgctggtgctgctgttcgacgtgctgcatcatcctctggtgcatctgctggtgctgctgctgcatctgctgcatcatggctgccatcatctgagtctgatgtgccataacttgggcaagggtcggattctcgggaagtggtggcggaccattgccggaatcactgctggggtgcacaccatcagcgcgttcttcgccgttgctgccctcgcctgttgcgcggctaccattcctggtgtagaccattctgattcccactaagtctcctctattttcagctccttgcagcatactcgatagaccctcagcaacaagcaaaaaaaggtatggggataagggatccccctgccttaagcctcgagaaggcttaataacctctgtcaatacaccattgaaattcaccctgtactgaacttttcttcctttcttctttttcattgtgtgtaagcactcataagctaccaaaacattatccgtgatcaacctgcccgggacaaaagcactctgctgatcacttattatttcagggagaagacactttagccggtttgctaacatcttagaaattattttatagaccacattacataagctaatgggtctaaattgagttactctgtctggtttatcaacctttggaatcatgacaacagttgtgtcattccatccatctggaattttcattgtatttattgcatcaagaacttctttaaccagatcactctccaacatatcccagaatcttttatagaaaacagcgtgcagcccatctggtcccggagctttcagatcacctatactgaacagagcatttttcacctcttcagctgtatacggtgctagtaatccaaaattcatatctcccgttacttttctctgtacatccagcaaagaagatccatctatttgtgtaacctcagccgagaagagantttggaagtacccataaactatgntactcattctgtcttcatcggtttgaaaacatccattctcatcaataagtcccttaatnttctttcttcttcttctcngngcagcaaattgttgaaagaaactggtgttacggtcaccatgttncaaccaatttgctctcgctcttggatacaatattctttccttgatcgtgattgggacaaaccgaacgaggggttnactcaaatctaagaaaaccctagctctgaggtatttaacaggattgattctcccctcatctactataactgtgaatggttgttcaccaaccttcttagcaaccctctctgctagttctctcttcttcatcaacccatcaggcaccccatgaatgcgcgtccaaactggaattttatccaacttataatcaaacacattagtgaagccatcatattctttaaggactacaggagctcctctaaagatccatggacctccttccatnactctgttccaatcaccaaggcattgaaattgtaccataaagagatttgaatccattaccttaaacgagatatcctgtgccgaagaccaggcgtttctcatagcattcaacagcgctgagtggctaaagggttttgtagtataaaccctaaaaagagcgagccagcgtacgtccttgatcagcccttccaattcctccgagaaatctaggtcagtttcctcctccccatgcatattcaacctcttcaatctctcttccagatttggttcggatcccatctctccatcacgcccagtctcctcctccgtagggcgcttggtttcatcctcggcagatgatcgagtatctgccat

SEQ ID NO: 22976 - DNA, 5223 bp, Oryza sativa
  Clone ID: TF_OsC1713_5398
aacggaatctcggccccgagattcggaggagctggtgaagaggtgcggatgggcggctttcaactcatcctccctttcccaggttgcttcctcttctgaatgatgactccactgaactcggcaaaacctgttgaccttgtttctggttcttctttcgctggtatcaagtatacgaatcggcttctccacgtatgttaggtcctcctggatatcaatgtgtttcgaatcagcctgttcttcaggtacccttaagcacttctttaattgggacacgtggaacacgtcatggataccgatcatattggatggaagttctaactgataagcaacttctccccttcgttccaagattttgtatggtcccacgaagcgtggtgccaacttgcctttcgtctgaaaacggtgtactccccggagcggagtgacacgaagatacacgtaatctcctgcctcaaaagtgagctcccttcggcggttatccgcgtagctcttctgtcgagactgggcaatcctcaacctttccctgatgattctgactttctcttctgcttccgctaatacctctgtcccgaacagttgacgctcgcctgtctgatcccagaagagaggtgtgcggcacttccggccgtataaagcttcaaacggtgccatctgtagactggcctggtagctgttgttgtacgagaattccgcatatggcaagcttttgtcccaagctccaccaaaatcgagagcgcaagctctcaacatatcttccaagatttgattgactcgctcggtctgaccatcagtttgcgggtgataggccgtgctgaaatttaaacgggtccccaattcttcctgcagcttctgccagaattttgaggtgaactgactccctcggtcagatacaatctttttgggtactccatgtaggcacatgattctcgaaaggtaaagctccgccaaccttttgcccgtatacgtggtatgtactggtatgaagtgagcaaccttagtgagtcgatccacgactacccagatcgagtcgtgacccgacgatgtccggggcagtcccgttataaagtccatcccaatctcctcccatttccattccaggatttgaagaggttggagtaaacctgctggtctttggtgctctgccttcactcgttggcaaacatcgcagagtgcgacgaattcagctatttctctcctcatgctgacccaccaaaacttttctttgaggtcttgatacattttagtgctgcctggatgaatggagtactgggtctgatgagcctcggtgagtatcagatccttcagttccttgtcgtcaggtacacacaatctttctcccaaccagattgtgccatgctcatcttcgtggaaatcccgggcttttccgaccctcatgttctttttcagctctgctatttcagaatcatttacttgagctgctctgacttgatccacgagcgtaggccgtgcctccagagcggctacaaacccgtgttcaacaattcccacgttgagatgctcaaactcctgccacaattcctcacacatgccctcgatgcatagggcagtgcagtaacttttccggcttaatgcgtctgccaccacattggctttacccgggtggtagtgaatactcatgtcatagtctttgattagttccaaccatcttcgttgtcggagatttaggtccggttgggtgaagatgtatttcagactcttatggtccgtatatacttcgcagcggttgccaatcagatagtgcctccagatcttcaaagcatgaaccactgctgccaattccaggtcatgagttggataattcccttcgtgtggacgtaactgccgcgaggcatacgcaaccactatgccctcttgcattaggacacatccaagtccgtgacgggatgcatcgcaatagacttggaagtctttcatctggtcgggcagaatcaaaactggtgcggatactaatttctttttgagctcctcaaaactcttatcgcactcagttgtccatttaaaataacctgcaagtccaagaaaacttcgaatctgcgacacggtcttcggcggggtccatttggtaactgactccacgtttgatggatcaactgccacaccctgagctgtaatgacatggcccagaaatttgacttccgtcaaccagaagtcacacttgctgaacttggcgtatagctggtgctcctttaacttctcgagtactagacggagatgttgttcatgttcttcttcggacgttgaatagataagaatgtcgtcgatgaacaccacaacaaacttgtccagaaattccattaacactttgttcatcagattcatgaagaatgcgggtgcgttggtaagtccgaacgacataaccgtgcactcatatagcccgtaccgagtggtgaaggccgtcttcggaatatcctcctcccgaattctcaactggtggtagcctgatcgcaggtctatcttagaaaacactttagctcctttcagttgatcaaacaaatcatcgattcgcggcaaaggatatttgttcttgatggtgacctcgttgagtgcgcgataatcaacgcacatcctcttcgtcttatcctttttctctacaaaaatgaccggagcaccccaaggtgaagtacttggtcgaatgtaccctttctgcagctgctcatcaacctgcttcttgacctcggctaattcgttggccgccattctgtacggtctcttgtaaattggggcggttcccggtgccaagtcaatccggaatcaatctctctcttgggtggcatggtagtgaggtcttcgaggaacacttccggatactcgcagactatgggtatatcttccaatttcatctgattcaaagagaccccttgctttggtgagactagtgatttgtacaccacggtttctcccttctcgttggtcaaggtgactgtgcgattcgcacaatcgatgacccccttaaacttggtcagccaatccatcccaagaatgacatctaggtctttggattcgagaagaatgaggttggctagaaatggtgatctttgaatttctattgttatagaagggctgaattgaaccgaagtggagctattccctggggtatgaacccgcatcggtgtgctaagttcctctcttattaacccatgcatcccaacaaacttctttgaaatgaacgaatgcgttgcaccagaatcaaaaagtactgttgcagggattgagttaatagaaaacgtacccagtacaacctctggtgctgcttgtgcctcctccgcagatgcgtggttgacacgagcctggataaaccttggcccggcacgcctaggcttcgggcatttgtcagcgaagtggccaagctcaccacagttgaagcaggaccctggttttgctccagtctccttcttggcttgcgcgggcgggcctgactgtgccggtgccattggtgggcgtggagctgcaccgcggttggactgacctccatggtggttctgactgccactggcgccctggggaaagttgctagggttgaacgtgatacgctgcctctggctactaccttgtgcctcctggaatacaatcattttccttttacggttatccatcctgttcttcttgtcttcaagtcgaattgctttgtcaaccagctgctgaaaatcaacatagtcatgggagattaacgtaactgacagttcatcctttaagccttccaagaacttctcctgcgccctaaactcacgcttcttcaaagcaacaactcctacaggtatgtgtgtcttcttgaatccttcagtaaactcttcccaagtgattggttgtcgttctgcttcatcaatgaacttctctaatgatgggaatgcaaccatacctacacacaaagcaaacaacaaagtcttcgagtttctccatcaagattaacgactactcaagttgaaagaggaagggggaagaatgacaaaacgatttgcaaagaattctagataagaaagaaaggaaaattttcacaaattatgttttcggaaaaatagtccttaaggtttgaccatttggcttatcctacagtcgagatggctctgataccaacttgtcacgcccggaaattcactaataatttccgaactaatttgtgcatgaaatcctcgtccaggaatcagccgaggtacccaaactgacaatttaatatacaaatccatcataataataacgttacatacttacgaaaaaaaagaaaaacagcagcggaattaacggtctagcgatggcttcagctccactcccacaggcagctcaactggggtataagccaaacgtcttctccttctggatcctttttcttcaacttacaataatcggtcttcaattaatcttcttgaatacttccggcgcactcgcgaaccttcgaaacgacggaaacgacaagataatcagttcagaccaccctccaagctcaatagatctccagtataaatgccaacggatctgaaatctggcaccaccaatatatcagtgtatgtgtcatcctttagatcataactttgtagaacattagttccccgcagtaggaagacaatcttctcatcgtctaacagcagcaaaggataagcattgttattatagtattcgaaatctatgctgtacttcttaacccagagtccttgctcaagatctgacagaaaccacaggtccatgggggaaccgtatacagcatgcaccatcactaaggacccattcaagtcggctagcgagaggggctccataatttccaaggttgaggagataacaatcatatcccgtcccctggcgactggtttcggtccgtttagaatacccatccattcctccgtctcaaggtcaaatggaactatgttacctggtcgaataagcaagccatcatttgagcaatagagcctcgaataatctaacaggaaatacgcaaccccattgatgaccacacttctcatattgttacttgaacaaacaggcaactgaggtccttgtatcgccctccattgcaaagcgccagcactgttcacggtcatgatctcgcactcgtatagctcacatggattaccagaaccaaggagacggaccaccttgtactctcctgtagaggggaccttcccaaaagcacaggattccattatgagacggcctgaactcagcaaatccttattatccgcagagatactctttgccgggatcctgcagcccggg

SEQ ID NO: 22977 - DNA, 5826 bp, Oryza sativa
  Clone ID: TF_OsC1713_5434
atggcggcggagctagtgggtgaaggagacggtggacgacgccggcggtcaggggtagaggccgccggatccaacggttggcggtgcggtggaggaggctgccgctggatcgggcaagcggcggtggggtggcggaggaggaggcgactggtggtcgggggagaggcgccagatctgcgtcccccaaacgtgttgaggctggcggtcgttaggcaggagaggcggcggcggctggcgatcgggacacggaggaggaagtggccgacggtgaggggagaggccgcggtggccggatccgtgccctgtaagaatgaaaggcagcagctgcaggcgggagcagcagcagcagcagctgcaggcgggatcagcatcgagtacccgttctgcgtggagcctggctgctaccacccaggcttcaacctcacctgcaaccactcctacagcccgcccaggctattcctcggcgacggcacggtgcaggtgctcgagatcgccatcccccaagccaccgtgcgcatcaacagcggccgcatggtgttcaattctactggcaatcatgccgtcaacagatcattattggatcaggtgggaaggccgtacttcgtggcagcttcaaacaggatagctttgctaagctgcaacgcccgggttgacgtccgcgcggctgggagaaacaacaacaaaactagtactaagttgctcagttcctgcactgccatctgcccaacagacgatggaggtggtgctaccactatcctcgatattggtccagagggtccatgctcagggattggctgctgtgaaacaagcatgctactagcaggaagctcgactgctgcctacagcatccaggtccagaacttgcaggagcaggccgtcgtgctaaatcgaacggatgatctggtgtacttggtagatgagagatttaactataccttggacatgtctttcggctacagcagtcctgaagagctcccagcacggctagactggtacataaatagttcatcagcgtgtccgttgcccgcgtccgcccccgaatgtcgcagcgcgcacagctattgcgacagtacttacgacaacaaggcgtacatctgccgctgctccgaaggttacgaaggaaatccctacgttcctgatggatgccatgatacggatgaatgcagttctggatactgcagttacggcgagtgcaggaacacaccaggatcgttcatttgcaactgccctcgtggctacgagggcaatccatcgccaaaagatggatgcaaagcacgagatttaggtctacgcatcgggcttggggttggtggtggcacaattcttttgctcctcgcactaagtgctccctttatatcaagcaaaatgaagctgcgcaagatgaaaagaatgaaagagacttttttcaggcaaaaccatggcttgctattaggacgattggtatcacaaaacgcagatattggtcaaaggatgatcatgactttacaagagctagagaaggccacagacaattttgataaatctcgtgaaattggtggtggaggacatggcgtcgtgtataagggaattttagacctgcaagttgttgccattaagaaatcaaggattgtcgtaaaaagagaaatcgatgactttataaatgaagttgcaattctttctcaagtcaatcatagaaacgtggtgaagcttctaggatgttgtcttgagacagaagttccattgttggtttatgagttcatttcaaatggatctctagatcaccatcttcatgttgatggaccaatttcgctaccatgggatgatcgaataaggattgctcttgaagttgctagagccttgacttatctacattcagctactacaataccaatattccatagggatattaaggcatgcaacatacttctcgatgaaaatttaatatcaaagaattgctcactcgaaaaaggcccatgtataggactgatcacggtgaaagtcttgtgttatattttgcctcgcttcatagacaagatgagctacaaagctactagaaatcgaatgccaaagcctgaaggtgagatcaaagcaaccaacctcagagcattcaacagctcatcagtagaaatcccctctggagtagacttcgaattagggaacacaaccaccggcacggtgtcatcatcattaccttgggatgatcgattaaggatagcttttgaagttgttagagctctttcatatctacattcagctgcatcaatgccaatatttcacagagatattaaatattcgaatatacttcttgatgacagcctaacagcaaagttacttactcggaagaaaccaattggtggtacatttgataatggcgatggtcttgtttcacatttcgtctcacttgtctcaaaaggtaacctttatgacataatagattctcaagttagggaagaggaagatggagaagtccaggaagtagcaacactagccgcaacatgtactaaatttaaaggagaagagcggcctacgatgagggaagtagagatggagaacgacttgcaagaaaaccggtcggccatgaagaaatgccccgaccttaagattgagagaaggtttttggggagcgcaaggcgcgactactcactgttcgtcaacatctacttcacattcaccaatatgtcgacaaccggcgacaacaacaacactggagacaaggagaaggagcctctcgtcaacaccaacggaggcaatactgcctcaaactccagcggagggccattctcggggtataaccttcttacattattaccattcgttcttcgtttcctacaactgttcatcgcaatgtcaacattgcgttctcttatctatgttgatgcttattctatattaagcatgctcatgttgtacacatctagcactatcactggatctactcaaattacaaatgtcatgtttattatcttgttattttggattaaaatatgccgaattatgaccaaatttccaacaatccaaaaacctgataggtcattttcagtagttggctttgctgcaacactgaaaccacatgcttttgatggttctaattataagagatggaaagcacgtgcactactatggttgacagcgatgcaatgcttctatgtttcacggggcaaacgaagtgaaccgcctctctctcctgaggaggaggctaagttcgaggcttcggattgcctgttccgtggagcattgatcagtgtactcgctgacaatatagtggacgtgtacattcacatgcctttagggaaggacatgtgggatgcacttgaggccaagttcagagtttccgacgccggcagcgagctgtatgtcatggagcagttctatgactacaagatggtcgatgaccgttctgtagtggaacaggctcatgagattcagatgctggcaaaggaacttgagaacaacaactgtgagttgccggacaagtttgtggcgggtggcattattgccaaattgccaccttcttggtcggactttactatttctctaaaacacaagaggcaagagtttaatgttactgatctcattggctctttgggtgttgaggagaaggcgagagcaaaggacaactggggcaaaaatatcgagggaaattctagcgccaatttggctacaaccaattttaagaagaaagacaagggaaagggcaagggcgactgctttgtgtgcgataagcctgggcattgggcgaagaattgtcctgatcgcaaggacaagaagtctgccaacatggttattagcgagggcggaggaacatcggggtacggtaattttttacctacagttctctctgtttttcattcacctgattggtgggttgatactggtgctaatattcatgtcgggagaggttcctccttgttgatgggaaacgagtcgcttgcggctgttcatggtgttggtacggtcgatctgaagtttacttcgggaaagactgtgcagctgaagaatgtgcagcatgtcccttcaataaagaagaatctagttagcggctctctactatgtagagatggttttagacttgtgtttgaatccaataaatgtgtcgtatctaaatatggaacttttattggaaaaggttatgacagcgaaggttccaagtgccatacttgtgttcaatcgaaacaacctcgcaagcctcacaaggcatctgaggcgagaaatttggcaccactagaactagttcattccgatctgtgcgaaatgaacggcgtgttgactaaagggggaaagaaatatttcatgacactgatagatgattgcactagatattgctatgtgtacctattgaaaacaaaggatgaggcattgcattactttaagatctataaagctgaggaatggtggggtgaggcaatttttactgcttgtcatgtcctaaataaaattccagtgaagcataaggaagtaacactattcaaagaatgggaaaggaagaaattaaatctctcatacctacgcacatggggctgcttggccaagaatgaatttcccatgaaaaatacacctagcacatctagtcaagaacctgttttaccccatgagcaccttgcaccgataaaacacaatgatcaaacgcctgaggaaaatcctgaggaggttaacattgtagcaactcgaaagagtaagagacaaaggactgcaaagtcttttggagatgactacattgtatacctcgtggatgacactccaagaaccatagaagaggcatattcatctcctgacgctgactattggaaggaagcggtacgcagtgagatggactcaattatgtctaatggtacttgggaagtcgttgagcgtccatatgggtgcaaacctgtaggatgcaaatgggttttcaagaaaaaacttaggcctgatggtacaattgaaaacctcaatgtgattgaggaggttaaggactttttgtccaaaagctttgaaataaaggatttggaagtggctgatgttattcttaacattaagctactgagaggagatgagggtgggattacactcgtgcaatctcactatgtggacaaggttttgagtcgctttggttatagtgactgcaagccagctccaactccttatgactccaatgtgctattaaggaaaaatggaagaatagcaagggatcaattgagatactcccaaatcattggttcattgatgtacttggctagtgcaacgaggcctgacatctcatttgctgtgagcaagctgagccggtttgtttcaaatccgggagatgatcattgtcaagctctggaaagggtcatgcgctatctaaagggtacaataagctatggaattcactatactggttacccaaaaatattggaagggtatagtgactcaaactggatatctgatgctgatgagataaaggccacaagtggatatgtgttcacacttggaggtggcgctgtttcctggaagtcttgcaagcagaccatcttaacgaggtcaacaatggaagcagaactgacagcactagatactgccacagtaaaggccgagtggcttcgtgaactcctaatggatttgccggtggttgaaaaaccagtgccagctatactaatgaactgtgataatcaaacagtgattattaaggtgaacagttcgaaggacaacatgaagtcatctaggcatgtaaagagaagactgaaatctgtcagaaagcagaaaaactccggagtgatagcactggactatgtccagacagctaaaaatctggcagatcagtttaccaaggggctaccacgtaatgtgatagacagtgcatcgagggaaatgggcttgagacccacttag

SEQ ID NO: 22978 - DNA, 3221 bp, Oryza sativa
  Clone ID: TF_OsC359_5540
atggtctacaccaggaatggcacccgcacgacaagcgagggcagcaacggcgaagaacgcgctgatggtgtgcaccccaacagtgattccggcaatggtccgccaccatttcccgagaatctgacgctggcccaagtaatggcacatcagactcagatgatggcagccatgatgcagcagatgcagcagcagcaccagcagatgcaccagaggatgctgcagcacgccgaacagcagcaccagcagtttggtccccctcctcctcagtccaagctgcccgagtttctacgcgtcaggccacccaccttctccagcaccaccaaccccatggaggcgaatgactggctccatgccatagagaagaagctgaatctcctgcagtgcaatgatcaggagaaggtcgctttcgccacacaccagcttcaaggtcctgcgtcagcttggtgggacaatcacgtggccacccgcccgccaggcactgaagtcacttgggcggagttctgtcgtagcttcaggaaggcgcaggtgccagacggggtcgtggcacaaaagaagaggggattccgggcactccatcagggcaacaggacagtgacagagtacctccatgagttcaatcgcctcgcgcgatatgcaccggaggatgtctgcaccgacgccgagaagcaggagaaattcctagcaggcctggatgatgagctaaccaaccagctgatatctggagactatgccgactttgaaaggttggttgacaaggcaatccgtcaggaggatcagcgcaacaaaatggacaggaagagaaaggcggcacagttccggtccaaccaaggaaaccatcagcgaccgcgcttcactctcggacagcagggtggacctaccaccatgatcgtccgccagcaccgcacgttcaagtctagcaacttccaccagggcgccagtggcagtcagaaccaccatggaggtcagcctaaccacggtgcagctccacacccaccagtggcaccagcacagtcaggcccgtccgcgcaagccaaggagactggagcaaagccagggtcctgcttcaactgtggtgagcttggccacttcgccgacaaatgcccgaagcctaggcgtgccgggtcaaagtttgtccaggctcgtgtcaaccacgcgtctgcaaaggaggcgcaagcagcaccagaggtcgtactgggtacgtttcctgttaactcaatccctgcaacagtactttttgattctggtgcaacgcattcgttcatttcaaagaagtttgtcaggatgcatgggttaataagagaggaacttagcacaccaatgcgggttcataccccagggaatagctccacttcggtacaattcagcccttctataacaatagaaattcaaagatcaccatttctagccaacatcattcttcttgattccaaagacctagatgtcattcttgggatggattggctgaccaagtttaagggagtcattgattgtgcgaatcgcacagtcaccttgactaacgagaagggagaaacaatagtgtataaatcactagtctcaccaaagcaaggggtctccttgaatcagattgaggcggaaaccccagtggtcaccgaggggatgaattcgaggaaattggaagaaattcccatagtctgcgagtacccagaagtgtttcccaaagacctcaccaccatgccacccaagagagagattgaattccggattgatttggccccgggaaccgccccaatctacaagagaccgtataggatggcagccaatgaactagccgaggtcaagaaacaggttgatgagcagctgcagaaagggtacatacgaccaagtacctcaccttggggtgctccggtcatttttgtggagaaaaaggataagacgaagaggatgtgcgtcgattatcgcgcactcaacgaggtcacaatcaagaataaataccctttaccacgaatcgatgacttgtttgaccaactgaagggagctaaggtgttctctaagatagacctgcgatcaggctatcaccagttaagaattcgggaagaagatattccaaagacggctttcaccacccggtacgggctgcatgagtgcacggttatgtctttcggacttaccaacgcacccgcattcttcatgaatctgatgaacaaagtgttcatggaatttctcgacaagtttgtggtggttttcatcgacgacatacttatctattcaaagtctgaagaagaacatgagcagcatctccgtctggtactcgagaagttgaaggagcaccaattatacgccaagttcagcaagtgtgacttctggttgacggaagtcaaatttctgggccatgttagacttctgggcatggcagttgatccatcgaacgtggagtcagttaccaaatggaccccaccgaagaccgtgtcgcagattcgaagttttcttagactggcgggttattaccgccaattcatcgaaaacttctccaggatcgctcgacccatgactcagttgcttaagaaagatgaaaagtttaaatggacagctgagtgcgataagagctttgaggagctcaaaaagaaattagtatccgccccagttctgattctgcccgaccagatgaaagatttccagatctggaggcactatctgattggcaaccgctgtgaagtatatacggatcataagagtctgaaatacatcttcacccaaccggatctaaatctccgacaacgaagatggttggaactaatcaaagactatgacatgagcattcactaccacccggggaaagccaatgtggtggcagacgcattaagcaggaaaagttactgcactgctctatgcatcgagggcatgtgtgaggaattgcagcaagagtttaagcggctcaacgtgggaattgttgaacacgggttcatagctgttggcggatggcatgagtcccttcgaccgaatctgccgaaacccatggcgaagaccacgagccaaggatgatgcgaggcgaagggtcgggtgagtgcatgccgaagaaagacgacttcgccaggaccggttcgccccggcatccagcccagagaaggacgacttcgccaggaccggttcgcccccgcgagggccgaagtagccttctcggcccaccaagcttagaggccatagggccggcgatcgcccgatggccatcaagggcccatgaacccccttgacgttatgtaacc

SEQ ID NO: 22979 - DNA, 4101 bp, Oryza sativa
  Clone ID: TF_OsC359_5554
atggtctacaccaggactggcacccgcacgacaggcgagggcagcaacggcgaagaacgcgctgatggtgtgcaccccagcagtgattccggcaatggtccgccaccacttcccgagaatccgacccttgcccaagttatggcacatcagactcagatgatggcagccatgatgcagcagatgcagcaacagcaccagcagatgcaccagaggatgatgcagcacgccgaacagcagcaccagcagtttggtccccctccccctcagtccaagttgcctgagttcctacgtgtcaggccacccaccttctccagcaccaccaaccctatggaggcaaatgactggctccatgcaatagagaagaagctgaatctcctgcagtgcaatgatcaggagaaggtcgcttttgccacacaccagcttcaaggtcctgcgtcggcttggtgggataatcacatggccacccgcccaccgggtactgaagtcacatgggcagagttctgccgtagcttcaggaaggcacaggtgccagatggggtcgtggcacaaaagaagagggagtttcgtgcactccatcagggcaacaggactgtgacggagtacctccatgagtttaatcgcctcgcgcgatatgcaccagaggacgtccgcaccgacgccgagaagcaggagaagttcatggcgggtctggatgacgagctgaccaaccaactgatatctggggactacgctgactttgagaggctggttgacaaggcaatccgtcaggaggatcaacgcaacaagatggacaggaagaggaaggccgcacagttcagggcacctcagggaagtcaccagaggccgcgcttcactcccggacagcagggtggacctaccaccatgatcgttcgtcagcaccgcccgttcaatcctagcaactttcctcagggcgccagtggcagtcagaaccaccatggtggtcagtccaaccgcggtgcagctccacgcccaccaatggcaccggcacagtcaagcccgcccgcgcaagccaagaaggagactggagcaaaaccagggtcctgtttcaactgtggcgagcttggccacttcgctgacaaatgcccgaagcccaggcgtgccgggccaaggtttatccaggctcgtgtcaaccacgcatctgcggaggaggcacaagcagcaccagaggttgtactgggtacgtttcctgttaactcaatccctgcaacagtactttttgattctggtgcaacgcattctttcatttcaaagaaattcgtggggatgtatgggttaaggaaagaagagcttagcacaccaatgagagttcataccccgggaaatagttcaacctcagtcagttttagcccttcagtgctaatagaaatccaaagatcaccatttctagccaacctcattcttcttgaatccaaagacctagacgtcattcttgggatggattggctgaccaagtttaagggagtcatcgattgtgcgaatcgtactgtcaccttgaccaacgagaagggggaaacggtagtgtacaaatcaccagactcgccaaagcaaggagtctccttgaatcagattgaagcggaaatcccagtggacaccgtggagaagaatttgaagaaattggaagacatacccatagcctccgaatacccagaagtgtttcctgaagacctaactaccatgccacccaagagagagattgaattccggattgacttggcaccgggaaccgctccaatttacaagagaccgtacagaatggcggtcaacgaactagcagaggtcaagaagcaggttgatgagcagctgcagaaagggtacattcgaccaagtacttcaccttggggtgctccggtcatttttgtggagaaaagggataagacgaagaggatgtgcgttgattatcgcgcactcaacgaggtcacaatcaagaacaaatatcccttgccgcgaatcgacgatttatttgatcaactgaaaggagctaaagtgttttctaagatagacatgcgatcaggctaccaccagttgcgaattcgggaagaggatattccgaagacggccttcaccactcggtacgggctatatgagtgcacggttatgtccttcggacttaccaacgcacctgcattctttatgaatctgatgaacaaagtgttcatggaatttctggacaagtttgttgtggtattcatcgacgacatacttatctactcaaaatccgaggaagaacatgagcaacatctccgtctggtactcgagaagttgaaggagcaccagctatacgccaagttcagcaagtgtgacttctggttgacggaagtcaaatttctgggccatgtcattacagcccagggtgtggcagttgatccgtcgaacgtagagtcagtcaccaagtggaccccaccgaagaccgtgtcgcagattcgaagttttctaggactggcaggttattaccgccggttcatcgaaaacttctccagaatcgcccgacctatgactcagttgcttaagaaagatgagaagtttaaatggacagctgagtgcgataagagttttgaggagctcaagaagaaattagtatccgcaccggttttgattttgcccgaccagatgaaagacttccaagtctattgcgatgcatcccgtcacggacttggatgtgtcctaatgcaagaaggcagagtggttgccagtggttcatactttgaagatctggaggcacggccaacgctcgtggatcaagtcagagcagctcaagtaaatgattctgaaatagcagagctgaaaaagaatatgagagtcgggaaagcccgggatttccacgaagatgaacacggcacaatctggttgggagaaagattgtgtgtacctgacgacaaggaactgaaggatctgatactcactgaggctcatcagacccagtactccattcatccaggcagcactaaaatgtatcaagatctcaaagaaaagtttttgtgggtcagcatgaggagagaaatagctgaattcgtcgcactctgcgatgtttgccaacgagtgaaggcagagcaccaaagaccagcagcttgggacaaaagcttgccatatgcggaattctcgtacaacaacagctaccaggccagtctacagatggcaccgtttgaagctttatacggccggaagtgccgcacacctctcttctgggatcagacaggcgagcgtcaactgtttggaacagaggtattagcggaagcagaagagaaagtcaggatcatcagggaaaggttgagaattgcccagtctcgacagaagagctacgcggataaccgtcgaagggagctcacttttgaggcaggagattacgtgtatcttcgtgtcactccgctccggggagtacaccggtttcagacgaaaggcaagttggtaccacgcttcgtgggaccatacaaaatcctggaacgcaggggggaagttgcttatcagttagaacttccatccaacatgatcggcatccatgacgtgttccacgtgtcccaactaaagaagtgcttaagggtacctgaagaacaggctgattcggaacacattgatatccaggaggacctaacatatgtggagaagccggccgaggcccagccaggccgccccgccgcctcctctctcggggtcgccgacaggtggggcccacctgtcgggtccttcccccacctcccgccgatctcgctcgcgccgtcgcgcccgcaaccgccgccgcgccctcgtctccgcctcctccgggccacgtcgaccacacccgcgcgccgcgccgtcgccgccgtcgggttcgcgtggccgagatccaccccgtccacccctcctccgtcgagggcaccccgaagctcgtccgcccgccgacgtcgtcctcccgtggcttgccgtcgccgttcgccatcgtcctcctccgcgccggccaccctcggtgaggcatccctcccctcttttccccttcctctcctcctagtgccgcgccgccgcttcgagtcgcgcgccgtcgccttcggccgccgccgcctcccgtgccgccggtcgccgccgtcgtcggccgcatgccgtcgctgctag

SEQ ID NO: 22980 - DNA, 5409 bp, Oryza sativa; identical to SEQ ID NO: 13868
  Clone ID: TF_OsC359_5601

SEQ ID NO: 22981 - DNA, 2844 bp, Oryza sativa; identical to SEQ ID NO: 13885
  Clone ID: TF_OsC359_5641

SEQ ID NO: 22982 - DNA, 4461 bp, Oryza sativa; identical to SEQ ID NO: 13862
  Clone ID: TF_OsC359_5694

SEQ ID NO: 22983 - DNA, 4422 bp, Oryza sativa; identical to SEQ ID NO: 13783
  Clone ID: TF_OsC359_5786

SEQ ID NO: 22984 - DNA, 4716 bp, Oryza sativa; identical to SEQ ID NO: 13782
  Clone ID: TF_OsC359_5805

SEQ ID NO: 22985 - DNA, 4908 bp, Oryza sativa
  Clone ID: TF_OsC359_5936
atgggttgcaagatggccggacacccacccaaccactgtggagaaggcatgatcgactttgtggcagagttggcacgtatgacgctggtggtgggctaccccaatgcgccagagtacacgacggttccaccgctcagtggcgagcttcctcaccgtgttcgcctggaggtccacggctacgtgggtacctgcctagctaacatggtggttgaggcatctggaggcacagcagatcacgcctgtcaggaggcagcatacctgatgatggccagactacgggagcgccacaactacatcttccatgacacggcgtaccgatttcaccctcgtcgagccagtggtgatgatgtcagtaccttccgtccgacagctggcgagaacgacaccacctttggtcacatgtgtgctgtgatgaggggattggataggatgcactcggatctgcacaaggcgaccaaggccttgaatgatgggaagctcatgaggatcgtcgctttgaaggatgagatagcgcgcctgaagagggagaatgctcagttaaagggtcttcccgcgccaggaggagtccggatccgcactacaccccgcaagacgacgacgaaacccgtgcgcatccagcttgcgcccaggaacccacctccgcccgcagctccggcagttcctgcagctccagctccagctcccgttcacgtgttagctcccgcgtccgctctctccttcgctccagcatcagccgccaggggtccagccagtggcaacggaggttgcttgtttgggatggtttacaccaggaatggtagccgcgcaacgggtgagggcagcaacggcgaagagcgcactgagggtgtgcatcccaacagcaattccggcaatggtccgccaccacttcccgagaatccgacgctagcccaagtgatggcacatcagacacagatgatagcagccatgatgcagcagatgcagcagcagcaccagcagatgcaccagaggatgctgcagcacgccgaacagcagcatcagcagtttggtccccctccccctcagtccaagttgccagagtttctacgtgtcaggccacccaccttctccagcaccaccaaccctatggaggcgaatgactggctccatgccatagagaagaagctgaatctcctgcagtgcaatgatcaggagaaggttgctttcgccacacaccagcttcaaggccctgcgtcggcttggtgggacaatcacatggccacccgcccaccaggtactgaagtcacttgggaagagttctgccgtagcttcaggaaggcgcaggtgccagatggggtcgtggcacaaaagaagagggaattccgagcactccatcagggcaacaggacggtgacggagtatctccatgagttcaatggcctagcgcgatatgcaccagaggatgtccgtaccgacgccgagaagcaggaaaagttcatggcaggtctggatgacgagctaaccaaccagttgatatctggagattacgccgatttcgaaaggctgatggacaggaagaggaaggccgctctgttcagggcacctcagggaagtcaccagaggccgcgcttcacccccgggcagcagggtggacctaccaccatgatcgtccgccagtaccgcccgttcaaccctagcaactttccccagggcgccagtggcagtcagaaccatcatggaggtcagcccagccgcggtgcagctccacgcccaccagtggcaccagcacagtcaggcccgcccgcgcaagccaagaaggagactggagcaaaaccagggtcctgcttcaactgtggcgagcttggccacttcgccgacaaatgcccaaagcctaggcgtgccgggccaaggtttatccaggctcgtgtcaaccacgcatctgcggaggaggcacaagcaacaccagaggttgtactgggtacgtttcctgttaactcaatccctgcaacaatactttttgattctggtgcaacgcattcgttcatttcaaagaagtttgtcgggatgcatgggttaaggaaagaagagcttagcacaccaatgagggttcataccccgggaaatagttcaacctcagtcagttttagcccttcagtgctaatagaaattcaaagatcaccatttctagctaacctcattcttctcgaatctaaagacctagatgtcattcttgggatggattggctgaccaagtttaagggagtcatcgattgtgcgaatcgtaccgtcaccttgaccaacgagaagggagaaacggtagtgtacaaatcaccagactcaccaaagcgaggggtctctttgaatcagattgagacgaaaatcccagaggacaccgtggagaagaacttgcggaaattggaagatatccccatagtctgcgagtatccagaagtgttccccgaagaccttactaccatgccacccaagagagagattgaattccggattgacttggcaccgggaaccgctccaatttacaagagaccgtacagaatggcggccaatgaattagccgaggtcaagaagcaggtggatgagcagctgcagaaagggtacattcgaccaagtacttcaccttggggtgctccgatcatttttgtggagaaaaaggataagacgaagaggatgtgcgttgattatcgcgcactcaacgaggtcacaatcaagaacaaatatcctttgccgcgaatcgatgatttgttcgaatttgatcaactgaaaggagctaaagtgttttctaagatagacctgcgatcaggctaccaccagttgagaattcgggaagaggatattccaaagacggccttcaccactcggtacgggctatatgagtgcacggttatgtctttcggacttaccaacgcacccgcattcttcatgaatctgatgaacaaagtgttcatggaatttctggacaaatttgttgtggtgttcatcgacgacattcttatctattcaaagtccgaagaagaacatgagcaacatctccgtctagtactcaagaagttgaaggagcaccagctaacgccatgttcagcaactcagggtgtggtagttgatctgtcgaacgtagagtcagttaccaaatggaccccaccgaagaccgtgtcgcagattcgaagttttcttggacttgcgggatattaccgccgattcatcgaaaacttctccaggatcgcccgacccatgactcagttgcttaagaaagatgagaagtttaaatggacagctgagtgcgataagagttttgaggagctcaaaaagaaattagtatccgcaccagttttgattctgcccgaccagatgaaagacttccaagtctattgcgatgcatcccgccatggacttggatgtgtcctaatgcaagagggcagggtggttgcgtatgcctcgcggcagttgcgtccacacgaaggaaattatccaactcatgacctggaattggcagcagtggttcatgttttgaagatctggaggcactatctgattggcaaccgctgcgaagtatatacggaccataagagtctgaaatacatcttcacccaaccggacctaaatctccgacaacgaagatggttggaactaatcaaagactatgacatgagcattcactaccacccgggtaaagccaatgtggtggcagacgcattaagcaggaaaagttactgcactgccctatgcatcgagggcatgtgtgaggaattgcggcaggagtttgagcatctcaacgtgggaattgttgaacacggtcagagcagagtaaatgattctgaaatagcagagctgaaaaagaacatgagagtcggaaaagcccgggatttccatgaagatgagcatggcacaatctggttgggagaaagattgtgtgtacctgacgacaaggaactgaaggatctgatactcaccgaggctcatcagacccagtactccattcatccaggcagcaccaaaatgtatcaagacctcaaagaaaagttttggtgggtcagcatgaggagagaaatagctgaattcgtcgcactctgcgatgtttgccaacgagtgaaggcagagcaccaaagaccagcaggtttactccaacctcttcaaatcccggaatggaaatgggaggagattggaatggactttataacaggactgccccggacatcatcgggtcatgattccatctgggtagtcgtggatcgactcactaaggttgctcacttcataccagtacataccacgtatacgggcaaaagcacggcctatcacccgcaaactgatggtcagaccgagcgagtcaatcaaatcttggaagatatgttgagagcttgcgctctcgattttggtggagcttgggacaaaagcttgccatatgcggaattctcgtacaacaacagctaccaggctagtctacagatggcaccgtttgaagctttatacggccggaagtgccgcacacctctcttctgggatcagacaggcgagcgtcaactgttcgggacagaggtattagcggaagcagaagagaaagtcagaatcatcagggaaaggttgaggattgcacagtctcgacagaagagctacgcggataaccgccgaagggagctcacttttgaggcgggagattacgtgtatcttcgtgtcactccgctccgaggagtgcaccgttttcaaaacaaaggcaagttggcaccacgcttcgtgggaccatacaaaatcttggaacgaaggggagaagttgcttatcagttagaacttccatccaatatgatcggcatccatgacgtgttccacgtgtcccaattaaagaagtgcttaagggtacccgaagaacaggctgattcggaacacattgatatccaggaaggacctaacctacgtggagaagccggttcgtatacttga

SEQ ID NO: 22986 - DNA, 5342 bp, Oryza sativa
  Clone ID: TF_OsC359_6008
atggccggtcacccacccaaccaccgcggagaaggcatgatcgacttcgtggcagagctggcacgcatgacactggtggtgggctaccccaatgcgccggagtacacgaccatcccaccgctcagtggcgagcttcctcaccgtgtccgcttggaggtccatggctacgtggggacttgcctcgctaacatggcggttgaggcgtcaggaggcacagcagatcatgcctgtcaggaggcagcctacttgatgatggccaggttacgggagcgccacgactacatcttccacgacacggcgtaccgctaccacccccgtcgagcccatggtgatggcgtcagctccttccgtccgacagctggcgagaacgacaccaccttcggtcacatgtgtgctgtgatgaggggattggaccggatgcactcggacctgcacaaggcgaccaaggccttgaatgatgggaagctcatgaggatcgtcgctctgaaggacgagatagcgcgcctgaagaaagagaatgctcagttgaagggtcttccagcaccaggaggagtccggatccgcactacgccccgtaagaggacgactgcacccgtgcgcatccagcttgcgcccaggaacccacctccagcagcagcagctccggcagttcctccagctccagctccagctccagctccagctccagctcccgctcccgcgttcactctctccttcgctccagcatcagccgccagaggaccagccagtggtaccggaggttgtcccctccagatggtctacaccaggactggtagccgcgcaacaggcgagggcagcaacggtgaagaacgcgctgatggtgtgcaccccaacagtgagtccggcaatggtccgccaccacttcccgagaatccgacgcttgcccaagttatggcacatcaaactcagatgatggcagccatgatgcagcagatgcagcagcagcaccagcagatgcaccagaggatgatgcagcacgccgaacagcagcatcaacagtttggtccccctccccctcagtccaagttgccggagtttctacgtgtcaggctacccaccttctccagcaccaccaaccctatggaggcaaatgactggctccatgcgatagagaagaagctgaatctcctgcagtgcaatgatcaggagaaggtcgctttcgccacacaccagcttcagggtcctgcgtcagcttggtgggacaaccacatggccacccgcccaccgggtactgaagtcacatgggcagagttctgccgtagcttcaggaaggcacaggtgccagatggggtcgtggcacaaaagaagagggaattccgggcgctccatcagggtaacaggactgtgacagagtacctccatgagttcaatcgcctcgcgcgatatgcaccagaggatgtccgcaccgacgccgagaagcaggagaagttcatggcgggtttggatgatgagctgaccaaccaactgatatctggggactacgttgactttgagaggctggtcgacaaggcaatccgccaggaggatcaacgcaacaagatggacaggaagaggaaggccgctcagttcagggcaccccagggaagtcaccagaggccgcgcttcactcccgggcaacagggtggacctaccaccatgatcgtccgtcagcaccgcccgttcaaccctagcaacttccaccagggcactagtggcagtcagaaccaccatggaagtcagcccaaccgcggtacagctccacgcccaccaatggcaccggcacagtcaggccagcccgcacaagccaagaaggagacgggagcaaaaccagggtcctgcttcaactgtggcgagcttggccacttcgctgacaaatgcccgaagcccaggcgtgccgggccaaggtttatccaggctcgtgtcaaccacgcgtctgcggaggaggcacaagcagcaccagaggtcgtactgggtacgtttcctgttaactcaatccctgcaacagtactttttgattctggtgcaacgcattctttcatctcaaagaaatttgtcgggatgcatgggttaataagagaggaacttagcacaccgatgcgggttcataccccagggaatagctccacttcggttcaattcagcccttctataacaatagaaattcaaaggtcaccatttctagccaacctcattcttctcgaatccaaagacctagatgtcattcttgggatggattggctgaccaagttcaagggagtcatcgattgtgcgagtcgcacagtcaccttgaccaacgagaagggagaaaccgtggtgtacaaatctctagtctcgccaaagaaaggggtctcgttgaatcagattgagacggaaatcccagtggacaccgtagagaagaacttgagaaaattggaagatatacccatagtctgcgagtatccggaagtgtttcctgaagacctcactaccatgccacccaagagagagattgaattccggattgacttggcaccgggaaccgctccaatttacaagagaccatacaggatggcggccaacgaattagcagaggtcaagaagcaagttgatgagcagctgcagaaagggtacatacgaccaagcacttcaccttggggcgctccggtcatttttgtggagaaaaaggataagacgaagaggatgtgcgtcgattatcgcgcacttaacgaggtcacaatcaagaataaatatcctttaccgcgaatcgacgatttatttgatcaactaaaaggagctaaagtgttttctaagatagacctgcgatcaggctaccaccagttgagaatccgggaagaggatattccgaagacggccttcaccactcggtacgggctatatgagtgcacggttatgtctttcggacttaccaacgcacccgcattcttcatgaatctgatgaacaaagtgttcatggaatttctggacaagtttgttgtggtgttcatcgacgacattcttatctattcaaagtccggagaagaacatgaacaacatctccgtctagtactcgagaagttgaaggagcaccagctatacgccaagttcagcaagtgtgacttctggttgacggaagtcaaatttctgggccatgtcattacaactcagggtgtggcagttgacccatcgaacgtggagtcagttaccaaatggaccccacctaagaccgtgtcgcagattcggagttttctaggactggcaggttattaccgccgattcatcgaaaatttctccaggatcgcccgacccatgactcagttgcttaagaaagatgagaagtttaaatggacagctgagtgcgataagagttttgaggagctcaagaagaagttagtatccgcaccagtattgattctgcccgacccgacgaaagacttccaagtctattgtgatgcatcccgtcacggacttggatgtgtcctaatgcaagagggcagagtggttgcgtatgcctcgcggcagttgcgtccacacgaaggaaattatccaactcatgacttggaattggcagcagtggttcatgctttgaagatctggaggcactatctgattggaaaccgctgcgaagtatatacggaccataagagtctgaaatacatcttcacccaaccggatctaaaccttcgacaacgaagatggttggaactaatcaaagactatgacatgagtattcactaccacccgggtaaagccaatgtggtggcagacgctttaagccggaaaagttactgcactgccctatgcatcgagggcatgtgtgaggaattgcggcaggagtttgagcatctcaacgtgggaattgttgaacacgggttcgtagccgctctggaggcacggcctacgctcgtggatcaagttagagccgctcaagtaaatgatccggaaatagcagaactgaaaaagaacatgagagtcggaaaggctcgggatttccacgaagatgagcatggcaccatctggatgggagaaagattgtgtgtacctgacgacaaggaactgaaggatctgatactcaccgaggctcatcatacccagtactccattcatccaggcagcactaaaatgtaccaagaccttaaagaaaaattttggtgggtcagcatgaggagagaaatagctgaattcgtcgcactctgcgatgtttgccaacgagtgaaagcagagcaccaaagaccagcaggtttactccaacctcttcaaatcccggaatggaaatgggaggagattggaatggactttataacaggactgccccggacatcatcgggacatgattcaatctgggtagtcgtggatcgactcaccaaggtggctcactttatacccgtacataccacctatacgggaaagagactggcagaattgtacctcgcaaggatcatgtgtttgcatggggtacccaggaaaatagtatccgaccgaggtagtcagttcacctcaaagttttggcagaaactgcaggaagaattggggacccgtttgaatttcagcacggcctatcacccgcaaactgatggtcagaccgagcgagtcaatcaaatcttggaggatatgttgagagcttgcgctcttgattttggtggagcttgggacaaaagcttgccatacgcggaattctcgtacaacaacagctaccaggccagtctacagatggcaccgtttgaagctttgtacggccggaagtgccgcacacacctctcttctgggatcagacaggcgaacgtcaactgttcggaacagaagtattagcggaagcagaagagaaagtcagaatcatcagggaaaggttgagaattgctcagtctcgacagaagagctacgcggataaccgtcgaagggagctcatttttgaggcaggagattacgtgtatcttcgtgtcactccgctccggggagtacaccgttttcagacgaaaggctagttggcaccacgcttcgtgggaccatacaaaatcttggaacgaaggggagaagttgcttatcagctagaacttccatccaatatgatcggcatccatgacgtgttccacgtgtcccaattaaagaagtgtttaagggtacctgaagaacaggctgattcggagcacattgatatccaagaggacctaacatatgtggagaagccggttcgtatacttgataccagcgaaaggagaaccagaaataaggtcaccaggttttgccgagttcagtggagtcatcattcagaagaggaagcaacctgggaaagggaagatgagttgaaagccgcccatccgcacctcttcaccagctcctccgaatctcggggccgagattccgtttaa

SEQ ID NO: 22987 - DNA, 8285 bp, Oryza sativa
  Clone ID: TF_OsC359_6289
atgacgaagccgccatccaagatggaggtggagccatccaatgtgataccggtcacattggatgacttcgaaggagaagatcgtaaagctatggaggagtacatcaacgagctcacacgggaggcgttgatgagagcaaacactaggactcgtcaaggcgtgatcatcaagcccgggccacatcccaagctcgctcccgacgtagtaagcaatgatgaggtatcacaatctatccaacaacaaattgcatctacaatagattcatcaatggttgcttttaaagatcagctagatgtaatgtttaaggataaatttgatgggtttttaaggattaagttcggttctcttatggatgattacacattaaaggataaagcctctaccactgctaatcaacctcctatagatcaaacgggtaataaaaccgacagaacggcgttcacggccggtcagaccgggtattaccccggcggttagaccgggtctcaagccggtccgaccgcacatcatgacgccggtcagaccggaccctgggccggtcagaccgacgcaattgttccaatacagggaatagatccgatgactaatactagttatttgtatcactttaaaacatttgatcctcctgtatctactgctacaagtagtccccaagttcccccacatattcctaatgcttataatgatgtttctaggggatatcctcccgatattagacaaggccaatataatcatattgcgccacaaacacaacctattaggccaccgaatccaccgccaagttaacaagggcctaataacatggaggatgtaattcgtgatattattaggaatagattcgggattgaaactaggaatcgtgctagaacttacaaaaagccatatcctgattattatgataatgtgccgtttccttgaaattatagagttcccgaatttgccaagtttagtggtgaggatggtaagaccacatgggagcatgtaggtcaatttttgatgcaatgtggtgaggctaatagtgatacttttaagttgcgcttgttttctttatctttatccagtaatgctttcacatggtttacttttttaccggcaaattctattcatacttgggctcaattagaagaacaatttcatgattatttctatactggagaaactgagcttaggttatgtgatttgacatcggttaagcaaaagtataatgaatctgtcattgattatattaagagatttagagatgttagaaaccgatgttatactttgaatataactgatagagatttggctggtcttgcttttaatggtttggttgctcctcttagagaaagactagacggccaacaatttcttgatgttagtcaactcatgcaaagggctctggctcaagaaagccgggttaaggataatagaaaacttgctagaccatttgacaaaaaacctaatgttaatgtggttgattaccctgaggctagtgatagtgaggaagagggtgatcatgatatttatgttgccgaatggttatggactaataaaaataagccttttgtttgctctaacctaatgccgactcctcgcaaagatcggcaaagtgaggttaaatatagttttgatgtggccaagtgtgataagattttttattatcttttgcaagagaaacaaattagattacctaaagaccatatcataccttctcaagaagagttgaaacgtcgagcatattgtaagtggcatgattctcattctcactctactaatgattgcaatgtgtttcggcgacaggttcaatcggccatagatgacgattgaagttcaccgatggctccaagatgaagcttgatcatgatccttttccggtgaatacaattaatttcaatgataagaaggtgttgattcggccggagcaagccgaatctactatgggaaaggaagtggtcattggtgaaccaagatccaagatgatagtgcccaagaagccggagaaatatgagaagcaaggtagtgggaaaattcacaacaaagggaagagaccaagatcacctcctagggagcgatttggtcattcaccaagacggtcgcattcaccttcatatcattatccacaagacatgtcatggggttcctatccaatgctgccgtcgggttatccctatccttacttcttgccatggggggcgacgccgccaatgttcaatcatatgcctccaatgcaattcaaccaagggtggagaggaccacggaagccaattcatgagcgtttgtcttcaccaaacaatagccgattttatggtaagaatcgggctaatgaagaaaagagggaaggaaagcgcgtcaaggtggaggaaaagacttcggaagtgattactatcaaagtggggtctcatgatgtgccaatacctactggagatggagttgaagtgtccccgaacagaaaatccgaagacggccggtctgaccgccgacccgatagtggtccgaccgacacctcaggccggtctgaccgtgctccggatgtcggtctgaccggcgcgtctggccggtctgaccggtggtctacggctggtctgaccgggctccagcgccggtttgacaggaggattgcaaagggcgatgtggaggcttcatcgtcttcaaacaaaactaatagagggcattatttacctcctggaacagagccgaatcctaggtggatgcctaaggatttgacggctactcaaaagagaaggttgcaacgtcttcgggcccaagagttgagagagaaaaaggccgaagagcaaagggataaaatgttcaatgagttgcgacccacaccggaaaaggaagaataattggttgataaaagtgaatcatctccaaaagaagacatggatatcaacatggtatgtatgttgcctatggagttttgtgctatggatgaagccgaggttgctcaattctcattagatcctaaagacgcggtttttgagaagcccgatgaatcaaaccgtcatatgaagcctctctatctcaaaggccatgttgatgggaagccagtctctaggatgctagtggatggaggtgccgccgtgaacttgatgccgtactcattattcaagaagttagggcgtgaggatgatgagttgaagaagaccaacatgattctcaatggcttcaatggtgaaccaacggaggcaaagggtatcttttcggcggaactcaccgtgggaaacaaaactgtcacgatgggttggaaactatgtcacgtcttccgtccgtataccgtggtgatggccggtcacccacccaaccaccgtggagaaggcatgattgacttcgtggcagagttggcacgcatgacactggtggtgggctaccccaatgcgccagaatacacgacgattcccccgctcagtggcgaacttcctcaccgtgtccgcttggaggtccacggctacgtggggacttgcctcgctaatatggcggttgaggcgtcaggaggcacagcggatcacgcttgtcaggaggcagcctacttgatgatggccagactgcgggagcgccacaactacatcttccacgacacggcgtaccgcttccaccctcgtcgagcccacggtgacgacgtcagttccttccgtccgacagctggcgagaacgacaccacctttggtcacatgtgtactgtgatgaggggattggacaggatgcactcggacctgcacaaggcgaccaaggccttgaatgatgggaagctcatgaggatcgtcgctctgaaggatgagatagcgcgcctgaagaaggagaatgctcagttgaagggtcttccagcaccaggaggagtccggatccgcactacgcctcgtaagaggacgactgcacccgtgcgcatccagctcgcgcccaggaacccagttccgaccgcagctcctgcagcacctccagttccgcccgcagctccggcagttcctgcagctccagctccagctcccgcgttcgatctctccttcgccctagcatcagccgccaggggtccagccagtggtaccggaggttgcttgtttgggatggtctacaccaggactggcaaccgcacgacaggcgagggcagcaacggcgaagaacgcgttgatggtgtgcaccccaacagcgattccggcaatggtccgccaccacttcccgagaatccgacccttgcccaagttatggcacatcagactcagatgatggcagccatgatgcagcagatgcagcagcagcaccagcagatgcaccaaaggatgatgcagcacgccgaacagcagcaccagcagtttggtccccctccccctcagtccaagttgccagagtttctacgcgagaaggtcgcttttgccacacaccagcttcagggtcccgcgtcagcttggtgggacaaccacatggccacccgcccaccgggtactgaagtcacatgggcagagttctgccgtagcttcaggaaggcacaggtgccagatggggtcgtggcacaaaagaagagggaatttcgtgcactccaccagggcaacaggactgtgacagagtacctccacgagttcaatcgcctcgcgcgatatgcaccagaggatgtccgcaccgatgccgagaagcaggagaagttcatggcgggtctggatgatgagctgaccaaccaactgatatccggggattacgctgactttgagaggctggttgacaaggcaattcgtcaggaggaccaacgcaacaagatggacaggaagaggaaggccgcacagttcagggcacctcagggaagtcaccagaggccgcgcttcactcccggacagcagggtggacctaccaccatgatcgtccgtcagcaccgcccgttcaactccagcaactttcaccagggctctagtggcagtcagaaccaccatggaggtcagcccaaccgcggtgcagctccacgcccaccaatggcaccggcacagtcaggcccgcccgcgcaagccaagaaggagactggagcaaaaccagggtcctgcttcaactgtggcgagcttggccacttcgccgacaaatgcccgaagcccaggcgtgccgggccaaggtttatccaggctcgtgtcaaccacgcatctgcagaggaggcacaaacagcaccggaggtcgtactggtactttttgattctggtgcaacgcattctttcatttcaaagaaatttgtggggaggtatgggttaaggaaagaagagcttagcacaccaatgagagttcataccccgagaaatagttcaacctcagtcagttttagcccttcagtgctaatagaaatccaaagatcaccatttctagccaacctcattcttctcgaatccaaagacctagatgtcattcttgggatggattggctgaccaagtttaagggggtcattgattgtgcgaatcgcacagtcaccttgaccaacgagaagggagaaaccgtggtgtacaaatcaccagactcaccaaagcaaggagtctccttgaatcagattgaagcggaaatcccagtggacaccgtggagaagaacttgagaaaattggaagatatacccatagtctgcgagtatccggaagtgttccccgaagacctcactaccatgccacccaagagagagattgaattccggattgacttggcaccgggaactgctccaatctataagagaccgtacagaatggcggccaacgaattagcagaggtcaagaagcaagttgatgagcagctgcagaaagggtacattcgaccaagcacttcaccttggggcgctccggtcatttttgtggagaaaaaggataagacgaagaggatgtgcgtcgattatcgcgcacttaacgaggtcacaatcaagaataaatatcctttaccgcggatcgatgatttgtttgatcaactgaaaggagctagagtgttttctaagatagacctgcgatcaggctaccaccagttgagaatccgggaagaggatattccgaagacggccttcaccactcggtacgggctatatgagtgcacggttatgtctttcggacttaccaacgcacccgcattcttcatgaatctgatgaacaaagtgttcatggaatttctggacaagtttattgtggtgttcatcgacgacattcttatctattcaaagtctgaagaagaacatgaacaacatctccgtctagtactcgagaagttgaaggagcaccagctatacgccaagttcagcaagtgtgacttctggttgacggaagtcaaatttctgggccatgtcattacagctcagggtgtggcagttgatccatcgaacgtggagtcagttaccaaatggaccccaccgaagaccgtgtcgcagattcggagttttcttggacttgcgggttattaccgtcgattcatcgaaaatttctccagaatcgcccgacccatgactcagttgcttaagaaagatgagaagtttaaatggacagccgagtgcgataagagcttcgaggagctcaagaagaaattagtatccgcaccagttttgattctgcccgacccgacgaaagacttccaagtctattgtgatgcatcccgtcacggacttggatgcgtcctaatgcaagagggcagagtggttgcgtatgcctcgcggcagttgcgtccacacgaagggaattatccaactcatgacttggaattggcagcagtggttcatgctttgaagatctggaggcactatctgattggcaaccgctgcgaagtatatacggaccataagaactatgacatgagcattcactaccacccgggaaaggccaatgtagtggcagacgcattaagccggaaaagttactgcactgccctatgcaccgagggcatgtgtgaggaattgcggcaggagtttgagcatctcaacgtgggtattgttgaacacgggttcgtagccgctctggaagcacggcctacgctcgtggatcaagtcagagcagctcaagtaaatgattctgaaatagtagagctgaaaaagaatatgagagtcggaaaagcccgggatttccacgaggatgaacacggcacaatcaggatgggagaaagattgtgtgtacccgacgacaaggaactgaaggatctgatactcaccgaggctcatcagacccagtactccattcatccaggcagcactaaaatgtatcaagacctcaaagaaaagttttggtgggtcagcatgaggagagaaatagctgaattcgtcgcactctgcgatgtttgccagcgagtgaaggcagagcaccaaagaccagcaggtttactccaacctcttcaaatcccggaatggaaatgggaggagattggaatggactttataacgggactgccccggacatcatcgggacatgattcaatctgggtagtcgtggatcgactcaccaaggtggctcactttataccagtacataccacctatacgggaaagagattggcagaattgtacctcgcaaggatcatgtgtttgcatggggtacccaagaagatagtatccaaccgaggtagtcagttcacctcaaagttttggcagatactgcaggaagaattggggacccgtttaaatttcagcacggcctatcacccgcaaactgatggtcagaccgagcgagtcaatcaaatcttggaagatatgttgagagcttgcgctcttgattttggtggagcttgggacaaaagcttaccatatgcggaattctcgtacaacaacagctaccaggccagtctacagatggcaccgtttgaagctttatacggccggaagtgccgcacacctctcttctgggatcagacaggcgaacgtcaactgttcggaatagaagtattagcggaagcagaacagaaagtcagaatcatcagggaaagattgaggattgctcagtctcgacagaagagctacgcggataaccgtcgaagggagctcacttttgaggcaggagattacgtgtatcttcgtgtcactccgctccgaggagtacaccgttttcagacgaaaggcaagctggcaccacgcttcgtgggaccatacaaaattttggaacgaaggggagaagttgcttatcagctagaacttccatccaacatgatcggcatccatgacgtgttccatgtgtcccaattaaagaaatgcttaagggtacctgaagaacaggctgattcggaacacattgatatccaagaggacctaacatatgtggagaagccggttcgtatacttgataccagtgaaaggagaaccagaaacaaggtcaccaggttttgctga

SEQ ID NO: 22988 - DNA, 5450 bp, Oryza sativa
  Clone ID: TF_OsC359_6355
atggccggtcacccacccaaccaccgcggagaaggcatgatcgatttcgtggcagagttggcacgcatgacactggtggtgggctaccccgacgcgccggagtacacgaccattccaccgctcagtggcgagcttcctcaccgtgtccgcttggaggtccatggttacgtggggacttgcctcgccaacatggcggtcgaggcatctggaggcacagcagatcacgcctgtcaggaggcagcctacttgatgatggccagactacgggagcgccacaactacatcttccacgacacggcgtaccgctaccaccccagtcgagccaacggtgatggcgtcagctccttccgtccgacagctggcgagaacgacaccaccttcggtcacatgtgtgctgtgatgaggggattggacaggatgcactcggacctgcacaaggcgaccaaggccttgaacgatgggaagctcatgaggatcgtcgctttgaaggacgagatagcgcgcctgaagaaggagaacgctcagctaaagggtcttccagcgccaggaggagtccggatccgcaccacgccccgcaagacgacgacggcacccgtgcgcatccagcttgcgcccagaaacccacctccagcagcagctcccgcagcacctccagttctgcccgcagttcctgcagctccagctccagctccagctccagctcccgcgtccgctctctccttcgctccagcgtcagccgccagaggtccagccagtggcaccgggggttggttgtctgctactcccagtggcagcagcgatctcagcagcagcagctccagtggctcgcagtcaggcagcggcgagacgtatctgccaggctccaggagtcgctcagagggacctgatggtctacaccaggactggcaaccgcacgacaggcgagggcagcaacggcgaagaacgcgttgatggcgtgcaccccaacagtgattccggcaatggtccgccaccacttcccgagaatccgacccttgcccaagttatggcgcatcagactcagatgatggcagccatgatgcagcagatgcagcaacaacaccagcaaatgcaccagaggatgatgcagcacgtcgaacagcagcaccagcactttggtccccctccccctcaatccaaattgcctgagttcctaggagtcaggccacccaccttctccagcaccaccaaccctatggaggcaaatgactggctccatgcaatagagaagaagctgaatctcctgcagtgcaatgatcaggagaaggtcgctttcgccacacaccagcttcagggtcctgcgtcagcttggtgggacaaccacatggccacccgcccaccgggtactgaagtcacatgggcagagttctgccgtagcttcaggaaggcacaagtgccagatggggtcgtggcacaaaagaagagggaatttcgtgcactccatcagggtaacaggacggtgacagagtacctccacgagttcaatcgcctcactgcgatatgcaccataggatgttcgtaccgaccccgataagcaggagaagttcatggcgggcctggatgatgagctgaccaaccagctgatatccgggtactacgctgactttgagaggctggttgacaaggcaatccgtcaggaggaccaacgcaacaagatggacaggaagaggaaggccgctcagttcagggcacatcagggaagtcaccagaggccgcgcttcactcccggacagcagggtggacctaccaccatgatcgtccgtcagcaccgcccgttcaaccctagcaacttctaccagggcaccagtgacagtcagaaccaccatggaggtcagcccaaccgcggtgcagctccacgcccaccagtggcatcggcacagtcaggccagcccgcgcaagccaagaaggagacggaagcaaaaccagggtcctgcttcaactgtggcgagcttggccacttcgctgacaaatgcccgaagcctaggcgtgccgggccaaggtttatccaggctcgtgtcaaccacgcatctgcggaggaggcacaagcagcaccagaggttgtactgggtacgtttcctgttaactcaatccctgcaacagtactttttgattctggtgcaacgcattctttcatctcaaagaaatttgtcgggatgcatgggttaataagagaggaacttagcacaccgatgcgggttcataccccagggaatagctccacttcggttcaattcagcccttctataacaatagaaattcaaaggtcaccggttctagccaacctcatccttctcgaatccaaagacctagatgtcattcttgggatggattggctgaccaagtttaagggagtcatcgattgtgcgaatcgcacagtcaccctgaccaacgagaagggagaaaccgtggtgtacaaatctctagtctcgccaaagaaaggagtctcgttgaatcagattgagacggaaatcccagtggacaccgtagagaagaacttgagaaaattggatgatatacccatagtctgcgagtatccagaggtgttccccgaagacctcactaccatgccacccaagagagagattgaattccggattgatttggcaccgggaaccgctccaatctataagagaccgtacagaatggcggccaacgaattaacggaggtcaagaagcaagttgatgaacagctgcagaaagggtacatacgaccaagcacttcaccttggggcgctccggtcatttttgtggagaaaaaggataagacgaagaggatgtgcgtcgattatcgcgcacttaacgaggtcacaatcaagaataaatatcctttgccgcgaatcgacgatttatttgatcaactgaaaggggctaaagtgttttctaagatagacctgcgctcaggctaccaccagttgagaatccgggaagaggatatcccgaagacggccttcaccactcggtacgggttatatgagtgcacggttatgtccttcggacttactaacgcgcctgcattcttcatgaatctgatgaacaaagtgttcatagaatttctggacaagtttgttgtggtattcatcgacgacatacttatctactcaaaatccgaagaagaacatgaacaacatctccgtctggtactcgagaagttgaaggagcaccagctatacgccaagttcagcaagtgtgatttctggttgacggaagtcaaatttctgggtcatgtcattacagctcagggtgtggcagtcgacccatcgaacgtggagtcagttaccaagtggaccccaccgaagactgtgtcgcagattcgaagttttctaggactggcaggttattaccgtcgattcatcggaaacttctccagaatcgcccgacccatgactcagttgcttaagaaagatgagaaatttaaatggacagcggagtgcgataagagctttgaggagctcaagaagaaattagtatccgcaccagttttgattctgcccgaccagatgaaagacttccaagtttattgcgatgcatcccgtcacggacttggatgtgtcctaatgcaagagggcagagtggttgcatatgcctcgcggcagttgcgtccacacgaaggaaattatccaactcatgacttggagttggcagcggtggttcatgctttgaagatctggaggcactatctgatcggcaaccgctgcgaagtatatacggaccataaaagtctgaaatacatcttcacccaaccggacctaaactttcgacaacgaagatggttggagctaatcaaagactatgacatgagtattcactaccacccgggtaaggccaatgtggtggcagacgctttaagccggaaaagttactgcactgctctatgcatcgagagcatgtgtgaggaattgcggcaggagtttgaacatctcaacataggaattgttgaacacgggttcgtagccgctctggaggcacggcctacgctcgtggatcaagtcagagccgctcaagtaaatgatccggaaatagcagaactgaaaaagaacatgagagtcggaaaggctcgggatttccttaaggatgagcatggcacaatctggatgggagaaagattgtgtgtacctgacgacaaggaattgaaggatctgatactcaccgaggctcatcagacccagtactccattcacccaggcagcaccaaaatgtatcaagacctcaaagaaaagttttggtgggtcagcatgaggagagaaatagctgaattcgtcgcactctgcgatgtttgccaacgagtgaaggcagagcaccaaagacccacaggtttactccaacctcttcaaatcccggaatggaaatgggaagaaattggaatggactttataacgggactgccccggacatcgtcgggtcacgattcgatctgagtagtcgtggatcgactcactaaggttgctcacttcataccagtacataccacatatacgggcaaaaggttggcggagctttacctttcgagaatcatgtgcctacatggagtactcaaaaagattgtatctgaccgagggagtcagttcacctcaaaattctggcagaagctgcaggaagaattggggacccgtttaaatttcagcacggcctatcacccgcaaactgatggccagaccgagcgggtcaatcaaatcttggaagatatgttgagagcttgcgctcttgattttggtggagcttgggacaaaagcttgccatatgcggaattctcgtacaacaacagctaccaggccagtctacagatggcaccgtttgaagctttatacggccggaagtgccgcacacctctcttctgggatcagacaggcgaacgtcaactattcggaacagaagtattagcggaagcagaagagaaagtcagaatcatcagggaaaggttgaggattgctcagtctcgacagaagagctacgcggataaccgtcgaagggagctcacttttgaggcaggagatcacgtgtaccttcgcgtcactccgctccggggagtacaccgttttcagacgaaaggcaagttggcaccacgcttcgtgggaccatacaaaatcttggaacgaaggggagaagtggcttatcagctagaacttccatccaacatgatcggcatccatgacgtgttccacgtgtcccaactaaagaagtgcttaagggtacctgaagaacaggctgattcggaacacattgatatccaggaagacctaacttatgttgagaagccggttcgtatactggataccagcgaaaggagaaccagaaacaaggtcacccggttttgccgagttcagtggagtcatcattcggaagaggaagcaacctgggaaagggaagatgagttgaaagccgcccatccgcacctcttcaccagctcctccgaatctcggggccgagattccgtt

SEQ ID NO: 22989 - DNA, 4083 bp, Oryza sativa; identical to SEQ ID NO: 13821
  Clone ID: TF_OsC359_6498

SEQ ID NO: 22990 - DNA, 639 bp, Oryza sativa; identical to SEQ ID NO: 13778
  Clone ID: TF_OsC359_6508

SEQ ID NO: 22991 - DNA, 3387 bp, Oryza sativa; identical to SEQ ID NO: 13808
  Clone ID: TF_OsC359_6569

SEQ ID NO: 22992 - DNA, 5468 bp, Oryza sativa; identical to SEQ ID NO: 13823
  Clone ID: TF_OsC359_6570

SEQ ID NO: 22993 - DNA, 2670 bp, Oryza sativa; identical to SEQ ID NO: 13878
  Clone ID: TF_OsC359_6576

SEQ ID NO: 22994 - DNA, 3477 bp, Oryza sativa; identical to SEQ ID NO: 13804
  Clone ID: TF_OsC359_6650

SEQ ID NO: 22995 - DNA, 5460 bp, Oryza sativa; identical to SEQ ID NO: 13834
  Clone ID: TF_OsC359_6654

SEQ ID NO: 22996 - DNA, 5567 bp, Oryza sativa
  Clone ID: TF_OsC359_6693
atggccggccacccacccaaccaccgcggagaaggcatgattgactttgtggcagagttggcacgtatgacgctggtggtgggctaccccaacgcgccagagtacacgactgttccaccgctcagtggcgagcttcctcaccgtgttcgcctggaggttcacggctacgtgggtacctgcctagctaatatggtggttgaggcatccggaggcacagcagatcacgcctgtcaggaggcagcatacctgatgatggccagactacgggagcgccacaactacatcttccacgacacggcgtaccgatttcaccctcgtcgagccagcggtgatgatgtcagtactttccgtccgacagccggcgagaacgacactacctttggtcacatgtgtgctgtgatgaggggattggataggatgcactcagacttgcacaaggcgtccaaggccttgaatgatgggaagctcatgaggatcgtcgctctgaaggacgagatagcgcgcctgaagagggataatgctcagttaaagggtcttcccgcgccaggaggagtccggatccgcactacgccccacaagaccacgactgcacccgtgcgcatccagcttgcgcccaagaacccacctccatcagcagctcccgcagcacctccagttccgctcgcagctccggtagttcctgcagctccagtaccagctctagctcccgttcacgtgtcagctcccgcgtctgctctctccttcgctccagcatcagccgctaggggtccagccagtggcaacggaggttggttgtctgctactcccagtggcagctgcgatctcagcagcagtagatccagtggctcagagctgggcagcggcgagacttatctgccaggctccaggagtcgctcagagggacctggtcttttcctccagatggtctacaccaggaatggtagccgcgcaacaggtgagggcagcaacggcgaagagcgcactgagggtgtgcatcccaacagcaattccggcaatggtccgccaccacttcccgagaatccgacgctagcccaagtgatggcacatcagacttagatgatggcagccatgatgcagcagatgcagcagcaacaccagcagatgcaccagcggatgctgcagcacgccgaacagcagcatcagtagtttggtccccctccccctcagtccaagttgctagagtttctacgtgtcaggccacccaccttctccagcaccaccaaccctatggaggcgaatgactggctccatgccatagagaagaagctgaatctcctgcagtgcaatgatcaggagaaggttgctttcgccacacaccagcttcaaggtcctgcgtcagcttggtgggacaatcacatggccacccgcccgccaggcactgaagtcacttgggaagagttctgtcgtagcttcaggaaggcgcaggtggcagatggggtcgtggcacaaaagaagagggaattccgggcactccattagggcaacagaactgtgacggagtatctccatgagttcaatcacctcgcgcgatatgcaccggaggatgtccgcactgacgccgagaagcaggaaaaattcctagcaggtctggatgatgagctaaccaaccagttgatatctggagattacgccgatttcgaaaggctggtggacaaggcaatccgtcaggatgatcaacgcaacaagatggacaggaagaggaaggccgctcagttcagggcacctcagggaagtcaccagaggccgcgcttcgctcccgggcagcagggtggacctaccaccatgatcgtccgccagtaccgcccgttcaaccctagcaactttccccagggcgccagtggcagtcagaaccaccatggaggtcagcccaaccgcggtgcagctccacgcccaccaacggcaccggcacagtcaggcccgtccgcgcaagccaagagggagactggagcaaaaccagggtcctgcttcaactgtggcgagcttggccacttcgctgacaaatgcccgaagcctaggcgtgccgggccaaggtttatccaggctcgtgtcaaccacgcatctgcggaggaggcacaagcagcaccagaggtcgtactgggtacgtttcctgttaactcaatccctgcaacaatactttttgattctggtgcaacacattcgttcatttcaaagaagtttgtcgggatgcatgggttaaggaaagaagagcttagcacaccaatgagggttcatacctcgggaaatagctcaacctcagtcagttttagcccttcagtgctaatagaaatccaaagatcaccatttctagccaacctcattcttctcgaatccaaagacctagatgtcattcttgggatggattggctgaccaagtttaagggagtcatcgattgtgcgaatcgcacagtcaccttgaccaacgagaagggagaaacagcagtgtacaaatcaccagactcaccaaagcaaggggtctctttgaatcagattgaggcggaaatcccagtggacaccgtgaagaagaatttgaggaaattggaagatatacccatagtctgcgagtatccagaagtgttccccgaagaccttactaccatgccacccaagagagagattgaattccggattgacttggcaccgggaaccgctccaatttacaagagaccgtacagaatggcggccaacgaactagcagaggtcaagaagcaggttgatgagcagctgcagaaagggtacattcgaccaagtacttcaccttggggtgctccggtcatttttgtggagaaaaaggataagacgaagaggatgtgcgttgattatcgcgcactcaacgaggtcacaatcaagaacaaatatcctttgccgcgaatcgatgatttgtttgatcaactgaaaggagctaaagtgttttctaagatagacctgcgatcaggctaccaccagttgagaattcgggaagaggatattccaaagacggccttcaccactcggtacgggctatatgagtgcacggttatgtctttcggacttaccaacgcacccgcattcttcatgaatctgatgaacaaagtgttcatggaatttctggacaagtttgttgtggtattcatcgacgacatacttatctattcaaagtccgaagaagaacatgagcaacatctccgtctggtactcgagaagttgaaggagcaccagctatacgccaagttcagcaagtgtgacttctggttgacggaagtcaaatttctgggccatgtcattacagctcagggtgtggcagttgatccatcgaacgtagagtcagttaccaaatggatcccaccgaagaccgtgtcgcagattcgaagttttctaggactggcaggttattaccgccgattcatcgaaaacttctccaggatcgcccgacccatgactcagttgcttaagaaagatgagaagtttaaatggacagctgagtgcgataagagttttgaggagctcaagaagaaattagtatccgcaccagttttgattctgcccgaccagatgaaagacttccaagtctattgcgatgcatcccgtcacggacttggatgtgtcctaatgcaagagggcagagtggttgcgtatgcctcgcggcagttgcgtccacacgaagggaattatccaactcatgacctggaattggcagcagtggttcatgctttgaaaatctggaggcactatctgattggcaaccgctgcgaagtatatacagaccataagagtctgaaatacatcttcacccaaccggacctaaatctccgacaacgaagatggttggaactaatcaaagactatgacatgagcattcactaccacccgggtaaagccaatgtggtggcagacgcattaagcaggaaaagttactgcactgccctatgcatcgagggcatgtgtgaggaattgcggcaggagtttgagcatctcaacgtgggaattgttgaacacgggttcgtagccgctctggaggcacggcctacgctcgtggatcaagtcagagcagttcaagtaaatgattctgaaatagcagagctgaaaaagaacatgagagtcggaaaaacccgggatttccacgaagatgaacacggcacaatctggttgggagaaagattgtgtgtacctgacgacaaggaactgaaggatctgatactcaccgaggctcatcagacccagtactccattcatccaggcagcaccaaaatgtatcaagacctcaaagaaaagttttggtgggtcagcatgaggagagaaaagctgaattcgtcgcactctgcgatgtttgtcaacgagtgaaggcagagcaccaaagaccagcaggtttactccaacctcttcaaatcccagaatggaaatgggaggagattggaatggactttataatagcactgccccggacatcatcgggtcacgattcaatctgggtagtcgtggatcgactcactaaggttgctcacttcataccagtacataccacgtatacgggcaaaaggttggcggagctctacctctcgagaatcatgtgtctacatggagtacccaaaaagattgtatctgatcgagggagtcagttcacctcaaaattctggcagaagctgcaggaagaattggggacccgtttaaatttcagcacggcctatcacccacaaactgatggtcagaccgagcgagtcaatcaaatcttggaagatatgttgagagcttgcgctcttgattttggtggagcttgggacaaaaacttgccatatgcggaattctcgtacaacaacagctaccaggccagtctacagatggcaccgtttgaagctttatacggccggaagtgccgcacacctctcttctgggatcagacaggcaagcgtcaactgttcgggacagaggtattagcggaagcagaagagaaagtcagaatcatcagggaaaggttgaggattgcccaatcttgacagaagagctacgcggataaccgccgaagggagctcacttttgaggcaggggattacgtgtatcttcgtgtcactccgctccggggagtacaccgttttcagacgaaaggcaagttggcaccacgcttcgtgggaccctacaaaatcttggaacgaaggggagaagttgcttatcagttagaacttccatccaatatgatcggcatccatgacgtgttccacgtgtcccaactaaagaagtgcttaagagtacctgaagaacaggctgactcggagcatattgatatccaggaggacctgacatatgtggagaagccggttcgtatacttgataccagcgaaagaagaaccagaaacaaggtcaccaggccgaggcccagccaggccgccccgactccctcctctcccggggtcgccgacaggtggggcccacctgtcgggtcctcccccaacctcccgccgcccgcgccggtcaccacccctccgtatccaccgtcgccgcacccatcctcgccgatttacccgagcccacgtcacgccccccgcgcccacgccatcgttgcgccctctctcccctga

SEQ ID NO: 22997 - DNA, 3916 bp, Oryza sativa
  Clone ID: TF_OsC359_6695
atgggttgcaagatggccggtcacccacccaaccaccgcggagaaggcatgatcgactttgtggcagagttggcacgcatgacactggtggtaggctaccccaacgcgccagagtacacgacgattccaccgctcagtggcgagcttcctcaccgtgttcgcttggaggtccacggctacgtgggtacttgcctagctaacatggtggtcgaggcagctggaggcacagcagatcacgcctgtcaggaggcagcatacctgatgatggccagactacgagagcgccacaactacatcttccacgacacggcataccggtttcaccctcgtcgagccagcaatgatgatgtcagttccttccgtccgacagctggcgagaacgacaccacctttggtcacatgtgtgctgtgatgaggggattggacaggatgcactcggacctgcacaaggcgaccaaggccttgaacgatgggaagctcatgaggatcgtcgctctgaaggacgagataacgcgcctgaagagggagaacgcccagttaaagggtcttcccgcgccaggaggagtctggatccgcactacgccccgcaagactacgacggcacccgtgcgcatccagcttgcgcccaggaacccacctccatcagcagctcccgcagcacctccagttccacccacagttcctgcagctccagctccagctcccgcgtccgctctctccttcgctccagcatcagccgccagaggtccagccagtggcaccggaggttgtttgtttgggatggtctacaccaggaatggtagccgcgcaacaggcgagggcagcaacggcgaagagcgcactgatggggcgcacccccacagcgattctggcaatggtccgccaccacttcccgagaatccgacccttgcccaagttatggcacatcagactcagatgatggcagccatgatgcagcagatgcagcagcagcaccagcagatgcaccagaggatgatgcagcacgtcgaacagcagcaccagcactttggtccccctccccctcagtccaagttgcctgagttcttacgtgtcaggccacccaccttctccagcaccaccaaccctatggaggcgaatgactggctccatgcaatagagaagaagctgaatctcctgcagtgcaatgatcaggagaaggtcgcttttgccacacaccagcttcaaggtcctgcgtcggcttggtgggacaaccacatggccacccgcccaccgggtactgaagtcacatgggcagagttctgccgtagcttcaggaaggcacaggtgccagatggggtcgtggcacaaaagaagagggaatttcgcgcactccatcagggcaacaggactgtgacagagtacctccacgagttcaatcgcctcacgcgatatgcaccagaggatgtccgtaccgacgccgagaagcaggagaagttcatggcgggtctggatgacgagctgaccaaccaactgatatctggggactacgccgactttgagaggctagtcgacaaggcaattcgtcaggaggatcaacgcaacaagatggataggaagaggaaggccacacagttcagggcacctcagggaagtcaccagaggccgcgcttcactcccggacagcagggtggacctaccaccatgatcgtccgccagtaccgcccgttcaatcctagcaactttccccagggctctagtggcagtcagaaccaccatggaggtcaatccaaccgcggtgcagctccacgcccaccaatggcaccggcacagtcaggcccgtccgcgcaagctaagaaggagactggggcaaaaccagggtcctgcttcaactgtggcgagcttggccacttcgctgacaaatgcccgaagcctaggcgtgccgggccaaggtttatccaggctcgtgtcaaccacgcatctgcggaggaggcacaagcagcaccagaggtcgtactgggtacgttccctgttaactcgatccctgcaatagtactttttgattctggtgcgacgcattctttcatttcaaagaaatttgtcgggatgcatgggttaataagagagaaacttagcacaccgatgcgggttcataccccagggaatagctccacttcggttcaattcagcccttctataacaatagaaattcaaagatcaccatttctagccaacctcattcttctcgaatccaaagatctagatgtcattcttgggatggattggctgaccaagttcaagggagtcatcgattgtgcgaatcgcacagtcaccttgaccaacgagaaggggaaaacggtagtgtacaaatcaccagactcaccaaagcaaggagtctccttgaatcagattgaagcggaaatcccagtggacaccgtggagaagaatttgaggaaattggaagacatacccatagtctccgagtacccagaagtgttccccgaagacctcactaccatgccacccaagagagagattgaattccggattgacttggcaccgggaaccgctccaatttacaagagaccgtacagaatggcggccaacgaattagccgaggtcaagaagcaggttgatgagcagctgcagaaagggtacattcgaccaagtacttcaccgtggggtgctccggtcatttttgtggagaaaaaggataagacgaagaggatgtgcgttgattatcgtgcactcaacgaggtcacaatcaagaacaaatatcccttgccgcgaatcgacgatttatttgatcaactgaaaggagctaaagtgttttctaagatagacctgcgatcaggctaccaccagttgagaattcgggaagaggatattccgaagacggccttcaccactcggtacgggctatatgagtgcacggttatgtccttcggacttaccaacgcacccgcattcttcatgaatctgatgaacaaagtgttcatggaatttctggacaagtttgttgtggtgttcatcgacgacattcttatctattcaaagtccgaagaagagcatgaacaacatctccgtctggtactcgagaagttgaaggagcaccagctatacgccaagttcagcaagtgtgacttctggatgacggaagtcaaatttctgggtcatgtcattacagctcagggtgtggcagtcgacccatcgaacgtagagtcagtcaccaagtggaccccaccgaagaccgtgtcacagattcgaagttttctaggactggcaggttattaccgccgattcatcgaaaacttctccagaatcgcccgacccatgactcagttgcttaagaaagatgagaagtttaaatggacagctgagtgcgataagagtttcgaggagctcaagaagaaattagtatccgcactagttttgattctgcctgaccagatgaaagacttccaagtctattgcgatgcatcccgtcacggacttggatgtgtcctaatgcaagagggcagagtggttgcgtatgcctcgcggcagttgcgtccacacgaaggaaattatccaactcatgacttggaattggcagcagtggttcatgctttgaagatctggaggcactatgtggaattttcagagctctagaaataattttaaccaattaaaattgagcaagcaatattttattccagggaaaatcctttttcctttttctttttctttttcctctctttttcctcctttttgtcaaatgggccgtcggcccatttctccttttcttcccccccctctctgttgggccggccgcaggccgaggcccagcccggcagccggccgcccgcctccctccctcccggggtcgccgacaggtgggacccacctgtcagacccgtttcccacctcccgccgatcccggcgcgccgccgcgcccgcaaccgtcgccgcgcccacg

SEQ ID NO: 22998 - DNA, 4818 bp, Oryza sativa; identical to SEQ ID NO: 13888
  Clone ID: TF_OsC359_6707

SEQ ID NO: 22999 - DNA, 5334 bp, Oryza sativa
  Clone ID: TF_OsC359_6721
atggccggtcacccacccaaccaccgcggagaaggcatgatcgatttcgtggcagagttagcacgtatgacactggtggtgggctaccccaacgcgccggagtacacgacgattccgccgctcagtggcgagcttcctcaccgtgtccacttggaggtccatggctacgtggggacttgcctcgctaacatggcggtcgaggcatctggaggcacagcagatcacgcctgtcaggaggcagcctacttgatgatggccagaatacgggagcgccacgactacatcttccacgacacggcgtaccgctaccacccccgtcgagcccatggtgatggcgtcagctccttccgtccgacagctggcgagaacgacaccacctttggtcacatgtgtgctgtgatgagtggattggacaggatgcactcggacctgcacaaggcgaccaaagccttgaacgatgggaagctcatgaggatcgtcgccctgaaggacgagatagcgcgcctgaagaaggagaacgctcagctaaagggtcttccagcgccaggaggagtccggatccgcaccacgccccgcaagacgacgactgcacctgtgcgtatccagcttgcgcccaggaacccacctccagcagcagctcccgcagcaccttcagttccgcccgcagttcctgcagctccagttccagctcccgcattcactctctccttcgctccagcatcagccgccagaggtccagccagtggtaccggaggctgcttgtttgggatggtctacaccaggactggcaaccgcacgacaggcgagggcagcaacggcgaagaacgcgtggatggtgtgcaccccaacagtgattctggcaatggtccgccaccacttcccgagaatccgacgcttgcccaagttatggcacatcagactcagatgatggcagccatgatgcagcagatgcagcagcagcaccagcagatgcaccaaaggatgatgcagcacgccgagcagcagcaccagcagtttggtccccctccccctcagtccaagttgccagagtttctacgcgtcaggccacccaccttctccagcaccaccaaccccatggaggcgaacgactggctccatgccatagagaagaagctgaatctcctgcagtgcaatgatcaggagaaggtcgctttcgccacacaccagcttcagggtcccgcgtcagcttggtgggacaaccacatggccacccgcccaccgggtactgaagtcacatgggcagagttctgccgtagcttcaggaaggcacaggtgccagatggggtcgtggcacaaaagaagagggaattccgggcgctccatcagggcaacaggactgtgacagagtacctccacgagttcaatcgcctcgcgcgatatgcaccagaggatgtccgcaccgacgccgagaagcaggagaagttcatggcgggtttggatgatgagctgaccaaccaactgatatctggggactacgctgactttgagaggctggtcgacaaggcaatccgccaggaggatcaacgcaacaagatcgacaggaagaggaaggccgctcagttcagggcacctcagggaagtcaccagaggccgcgcttcactcccgggcagcagggtggacctaccaccatgatcgtccgtcagcaccgcccgttcaaccctagcaacttccaccagggcactagtggcagtcagaaccaccatggaggtcagcccaaccgcggtgcagctccacgcccatcagtggcaccggcacagtcaggccagcccgcgcaagccaagaaggagactggagcaaaaccagggtcctgcttcaactgtggcgagcttggtcacttcgctgacaaatgcccaaagcccaggcgtgccgggccaaggtttatccaggctcgtgtcaaccacgcgtctgcagaggaggcacaaacagcaccggaggtcgtactgggtacgtttcctgttaactcaatccctgcaacagtacttttcgattctggtgcaacgcattctttcatttcaaagaaatttgtggggaggtatgggttaaggaaagaagagcttagcacaccaatgagggttcataccccgggaaatagttcaacctcagtcagttttagcccctcagtgctaatagaaatccaaagatcaccatttctagccaacctcattcttcttgaatccaaagacctagatgtcattcttgggatggattggctgaccaagtttaagggagtcatcgattgtgcgaatcgcacagtcaccttgaccaacgagaagggagaaacagtggtgtacaaatctctagtctcaccaaagaaaggggtctcgttgaatcagattgagacggaaatcccagtggataccgtagagaagaacttgagaaaattggaagatatacccatagtctgcgagtatccagaagtgttccccgaagacctcactaccatgccacccaagagagagattgaattccggattgacttggcaccgggaaccgctccaatctataagagaccatacagaatggcggccaacgaattagcagaggtcaagaagcaagttgatgagcagctgcagaaagggtacatacgaccaagcacttcaccttggggcgctccggtcatttttgtggagaaaaaggataagacgaagaggatgtgcgttgattatcgcgcactcaacgaggtcacaatcaagaataaatatcctttgccgcgaatcgacgatttatttgatcaactgaaaggagctaaagtattttctaagatagacctgcgatcaggctaccaccagctgagaatccgggaagaggatattccgaagacggccttcaccactcggtacgggctatatgagtgcacggttatgtctttcggacttaccaacgcacccgcattcttcatgaatctgatgaacaaagtgttcatggaatttctggacaagtttgttgtggtattcatcgacgacatacttatctactcaaaatccgaggaagaacatgagcaacatctccgtctggtactcgaaaagttgaaggagcaccagctatacgccaagttcagcaagtgtgacttctggttgacagaagtcaaatttctgggtcatgtcattacagctcagggtgtggcagtcgacccatcgaacgtggagtcagttaccaaatggaccccacctaagaccgtgtcgcagattcggagttttcttggacttgcgggttattaccgccgattcatcgaaaacttctccaggatcgcccgacccatgactcagttgcttaagaaggatgagaagtttaaatggacagctgagtgcgataagagctttgaggagctcaagaagaaattagtatccacaccggttttgattctgcccgaccagatgaaagacttccaagtctattgtgatgcatcccgtcacggactgggatgtgtcctaatgcaagagggcagagtggttgcatatgcctcgcggcagttgcgtccacacgaaggaaattatccaactcatgacttggaattggcagcagtggttcatgctttgaagatctggaggcactatctgattggcaaccgctgcgaagtatatacggaccataagagtctgaaatacatcttcacccaaccggacctaaatctccgacaacgaagatggttggaactaatcaaagactatgacatgagtattcactaccacccgggtaaagccaatgtggtggcagacgctttaagccggaaaagttactgcactgccctatgcatcgagggcatgtgtgaggaattgcggcaggagtttgaacatctcaacatgggaattgttgaacacgggtttgtagccgctctggaggcacggcccactctcgtggatcaagtcagagcagctcaagtaaatgattctgagatagcagagctgaaaaagaatatgagagtcggaaaagcccgggaattccacgaagatgagcatggcacaatctggatgggagaaagattgtgtgtacctgacgacaaggaactgaaggatctgatactcaccgaggctcatcagacccagtattcaattcatcccggcagtactaaaatgtaccaggacctcaaagagaaattctggtgggtcagcatgaggagagaaatagctgaattcgtcgcactctgcgatgtttgccaacgggtgaaggcagagcaccaaagaccagcaggtttactccaacctcttcaaatcccggaatggaaatgggaggagattggaatggactttataacaggactgccccggacatcatcgggtcacgattcaatctgggtagtcgtggatcgactcactaaggttgctcacttcataccagtacataccacgtatacgggcaaaaggttggcggagctctacctctcgagaatcatgtgtctacatggggtacccaaaaagattgtatctgatcgagggagtcagttcacttcaaagttctggcagaaactacaagaagaattggggacccgtttaaatttcagcacggcctatcacccgcaaactgatggtcagaccgagcgagtcaatcaaatcttggaagatatgttgagagcttgcgctcttgattttggtggagcttgggacaaaagcttgccatatgcggaattctcgtacaacaacagctaccaggccagtctacagatggcaccgtttgaagctttatacggccggaagtgccgcacacctctcttctgggatcagacaggcgaacgtcaactgttcggaacagaagtattagcggaagcagaagagaaagtcagaatcatcagggaaaggttgaggattgctcagtctcgacagaagagctacgtggataaccgtcgaagggagctcacttttgaggcaggagattacgtgtatcttcgtgtcactccgctccggggagtacaccgttttcagacgaaaggcaagttggcaccacgcttcgtgggaccatacaaaatcttggaacgaaggggagaagttgcttatcagctagaacttccatccaatatgatcggcatccatgacgtgttccacgtgtcccaattaaagaagtgtttaagggtacctgaagaacaggctgattcggaacacattgatatccaggaggacctaacttatgtggagaagccggttcgcatacttgataccagcgaaaggagaaccagaaacaaggttacccggttttgccgagttcagtggagtcatcattcggaagaggaagcaacctgggaaagggaagatgagttgaaagccgcccatccgcacctcttcaccagctcctccgaatctcggggccgagattccgtttaa

SEQ ID NO: 23000 - DNA, 5334 bp, Oryza sativa; identical to SEQ ID NO: 13870
  Clone ID: TF_OsC359_6727

SEQ ID NO: 23001 - DNA, 5358 bp, Oryza sativa; identical to SEQ ID NO: 13838
  Clone ID: TF_OsC359_6746

SEQ ID NO: 23002 - DNA, 3120 bp, Oryza sativa
  Clone ID: TF_OsC359_6774
ggcaacaggactatgacggagtacctccatgagttcaatcgcctcgcgcgatatgcaccagaggatgtccgcaccgacgccgagaagcaggaaaagttcatggcgggtctggatgacgagctgaccaaccaactgatatctggggactacgctgactttgagaggctagttgacaaggcaatccgtcaggaggatcaacgcaacaagatggataggaagaggaaggccgctcagttcagggcacctcagggaagtcaccagaggccgcgcttcgcttccgggcagcagggtggacctaccaccatgatcgtccgccagtaccgcccgttcaaccctagcaactttccccagggcgccagaggcagtcagaaccaccatggaggtcagcccagcagcggtgcagctccacgcccaccaacggcatcggcacagtcaggcccgtccgcgcaagccaagaaggagactggaacaaaaccagggtcttgcttcaactgtggcgagcttggccacttcgctgacaaatgcccgaagcctaggcgtgccgggccaaggtttatccaggctcgtgtcaaccacgcgtccgcggaggaggctcaagcagcaccagaggttgtactggcggaaatcccagtggacaccgtggagaagaacttgagggaattggaagatatacccatagtctgcgagtatccagaagtgttccccgaagacctcactaccatgccacccaagagagagattgaattccggattgacttggcaccgggaaccgctccaatttacaagagaccatatagaatggcggctaatgaattagccgaggtcaagaagcaggttgatgagcagctgcagaaagggtacattcgaccaagtacttcaccttggggtgctccggtcatttttgtggagaaaaaggataagacgaagaggatgtgcgttgattatcgcgcactcaacgaggtcacaatcaagaacaaatatcctttgccgcgaatcgatgatttgtttgatcaactgaaaggagctaaagtgttttctaagatagacctgcgatcaggctaccaccagttgagaattcgggaggaggatattccaaagacggccttcaccactcggtacggattatatgagtgcacggttatgtcgttcggacttaccaacgcacccgcattcttcatgaatctgatgaacaaagtgttcatggaatttctggacaagtttgttgtggtattcatcgacgacatacttatctattcaaagtccaaagaagaacatgagcaacatctccgcctggtactcgagaagttgaaggagcaccagctatacgccaagttcagcaagtgtgacttctggttgacggaagtcaaatttttgggccatgtcattacagctcagggtgtggcagttgacccatcaaacgtagagtcagttaccaaatggaccccaccgaagaccgtgtcgcagattcgaagttttctaggactggcaggttattaccgccgattcatcgaaaacttctccagaatcgcccgacccatgactcagttgcttaagaaagatgagaagtttaaatggacagttgagtgcgataagagttttgaggagctcaagaagaaattagtatccgcaccagttttaattctgcccgaccagatgaaagacttccaagtctattgcgatgcatcccgtcacggacttggatgtgtcctaatgcaagagggcagagtggttgcgtatgcctcgcggctgttgcgtccacacgaagggaattatccaactcatgacctggaattggcagcagtggttcatgctttgaagatctggaggcactatctgattggcaaccgctgcaaagtatatacggaccataagagtctgaaatacatcttcacccaaccggacctaaatctccgacaacgaagatggttggaactaatcaaagactatgacatgagcattcactaccacccgggtaaagccaatgtggtggcagacgcgttaagcaggaaaagttactgcactgccctatgcatcgagggcatgtgtgaagaattgcggcaggagtttgagcatctcaacgtgggaattgttgaacacggttttgtagccgctctggaggcatggcctacgctcgtggatcaagtcagagcagctcaagtaaatgattctgaaatagcagagctgaaaaagaacatgagagtcggaaaagcccgggatttccacgaagatgagcatggcacaatctggttgggagaaagattgtgtgtacctgacgacaaggaactgaaggatctgatactcaccgaggctcatcagacccagtactccattcatccaggcagcactaaaatgtatcaagacctcaaagaaaagttttggtgggtcagcatgaggagagaaatagctgaattcgtcgcactctgcgatgtttgccaacgagtgaaggcagagcaccaaagaccagcaggtttactccaacctcttcaaatcccggaatggaaatgggaggagattggaatggactttataacaggactgccccggacatcatcgggtcatgattcaatctgggtagtcgtggatcgactcactaaggttgctcacttcataccagtacataccacgtatacgggcaaaaggttggcagagctctacctctcgagaatcatgtgtctacatggagtacccaaaaagattgtatctgatcgagggagtcagttcacctcaaaattctggcagaagctgcaggaagaattggggacccgtttaaatttcagtacggcctatcacccgcaaactgatggtcaaaccgagcgagtcaatcaaatcttggaagatatgttgagagcttgcgctcttgattttggtggagcttgggacaaaaacttgccatatgcggaattctcgtacaacaacagctaccaggccagtctacagatggcaccgtttgaagctttatacggccggaagtgccgcacacctctcttctgggatcagacaggtgagcgtcaactgttcgggacagaggtattagcggaagcagaagagaaagtcagaatcatcagggaagggttgaggattgcccagtctcgacagaagagctacgcggataactgctga

SEQ ID NO: 23003 - DNA, 5358 bp, Oryza sativa; identical to SEQ ID NO: 13857
  Clone ID: TF_OsC359_6786

SEQ ID NO: 23004 - DNA, 4875 bp, Oryza sativa
  Clone ID: TF_OsC359_6814
ttaagtctgactgctcttgtcaagagaacagacaccgatctttgaacgaagctcctgaaacctggttctgcccagagatttggtgaatatatcaccgagctgctccgcagttcccacgaacatcatttcgatcagtttcttttctgcacactcccggatataatgatatttgacatcgatatgcttactccggtcatgatgcactggattttttatcaatgatattgtggactggttgtccaccttcagcagcggtgcggtgatctcgtcgcccagcacctccgctaacagccgcgcgagccatactccttgacatgttgcggcggctgcggcgatgtactcggcctcacaggaagacaatgccaccaccttctgcttggaggactgccaagtgacaggcccgccattgatgaagaaaatctggccggacgtgctctttcgctcatctggatcgccagccagatcactgtcagagtaaccaaccagcattggcaaagcgcaccgtgcacctgggccaaatcgaattccccagcagcgagtgcctgccacatagcgcagtatgcgccgaacggcagcgagatgatcttccctgggtgactccatgaagcgactgacatacccaacagagaatgccaggtcgggtcgcgtgttgacgagatagcgcagactcccaaccaagctgcgatacagtgtagcatccacaagcggaaaatctgaaccctttctcaatttcaaacgtacctccataggagtctgacagggattgcagtccttgagtcctgccttctcaagaatcttgccggcatatgcggcttgccccagcgtgatcccatcactgtcctgggtaacctcgatgccgaggtagtatctgagtgcccccaaatcactcatcttgaagagcttcatcatctctcccttgaagctgcggatctcgtcgtcgtgatcgccggtgatgatgaggtcatcgacgtagacgcccaccatcagtcgtcttcctcccctggtgcgtgtgtacacaccatgctcggagctgctgcggtgaaagccgagtgacagcaaggagctatcaagtttggcattccacgcgcgaggcgcctggcgcaagccgtaaagagctttgtgtaggcgatacaccttgttcttgtggttgtcgtcgacaaaacccggcggctgcgagacataaacttcctcgagcagctcgccgttgaggaatgccgacttgacgtccatgtggtggacttgccacccttggtgcgcggcgacggcgagaaggaggcgcaccgattccagccgggcgacaagtgcgaagacctcgtcgaagtccaccccctgtcgctggacgtaccccttagcgacgaggcgcgccttgtagcgcacgatcgccccctgttcgtcacgtttcagcttgtagacccattttagcccaattgcacggtggccatggggtaggtcagtgagcgaccaagtgtcgttgtcgacgatcgcgttaagctcgtcttgcatggcgccacgccagcttggatccgcctcagcctcagccagtgaagcaggttcgtcggcgctcacaacatggagctcgagctgttccagcacccgcggagcgtgtccgggcggtgaggcattccccagcaggttatccaccaggcggtagcgaggcacgacgtcgtcatctgcgtcggcgtccaggatggaatcttgggtaggcggcgtgacaaactcaaccgcctccggcgacggaggcgacggaggtgccggtgtcgtgggggccgacggagccggcgatggtggcgagggtggagtcggcgacgaagcaggtgccgtcccgatggtggtcgtcaccacctgttcgacggtgaacggctcgagctggggagcaccatcaggcgtcactggtccccagtcccaggcgatgtcttcatcaaacaccacgtccctagacacatggacgcgctcgctgactggatcatagagccggtaggccttcgagccttgctcgtagccgaggagcaccattggcgcactccggtcatcgagtttcttcagcccgggcttggtgatcttgacgtgccccacgcacccgaaagtgcgcaggaaatgcacagcgggccattggccataccatgcttcatagggcgtctggttgtccaagcttttcgtcggcgaacgattcaagagaaagaccgctgtggacatggcctctccccagaaccgcccaggaacacccttcgccttcatcatgctgcgggcagtggcgacgatggtttggtttcgacgctccactactccgttctgctgcggggagtagggcgccgtcaactgccgaccaactccgagattggcgcagtattccccaaattcgattgaggtgaattcgcttccacgatccatgcgcagtgcacggagtttgcgcccggactccacctctgcacgggcctgaaagtgcttgatggcgttcgcggcctcatccttgctcctaatcatggttagccacatatagcggctcatgtcatcgacaagcaacaaaaaataccgattaccagccggcgttgcaggttcgatcggcccacagagatcgccgtggacgagctccagatgttcgtcagcgcggtacttggactgcgtcgggaacgccgctcgccgctgcttcccgagcaaacagccatcgcagacttgagtgacttgttgtagcagcggcagcccacgaaccatttcctgttgcgcgagcttgcggagagcaggaaagttgaggtggccgtacctggcgtgccaccgccacgccggctcggcgctccttgccgcgaggcagaccggacggtcgatgtccagcttgatggtgtagaggcagtcgtcggagcgtcggacacggacgagtaggtgccctcgaggatcccacacgtgcaggatgccgtgatgaatcagtaccttgctgccggaacgatccagctgtccaaggctgacgatgttcgccgtgagccgcgggatgtagtagaccccggcgatgccgcggtgttccccgaacctgcaggagaacaggacggtgacgcggccctcgatgcgaaccaccgagccgtcgccaaacctgacagtgccggtgaccgccgtgtcgagctcggcgaaagcggagcgggacccggtcatatggttggttgcgccagtatccaggatccacatcgccggatcatgttcgccaccgtcgtctagctgcgcgaagaccttggcctcgaccacggcaagttcgccaatcggcgacggcgccctcggcgcgctcggtggcgagacgacgtttgtcggtgcagcgacgcgaggacgcggcggatccagctgcaccttggccaggagcagagcaggctcttcgtcctcctcctgggctacgtaagcttgctgggccttgggcttgctgcgacagtctttggcccaatgtcccctcttgccgcaattcttgcaatttcccgggttacggcctcccgggttggctggcttgggctgggcctccttcggggctccatcgtccttcttcccacgccctcgaccccggcggtcgccgttgccgctggaggagtgagcggcgtcttgcagagaggccgccttgcggaatttcgccagccattcttcctcggtgaagaggagacggccattggcgtcgacccgactcgatgccgccgcagtcttgcactgcttgcgttgctcgacggagcgcagacgcccagtaacctcctcgagagacagctcattgacgtcgagcaaggtctcaatcgagatggctatttgctggagatgttctgggacaacctgcaacaatttctgaacgacctcagcttcagtgatattatcacctaaggtgcgaaggttgttggcgaggccgccgatccgcatcgagaagtcgtcgacggtttcatcgtccttgaagaggatatcaccgaattctcggcgcagctgctgtgcattcgcctcacgcacgcgctgcacaccgatacggcgagtcttgatcgcttcccacgcctcctgcgccgtctccttgacagcgagcgtggcgagcatctcggcgggcacggcgcgaagtatcgcggcgagcgcctgctggtcctgccggtagtcgacgagatcatcgccctccggctccaccgcgccccacagacattgggcttgcatgttcacccgcattaccagcgcccaatcttggtaatttgtgcgggtgagtgtcgggtagacgacgctgctcgtggtcgcctcgcggacgacgcgttccaccacgacttggccgcggccgccatgacggccacggcgcggagacggcgagcgccagcgacgacgcggtggtgagtgggagacgtggagcagaagcaccagactaacaccaccgatgctgacgtaggccacaacagcgcagtcatcgccgccagagacagcaacagcgcagccgtgggcagcatcagagcagccaccaccgccgcgggccgcattcgagccgccgccgccaccttgggccgcatccgagcagccgccgccgccacgggccgcatccgagcagccgccgccgtcgtgggccgcatccgagccgccgccgccgccacggaccgcatccgagcagccgccgccgccgtgggccgcaaccgagccgccgccaccgccgccatggaccgcatccgaacagccgccgccgccgtgggccgtatccgagccgccgccgccgccacggaccgcatccgagcagccgccgccgccgtggaccgcttccgagccgccgccgccgccgtcatcttcggtcgtaatcgcgtcgccatcaccgagtcgggatcaggtcgggatcaatcaggattgtccatcagatcagacggccccaacttctcccgcgtcgcgctgggcgccgttctgtaa

SEQ ID NO: 23005 - DNA, 5484 bp, Oryza sativa; identical to SEQ ID NO: 13797
  Clone ID: TF_OsC359_6925

SEQ ID NO: 23006 - DNA, 4995 bp, Oryza sativa
  Clone ID: TF_OsC359_6933
tcaccactcccgaaaccgctgccgccgcgccccacctcccccgctttccccgcgcccacgccgcgtcgcctgcgcccactccacatcgccgccccctctccccgcgtctcccggccgcgccccagagtacgagtatgtgtccgatggtgggttcttcgaggagtaggcttcatccgtgcagtcgaggatgcctatggagtgatgttcccggtggatctgtatgtcaacattgtcgtttgtgtaccccggccggtcctggacgggggttttaatgcatattccctttgtcttctctagatggccgagcacccacccaaccaccgcggagaaggcatggatgacttcgtggcagagttggcacgcatgacactggtggtgggctaccccaacgcgccggagtacacgactgttccaccgctcagtggcgagcttcctcaccgtgtccgcttggaggtccatggttacgtggggacttgcctcgctaacatggtggtcgaggcgtctggagccacagcagatcacgcatgtcaggaggcagcatatctgatgatggccagactgcgggagcgccacaactacatcttccacaacacggtgtaccgtttccaccctcgtcgagccaacgacagtgatgtcagttccttccgtccgacagccggcgagaacgacaccaccttcagtcacgcgtccaaggccttgaatgatgggaagctcatgaggatcgtcgctctgaaggacgagatagcgcgcctgaagagggagaatgctcagttgaagggtcttcccgcgccaggaggagtccagatccgcaccacgcctcgcaagtcgacaacggcacccgtgcgcatccagcttgcgcccaggaacccacctccgtcagcagctcccgcagcacctccagttccgcccgcagctccagcagttcctacagctccagcgccagccccagctcctgttcccgtgtcagctccagcatccgctctctccttcgcacctgcatcagccgtcaggggccccgccagtggcaatgggggttggttgcctgctactcccagtggcagtcgcgaccgcagcagcagcagctccagtggcatagagccgggcagcggcgagacttatctgccaggctccaggagtcgctcagaggacctgatggtctacaccaggactggcacccgcacgacaggcgagggcagcaacggcgaagaacgcgctgatggtgtgcaccccaacagtgattccggcaatggtccgccaccacttcccgagaatccgacgctagcccaagttatggcacatcagactcagatgatggcagccatgatgcagcagatgcagcagcagcaccagcagatgcaccagaggatgctgcagcacgctgaacagcagcaccggcagtttggtccccctccccctcagtccaagttgccagagtttctacgtgtcaggccacccaccttctccagcaccaccaaccccatggaggcgaatgactggctccatgccatagagaagaagctgaatctcctgcagtgcaatgatcaggagaaggtcgctttcgccacacaccagcttcaaggtcctgcgtcagcttggtgggacaatcacatggccacccgcccgccaggcactgaagtcacttgggcggagttctgtcgtagcttcaggaaggcacaggtgccagacggggtcgtggcacaaaagaagagggaattccgggcgctccatcagggcaataggacagtgacagagtacctccatgagttcaatcgcctcgcgcgatatgcaccggaggatgtccgcactgacgccgagaagcaggaaaagttcatggcaggtctggatgacgagctgaccaaccaactgatatctggggactacgctgattttgaaagactggttgacaaggcaatccgtcaggaggatcagcgcaacaaaatggacaggaagagaaaggcggcacagttccggtccaaccaaggaaaccatcagcgaccgcgtttcactcccggacagcagggtggacctaccaccatgatcgtccgccagcaccgcccgttcaactccagcaacttccaccagggcgctagtggcagtcagaaccaccatggaggtcagcctaaccgcggtgcagctccacgcccaccagtggcaccagcacaatcaggcccgtccgcacaagctaaggagaccgaagccaaacctgggtcctgtttcaactgtggtgagcttggccacttcgccgacaaatgcccgaagcccaggcgtgccgggccaaggaaagaagagcttagtacaccaatgagggttcataccccaggaaatagttcaacctcagtcaattttagcccttcagtgctaatagaaatccaaagatcaccatttctagccaacctcattcttctcgaatccaaagacctagatgtcattcttgggatggattggctgaccaagtttaagggagtcatcgattgtgcgaatcgcacagtcaccttgaccaacgagaagggagaaaccgtggtgtacaaatcactagtctcaccaaagcaaggggtctccttgaatcagatcgagatggaaatcccagtggtcaccgaggagaagaattcgaggaagttggaagagattcctatagtctgcgagtacccagaagtgtttcccgaagatctcactaccatgccacccaagcgaaagattgaattccggattgatttggcaccgggaaccgcgccaatttacaagagaccgtacaggatggcggccaacgaattagcagaggtcaagaagcaggttgatgagcaactgcagaaagggtacattcgaccgagtacttcaccttggggtgctccggtcatttttgtggagaaaaaggataagacgaaaaggatgtgcgttgattatcgcgcactcaacgaggtcacaatcaagaataaatatcatttaccgcggatcgatgatttgtttgatcaactgaagggagctaagttaaggatccgggaagaggatattccaaagacggctttcaccactcgatacgggctgtatgagtgcacggttatgtctttcggacttaccaacgcacccgcattcttcatgaatctgatgaacaaagtgttcatggaatttctcgacaagtttgttgtggttttcatcgacgacattcttatctattcaaagtctgaagaggaacatgagcagcatcttcgtctggtactcgagaagttgaaggagcaccaattatacgccaagttcagcaagtgtgacttctggttgacagaagtcaaatttctgggtcatgttattacagctcagggtgtggcagttgatccatcgaacgtggagtcagttaccaaatggaccccaccgaagaccgtgtcgcagattcgaagttttcttggacttgctggttattaccgccgattcatcgaaaacttctccaggatcgcccgacccatgactcagttgcttaagaaagatgagaagtttaaatggacagctgagtgcgataagagctttgaggagctcaagaagaaattagtatccgcaccagaaggcagagtggttgcgtatgcctcgcgacagttgcgtccacacgaagggaattatccaacccatgatttggaattggcagcagtggttcatgctttgaagatctgggggcactatctgattggcaaccgctgtgaagtatatacggatcacaagagtctgaaatacatcttcacccaaccggatctaaatctccgacaacgaagatggttggaattaatcaaagactatgatatgagcattcactaccacccggggaaagccaatgtggtggcagacgcattaagcaggaaaagttactgcactgctctatgcatcgagggcatgtgtgaggaattgcggcaggagtttgagcatctcaacgtgggaattgttgaacatgggttcgtagccgctctagaagcacggcctacgctcgtcgatcaagttagagccgctcaaataaatgatccggaaatagcagagctgaaaaagaacatgagagtcggaaaggctcgggatttccttgaggatgagcatggcacaatctggatgggagaaagattgtgtgtacctgacgacaaggaactgaaggatctgatactcaccgaggctcatcagacacagtattccattcacccaggcagcactaaaatgtaccaagacctcaaagaaaagttttggtgggtcagtatgagaagagaaatagctgaattcgtcgcactctgcgatgtttgccagcgagtgaaggcagagcatcaaaggccagcaggtttactccaacctcttcaaattccagaatggaaattgcataccacctatacgggaaagagattggcagagttgtacctggcaaggatcatgtgtttgcatggggtacctaagaagatagtatctgaccgagggagtcagttcacctcaaaattttggcagaaactgcagaaagaattggggacccgtttaaatttcagtaccgcctaccatccgcagacagatggtcagaccgagcgagtcaatcaaatcttggaagatatgttgagagcttgcgctcttgacttcggtggagcttgggacaacagcttgccatatgcggaattctcatacaacaacagttaccaagccagtctacagatggcaccgtttgaagctttatacggccggaagtgccgcacacctctcttctgggatcagacaggcgagcgtcaattgttcgggacagaggtattaacggaagcagaagagaaagtcagaaccatcagggaaaggttgagaattgcccagtctcgacagaagagctacgcggataaccgccgaaggaagctcacttttgaagcaggggattatgtgtatcttcgggttaccccgctccggggagtgcaccgttttcaaaccaaaggcaagttagcaccacgtttcgtgggaccctacaaaatcttggaacgaagggggaagttgcttattagctag

SEQ ID NO: 23007 - DNA, 3663 bp, Oryza sativa; identical to SEQ ID NO: 13850
  Clone ID: TF_OsC359_6996

SEQ ID NO: 23008 - DNA, 4713 bp, Oryza sativa; identical to SEQ ID NO: 13880
  Clone ID: TF_OsC359_7059

SEQ ID NO: 23009 - DNA, 3617 bp, Oryza sativa
  Clone ID: TF_OsC359_7142
atggaggcgaatgactggctccatgacatagagaagaaactgaatctcctgcagtgcaatgatcaggagaaggttgctttcgccacacaccagcttcaaggtcctgcgtcagcttggtgggacaatcacatggccacccgcccgccaggcactgaagtcacttgggcggagttctgtcgtagcttcaggaaggcgcaggtgccagacggggtcgtggcacaaaagaagagggaatttcgggcactccatcagggcaacaggactgtgacagagtatctccatgagttcaatcgcctcgcgcgatatgcaccagaggatgtccgcaccgacgccgagaagcagaaaaagttcatggcaggtctggatgacgagctgaccaaccaactgatatctggggactacgcggattttgaaaggctggtggacaaggcaatccgtcaggaggatcagcgaaacaaaatggataggaagagaaaggcggcacagttccggtccaaccaaggaaaccatcagcgaccgcgcttcgctcccgggcagcagggtggacctaccaccatgatcgtccgccagtaccgcccgttcaaccctagcaacttccaccagggcgccagtggcagtcagaaccaccatggaggtcagcccaaccgcggtgcagctccacgcctaccagtggcaccggcacagtcaggcccgtccgcgcaagccaagaaggagactggaacaaaaccagggtcctgcttcaactgtggcgagcttggccacttcgctgacaaatgcccaaagcccaggtgtgccgggccaaggtttgtccaggctcgtgtcagccacgcgtctgcagaggaggcgcaagcagcaccagaggtcgtactgggtacatttcctgttaactcaatccctgcaacagtactttttgattctggtgcaacgcattctttcatttcaaagaaatttgtggggatgcatgggttaaggaaagaagagcttaatacaccaatgagggttcataccccgggaaatagttcaacctcggtcagttttagcccttcagtgctaatagaaatccaaagatcaccatttctagccaacctcattcttcttgaatccaaagacctagatgtcattcttgggatggattggctgaccaagttcaagggagtcattaattgtgcgaatcgcatagtcaccttgaccaacgagaagggagaaaccgcagtgtacaaatcactagtctcaccaaagcaaggggtcgccttgaatcagatggaggcggaaatcccagtggtcaccgaggagaagaatccgaggaaattggaagagattcccatagtttgcgagtacccagaagtctttcccgaagacctcactaccatgccacccaagcgagagattgaattccgaattgatttggcaccgggaaccgcgccaatttacaagagaccgtacaggatggcggccaacgagctagcagaggtcaagaagcaagttgatgagcagctgcagaaagggtacattcgaccaagtacttcaccttggggtgctccggtcatttttgtggagaaaaaggataagacaaagaggatgtgcgttgattatcgcgcactcaatgaggtcacaatcaagaataaatatcctttaccgcggatcgatgatttgtttgatcaactgaagggagctaaggtgttctctaagatagacatgagatcaggctatcaccagttgagaattcgggaagaggatatttcaaagacggccttcaccactcggtacgggctatatgagtgcacggttatgtctttcggacttaccaacgcacccgcattcttcatgaatttaatgaacaaagtgttcatggaatttctggacaagtttgttgtggtattcatcgacgacatacttatctatccaaagtctgaagaagaacatgagcagcatctccatttggtactcgagaagttgaaggagcaccagttatacgccaagttcagcaagtgtgatttttggttgacggaagtcaaatttctgggccatgttattacagctcaagttcagcaaactgagccacaaactaagccttacccactagacatgtggaagtacggtagtgctttgcaacagaggcccgagcttaatccttatagtacccgagctcagggtgtggcagttgatccatcgaacgtggagtcagttaccaaatggaccccaccgaagaccgtgtcacagattcgaagttttcttggacttgtaggttattaccgccgattcatcgaaaacttctccaggatcgcccgacccatgactcaattgcttaagaaagatgagaagtttaaatggacagctgagtgcgacaagagttttgaggagctcaaaaagaaattagtatccgcaccagttttgattctgcccgaccagatgaaagacttccaagtctattgcgatgcatcccgccacggacttggatgtgtcctaatgcaagagggcagagtggttgcgtatgcctcgcgacagttgcgtccacacgaagggaattatccaactcatgacctggaattggcagcagtggttcatgctttgaagatccggaggcactatctgattggcaaccgctgcgaagtatatatggaccataagagtctgaaatacatcttcacccaaccggacctaaatctccgacaacgaagatggttggaattaatcaaagactatgatatgagcattcactaccacccggagaaagccaatgtggtagcagacgcattaagcaggaagagttactgcactgccctaggcatcgagggcatgtgtgaggaattgcggcaggagcttgagcgtctcaacgtgggaattgttgaacacggattcgtagccgctctggaagcacggcctacgctcgcggatcaagtcagagcggctcaagtaaatgatcctgaaatagcagagctgaaaaagaatatgagagtcagaaaagcccgggattttcatgaagatgaacacggcacaatttggttgggagaaagattgtgtgtacctgacgacaaggaactgaaagatctgatactcaccgaggctcatcagactcagtactccattcatccaggcagcaccaaaatgtatcaagacctcaaagaaaagttttggtgggtcagcatgaggagagaaatagctgaattcgtcgcactctgcgatgtttgccaacgagtgaaggcagagcaccaaagaccagtaggtttactccaacctcttcaaatcccggaatggaaatgggaggagattggaatggactttataacaggactgccccggacatcatcgggtcacgattcaatctctgtcgtgaatgttaccctacttccttttgcaccatttgttgaagtacgaaggtctacatttggcattggcacttcgacatcagtgtcctcgaacatcatgtgcacaaagggatcacctctacttgtcattgcaatctagtcactgcaataaatatataaattgacaacctttccaatcgatctcagaaacatcaacaaatgattgtaattgctcaaacaaatatgaaaacaaggtacatcgatttgcactattgaattcctattaactatgctatagcttatattcagaat

SEQ ID NO: 23010 - DNA, 4056 bp, Oryza sativa; identical to SEQ ID NO: 13877
  Clone ID: TF_OsC359_7158

SEQ ID NO: 23011 - DNA, 5352 bp, Oryza sativa; identical to SEQ ID NO: 13874
  Clone ID: TF_OsC359_7225

SEQ ID NO: 23012 - DNA, 5157 bp, Oryza sativa
  Clone ID: TF_OsC359_7450
atggccggccacccacccaaccaccgcggagaaggcatgattgactttgtggcagagttggcacgcatgacactggtggtgggctaccccaacgcgccagagtacacgacgattccaccgctcagtggcgagcttcctcaccgtgttcgcttggaggtccacggctacgtgggtacctgcctagctaacatggtggtcgaggcatctggaggcacagcagatcacgcctgtcaggaggcagcctacttgatgatggccagactacgggagcgccacaactacatcttccacgacacggcgtaccgcttccacccccgtcgagccaacggtgatgacgtcagctccttccgtccgacagctagcgagaacgacaccacctttggtcacatgtgtgctgtgatgaggggattggacaggatgcactcggacctgcacaaggcgaccaaggccttgaacgatgggaagctcatgaggatcgtcgctctgaaggacgagatagcgcgcctgaagagggagaacgctcagctaaagggtcttccagcgccaggaggagtccggatccgcactacgccccgcaagacgacgacggcacccgtgcgcatccagcttgcgcccaggaacccacctccatcagcagctcccgcagcacctccagttccgcccgcagctccggcagttcctgcagctccagctcccgcgtccgctctctccttcgctcccgcatcagccgccaggggtccagccagtggcaatggaggttgcttgtttgggatggtctacaccaggaatggtagccgcgcaacaggcgagggcagcaacggcgaagaacgcgctgatggtgtgcaccccagcagtgattccggcaatggtccgccaccacttcccgagaatccgacccttgcccaagttatggcacatcagactcagatgatggcagccatgatgcagcagatgcagcagcagcaccagcagatgcaccagaggatgatgcagcacgtcgaacagcagcaccagcagtttggtccccctccccctcagtccaagttgccagagtttctacgcgtcaggccacccaccttctcaagcaccaccaaccccatggaggcgaatgactggctccatgccatagagaagaagctgaatcgcctgcagtgcaatgatcaggagaaggtcgctttcgccacacaccagcttcagggtcccgcgtcagcttggtgggacaatcacatggccacccgcccaccaggtactgaagtcacatgggcagagttctgccgtagcttctggaaggcgcaggtgccagacggggtcgtggcacaaaagaagagggaattccgggcactccatcagggcaacaggactgtgacagagtacctccacgagttcaatcgcctcgcgcgatatgcaccagaggatgtccgcaccgacgccgagaagcaggagaagttcatggcgggtctggatgatgagctgaccaaccaactgatatccggggactacgctgactttgagaggttggttgacaaggcaatccgccaggaggatcaacgcaacaagatggacaggaagaggaaggccgcacagttcagggcacctcagggaagtcaccagaggccgcgcttcgctcctgggcagcagggtggacctaccaccatgatcgttcgtcagcaccgcccgttcaaccctagcaactttccccagggcgccagtggcagtcagaaccaccatggaggtcagtccaaccgcggtgcagcttcacgcccaccaatggcaccggcacagtcaggcccgcccgcgcaagccaagaaggagactggagcaaaaccagggtcctgcttcaactgtggcgagcttggccacttcgctgacaaatgcccgaagcctaggcgtgccgggccaaggtttatccaggctcgtgtcaaccacgcatctgcggaggaggcacaagcagcaccagaggtcgtactgggtacgttccctgttaactcaatccctgcaacagtactttttgattctggtgcgacgcattctttcatttcaaagaaatttgtcgggatgcatctgttaataagagaggaacttagcacaccaatgcgggttcataccccagggaatagctccacttcggttcaattcagcccttctataacaatagaaattcaaagatcaccatttctagccaacctcattcttctcgaatccaaagacctagatgtcattcttgggatggattggctgaccaagtttaagggggtcatcgattgtgcgaatcgcacagtcaccttgatcaacgagaagggagaaaccgtggtgtacaaatctctagtctcgccaaagaaaggggtctctttgaatcagattgaagcggaaatcccagtggacaccgtagagaagaactcgagaaaattggaagatatacccatagtctgcgagtatccagaagtgttccccgaagacctcactaccatgccacccaagagagagattgaattccggattgacttggcaccgggaactgctccaatctataagagaccatacaggatggcggccaacgaactagcagaggtcaagaaacaggttgatgagcagctgcagaaagggtacattcgaccaagtacttcacctttgggtgctccggtcatttttgtggagaaaaaggataagacgaagaggatgtgcgttgattaccacgcactcaacgaggtcacaatcaagaacaaatatcctttgccgcgaatcgatgatttgtttgatcaactgaaaggagctaaagtgttttctaagatagacctgcgatcaggctaccaccagttgagaattcgggaagaggatattccgaagacggccttcaccactcggtacgggctatatgagtgcacggttatgtctttcggactcaccaacgcacccgcattcttcatgaatctgatgaacaaagtgttcatggaatttctggacaagtttgttgtggtgttcatcgacgacattcttatctattcaaagtccgaagaaaaacatgaacaacatttccgtctggtactcgagaagttgagggagcaccagctatatgccaagttcagcaagtgtgacttctggttgacggaagtcaaatttttgggccatgtcattacagctcagggttattaccgtcgattcatcgaaaatttctccagaatcgcccgacccatgactcagttgcttaagaaggatgagaagtttaaatggacagccgagtgcgataagagcttcgaggagctcaagaagaaattagtatccgcacccgttttgattctgcccgacccgatgaaagacttccaagtctattgtgatgcatcccgtcacggacttggatgtgtcctaatgcaagagggcagagtggttgcgtatgcctcacggcagttgcgtccacacgaagggaattatccaactcatgacttggaattggcagcagtggttcatgctttgaagatctggaggcactatctgattggcaaccgctgcgaagtatatacggaccataagagtctgaaatacatcttcacccaaccggacctaaatctccgacaacgaagatggttggaactaatcaaagactatgacatgagtattcactaccacccgggtaaagccaatgtggtggcagacgctttaagccggaaaagttactgcactgccctatgcatcgagggcatccgctctggaggcacggcctacgctcaagcaaatgattctgaaatagcagagctgaaaaagaacatgagtgtcggaaaagcccgggatttccacgaagatgagcatggcacaatctggttgggagaaagattgtgtgtacctgacgacaaggaactgaaggatctgatactcaccgaggctcatcagacccagtactccattcacccaggcagcactaaaatgtatcaagacctcaaagaaaagttttggtgggtcagcatgaggagagaaatagctgaattcgtcgcactctgcgatgtttgccaacgagtgaaggcagagcaccaaagaccagcaggtttacttcaacctcttcaaatcccggaatggaaatgggaggagattggaatggactttataacaggactgccccggacatcatcgggtcacgaatcgatctgggtagttgtggatcgactcactaaggttgctcacttcataccagtacataccacatatacgggcaaaaggttggcggagctttacctttcgagaatcatgtgcctacatggagtacccaaaaagattgtatctgaccgagggagtcagttcacctcaaaattctggcagaagctacaggaagaactggggacccgtttaaatttcagcacggcctatcacccgcaaactgatggtcagaccgagcgagtcaatcaaatcttggaagatatgttgagagcttgtgctcttgattttggtggagcttgggacaaaagcttgccatatgcggaattctcgtacaacaacagctaccaggccagtctacagatggcaccgtttgaagctttatacggccggaagtgtcgcacacctctcttctgggatcagacaggcgaacgtcaactgttcggaacagaagtattagcggaagcagaagagaaagtcagaatcatcagggaaagattgaggattgctcagtctcgacagaagagctacgcggataaccgtcgaagggagctcacttttgaggcaggagattacgtgtatcttcgtgtcactccgctccggggagtacactggtttcagacgaaaggcaagttggcaccacgcttcgtgggactatacaaaatcttggaacgaaggggagaagttgcttatcagttagaacttccatccaatatgatcggcacccatgacgtgttccatgtgtcccaattaaagaagtgcttaagggtacctgaagaacaggctgattcggagcacattgatatccaggaggacctaacatatgtggagaagccggttcgtatacttgataccagcgaaagaagaaccagaaataaggtcaccaggttttgccgagttcagtggagtcatcattcagaagaggaagcaacctgggaaagggaagatgagttgaaagccgcccatccgcacctcttcagcagctcctccgaatctcggggccgagattccgtttaa

SEQ ID NO: 23013 - DNA, 5478 bp, Oryza sativa; identical to SEQ ID NO: 13873
  Clone ID: TF_OsC359_7454

SEQ ID NO: 23014 - DNA, 6055 bp, Oryza sativa
  Clone ID: TF_OsC359_7650
cactcctcggtttcgccggaacgccatcgccgcgaacctctacatccgcctcgccggagttgttcggccgcctgtccctcctcgccgtgcaccggtcgaccacacctccaccacctccggcatcgcagcggcaaggtcgtcctcggcatcgtttcccctccatccaaacccctccgcggtccatcatcgtcgtctccgatcgttctcgtcgtcgacgtcccgtcggtcgcccggctcgtcgtctcgcggcgccgcctccgtcgtcggcatcgtagcggcgtggtcctcgtcgtcctcgtccccgtgcagccgctgccggctgtcctcgtcgcctcctcgccggtcccggtcgtcgtcgtcgtcgtcgtcgtcatcctctcgtcgttcccggtcgtcgtggcgttcgtccctccgtcaagccgttctcgttcgtcgtcctcgcttcgtcaagatcgctgcagccccgtcctcgtgttcgtcctcggttccgcgtcgtcaagcctcgtgccggccgcgtctcgcccgtgtaccggtgtcggtagtcgttcacgcgcgcgggtggtgaccgtgtagtgtccgtgttagtgtgcccgctcggtagccgcgtggtttccacgtgtgcaacccgtgtggtgtctagtggagtccgtttgtcggccactcgcctcggttgacacacgggatccgcttccgtcgacccgtggaccgtctctgtgtactcggttttctttttatgtattgttattgcttctttataggcttgtagctttgcttgtgtgcttcgcgtagcttctgtcgttccggaggttcccgaagcgtggttcgcggtcgtcgccgaaggttcggaaggccgttctctctctcttcccctttcaaaacccctaaaacctgttttcggtggggtttgggtgcatgccagttgtgggaagtagcaccccggccactataaggattaagctcgggcctctgttgcaaagcactaccgtacttccacatgtctaatgggtaaggcttagtttgtggctcagtctagtcataaacaaaagtacacggattggagatggatgaagtcgggcgtcgatggacattctccagggcaaatgaaggctacacgggctgcggcccggcaattttcccggtcgcgacagacctgcacaaggcgaccaaggccttgaacgatgggaagctcatgaggatcgtcgctctgaaggacgaggtagcgcgcctgaagaaggagaatgctcagttgaagggccttccagcgccaggaggagtccggatccgcactacgccccgtaagaggacgactgcacctgtgcgcatccagcttgcgcccaggaacccacctccaccagcagctcccgcagcagctccagttccgcccgcagttcctgcagctccagctccagctcccgcgttcactctctccttcgctccagcatcagccgccagaggttcagccagtggtaccggaggttgcttgtttgggatggtctacaccaggactggtagccgcgcaacaggcgagggcagcaacggcgaagaacgcgctgatggtgtgcaccccaacggtgattctggcaatggtccgccaccacttcccgagaatccgacgcttgcccaagttatggcacatcagactcagatgatggcagccatgatgcagcagatgcagcagcagcaccagcagatgcatcagaggatgatgcagcacgccgaacagcagcaccagcagtttggtccccctcccccccagtccaagttgcctgagtttctacgtgtcaggccacccaccttctccagcaccaccaaccctatggaggtaaatgactggctccatgcgatagagaagaagctgaatctcctgcagtgcaatgatcaggagaaggtcgctttcgccacacaccaacttcagggtcctgcgtcagcttggtgggacaaccacatggccacccgcccaccgggtactgaagtcacatgggcagagttctgccgtagcttcaggaaggcacaggtgccagacggggtcgtggcacaaaagaagagggaattccgggcgctccatcagggcaacaggactgtgacagagtacctccatgagttcaatcgcctcgcgcgatatgcaccagaggatgtccgcaccgacgccgagaagcaggagaagttcatggcgggtctggatgatgagctgaccaaccaactgatatctggggactacgccgactttgagaggctggttgacaaggcaatccgccaggaggatcagcgcaacaaaatggacaggaaaagaaaggcggcgcagttccggtccaaccaaggtagtcagcaccgaccgcgcttcactcccggacagcagggtggacctaccaccatgatcgtccgccagcaccgcccgttcaactccagcaacttccaccagggcactagtggcagtcagaaccaccagggaggccagcccaaccgcggtgcagctccacgcccaccaatggcaccggcacagtcagcccagcccgcgcaagccaagaaggagacgggagcaaaaccagggtcctgcttcaactgtggcgagcttggccacttcgctgacaaatgcccgaagcccaggcgtgccgggccaaggtttatccaggctcgtgtcaaccacgcgtctgcggaggaggcacaagcagcaccagaggtcgtactgggtacgttccctgttaactcaatccctgcaacagtactttttgattctggtgcaacgcattctttcatttcaaagaaattcgtgggaatgtatgggctaaggaaagaagagcttagcacaccaatgagggttcgtaccccgggaaatagttcaacctcagtcagttttagcccttcagtgctaatagaaatccaaagatcaccatttctagccaacctcattcttctcgaatccaaagacctagatgtcattcttgggatggattggctgaccaagtttaagggggtcatcgattgtgcgagtcgcacagtcaccttgaccaacgagaagggagaaaccgtagtgtacaaatcaccaggctcaccaaagcaaggagtctccttgaatcaaattgaaacggaaatcccagtggacaccgtggggaagaacttgagaaaattggaagatatacccatagtctgcgagtatccggaagtgttccccgaagacctcactaccatgccacccaagagggagattgaattccggattgacttggcaccgggaaccgctccaatttacaagagaccatacaggatggcggccaacgaattagcagaggtcaagaagcaagttgatgaacagctgcagaaagggtacatacgaccaagcacttcaccttggggcgctccggtcatttttgtggagaaaaaggataagacgaagaggatgtgcgtcgactatcgcgcacttaacgaggtcacaatcaagaataaatatcccttaccgcgaatcgacgatttatttgatcaactgaaaggagctaaagtgttctctaagatagacctgcgatcaggctaccaccagctgagaatccgggaagaggatattccgaagacggccttcaccactcggtacgggctatatgagtgcacggttatgtctttcggacttaccaatgcacccgcattcttcatgaatctgatgaacaaagtgttcatggaatttttggacaagtttgttgtggtgttcatcgacgacattcttatctattcaaagtccgaagaggaacatgaacaacacctccgtctggtactcgagaagttgaaggagcaccagctatacgccaagttcagcaagtgtgacttctggttgacggaagtcaaatttctgggccatgtcattacagcccagggtgtggcagttgatccatcgaacgtggagtcagttacaaaatggaccccaccaaagaccgtgtcgcagattcggagttttctaggactggcaggttattaccgccgattcatcgaaaatttctccagaatcgcccgacccatgactcagttgcttaagaaagatgagaagtttaaatggacagctgagtgcgataagagctttgaggagctcaaaaagaaattagtatccgcaccagtattgattctgcccgacccgacgaaagacttccaagtctattgtgatgcatcccgtcacggacttggatgtgtcctaatgcaagagggcagagtggttgcgtatgcctcgcggcagttgcgtccacacgaaggaaattatccaactcatgacttggaattggcagcagtggttcatgctttgaagatctggaggcattatctgattggaaaccgctgcgaagtatatacggaccataagagtctgaaatacatcttcacccaaccggatctaaaccttcgacaacgaagatggttggaactaatcaaagactatgacttgagtgttcactaccacccgggtaaagccaatgtggtggcagacgctttaagccggaaaagttactgcactgccctatgcatcgagggcatgtgtgaggaattgcggcaggaatttgaacatctcaacatgggaattgttgaacacgggtttgtagccgctttggaggcacggcctacgctcgtggatcaagtcagagccgctcaagtaaatgatccggaaatagcagaactgaaaaagaacatgagagtcggaaaggctcgggatttccatgaagatgagcatggcacaatctggatgggagaaagattgtgtgtacctgacgacaaagaactgaaggatctgatactcaccgaggctcatcagacccagtactccattcacccaggcagcaccaaaatgtatcaagacctcaaggaaaaattttggtgggtcagcatgaggagagaaatagctgaattcgtcgcactctgcgatgtttgccaacgagtgaaagcagagcaccaaagaccagcaggtttactccaacctcttcaaatcccggaatggaaatgggaggagattggaatggactttataacaggactgccccggacatcatcgggacatgattcaatctgggtagtcgtggatcgacttaccaaggtggctcactttataccagtacataccacctatacgggaaagagattggcagaattgtacctcgcaaggatcatgtgtttgcatggggtacccaagaagatagtatccgaccgaggtagtcagttcacctcaaagttctggcagaagctgcaggaagaaatggggacccgtttaaatttcagcacggcctatcacccgcaaactgatggtcagacagagcgagtcaatcaaatcttggaagatatgttgagagcttgcgctcttgattttggtggagcttgggacaaaagcttaccatatgcggaattctcgtataacaacagctaccaggccagtctacagatggcaccgtttgaagctctatacggccggaagtgccgcacacctctcttctgggatcagacaggcgaacgtcagctgttcggaacagaagtattagcggaagcagaagagaaagtcagaatcatcagggagagattgaggattgctcagtctcgacagaagagctacgcggataaccgtcgaagggagctaacttttgaggccggagattacgtgtatcttcgtgtcaccccgctccggggagtacaccgctttcagacaaaaggcaagttggcaccacgcttcgtgggaccgtacaaaattttggaacgaaggggagaagttgcctatcagctagaacttccatccactatgatcggcatccatgacgtgttccatgtgtcccaattaaagaagtgtttaagggtacctgaagaacaggctaattcggaacacattgatatccaagaggacctaacatatgtggagaagccggttcgcatacttgacactagcgaaaggagaaccagaaacaaggtcaccaggttttgccgtgttcagtggagtcatcattcagaagaggaagcaacctgggaaagggaagatgagttgaaggccgcccatccgtacctcttcaccagctccaccgaatctcggggccgagattccgtttaa

SEQ ID NO: 23015 - DNA, 5118 bp, Oryza sativa
  Clone ID: TF_OsC359_7660
atgggttgcaagatggctggccacccacccaaccaccgcggagaaggcatgatcgactttgtggcagagctggcacgcatgacactggtggtgggctaccccaacgcgccggagtacacgactattccgccgcttagtggcgagcttcctcaccgtgtccgcttggaggtccatggctacgtggggacttgcctcgctaacatggcagttgaggcgtcaggaggcacagcagatcacgcctgtcaggaggcagcctacttgatgatggccagactacgggagcgcgacaactacatcttccacgacacggcgtaccgctaccacccccgtcgagccaacggtgatggcgtcagctccttctgtccgacagctggcgagaacgacaccacctttggtcacatgtgtgctgtgatgaggggattggacaggatgcactcggacctgcacaaggcgaccaaggccttgaacgatgggaagctcatgaggatcgttgctctgaaggacgagatagcgcgcctgaagaaggagaacgctcagctaaagggtcttccagcgccaggaggagtccggatccgcactacgccccgcaagactacgacggcacccgtgcgcatccagcttgcgcccaggaacccacctccagcagcaactcccgcagcacctccagttccgcccgcagttcctgcagctccagctccagctcccgagtccgctctctccttcgctccagcatcagccgccagaggtccagccagtggcaccggaggttgcttgtttgggatggtctacaccaggactggtagccgcgcaacaggcgagggcagcaacggcgaagaacgcgctaatggtgtgcaccccagcagtgattccggcaatggtccgccaccacttcctgagaatccgacgctagcccaagttatggcacatcagactcagatgatggcagccatgatgcagcagatgcagcagcagcaccagcagatgcaccagaggatgatgcagcacgccgaacagcagcaccagcagtttggtccccctccccctcagtccaagttgcctgagttcctacgtgtcaggccacccaccttctccagcaccaccaaccctatggaggcaaatgactggctccatgcgatagagaagaagctgaacctcctgcagtgcaatgatcaggagaaggtcgctttcgccacacaccagcttcagggtcctgcgtcagcctggtgggacaatcacatggccacccgcccaccgggtactgaagtcacttgggtagagttctgccgtagcttcaggaaggcacaggtgccagatggggtcatggcacaaaagaagagggaatttcgtgcactccatcagggcaacaggactgtgacagagtacctccacgagttcaatcgcctcgcgcgatatgcaccagaggatgtccgcaccgacgccgagaagcaggagaagttcatggcgggtttggatgatgagctgaccaaccaactgatatccggggactacgctgactttgagtggctggttgacaaggcaatccgccaggaggatcaacgcaacaagatggacaggaagaggaaggccgctcagttcagggcacctcagggaagtcaccagaggccgcgcttcactcccggacagcagggtggacctaccaccatgatcgtccgtcagcaccgcccgttcaactccagcaacttccaccagggctctagtggcagtcagaaccaccatggaggtcagcccaaccgcggtgcagctccacgcccacccatggcaccggcacagtcaggcccgcccgcgcaagccaagaaggagacgggagcaaaaccagggtcctgcttcaactgtggtgagcttggccacttcgctgacaaatgcccgaagcccaggcgtgccgggccaaggtttatccaggctcgtgtcaaccacgcgtctgcagaggaggcacaaacagcaccggaggtcgtactaggtacgttccctgttaactcaatccctgcaacagtactttttgattctggtgcaacgcattctttcatttcaaagaaatttgtggggatgtatgggttaaggaaagaagagcttagcacaccaatgagggttcataccccggggaatagttcaacctcagtcagttttagcccttcagtgctaatagaaattcaaagattaccatttctagccaacctcattcttcttgaatccaaatacctagatgtcattcttgggatggattggctgactaagttcaagggagtcatcgattgtgcgaatcgcacagtcaccttgaccaacgagaagggagaaacggtagtgtacaaatcactagccccgccaaagcaaggggtctccttgaaccagatcgagatggaagtcccagtggtcaccgaggagaagaatttgaagaaattggaagacatacccatagtctccgagtatccagaagtgttccctgaagacctcactaccataccacccaagagggagattgaattccggattgacttggcaccgggaaccgctcccatttacaagagaccgtacagaatggcggccaacgaattagccgaggtcaagaagcaggttgatgagcagctgcagaaagggtacatccgaccaagtacttcaccttggggtgctccggtcatttttgtggagaaaaaggataagacgaagagaatgtgcgttgattatcgcgcactcaacgagttgagaatccgggaagaggatattccgaagacggccttcaccactcggtacgggctatatgagtgcacggttatgtctttcggacttaccaacgcacccgcattcttcatgaatctgatgaacaaagtgttcatggaatttctggacaagtttgttgtggtgttcatcgacgacattcttatctattcaaagtccgaggaggaacatgaacaacatctccgtctagtactcgagaagttgaaggagcaccagctatacgccaagttcaacaagtgtgacttctggttgacggaagtaaaatttctgggtcatgtcattacagctcagggtgtggcagtcgacccatcgaacgtggagtcagttaccaaatggaccccacctaagaccgtgtcgcagattcggagttttcttggacttgcgggttattaccgccgattcatcgaaaatttctccagaatcgcccgacccatgactcagttgcttaagaaagatgagaagtttaaatggacagctgagtgcgataagagtttcgaggagctcaagaagaaattagtatccgcaccagttttgattctgcccgacccgacgaaagacttccaagtctattgtgatgcatcccgtcacggacttggatgtgtcctaatgcaagagggcagagtggttgcgtatgcctcgcggcagttgcgtccacacgaaggaaattatccaacgcatgacttggaattggcagcagtggttcatgctttgaagatctggaggcactatctgattggcaaccgctgcgaaatatatacggaccataagagtctgaaatacatcttcacccaaccggacctaaatctccggcaacgaagatggttggaactaatcaaagactatgacatgagtattcactaccacccgggtaaagccaatgtggtggcagacgctttaagccggaaaagttactgcactgccctatgcatcgagggcatgtgtgaggaattgcggcaggagtttgggcatctcaacgtgggaattgttgaacacaggttcgtagccgctctggaggcacggcctacgctcgtggatcaagttagagccgctcaagtaaatgatccggaaatagcagagctgaaaaagaacatgagagtcggaaaggctcgggatttccttgaggatgagcatggcacgatctggatggtagaaagattgtgtgtacctgacgacaaggaattgaaggatctgatactcaccgaggctcatcagacccagtactccattcacccaggcagcactaaaatgtatcaagacctcaaagaaaagttttggtgggtcagcatgaggagagaaatagctgaattcgtcgcactctgcgatgtttgccaacgagtgaaggcagagcaccaaagaccagcaggtggctcactttataccagtgcataccacctatacggaaagagattggcagaattgtacctcgcaaggatcatgtgtttgcatggggtacccaagaagatagtatccgaccgaggtagtcagttcacctcaaaattttggcagaagctacaggaagaattggggacccgtttaaatttcagcacggcctatcacccgcaaactgatggtcagaccgagcgagtcaatttaatcttggaagatatgttgagagcttgcgctcttgattttggtggagcttgggacaaaagcttgccatatgcggaattctcgtacaacaacagctaccaggccagtctacagatggcaccgtttgaagctttatacggtcggaagctttatacagccatatgcgctttattctgggatcagacaggcgaacgtcaactgttcggaacagaggtattagcggaagtagaagagaaagtcagaatcatcagggaaaggttgagaattgctcagtctcgacagaagagctacgcggataaccgtcgaagggagctcacttttgaggaaggagattacgtgtatcttcgtgtcactccgctccggggagtacaccatttccagacaaaaggcaagttggcaccacgcttcgtgggaccatacaaaattttggaacgaaggggagaagttgcttatcagctagaacttccatcaaacatgatcggcatccatgacgtgttccatgtgtcccaattaaagaagtgcttaagggtacctgaagaacaggttgattcggagcacattgatatccaagaggacctaacctatgtggagaagccggttcgtatacttgataccagcgaaagaagaaccagaaataaggtcaccaggttttgccgagttcagtggaatcatcattcagaagaggaagcaacctgggaaagggaagatgagttgaaagccgcccatccgcacctcttcaccagctcctccgaatctcggggccgagattccgtttaa

SEQ ID NO: 23016 - DNA, 5019 bp, Oryza sativa; identical to SEQ ID NO: 13866
  Clone ID: TF_OsC359_7908

SEQ ID NO: 23017 - DNA, 5347 bp, Oryza sativa
  Clone ID: TF_OsC359_7970
ttgtcttctctagatggccggtcacccacccaaccaccgcggagaaggcatgatcgactttgtggcagagttggcacgcatgacactggtggtgggctaccccaacgcgccggagtacacgactattccaccgctcagtggcgagcttcctcaccgtgtcagcttggaggtccatggctacgtggggacttgcctcgctaacatggcagttgaggcgtcaggaggcacagcagatcacgcctgtcaggaggcagcctacttgatgatggccagactgcgggagcgccacaactacatcttccatgacacggcgtaccgcttccacccccgtcgagccaacggtgatgatgtcagttccttccgtccgacagccggcgagaacgacaccacctttggtcacatgtgtgctgtgatgaggggactggataggatgcactcggacctgcacaaggcgaccaaggccttgaacgatgggaagctcatgaggatcgtcgctctgaaggacgagatagcgcgcctgaagagggagaacgctcagctaaagggtcttccagcgccaggaggagtccggatccgcactacgccccgcaagactatgacggcacccgtgcgcatccagcttgcgcccaggaacccgcctccagcagcagctcccgcagcacctccagttccgcccgcagttcctgcagctccagctccagctcccgcgtccgctctctccttcgctccagcatcagccgccagaggtccagccagtggcaccggaggttgcttgtttgggatggtctacaccaggactggcacccgcacgataggcgagggcagcaacggcgaagaacgtgctgatggtgtgcaccccagcagtgattccggcaatggtctgccaccacttcccgagaatccgacccttgcccaagttatggcacatcagactcagatgatggcagccatgatgcagcagatgcagcagcagcaccagcagatgcaccagaggatgatgcagcacgccgaacagcagcaccagcagtttggtccccctccccctcagtccaagttgcctgagttcctacgtgtcaggccacccaccttctccagcaccaccaaccctatggaggcaaatgactggctccatgcaatagagaagaagctgaatctcctgcagtgcaatgatcaggagaaggtcgcttttgccacacaccagcttcaagggcctgcgtcggcttggtgggacaatcacatggccacccgcccaccgggtactgaagtcacatgggcagagttctgccgtagcttcaggaaggcacaggtgccagatggggtcgtggcacaaaagaagagggaatttcgtgcactccatcagggcaacaggactgtgacggagtacctccatgagtttaatcgcctcgcacgatatgcaccagaggatgtccgcaccgacgccgagaagcaggaaaagttcatggcaggtctggatgacgagctgaccaaccaactgatatctggggactacgccgactttgagaggctagttgacaaggcaattcgtcaggaggaccaacgcaacaagatggacaggaagaggaaggccgcacagttcagggcacctcagggaagtcgccagaggccgcgcttcactcccgggcagcagggtggacctaccaccatgatcgtccgccagtaccgcccgttcaatcctagcaactttcctcagggcgccagtggcagtcagaaccaccatggaggtcagtccaaccgcggtgcagctccacgtccaccaatggcaccggcacagtcaggcccgcccgcgcaagccaagaaggagactggagcaaaaacagggtcctgcttcaactgtggcgagcttggccacttcgctgacaaatgcccgaagcccaggcgtgccgggccaaggtttatccaggctcgtgtcaaccacgcatctgcggaggaggcacaagcagcaccagaggttgtactgggtacgtttcctgttaactcaatccctgcaacagtactttttgattctggtgcaacgcattctttcatttcaaagaaattcgtggggaggtatgggttaaggaaagaagagcttagcacaccaatgagagttcataccccgggaaatagttcaacctcagtcagttttagcccttcagtgctaatagaaatccaaagatcaccatttctagccaacctcattcttcttgaatccaaagacctagacgtcattcttgggatggattggctgaccaagttcaagggagtcatcgattgtgcgaatcgcacagtcaccctgaccaacgagaagggagaaaccgtggcgtacaaatcactagtctcaccaaagcaaggggtctctttgaatcagattgaagcagaaatcccagtggacaccgtggagaagaacttgaggaaaatggaatatatacccatagtctgcgagtatccggaagtgttccccgaagacctcactaccatgccacccaagagagagattgaattccggattgacttggcaccgggaaccgccccaatttacaagagaccgtacaggatggcagccaacgaactagcagaggtcaagaagcaagttgatgagcagctgcagaaagggtacattcgaccaagtacttcaccttggggtgctccggtcatttttgtggagaaaaaggataagacgaagaggatgtgcgttgattatcgcgcactcaatgaggtcacaatcaagaacaaatatcccttgccgcggatcgacgatttatttgatcaactgaaaggagctaaagtgttttctaagatagacctgcgatcaggctaccaccagttgagaattcgggaagaggatattccgaagacggccttcaccactcggtacgggctatatgagtgcacggttatgtccttcggacctactaacgcacctgcattcttcatgaatctgatgaacaaagtgttcatggaatttctggacaagtttgttgtggtattcatcgacgacatacttatctactcaaaatccgaggaagaacatgagcaacatctccgtctggtactcgagaagttgaaggagcaccagctatacgccaagttcagcaagtgtgacttctggttgacggaagtcaaatttctgggccatgtcattacagcccagggtgtggcagttgatccgtcaaacgtagagtcagtcaccaagtggatcccaccgaagaccgtgtcgcagattcgaagttttctaggactggcaggttattaccgccgattcatcgaaaacttctccagaatcgcccgacccatgactcagttgcttaagaaagatgagaagtttaagtggacagctgagtgcgataagagttttgaggagctcaagaagaaattagtatccgcaccggttttgattttgcccgaccagatgaaagacttccaagtctattgcgatgcatcccgtcacggacttggatgtgtcctaatgcaagagggcagagtggttgcgtatgcctcacggcagttgcgtccacacgaagggaattatccaactcatgacctagaattggcagcagtggttcatgctttgaagatctggaggcactatctaattggcaaccgctgcgaagtatatacggaccataagagtctgaaatacatcttcacccaaccggacctaaatctccgacaacgaagatggttggaactaatcaaagactatgacatgagtattcactaccacccgggtaaagccaatgtggtggcagacgcattaagccggaaaagttactgcactgccctatgcatcgagggcatgtgtgaggaattgcggcaggagtttgagcatctcaacgtgggaattgttgaacacgggttcgtagccgctctggaggcacggcctacgctcgtggatcaagtcagagtagctcaagtaaatgattctgaaatagcagagctgaaaaagaatatgagagtcgggaaagcccgggatttccacgaagatgaacacggcacaatctggttgggagaaagattatgtgtacctgacgacaaggaactgaaggatctgatactcactgaggctcatcagacccagtactccattcatccaggcagcactaaaatgtatcaagacctcaaagaaaagttttggtgggtcagcatgaggagagaaatagctgaattcgtcgcactctgtgatgtttgccaacgagtgaaggcagagcaccaaagaccagcaggtttactccaacctcttcaaatcccggaatggaaatgggaggagattggaatttactttataacgggactgccccggacatcgtcgggtcacgattcgatctgggtagtcgtggatcgactcactaaggttgctcacttcataccagtacataccacatatacgggcaaaaggttggcggagctttacctttcgagaatcatgtgcctacatggagtacccaaaaagattgtatctgaccgagggagtcagttcacctcaaaattctggcagaagctgcaggaagaaatggggacccgtttaaatttcagcacggcctatcacccgcaaactgatggtcagaccgagcgagtcaatcaaatcttggaagatatgttgagagcttgcgctcttgattttggtggagcttgggacaaaagcttgccatatgcggaattctcgtacaacaacaactaccaggccagtctacagatggcaccgtttgaagctttatacggccggaagtgccgcacacctctcttctgggatcagacaggcgagcgtcaactgttcggaacagaggtattagcggaagcagaagagaaagtcaggatcatcagggaaaggttgagaattgcccagtctcgacagaagagctacgcggataaccgtcgaagggagctcacttttgaggtaggagattacgtgtatcttcgtgtcactccgctccggggagtacaccggtttcagacgaaaggcaagttggcaccacgcttcgtgggaccatacaaaatcttggaacgaaggggagaagttgcttatcagctagaacttccatccaacatgatcggcatccatgacgtgttccacgtgtcccaactaaagaagtgcttaagggtacctgaagaacaggctgattcggaacacattgatatccaggaggacctaacatatgtggagaagccggttcgtatacttgataccagcgaaaggagaaccagaaacaaggtcacccggttttgccgagttcagtggagtcatcattcggaagaggaagcaacctgggaaagggaagatgagttgaaagccgcccatccgcacctcttcaccagctcctccgaatctcggggccgagattccgtttaa

SEQ ID NO: 23018 - DNA, 5508 bp, Oryza sativa
  Clone ID: TF_OsC359_8137
tcagccgctgacaggtgggtcccacttgtcagggtcgtcgtcctcctcgcgccgccgccgccgccgctggagcaccgtcgccgccgtcgacccgatcttctccgccgctttgacctcgtcgccgtcgccgtccgttggtcttccgccgctcctttggtcaccggtgagttcgtcgtgccgtccgcttcgtcccggtgccttccgttcacgccgtcgcgccgtcgttcgccggcgagcgtgcgccgtccgagctgccgagccgcccgagccgccgccgccggtggtgacgtcatcgctgacgtcatcgtcgtcctttgtcttctctagatggccggacacccacccaaccaccgcggagaaggcatgattgattttgtggcagagttggcacgcatgacgctggtggtgggctaccccaacgcgccagagtacacgacggttccaccgctcagtggcgagcttcctcaccgtgttcgcctggaggtccacggctacgtgggtacctgcctagctaatatggtggttgaggcatccggaggcacagtagatcacgcctgtcaggaggcagcatacctgatgatggccagactacgggagcgccacaactacatcttccacgacacggcgtaccgatttcacccttgtcgagccagcggtgatgatgtcagtactttccgtccgacagctgacgagaactacactacctttggtcacatgtgtactgtgatgaggggattggataggatgcactcggacctgcacaaggcgtccaaggccttgaatgatgggaagctcatgaggatcgtcgctctgaaggacgagatagcgcgcctgaagagggagaatgctcagttaaagggacttcccgcgccaggaggagtccggatccgcactacaccccgcaagacgacgactgcacccgtgcgcatccaacttgcgcccaggaacccacctccgcccgcagctcccgcagcacctccagttccgcccgcagttcctgcagctccagcaccagctccagctcccgttcacatgtccgctcccgcgtccgctctctccttcgctccagcatcagccgccaggggtccagccagtggcaacggaggttgcttgtttgggatggtctacaccaggaatggtagccgcgcaacaggcgagggcagcaacggcgaagagcgcactgagggtgtgcatcccaacagcaattccggcaatgttccgccaccacttcccgagaatccgacgctagcccaagtgatggcacatcagactcagatgatggcagccatgatgcaacagatgcagcagcagcaccagcagatgtaccagaggatgttgcagcacgccgaacagcagcaccagcagtttggtccccctccccctcagtccaagttgccagagtttctacgtgtcaggccacccaccttctccagcaccaccaaccctatggaggcgaatgactggctccatgccatagagaagaagctgaatctcctgcagtgcaatgatcaggagaaggttgctttcaccacacaccagcttcaaggtcctgcgtcagcttggtgggataatcacatggccacccgcccaccaggtactgaagtcacttgggcagagttctgccgtagcttcaggaaggcgcaggtgccagacggggtcgtggcacaaaagaagagggaatttcgggcactccatcaaggcaacaggactgtgacggagtatctccatgagttcaatcgcctcgcgcgatatgcacccgaggatgtccgtaccgacgccgagaagcaggaaaggttcatggcaggtctggatgatgagctgaccaaccaactgatatctggggactacgccgactttgagaggctagttgacaaggcaatccgtcaggaggatcaacgcaacaagatggacaggaagaggaaggccgctcagttcagggcacctcagggaagtcaccagaggccgcgcttcgctcccgggcagcagggtggacctaccaccatgatcgttcgccagtaccgcccgttccaccctagcaactttccccagggcgccagtggcagtcagaaccaccatggaggtcagcccaaccgcggtgcagctccacgcccaccaatggcaccggcacagtccggcccgtccgcgcaagccaggaaggagactggagcaaaaccagggtcttgcttcaactgtggcgagcttggccacttcgccgacaaatgcccgaagcctaggcgtgccgggccaaggtttatccaggctcgtgtcaaccacgcatctgcggaggaggcacaagcagcaccagaggttgtactgggtacgtttcctgttaactcaatccctacaacagtactttttgattctggtgcaacgcattcgttcatttcaaagaagtttgtcgggatgcatgggttaataagagaggaacttagcacaccaatgcggctgaccaagtttaagggagtcatcgattgtgtgaatcgcacagtcaccctgaccaacgagaagggagaaacggtagtgtacaaatcaccaaactcaccaaagcaaggggtctccttgaatcagattgaagcggaaatcccagtggtcaccatggagaagaatttgaggaaattggaagatatccccatagtctacgagtatccagaagtgttccccgaagacctcactaccatgccacccaagagagagattgaattccggattaacttggcaccgggaaccgctccaatttacaagagaccgtacagaatggcggccaacgaactagcagaggtcaagaagcaggttgatgagcagctgcagaaagggtacattcgaccaagtacttcaccttggggtgctccagtcatttttgtggagaaaaaggataagacgaagaggatgtgcgttgattatcgcgcactcaacgaggtcacaatcaagaacaaatatcctttgccacgaatcgatgatttgtttgatcaactgaaaggagctaaagtgttttctaagatagacctgcgatcagcctaccaccagttgataatccgggaagaggatattccaaagacggccttcaccactcggtacgggctatatgagtgcacggttatgtctttcggacttactaacgcacctgcattcttcatgaatctgatgaacaaagtgttcatggaatttctggacaagcttgttgtggtattcatcgacgacatacttatctattcaaagtccgaagaagaacatgagcaacatctccgtctgttcagcaagtgtgacttctggttaacggaagtcaaatttctgggccatgtcattacagctcaaggtgtggcagttgatccatcgaacgtggagtcagttaccaaatggaccccaccgaagaccgtgtcgcagattcaaagttttcttggacttgcgggatattaccgccgattcatcgaaaacttctccaggatcgcccgacccatgactcagttgcttaagaaagatgagaagtttaaatggacagctgagtgcgataagagttttgaggagctcaaaaagaaattagtatccgcaccagttttgattctgcccgatcagatgaaagacttccaagtctattgcgatgcatcccgccacggacttggatgtgtcctaatgcaagagggcagggtggttgcgtatgcctcgcggcagttgcgtccacacgaagggaattatccaactcatgacctggaattggcagcagtggttcatgctttgaagatctggaggcactatctgattggcaaccgctgcgaagtatatacggaccataagaatctgaaatacatcttcacccaaccggacctaaatctccgacaacgaagatggttggaactaatcaaagattataacatgagcattcactaccacccgggtaaagccaatgtggtggcagacgcattaagcaggaaaagtcactgcactgccctgtgcatcgagggcatgtgtgaggaattgcggcaggactttgagcatctcaacatgggaattgttgaatacgggttcgtagccgctctggaggcacggcctacgctcgtggataaagtcagagtagctcaagtaaatgattctgaaatagcagagctgaaaaagaacatgagagtcggaaaagcccgggatttccacgaagatgagcatggcacaatctggttgggagaaagattgtgtgtacctgacgacaaggaactgaaggatctgatactcaccgaggctcatcagacccagtactccatccatccaggcagcaccaaaatgtatcaagacctcaaagaaaagttttggtgggtcagcatgaggagagaaatagctgaattcgtcgcactctgcgatgtttgccaacgagtgaaggcagagcaccaaagaccagcaggtttactccaacctcttcaaatcccggaatggaaatgggaggagattggaatggactttataataggactgccctggacatcatcgggtcacgattcaatctggatagtcatggatcgactcactaaggttgctcacttcataccagtacataccacgtatacgggcaaaaggttggcggagctctacctctcgagaatcatgtgtctacatagagtacccaaaaagattgtatctaaccgagggagtcagttcacctcaaaattctggcagaagctgcaggaagaattggggacccgtttaaatttcagcacggcctatcacccgcaaactgatggtcaaaccgagcgagtcaatcaaatcttggaagatatattgagagcttgcgctcttgattttggtggagcttgggacaaaagcttgccatatgcggaattctcgtacaacaacagctaccaggccagtctacagatggcaccgtttgaagctttatacggccggaagtgccgcacacccctcttctgggatcagacaggcgagcgtcaactgttcgggacagaggtattagcggaagcagaagagaaagtcagaatcatcaaggaaaggttgaggattgcccagtctcgacagaagagctacgcggataaccgtcgaagggagctcacttttgaggcaggggattacgtgtatcttcgtgtcactccgctccggggagtacaccgctttcagacgaaaggcaagttggtaccacgcttcgtgggaccatacaaaatcctggaacgaaggggggaagttgcttatcagttagaacttccatccaatatgatcggcatccatgacgtgttccacgtgtcccaattaaagaagtgcttaagggtacctgaagaacaggctgattcggaacacattgatttccaggaggacctaacatacgtggagaagccggttcatatacttgataccagcgaaagaagaaccagaaacaaggtcaccaggttttgccgagttcagtggagtcatcattcagaagaggaagcaacctgggaaagggaggatgagttgaaagccgcccatccgcacctcttcgccagctcctccgaatctcggggccaagattccgtttaa

SEQ ID NO: 23019 - DNA, 9731 bp, Oryza sativa
  Clone ID: TF_OsC359_8398
tcagatggtggtttctccgaggagtaggctcgtccgtgccgtcgaggatgcctgtggagtggtgttcccgccctttgtcttctctagatggccgatcacccacccaatcaccgcggagaagccatggatgactttgtggcagagttggctcgcatgacactggtggtgggctaccccaatgtgcccgagtattcgactgttctgccgctcagtggtgagttccctcaccgtgttcgcccggaggttcatggctatgtgggtacctgtctcgctaacatggtggttgaggcatccggaggcacagcagatcacacctgtcaggaggcagcatagctgatgatggccagactacggaagcgccacaactacatcttctgcaacacggcgtaccgttttcaccctcgtcgagcaagtggcgatgacgtcagcaccttccgtccgacagccggcgagaacgacaccacctttggtcacatgtgtgccgtgatgaggggtatggacaggatgcactcggatctacgcaaggcgtccaaggccttgaatgacgggaagctcgtgaggatcatagctctgaaggatgaaatcgcgcgcctgaagaaggagaatgcgcagttgaagggtctccccattcccggaggagtccggatccgcaacacgccccgcaagtcgacgacggcacccgtgcgcattcagcttgcgcctaggaacccacctccgcctgcacctccagcagctcctccagttccgcccgcagtttcagaagttcccacagctcctgcagctccagctccagtcccagctcctgtcccagtgtcagctcccacgtccgctctctccttcgctcctgcatcagccgtcaggggtccagccagtggtaacgggggttggttgcctgctactcccagtggcagccacgaccacagcagtagcagttccagtggctcggagccgggcagcggcgagacgtatttgccagagtccaggagccactcagagggacctggcctcttcctccagatggtctacaccaggaatggtagccgtacaacaggcgagggcagcaacggcgaagagcgcaccgacggtgtgcatcccaacagcaactccggcaatggtccgccaccgctccccaaaaatctgacccttgcccaagtaatggctcatcagactcagatgatggcagccatgatgcagcagatgcaccagaggatgcagcagcaagccgagcagcagcagcagcagtttggtccccctcgccctcagtccaagttgccggagttcttacgtgtcaggccacccaccttctccagtaccaccaaccctatggaggcaaacgactggctccacgctatagagaagaagctcaatctcctacagtacaatgatcaggagaaggttgctttcgctacacaccagctccagggtcccgcgtcagcttggtgggacaatcacatggccacccgcccgctaggcacggaagtcacttgggcggagttctgtcgcagcttcaggaaggcgcaggtgcctgacggggttgtggcacagaagaagagggagttccgggcactccaccagggcaacaggacagtgataaagtatctccatgagttcaatcgcctagcgcgatatgcaccggaggatgtccgtactgacgccgagaagcaggagaaattcctagcaggcctggatgacgagctgaccaaccagctgatctctggagactacgccgattttgagaagctggttgacaaagcgatccgtcaggaggatcagcgcaacaaaatggacaggaagagaaaggcagcgcaattccggtccaaccaaggaagccacccgtgaccgcgcgtcacttccggacagcagagtggacctaccaccatgatcgtccgccagcaccgccctttcaactcgagcaacttccaccatggcaccagtggcagccagaaccaccatggaggtcagcccaatcgcagtgcagctccgcgcccaccaatggcaccagcacagtcagctccatctgcgcaagtcaagaaggagactggaacaaagccagggtcctgcttcaactgtggcgagcttggccacttcgctgacaaatgcccgaagccaaggcgtgctgggccaaggtttgtctaggctcgtgtcaaccacgcgtccgcagaggaggcgcaagcagcaccagaggtcgtactgggtacgttttctgtcaactcagtccctgctacagtactttttgattctggtgcaacacattctttcatttcaaagaagtttgtggggatgcatgggttaagaaaagaagagcttagtacaccaatgagggttcataccccaggaaatagttcaacctcggtcagttatagcccttcagtgctaatagaaattcaaagatcaccatttctagccaaccttatccttctcgaatccaaagacttagatgtcattcttgggatggattggctgaccaagttcaagagagtcattgattgtgcgaatcgcacagtcaccttgaccaatgagaagggagaaaccgtggtgtacaagtcaccggcctcaccaaagcagagaatctccttaaaccagattgaagtggaggaacctgtgaccaccgagcagaagagttcgccgaaattggaggatatccccatagtctgcgagtatcccgaagtgttccctgaagatctcactactatgccacccaagagagaatttgaattccggattgatttggcaccaggaactgccccaatttacaagaggccgtagagaatggcagccaacgagctagcagaggtcaagaagcaggttgatgagcagctgcagaaagggtacactcgaccaagtacttcaccttggggtgctccggtcatttttgtggagaagaaggataaagcaaagaggatgtgcgtcgattatcgcgcactcaatgaggtcacaatcaagaacaaatatcctttgccacggattgatgatttgttcaaccaactaaagggggctaaagtgttctctaaaatcgacctgcgatcaggttatcactagttgagaattcgggaagaggatattcccaagacggccttcaccactcgatatgggttgtacgagtgcatggttatgtctttcggacttaccaacgcacctgcattcttcatgaatctgatgaacaaagtgttcatggaatttctggacaagtttgttgtggtattcatcgacgacattcttatctattcaaagtccgaagaagaacatgagcaacatctccgtctggtactcgagaagttgaaggagcaccaattatatgccaagttcagcaagtttgacttttggctgttggaggtcaaattcttgggtcacgtcattacagctcagggcgtggcagtcgatccatcgaatgtggagtcagttaccaagtggaccccacctaagaccgtgtcatagattagaagttttcttggactcgcgggttattatcgtcggttcattgaaaatttctcaagcattgccagacctatgacccagttgcttaagaaagatgagaaatttaaatggacagctgagtttgacaagagttttgaggagctcaagaagaaattagtatccgctccagttctgattctgcccgaccaaagaaaagacttccaagtctattgcgacgcgtcccgccacggactcggatgtgttttagtgcaagaggcccgcgtttcgtcaagtgtgcagcagccccgtcgtcgtcttcgtcctcgcctccgcgtcgtcaagcctcgtgccggctgtgtctcgcccgtgtaccggtgtcggtagtcgttcacgtgtgcgggtggtgaccgtgtagtgtccgtgttagtgtgttcgctcggtagccgcgtggtttccacgtgtgcagcccgcgtggtgtctagtggagtccgtttgtcggctactcgcctcggttgacacacggggtccgcttccgtcgacctgtggaccgtctctgtgtacctggttttctttttatgtgttgttattgcttctttataggcttgtagctttgcttgtgtgcttcgcgtagctttcgtcgttccggaggttcccgaagtgtggttcgcggtcgtcgccaaaggttcggaaggccgttctctctctcttcctctttcaaaacccctaaaacctgttttccggtggggtttgggtgcatgccagttgtgggaagtagcaccctggccactataaggattaagctcgggcctctgttgcaaagcactaccgtacttccacatgtctagtgggtaaggcttagtttgtggctcagtctggttataaacaaaagtacacggatggagatggacgaagtcgggggtcgatggacatctccaggacaaatgaaggctacacgagctgcggcccgatggccggcagcgttacccgtcgtggtttgcacatgactggcttcgtcttggagctgcggggcctgtgcgtggtcttggggtatccacatggagtggattaccaggccaggccgctcccggagcaggagggtgaggatgcagagcctcacgctggttgggaggtcactgcagtgatcctctccggctctcctgagcggacttcgctggcagtcaccgcgggcggagattccttccccgccgcttgccagaacgccgctctcctcgccatcggcacccttcaccagcgctacccggacgagttgcagcactcgccctaccgctaccacccccgtcgcggggcgcccgcaccacgccaccttccgagacgccagctcggaggatgacgctaccgtcgtgcatctggcacgcatggtggaggcgtacgacgtggctcgtatcgacttccaccagatggtgcgtcgtggcatggtggagaacaacatgaagatcctggagctgcgtcaggagaacctgcagctcaagaaggacctcgacgcgttggaggcgcagctgcaccagctcaaggtcgcccagggtgagatctgccgtcccaagcgtcgccgcgtctgccgcagccagaagatcaccgcccgcaagagcacctccaggcccgagcttgttcgtcagtccctggcatggacttgcttcgtcgagacccctcgtgccgagcctgcgcccgtggttccccaggagggggaagcctccggcgttggtagctcggagggtgcgctgttgctcaccttccgccctggcccgtcgcagcgctctccttctctgtttgctggttctgtgtggagtttacagatggtgtcgaccaggagaaatgttaacaccggtgaaggcaaccaacccgaaggcagcaaccccaacccccaaggcaatccacctccaccaccaccaccagacaccaacgccattctcactcaaatcctcgcccagcaagccaacatgatgaatgctttcctccaccacctccaaaatccaccacaacagaatgctccaccaccacctccccaacactccaaactcgccgaatttctccgcatccgcccacccaccttctctagctccaacaatcctgtagatgcgttggattggttgcatgccgtggggaagaagctggacacggtgcagtgcagcgacgaagagaaagtcatcttcgccgcccatcagctgcagggacccgcatctctatggtgggaccatttccaggccacgcagccagagggacaaccgattacttgggctcgcttcaccgccgccttccggagaacccatgtgcctgccggagtcgtggctctcaagaagaaggaattccgagagttgaagcaaggcaaccgctccgtaatggagtatttgcatgagttcaacaatctagcccgttacgctccggaggatgtgcgggaagatgaggagaagcaagagaagttcttggcaggaatggaccccgagctgtctgttcgtctagtctctggagactatcctgattttcaacgactggtggacaagagcatccgcttggaagccaagcacaaggagctggaatcgcacaagcgccgcttggcgaatttccgcaatcaacagggtgctaaccagagggtccgctacaccaatccctacccagggggatcctcctcgcagcagcagcagcagcagcagcagcaatctcgctccgcgcctcgaccccaattcgtggtgcgcgtcccacagccgcagcagcagcagaatcagcaagggactcgtgcgccccgtcctcctactccagctgggcagcccgttcaaggccgcagggacgcttcaggtccgcagcgtctgtgcttcaactgcttcgagcccgggcactttgcggataaatgcccgaagccaaggcgtcagcaaggccaagcgcctccccgctccaacaacagtggcaaggacgtcctccgtggtcgtgtgaaccacgtgacggccgaggacgtgctgacaactccagacgtcatcgttggtacgttcctcgtccattccatccctgctacaattttgttcgactctggagcttcccactcgtttatatctgtgccattcgtggggaaaaatcagttgggggtagaaaggcttagaaaccctctgctcatcaccacccctggcggggttatgacagcaaagtattatagccctgccgttcctatagaaattcaggggattccttttccttcggatctgatcctgctagacacaaagaacttggacgtgatccttgggatgaattggttggctcaattccaaggagtagtggattgcacgagacgcactgtcactctgtatcgagggccagaacaaccggttgttttctttgcacctccaacctctgtcagaagttcagaactgcatcagataggtccgtcagaaatccccatagtcagagagttcgaagatgtgtttccagaagaactacctggtatgccgcccaagcgagagattgagttccggatagatcttgttccaggaaccactcctctgcacaagcgaccctaccgtatggcagcaaatgaactggccgaagtcaagaaacagttggaagagttgaaagaaaaggggtatatacgtccgagtacttccccatggggtgctcctgtgatttttgtagagaagaaagacaaaacgaagaggatgtgcgttgactacagagctctcaatgaagtcaccatcaaaaacaagtaccctcttccccggatcgatgatctgttcgatcagcttaaaggtgccactgtattctccaagattgatcttcgttccggatatcatcaattacgtattcgtgaagaagatattccgaagaccgcattcactacgcgatatgggctgtatgaattcacggtgatgtcgttcggtttgaccaatgcacctgccttcttcatgaacttaatgaacaaagtgttcatggaatacttggataagtttgttgtggttttcatcgatgacattctaatatactcacaatcagaagaagaccatcagcaccatctccgtctggtattgggaaaactgcgggaacatcaattgtatgccaagcttagcaagtgtgagttctggttgtccgaagtcaaattcttagggcacgtgatatctgctaagggagttgctgtggaccccgaaacagtgaccgccgtcaccgattggaagcaacccaagacagtcactcagattcgcagtttcttaggtttggcaggatattaccggagattcatcgagaacttctccaaaatcgctcgacccatgacacagttgttgaagaaagaagagaaatttgtgtggagcccgcaatgcgagaaggcgttccaaactctcaaggaaaagctggtttcctcgccagtgttaatcttgccggatactcgtaaggatttcatggtgtattgtgatgcttcgcgccaaggattggggtgtgtgctcatgcaggacggtcatgtggtagcctatgcttcacgtcagctacgtcctcatgaaggcaactaccctacgcatgatttggagttagcagcggtggttcatgctctaaaaatctggcggcactatctcattgggaaccgctgcgaaatatatactgatcacaagagcttgaagtacatcttcacccagtcggatctgaatcttcggcaaaggagatggttagaactcatcaaggattatgatgtgggaatacactatcatcctggtaaggccaacgtggttgccgacgctctaagtcgaaagagccactgcaacactctcaacgtccgaggcattccgcccgagcttaatcaacagatggaagccctgaacctaagcatagttggtcgcggattcttggccgcgttggaagccaagcctaccttgctcgatcaaatccgcgaggctcagaagaatgatccggacatgcatggactcctcaagaatatgaaacagggtaaagccgcaggtttcacagaggatgaacacggaactctatggaacgggaagcgggtatgcgttcccgataacagagaacctaaacagctgatacttcaggaagctcacgaaagtccttattccattcacccgggcagtaccaagatgtacttagacttgaaggagaaatactggtgggtcagcatgaagcgggaaattgcagagtttgtggctctatgtgatgtgtgccagcgtgtcaaggcagaacaccaacgaccggctggacttctccaacctctccaagtgccggaatggaaatgggatgaaattgggatggatttcatcaccggccttccaaaaacccaaggtggatatgattctatatgggtaatagtggatcgattaaccaaggtagctcgatttattcctgtgaagaccacctatggagggaacaagctagcggagctctacttcgctaggatcgtgagtctccatggcgttcccaagaaaatcgtatctgataggggaagccaattcatctctcacttttggaagaagctccaagaagagctgggtactcggttgaatttcagcaccgcctatcacccgcagacagatggacagaccgagcgtctaaatcagatcctagaagatatgctccgcgcatgtgtcctagatttcgggaagacttgggataagagtctcccctatgccgagttctcctacaataacagctaccaagccagcatacaaatggcaccttatgaagcgttgtacgggcgcaaatgccgaacaccgctattgtgggaccaagtcggagaaagtcaagtgttcgggaccgatatcctgagagaagctgaagctaaagtcagaatcattcgggataatctaaaggtggcacagtcccggcagaaaagttatgcagataaccgacgccgtgatctggaattcgcagtggatgattttgtgtatcttcgggtcacgccattgcgaggtgtgcacaggtttcagacgaaagggaagctagcacctcggtatgtgggtcccttccgtatcatcgctagacgcggagaagttgcttaccagctggagttgcccgcctccttgggtaacgtgcatgatgtgttccacgtgtcgcagctcaagaaatgtctccgagtgccatccgagcaggccgactcagagcaaattgaagttcgcgaagacttgacctatgtggagaggccagtgaaaatcctggacaccatggagcgcaggaccaggaaccgagtaatccgtttttgcaaggtccagtggagcaaccacgccgaagaagaagctacttgggagcgcgaagacgagctgaaggcagcccatcccgatctcttcgccagttcttccgaatctcggggtcgagattccgtttaa

SEQ ID NO: 23020 - DNA, 4152 bp, Oryza sativa
  Clone ID: TF_OsC1713_4687
gtatattaaattgtcagtttgtgtacctcggtgcttgttatccaaataaccactcaagcatatagaagaatatgtagaataccatattccaaattcaagagtctattgcaaatacctcatgatgcgtttgacagcttgacgatgtgaagcacgtggagaagcttgaaaacaagcacacaaacatacaacaaattgtatgtccggtcttgaagcagtgagatagagtaatgatccaatcatactcctatactccttttgatccacaacttcaccatcttcatccggatccaacacaggagtagatccaatgggtgtagacataggcttgcaatcctccatcttgaaacgccgtagaagatccttggtgtacttcgtttgatgcacaaatgtgccttgctttgtttgcttgatttgaagccccaaaaagtaagtcaattcgcccatcatgctcttctcaaattccatgcgcatagtctcagcaaactccacaaccaaagggtgagatgaacaaccaaagatgatatcatccacataaatctgaacaaaaagttgatcatcaccatgcttaagaacaaagagtgttttatccacttttcccattataaaacctttggcaagcaaaaagttttccaatctatcatgccatgcccttggagattgttttaaaccatacaaagctttagacaagcgaaaaacatgattgggaaattcagagttttcaaaaccgggtggttgttttacataaacttcctcctgtatataaccattaagaaaagcacttttcacatccattagatacaatttaaaaccttttgaagctgtaaaagtcaacaaaagtctaattgcctcaattctagcaacaggagcaaaagtttcatcataatccaacccctacatttgtgtaaaaccctgagcaacaagcctagccttgtttctcacaattaaaccatcctcattttaaaatccatttagttccaatgatattatgaccaacaggaggttcaactaaagaccaaactttatttctttcaaaattctcaagttcttcatgcatggcgttgatccatgattcatcagttagtgcatgagtaacatctttgggttcaaaattagcaacaaaagcagaattcacatgatgatcacgagttgttaccttggaccttgtagtatgttcaccaatattacctatcatttgttgtggaggatgtcgtcattgaatatgaagcggagtagtagcatatgatgaaatttcgtgttctgcaccctgtcctattgaagtagaagtctctggaggtcctctaccatcatcacccgacgcacccgaggaagatcccccaggccggtctgaccgatcctctgccagcggtctgaccggccgtggccccggtctgaacggccgccatttcgtcctcttcctcgtcattgctttcgtccacaaaaatatcctccccctgaacctatgatagtgtaccggaaacatcgggtctagtaccaggactagcctcatcaaaagtgacttcgcaagtctcaacaattttgttagtttccaaaacaagtacacgataaccacgagaatgtgtagaatatccaagcataagtccattagttgaatgtgactcaaatttgtctaaatttctagattttaagacaaagcatttacatccaaaaacacgcaaatgtgaaataccattatcacttcgaatagtcctcaaagatccagcaaattcaagagacaaacgaagatataaacttttaaagtgttcaaaaggctcatccttagtagccataaagaaaacccaagaatatcgagaaaaatcgtcaacaacaaccaacacataccactttcctccaacaaattgcactctagttggaccaacagtgtccatatgtaagagatgtcccggtgcatccgtcatcacagagataataggagcatgtgaagaagcaaccatcttagcataacgatatggtgaacaaaccaaatcaagatttttcttaagtttaggcaaaccacgaacaagatccgaaccactaattctagtgagatgatcaaaaccaacatgtcctagcctacgatgctaaaacatcacatctttcgagaattttgcaacaagacatgtaacctcagaagaaacactattctcaaaatcagccttaaaaactcttccataacgcgaaacattaagcacaacatctccagaagaattaaagaccttgcttctagttttcttgaacaacacatcaaaatcctcatccacgatttgagagacggagagcaaattatatttcaaattctcaaccaaagtgacatcattcaatgtaaacttgtcacttaccttgacagaaccagtagttgttatcgaactagtagaagcatcaccgaagatgatcgagtccctccttgacgccttcttgaggaaggagaatcactggtcatgtgctgcatacaaccggagtccacaatccacacgttctccatcctcaccactaaatcacgattgtttgtgttaaccttagattgatcaagaatcatgttgaggttcttttttcctttagaaaatctttgcaaagaacttttcaagtaaaaaacctcttgagaaagagtagcacaatttttgcaagcatccaaaacactcttttattttctacacgttgagcaagacatcacttcatcttgtttaacaatttcctccatgtgcttaacacgacccaaagcatattttagtttcatctcattagcaacacatgttgtcgaaaaaagtttggtactagattgcttaatcctcttagagctaatcaagttaaatatcgagctagcaaacaaagcaacttgacatttattcaaagctctcttagttaaaaacaattcatcaaccaatctagtgttcatggcaaagctaagagcaacacaagattcaaatttcttagttttcctagattcaacatcaagctttttgatacaaacatctctattagacttaatttcagcacataaaacctcacaagattgacattcatcattatcaggaacaagagattttatactactattttcagccttaagagattcaatggtagcttcatatggactaatcttttctcaaacttagaaattttaaaaccaagtctagcaataatatcttgataatattcaacactagaaggaggaattacctcattgtcatctcctgaatcctcatcaatgcttctagccatgagacaaactccaacgatgttcttccccttgtcatcatctccatcactatcaaaatcaacatcacttgattcttgaattgccgcatatgcttcatctatcgccttttgatagaacttcttcatcttcatgttcttgaattgcttcttgctttgtttgtcgtccttggtgttcttggcattcttgacttcatcttgatctaccgcctttgttcctcttctgagcttgggacattgagaacgaatatggccaagttgtccacattcaaagcaacgttgtggtcctcctcttctcctggatctagtattactcaaagctttagaagctctattagcaatcaaaaccaagtcctcctcactaactccctctagttgatcctcggacaaggcattaaaagcggaaaaaatagacatgggagtggaatcaatagaagaactagatgaagacaccaaagcagtagatttagaatcagttcttttagaaagaatattcatctcatatgttttcaatttggtgtagagaatatccaaagtcagggtgttcatgccaacagattcctgaatagaagtcactttaacatcccagattttcatgtcaagaccattcataaagtaacaagcaaccttagattgagaatagttgacattgtaagaagcatcaacagatccaagatcactcaagattttattgaaacgccccaaataatcatccaatgattcaccagaattcatctcaaacttgatgtattcctttttgaaaacatctttttgcaactccttaatgtttgaagatccagtgtgaaaatcgttgaaagctttccaaatctcattagcagttgcaagatgtgaaacacgatcaaaatcggagcgagaaatggcattaagaataatgttgcgtgctttgcaattattttcaaaatcagctttttgagcaatagt

SEQ ID NO: 23021 - DNA, 4896 bp, Oryza sativa
  Clone ID: TF_OsC359_7895
atgtcggatttagggggaaagaacggggaaaatggaaatgaagatggaacgagcagcaaggaaactccatcacccaagggagctactataccttttgattacagcaaacttaccattccccctcacaactttgtctccgtgccttctaggcgtgctcctcaatttgatgggacacattacgccgcttggaagcacaagatgaagttgcatctaatctttttgcatccaagtatttggaaagttgtttgtatagcttccaatccaattctctccgccttgagtccggaggagttcaacaaggttgatgggcttgaggaggccaaggagatatgggatactttgcaattggctcatgagggatcacccgccgttcgtgaggccaagattgaattattggaagaaaggcttggaagatttgtgatggatgacaaggagacaccacaagagatgtatgataggatgatgatccttgtcaacaagattaaaggacttgggagtgaggacatgacaaatcactttgtggtcaaaagacttctccatgcttttggtccaagaaatcccactcttgtatcaatgatatgggaaaggaaagatttcaagaggctcaccccaagtgacattcttggaagaattgtgtctcatgagatgcaagaagaggaagctcgtgaagtgaggcaaatggtgaagaatgccaccatgatcaaaaatcaagaagtagctttgaaggcaaaacaagaagaagagtcaagttgtgaagaaagtgaagatgaagaaatgacttttattgtcaagagattcaagcactttcttcgcaagagtggctatggcaaagggaggaaggatgatgacaagggaaagaggcaatcaaagagagcttgcttcaattgtggcgaatatggccacttcattgccgattgtctcaagtcaaatgaagcgaaggctaagggaggcaagaagaagccggagcgtgctcatgtggcggaggcacacatggcagaggtgtggtactccggagatgaagaagatctcgaggtcaagcccaagcccaagccaaaagacaaggttgaaggagaaggtggtgttgctactgtcgccttcaagtcatcctcttcaagcaaggagcgtctcttcaacaacttgagtgatgacgacgacgactcctaccactactcttgtttcatggcccaaggccacaaggtgatgactcaaaagccctctcatacctctcttgatgttgattctagtgatgaggaaagtgataatgaattagatgatgtgcttaagagttttagcaaacccgctatgcaacatttggctaagttaatgagagctttggatagtaaagaacaatctctcgaaaggcaagaagaattacttattcttgagaaggaaagaaaccttgccttagtggagagcctagctaaagaatgtgctaaaaatgaacaactagctaatgagcttaatttggctaatggttctctagctagccttagggatgtcaatgaaactcttcaagagaagtttgctagtttagacaaaagtcataaagatcttgaagttcaatttgacactctttggaatagcacttctcaaccaaatgtggtttctaattcttccaacccatctactagcaatggttgtgctaggtattacaatattgatttgaactctcatgctactaatgttgatgctatgcaagctcttaagaaagaaaatgaaaggttgggcacattggtgaaatatggatgtatgaagacataccattcaaaagatgccctttacaagaccatcaccgctcatcctaacaaggatggacacgggctcaggaagtttcgggcttctgataggccgaaggggctggccggaagttccggttataatgccaggaagttctggccagagggtctttactatgattcatatgcatactcctccgatggctcaagttgggttgtggacagtggctgcaccaatcatatgacgggagagaggagtatgtttacaagtcttgatgaggagggtggaagtcgtgaaaatattgtctttggagatgatggtaaaggaaagagggtgcgaagcaacaatggaggagaattcaagaacactcaagtggaggaatttcttgatgaagaaggaatcaagcacgagttctccgccccctatgatcctccccaaaacggcattgttgagaggaagaaccgaaccctcattgaagtcgcaagggcaatgcttgatgagtacaagacttcggatgtattttgggcggaggccgtgagtaccgcatgtcttgccatcaatcgcttgtacctccacaagatcctaaagaaaacctcatatgagctcttgagtggtaagaagcctaatgtttcatattttcatgtctttgggagcaaatgttttattttaagtaagaggtctcgctcatctaagttctcacctaaggtggatgagggattcttacttggctatgaatcaaatgcacatgcctatcgtgtcttctacaaaacctccggtattgttgaagtcactagggatgtgacatttgatgaatctaatggctcccaaggagagcaagttgttgtacatgttgtaggggatgtggatccaaatcaagctataggtactaacgctattggagacatacgaccagtcgagacgcaggatgaccaagaagatagggatcaacctccgtcatcgacatccaatagccctacaagtgctgtgtctgctgagccggaagttccgggtcccattgaccggaacctccggacatctccagacccggaagttccgggttctacagttcggaacctccggatcagtggcagtgaagacgtgccaacggcacaagtggatgggatcgatgctgagggcactttagagcattctgatcaggctcaggtccccccagtgcaccatccaaggatacatcacactgtccaaagagatcatcccgttgacaacatacttgggttcgaggatccaaagttgccaaaccatgtgtacaagctccacaaggcgctctacgggctcaaacaagcccctagagcttggttcgagatgtctatgatgggcgagttgaccttcttcctcgggctacaagtgaagcaagcactagagggcaccttcatctctcaaaccaagtacgtaaaagacatactcaagaagtttgggatggaggatgccaaacctatcaagacgcccatgcctactaatggatacctagacctcgacgataatggccggaagttccggtgttcttggcctggaacttccgtggtcattatgcctcgtgagaagagacagaagctttctcaagatgttcctgctgactcgagccccccggttcgtggtcctagggggagattgggcaaagaaaaagttggagttttttacagtgggagtcagattccgatccattccaggagggctggtagcattgtcattcgtgatgcaccccgctctccctctccagctgcatctgagtcagatgatggtggcaatgaggatgagcctggttctaaaagcaatcctttgaggctgtacaagacaagggctgttgatccagatcctaaacgcacaagagtgaactatctgaagaatctactccagtgtggaaaggacagaatggttagtcctgatactctgccagctgactctcaggatgacagattcaggaccttggtgcaggttgattggtataactctatgatcatgggaagatctcatctagtggtagagatgaagtggctagactggcagtacatgtcctcaaagaacaatatagtcttcaatgaggtacgcaaggtgtgtgagcgcaagcacgtggtagatttgttggccttgcagtattcctggaatgaggaagtgattggacagttctactttactgctttctttggcatcaccaagaaggggcttgattttgtgaagtggaccattcaggggcagcagtatagggtttctatggcacagtttgctgcagctttggggttagatgatgatgacctgagtcgtccacatatctttgtagaggatgctctgtcaccaaccagcactacctttatgtatgagaaggatgctcctaaggattgtttggggactattcgagggttgcgtccatattatagagtgctgtactctatcttcaggtggtctttgctccccaaagtgggagatgctacagctcttccaggtaggcatgcgctcctcctcagtcgcatgcgctacaacaagccagatttcagcatcatgaagcttatttggagtgagatctataagacaatgtgtgagccaaagaggggctgcatctatgctccttatatcatgaagatgattgaggccaagactgggatttgttatttcaaggacaatcaacacaagcttttccgtcctcatgctcccactacttcagctactcctaccaccagagtgactcgtgcttccacctcagctgctccttcttcctctgctgcacctcagcgttctgagtcttcttctcccataaagaaggctcttagggctatcttttgcatgtgtgccaagacagctaagaaggtaaagaagatagagaggcgtcaaaaggaagattggattgcagcaggcaaggatgtctctgacatttctgatgatgaggagtttgttgatccttttgctgcttatgagactgctcgagacattgctagtggtgagggtccctctggcacttctcgtttcttcaatgaggagtcctctcactccgaggagagcagtgatgatgaggagtcaaatgcccctaccgagaatgttcttacagatcccgatgaggcagtggacgccgccgggcaagacatcgactctcctcactccggcgacaccgagatcattccttctgatggcgatgatgatgaggcttga

SEQ ID NO: 23022 - DNA, 779 bp, Oryza sativa
  Clone ID: TF_LIB4506-006-R1-K1-A9
ggtccggattcccgggtcgacccacgcgtccggaaacattgctcgacatctccactttgtccctggaggaggtcactggacgcctcaaggcggctgaggactctggccagtcgtcgtcctcgtccttaccaggtggcagcggcaagctctatctcaccgaagaagagtggcttgaacgtcacaagaaaaaggaacaggaggcgaagaagggcaatggcggaggcaacacccgtggcaagcgccgcggcgggcaagggtgcaatggtagtggtggtggcgacaacgctagcccggtgcgcaagaaggacaagtgccgtaattgtggcaaacttggccactgggccaaatattgcaggagcaaaccaaagcaggagcaagcgcacgtggcccaggaggaggattagcccacgctcatgctcatgacgggcggctgcattgatgtggtggaggagacgggcgcgccgtgcgcgacaccgtcgccgcccgcattgcggcctcgcccagacgtcatcgagtttgtggagcagaaggtgatcgccgcgctggacgacgccaccgaccacgacaacaagcgctagatcctcgacaccgacgcgtcgaaccacatgaccggctcaacaccaacgtcaccggcaatgtccgactcggggatggctcgctcgtccacatcggagggcgcggcaccatcctattcgcctgcaagaatgttatattgacggtcgaaactgatcgataacgaccgtcaacaaaaccccccaagctttgacctttgctcgtcc

SEQ ID NO: 23023 - DNA, 5115 bp, Oryza sativa
  Clone ID: TF_OsC359_8211
atggaccaataccgaccactggtcgaagatctcaaactgctgtggaagaaagaaggcgtcctccccgtgtgggatgaggacaaacaggggatgctggtagcggcgagcgtcagcctcgtggacatcgagcaacctctgagtttcgatggcgtggggacgacgcgcatcgagggcttggtggaggcggcgggctcggcgagggaggttgatggtggcgaaagaggagttggcggtggaagcgggctcggtggagagtgtcgccggtcggtggagacgccggtcgggcaggtggcgtcgggcgtcggagaggaggaagcgacgacaacgaggaaggacgttaccgggctcgcggcgccgggctcggtggaggcggcggcctcgggctcagcgaggaaggcggcggcgccgggctcggtggagggcgtcgccggggacccccggtgtctcctctacccgccgccaccctcgctttcgcctctcgtcgtcggaaacgccctagcgccgtgtgccctagcgccgccgtcgccgccgtcgctccagccgtccttcgccgccgttccggtcgtcgccgtcgctcgggaagaccgtcgtcgtggtcgccaagtcgtcgccgtcctcgtccgccccttcgccgtcgctgtagaccgccggagcaccgtcgccgtcgtcaagccgaagagcgccgccgcttcttcttcgttgccgtcgccgtccgttcctcttccgccgctcttttggtcaccgcgctgccgttcgccggcgagcgtgcgccgtccgagccgccgagccgccgccgccggtggtgacgtcaccgctgacgtcatcgtcgccctctcccggggtgattatgatccaggaaaggtgcgctgcagtggattgtgttatgcaaggggtattgtcacaactcctttccgaggtaccgtggtgatgccgcgctacaagcctgagtacttgtttggtgttgagggttttgtccaggagttgagtacgatgtcctttgtcattggatttgggactgcccctttttatgctcagattcctcatgatcgtcatgaagagaagtgccgagtcaaagtcactttgaacagtaatagtgaagatatcccctcagtgatgttcgaagctggaggaagaaactacatccatgcatgtcaggaggtggcaaggatcgccataggagagctccgtgatcgctacagtgatcagttggccgacactgagtatcgctaccatcctcgccaaccacagggaagtgaccgtggcagctaccttgagactgaaggaattgagaatgatgctaccacaaggcatttggtcgagatgctgtgggctatggatgaaagtcgtgcggagactgtgttagcggctcaagatcgtgaagaccggaatcgtggtaagatttgcaagttagaagacaaggtggatcgtttggagagggaactagctgcattgaagggagaagcaccgccgcagaaggctaggattcgtctcaccgcaaggaagagagctctatttgtccctcgctatcaattggcgccaaaggttcgtgtggtggagaaagaagttgccccaaccctagcagatcctccggtcatcatcataagtgatgatgaagaagaagaatccaagcgcaaccattccaagattgagtgggaagctactcaagatgatgaagacgagccgaacgagccttcaatcgacctccgatgctcggaagaactagacaacgggaatggccccaacaacaacaataacaataacaatgaagggaacccaacccttgctcaagttcttgctcaacagactcagttaatgaacatgatgatgcagcaacttcagaatcagcagaaccaaggaaataaccatgcacctccccagaacaagttagcagaatttcttcgtgtgaggccgcctattttctctagtacctctaatcctgttgaagctggtgattggttgcatgccatagagaagaagttggatttgcttcagtgcactgatcaggagaaggtctcatttgcatcacatcagctgcatggccctgcttctgaatggtgggatcacttccgcctgaaccggactactgctgaacctatcacttggcttgaattcaccgctgctttccggaagacgcatataccatcgggagtggtgtctctcaagaagaaggagttcaggtcgctcacccagggatctcgctctgttacggagtatttgcacgagttcaatcgtctggctcgttatgctccggaagatgtgcgcaatgatgaagagcgtcaagagaagttcttggaaggacttaatgatgagctttcttacccactcatgactggagattattctgatttccagaagttggtggataaggctattcgtcaggaggacaaaaacaaccgcatggagcagaagaaacgccggattgctcaattcaagacacaacaggggaataatcagaagccgcgtcttactttaggaccccagaccatgccacatggaggttcttcatctgttgtacgtccgcagcgtcagttcttcaacaacaatgctggcaacaacatctgcaatcaagctccacgtcctgttgcagctccaacacagcaacaaccttccaagagggagcaaggcagcaaacccgtggtgtgtttcaactgtggagacctaggacattacgctgacaagtgtccgaagccccgacgtgtgaaggttgtccctacccagagcaactctaccgtaccagcgtcaaaggctcgtgtcaatcatgtcgctgctgcagaagctcaagatgctccagatgtgattttggtccgggagtatcccgatgtgttcccagatgatttacctgccaatgaattggcagaagtcaagaggcaagtagatgatttgcttcagaaaggatacatcagaccaagtttgtcaccatggggagctccggttatttttgtggaaaagaaagaccatacccagagaatgtgtgtggactatcgtgcactaaatgatgtgactatcaagaataagtatccactacccagaattgatgatttgtttgatcagcttaaaggtgccactgttttctccaagatagatcttcgatcaggatatcaccaattgagaatcaaagaggaagatatacctaagacagcttttaccactaggtatgggttgttcgaatgtactgttatgtcttttggacttaccaatgcccctgctttcttcatgaacttgatgaataaggtgtttatggaatacctagacaagttcgtggtggtctttattgatgatattcttatctactctcgaaccaaagaagagcatgaagaacatcttcgccttgcattggagaagttacgagaacatcaactatatgctaagtttagcaagtgtgaattctggttgtctgaagtgaagttccttggtcacgtcatctcagccggtggagttgccgttgatcctagtaatgtggaatccgtaaccaactggaaacaaccaaagacagtttcagagattcgcagtttcctaggcctcgcaggatattaccggaggtttatagagaatttttccaagattgctaagcccatgacacggctgcttcagaaagatgtgaagtacaagtggtcggaagaatgtgagcagagttttcaagagttgaagaatcgcttgatatcagctcctattttgattttgcctgatccaaagaagggtttccaggtgtattgtgatgcatccaaacttgggttaagttgtgttctgatgcaagatgggaagccgtccttcgccgccgttccggtcgtcgccgtcgctcgggaagaccgtcgtcgtggtcgccaagtcgtcgccgtcctcgtccgccccttcgccgtcactgtagaccgccggagcaccgtcgccgtcgtcaagccgaagagcgccgccgcttcttcttcgttgccgtcgccgtccgttcctcttccgccgctcttttggtcaccgcgctgccgttcgccggcgagcgtgcaccgtccgagccgccgagccgccgccgccggtggtgacgtcaccgctgacgtcatcgtcgccctctcccgtgagccggcgggcccgcccgccgccctcgctgacgggtgggtcccacctgtcatctccctcctcgcgccgcgccgccgcccgcccgtgccccccgcgattccctctcccgtttcccccgttttcccctctctctctccctcggattcgtccggattcatcccgcaatcgtcgccggcgtcttcaatggcggccgagatctccgcgccggtttccttcctctccggccgcgctctccccctctcggcgctatatatttgctccccgtgcttcgctcttccgtttccgccgctcgccgctcgctctccccgtcggattcgtgctcgcgccgtcttcctctctctccgccgtcgccgacgagctccggttcgccgccgacgtcgctccgcgcttcctcccgactcggcgccacctccgtcggcttcgccgcgtcgccgccgaccccgtccacccctccgcttcgctcgccgaccgccggagcaccgtcgccctcgccgtcccgaaccgcgccgccgcgttcctccgctccgttcgtcgtctccgccgtcctcgtgtctcggggtgagccgtggaccgtccctttcgcttccctctcctctccgctctctcgggcgccgctccgccgcgccggtggtcgccggcggtgaccatcggggcgcggtcgtgccgcctcccgtcggccgtgccggcgaggccgccttcgggcgcgccctcgcggctgccaagtgggcccggccgtcagccgcccgcgcccgcgggtgcggctgacgcgtgggacccacggcgccgaccgccgccagccgcgtgctcccggtccaccgtggaccgagaggctgacgcgtgggccccactcccgtggacccggtccgcgcgccctctccctcggctccacttctgccggaggcaggcgcgtcgtgggaacgtggctgtcgcctcggccctcggggccggggcaggagtcacccgaccccccctcggggaaatcaggaggagggcggacacctcaccctcgggcccgacgtccccgaaggtgccaggccacgtgggcgattgtgt

SEQ ID NO: 23024 - DNA, 5446 bp, Oryza sativa
  Clone ID: TF_OsC1713_5373
ttagacatagtccaatgctatcactccggagtttttctgctttctgacagatttcagtcttattttgatatgtctagatgacttcacgttgtcctttgaactgttcactttaataatcactgtttgattatcacagttcgttaggatagctggcactggtttttcaaccaccggcaaatccatcaggagttcacgaagccactcggcctcaactgtcgcagtatctagtcctgtaagttctgcttccattgttgacctcgttaagatggtctgcttacaagacttccaggaaacagtgccacctccaagtgtgaacacatatccacttgtggcttttatctcatcagcatcagatatccagtttgagtcactatacccttccagtacttttaggtacccggtatagtgaattccatagctcatagtgccctttagatagcgcattactctttccaaagcctgccaatgatcatccaccagatttgagacaaaccggctcagcttgcttacagcaaatgagatgtcaggcctcgttgcactagccaagtacatcaatgaacctatgatttgtgagtatctcagttgatcccttgctattcttcggtttttccttaatagcacactgggatcataaggagtaggagctggcttgcagtcgttgtgtccaaagcgactcagaaccttgtccacatagtgggattgcacaagtgtaatcccaccctcatctcctcttagtagcttaatgttaagaataacatcagcctctcccaaatccttcatttcaaaactcttggacagaaagtccttgacctcctcgatcacattgaggctggtcctaaagatcaatatgtcatcgacatataaacacaagatcactccttctcccccaccatagcgatagtacacgcatttgtcagtttcgttcacaacaaagccagcagatgtaagtgtggtgtcaaacttctcatgccattgcttaggtgcttgcttaaggccatacaaggatttcaacagtttacacaccattccctcccgaccttctagtgcatacccgtttggttgatccatatagatctcctcctccagctctccatttaggaaagctgtcttaacgtccatctgatggacgagaagagcatgagaggctgccagagcaagtagtactcgaatcgtggtcaaatgggcaactgatgagtaggtgtcgaaaaaatcctcgccttccttttgggtataacccttggccacaagccttgccttgtacttttcaattgtaacctctggcctaagctttttcttgaaaacccatttgcatcctacaggcttggacccatatagacgctcaacgacttcccaagtaccattagacataattgagtctatctcactacgtactgcttccttgttcatacgccacactttgctcctagtcctcttctcggcttcatccaatatccggatcgggtgttctggatacgtaagatcattgctaatgtgaatctcttccagcggagcttgttcttccggcactcgtaagcatttctttaattgagacacatggaagactgggtgcacatcagcgatattctctggtagctgtaactgatatgcgacttctcctcttctagccgtgatttgaaagggtcccacgtatcttggtgctagttttcccttaaccctaaacctttttgttcccctcatcggagaaacctttaaataaacgtaatctccttccttaaattctaggtttcttcttcgggtgtcggcataactcttttgtcgtgattgtgctacctttaaacggtcacggatcaagcgaaccttttcttcggcctcattgataatgtcaggtccaaataccgcccgttcacctgtctcagaccacatcagcggcgtccggcatcgtcgaccaaacaatgcttcattgggggacatcttcaggcttgcttgaaagctgttgttgtaggagaactcggcgtagggcaaacacctctcccagtctttgctaaaatccaacgcacaagctctcagcatgtcctccagtacctggttggttctctccgtctggccatctgtctgtggatgataagctgtgctaaaagcaagataacttcctagggcttcatgtactttttcccagaaatgcgaggtaaactgtgtgcctcgatcggatataatcctcttaggtataccatgaagacacactatcctggtcatatacaactcggcaagtttagcactgctatagtttgtcttgacggggatgaatcttgccgtcttggtgagtcgatccacgatcacccaaatggaatcatatcctgttgcggtcttgggcaatccaacaataaaatccatacctatctcatcccatttccattcaggaatcctaaggggttgcagcaagcctgccggtcgctgatgctcagccttcactttttggcatacgtcacagagtgctacgtattctgccacatctctcttcatgttgggccaccagtatccttccttcagatcttggtacatcttcgtacttccggggtgcaatgagtatgccgattcgtgagcttcctttaaaattaatcccctcagtccaccctgttcgggtacgtaaattctctttttataccatagaacatctttttcgtcgattgaaaattcctttgcacgtcctgcagctaagcgttccttcaactctcggatttcctcgttgtccttctgggcttcttctatttgggttctcaaaagaggttgaatgtccagggtgtttattttgttcataagattcatgaagtaggctggggcattggttagaccaaatgacatcactgtgaactcatacaatccatagtgtgttgaaaacgcggtcttgggaatatccttggtcctaatcttcagttggtggtatcctgatcgaatgtcgatctttgaaaacaccttagctcctttgagttgatcgaagagatcatcaaaccttggtagtaggtacttgttcttaatagttacttcgttcagtgatcggtagtccacacacattctcatgctaccatctttcttcttgacgaatagcactggggctccccaaggtgacgaactggggcgtacaaatcccttttcttgcaactccctaatttgctttttaagttcttctaactcattaaccggcatccgatatggtctcttggatatgggggcggttccaggtatcaggtcaataatgaactttatgtcacgatctggtggcattccaggtaaatcttctgggaacacatcaggaaatcgctgcactacaggcattccctttaggggtagcatggtaaatatacctccggcacgttcggttagcctaggatcttgatccatggttgctctcatatccgatccccagggtgtggttaaggtcacctctctacgcccacagtcaattacacctctattctttgttaaccaatccatgcccagtatgacatctagggtctgaggtattaagatcataagattggagggaaacaccacgtccctaagacgaattggtacgtctatgcaagcatgactcacagttatctcgcccccaggtgagtgtactatcataggctttctaagtcccactagggttaagttgtgcttttgactagccttcagagatataaatgaatgcgatgcaccagaatcgaagagaactttaaccggggtagaattgatagagaacatacccatgagtatgccctgatcttcctgggcctcttcagctcggacatggttcacttgtccgcgcccaagtccagtggcggtcctgttagattgcggagtcttgaatagacctcgcccggtaacaggggtagtagtgccacgaacagtcattgcattcgtgccggtccggacaggagtcttgcgtggatgagggcagttgttggcgtagtgcccataccccccgcaattgaagcagttcacattcatcttggctccaggggcagccaaagttggtgtaggggtgcggttctgaattgcaactggcctgttgaagttgctaggtgcagcgggacggttggttgccacgatagggggcttccatccggatgaagtggctcccttgagtcgctgaggcactatctgaggtaggcgactcatagcaagcctcctcttgcggttgtgttccaccgtcctttgatcgttctctagcctgacgactttgttgatcaggctctggaaactctcgtgatcctgcccgatcataggtccacgcaattcatcattcagcccttctatgaacttgtcgatcttttcttcttcatccgctaggtctccaattgcatagcgggccaactgagtaaacttgttcagatattcttgcaccgttgtattcccttgccgcagccatctaaactcgttcttcttcatgcgcatcactgcagcaggtacgaagttctcgcgaaatgctgcagtgaactcctcccaagtgggttctccagcatcgttttcccgagcttccttgtaggtgtcccaccaatcactagcgggtccttccagttggtttactgcgaagattactttgtcggtttcgcgtaccctgacaagagtcagtttcttctctatgatgcgtagccagtcttctgcctccataggctcatctgccgtagcgaaagtgggtggcttagtcctcataaactctccaaagctcgatcctccgcagttgtcttgattgtttgcaatggcttgcagaagttgggtttgagtggccataactctggccagggtggttaggtcgggtacttgagtttcttcattgctggttgacgccctacgtcggcttgccatctgtgtaggccgatgaggtatgtatcctattttcctaactagcccttttggttttatcccgttaagggagttgttttgattgtgaactgagtccccacggctcggaagtagtggcctctggatctggcttgggcttcttgcccggaggtcgtgtgctcttgcgagcagtgctgagggtacgagggcctccgacaaaggtgatgcggtgggcaggagtctcatcctctgaaagatcagtgatgtccggctctatctctggcttagtgtcggtcccctctgtctcggagtcgacctggattggagtctccaaactggaacccagtgccccaagccaggtgctcctcctctagctgaagctgctgcactgtgaggtcagtcacctcagtctctctaactctcccacacgcctctactggtcgtcgatctctaacagagcctcctcgtagaagtcgtctactgcctcagcccatcgggacagtcgagtcactgtcgggttgtagcagcaaggtgtgtcctggactgtgcagacggagttgctctcctctcgaaatgggtggtgagcaaactcggtactcgctaactcagctcggtgaatagagctaattcggagaaaggcctctccggtaagtcgcgacgg

SEQ ID NO: 23025 - DNA, 4216 bp, Oryza sativa
  Clone ID: TF_OsC1713_4627
gaagcatcagactggaactaatcccagcttgcctctcaactccaaaaatcgaatcttaccaagaggctttgttaaaatatctgcatgttgctcctctaaccttatgtattccacctccacccgtttctgatcaacacaatcccagatgaaataaaactttgtatcaatatgtttactgcgatcatgaagcacaggattcttcaagagacttatagcagacttgttatcaaccttgatcagtgcacaaccaggttcttggccttccaactcacctattggtcgagccagccacactccttgtacagcagcagttgcagcagctatatattcagcctcacacgaagatattgctaccaccttttgtttttgtgactgccaactgatcaaactgtctcccaatttaaatagaactccggttgtactctttctatcatcaatatccccagccatatcactgtcactatagccattcagctgaggaacctgttgttgcttctttctgaattccaccccgagattcagagtacctgccacatacctcaaaatatgtttcatggcagcccaatgttcagaggtcggtttctccataaacctgctaacataaccaaccgaataacttagatgaggtcttgtgttcaccaagtacctcaagctcccaattatgcttctgaattgagtttcctccatacattctcctccctcctttctcaacttcaaccgagcatccatgggagtctgacatggattacaatccctcatcccagctttgtcaagtatctttgctgcatatgcaccttgagacactgtgatcccttcctttgcatgtttcacctccatcccgagataataagagagcagaccgagatcactcattttaaaaagagcctgcatctgctccttaaacttgtttatttccatcagacttgctcctgtagtaatgagatcatccacatatacaccaaccacaagtcatgagttcttctctcctcgagtatacacagcacttttgacaccactcttgacaaaattcaggctcacaagactagaatccaacttcgcataacatgcacgtggtgcttgtttcagtccatatagggccttcttcaatttcaacaccttgtcttcttttccatcaacaacaaaaccaggtggttgaaccacctaagcatcttcttccaattccctattcaagaaagctaatttcacatccatctgatgaacttcccatccctgatgagcagccgttgcaatcagcaatcgcacagtctccatcctcgtcactggggcaaatacttcatcaaaatcaactccttgttgatggacatatccctttgccaccaatcgagctttgtacttcacaatgacatctttggcatcacgtttgattttgtaaacccatttcagtcctgttgctctgtggctagagggcaaatcatagagagtccaggtgttgttaccttcaattgattccatctcttcaagcatggccttcctccagcagctctcctgctcagcctccaagaaacttgctggttcctctgctgccataaggcattgatcactgtaattaaaatctaggattggggtcaaggtggcaagcgtgttcaccactgttctgtagctcctgggcccttcatcagtcccttcactagcatcagttggaggggaacagaattcaacaccagatggcagagttgttgcagttccggtgcttgatgttggtgatgttgctagcatggttggagtggctgctgcatcctgggcatgtgtctcactcccttggactgggattgtgaaattctccaccgtaaactccacatacgcgtcctgatctccttcttcatcagtgttgctgccccagtcccagaacgtcgtctcataaaaaaacgacgtcgcgtgacacacacacgcgtcgcaccacaaaatcatacatcttgtaggcttttgatccttgctcgtagccgatgaagaccatcctcgtgctacgatcatcaagctttctcaagtttggcttggctgtcttaacatagcccacacactcaaacacacgcaggtgttcgacagtgggtcggcgaccataccacgcttcatacggcgtcaccccatcaagactcttcattggtgatttgctcaagacatagacggctgcaaccaccgcctctccccagaaatatgccagcatgtttgccgccttcagcatggacctagctgctgccaccacagtctgattgcgccgctccacgacactgttctgctgccgtgagtagggtgcagtgatttaacgtttcacccctgtgtccgcgtagtactccatgaactctatagaggtgaattcacccccgcgatcagtgcgcagcgccatgagcttccgattgctatccttctccacgccggcttaatcgctgccgatgcttcgtgtttggcagagaggagtcgtatccacatgtgatgactcatgtcatcgactaggagcaagaaatacttcttgccccctgtcgtcgccggcgtgattggtccgcagaggtcaccgtgcaccagctcgagcgccgtctgcgccctgtactgcgcctcctctgggaacggtgtgcgatgttgtttgcccgcgaggtacccgtcacacaactgatcaatgtgatcaatttgcgggatcctgcggaccacgcctccttttgccaacctccgaagtgccaggaaattcagatggccaaatcgtgcatgccatcgccatgctagctcggagccgctcgctgccatacagattagtgtcgcaaggttcaacttgagaacatacaggtaacttgaatcacgatttaccttagctagctgcatcccttccgggtcacgcaacgtgaaaacaccatgccaaatgtgtgcgtcgtagccgcgcgcatcgaggcgaccaacactaacaatgttttttctcagcttggggatgtagtacactgcctctagtgagcggtgatcaccattcttgctctgaaacaccacagttccgcgcccctagatgtcaaccactgagccatcgctgaatttaaccgtgcccacaacaccagtgtcaagctccgcgaacgctgagcgtgcgcccgtcaagtgattcgtggccccggtgtccaggaaccactctccagtcttctcctccttacgcccatcctcatggtccagcacaaccttcttctctgtgagatgcacttcctgcacacaaggtgttcgaccaacggccgcttcgccggcgagcgacacccccatcacgtgtgccatgagcagagtcggctcttcctcagcctggaccagatttgcatttgcctctccccgacattggcgacgcggcatacggcactgcttcgagtaatgaccgtattcatcacaattgaaacacttcaccttagagatgtcacgacagccatggccgctggtggccatctcctttcccttcggtgaatcgccggccttgcctcgacggttctggttgccagagcccgcccggcccttgttgctgctgccagatccctcctactcccgctgcttgacaccggcctgccactgctccttagtgaggtacaatttgccaccgtcacttgcctcctcatcatcactgtaggagtcgaccgtcgacagccactcgatgagctcctccagggccatggtcttcacgtcgaggagctgctcgagggaaattgccaccggcttgtacttcttggggacaacacgcagcagcttcttgttgatgtgttcgtcttccatgactccgcccatgttgcgcatgtccgcaacgatggcagtgagccgcatcgcaaattcctccggtgtctcaccgtccttgaagcgcatcgcctcgaactgacggcggaatccctgctccctcgcctcgctcacgcggtcgacaccgacccgcatggttttaatggcatcccacgccgccttcgccgtgtcgtgctttgccaagccgcgcaacatctcgcggggcacagcttggagaatcgccgagagcgctgcacgatcctcgcggtactccgcatagcagggatcgatggccgtccagagcccctgcgcctgcaggttgacgcgcatcaacagcgctcagtctatataatttgtcctcgacaggatcaagagacgggcagtgtgccctgcatcgactagcgggagtgatgccgcagccgttgtcgcttcccccgccgccaccgccaccacgacggccaggcggtgtgtatgacat

SEQ ID NO: 23026 - DNA, 906 bp, Oryza sativa; identical to SEQ ID NO: 13924
  Clone ID: TF_OsC333009_5

SEQ ID NO: 23027 - DNA, 4275 bp, Oryza sativa; identical to SEQ ID NO: 13926
  Clone ID: TF_OsC359_5853

SEQ ID NO: 23028 - DNA, 4917 bp, Oryza sativa
  Clone ID: TF_OsC359_5908
agacgattatcctggtttaggcccttagcatggggtaataccctacgtctggtgatgtagattggatctatgtcaactaaaaagacaagagtgttaccgcttagggttagtgccagcgcccttatagagctagggcaaccgacgacatgcttcgtacagtatccctcataatccggctccagccgacggcaccgccgccgccgaaaccgccaccgacgccgccggtttccccgtttcccgcggcccactccgcccgtaaccccaagcccacgtcgccgcccaccttccccgcacctcccgccagttcgggggcccgcaaacggcgggggggatttgaaatttcccccactctctctctcctcctccatatggtgaagacaaggaatgatccccgtgactccaacgacgccagtggcagcgaagagcagaccgatggagctcatgtcagtggtgcatctggcagcagatcatctccaccgcccgaaaacccaacagtcactcaaatgatgacaatgatgatgcaacagatgcagcaacattaccatcagatgttgcagcaggcgcaacagaaccagcagtttggtcctccaccatcacacgtgtccaaactgttagactttcttcgtatccagccacccactttctcaagcaccaccaacccaatggaggccaatgactggctccgtgctattgagaagaagctgaacctactgcaatgcaacgaccaagagaaagttgcttttgctacacaccagttgcaaggtcccgcttctgcctggtgggataactacgtggcgacccgtctagatgcaacggaggttacttgggcagagttttgtcaaagcttcaggaaggcacagattcctgaagggattatggcacaatagaagagagagttccgtgcgctccagcaaggaaccatgtcagttacagagtacttgcatgagttcaaccgccttgcgcgctacgctcctgaggacgtgcgcaccgatgctgagaagcaggagaagtttttgtttgggctcgacgatgaattgaccaaccagctaatctccggagtctatgaggactttgagaagcttgtggacaaggctatccgccaggaagagcaacgcaacaaaatggaccgaaaaagaaaggcagctcagatcagctttcctcaggggaacaatcagaagcctcgcttcatgacgggacagctaggtgggccttccaccctgatcgtctgtcagcaccgtccctatcacccgagtaacttcgacaacgactacaacggtggcagtcacaacaacagtaagcagcacaaccacaactcgactccacccccactaatggcaccagctcagtcagatccgccagctgtgtcagctcagtcagaacaacccaagaagagggctgtaggaaagccaggaccctgcttcaactgtggcaagcacggccactttgctagcaagtgtccgaagctgaatcgcactggacccaggttcatccaggcccacgccaatcatgtgtctgcagtggaagcacaggcagcaccagaggtcgtgttgggcacgtttccagtgaactcatatccagcaacagttctctttgattcaggtgcctcgcattctttcatttccaaaagatttgctgggacacatggattatcggtagtggaacttaaaataccgatgcaggttcatacccctggaaatgatatgaggacagcacactactgcccctcggtgactatagagatcagaagatcaccgtttctatccaacctcatccttctcgaatctaaagacctggatgtcattcttggaatggattggttgaccagaaacaagggagtgattgactgcgcaagccgcaccatcaccctaaccaacgacaaaggggagaagatcaccttccgttccccagcgtcgcagaagtccgtagcgagtctgaatcaggctgctattgagggtcagacagaaacagtggagaaaagtcccaggaagttggaggatattcctatagtacaagagtatcctgaggtgttcccagaagacctcactacaatgccaccgaagagagaaatcgagttccggatcgatttggcacccgggactactccaatttacaagaggccgtacagaatggcagctaatgagctagcagaggtcaagaagcaggttgacgaacagctgcagaaagggtacatccgaccgagtacttcaccttggggtgctccggttatctttgtggagaagaaagacaagaccaagaggatgtgcgtggattatcgcgcccttaatgaggtcacaatcaagaacaaatatccgttgccaagaattgatgacctgtttgatcagctaaaaggagctaaggtgttttccaagatagacctacgatcaggctatcatcagttgagaattcgggaagaggatattcccaagacagccttcaccactcggtatgggttgtttgagtgcacggttatgtcctttggactcaccaatgcaccggctttcttcatgaacttgatgaacaaagtgtttatggagtttcttgacaagtttgtcgtggtattcattgacgacatacttatttattcaaaatcagaagaggaacatgagcaacatcttcgtctggtacttgagaaattgaaggagcaccagttatatgccaagtttagcaagtgtgacttctggttatcggaggtcaaatttctgggtcacgtcatttctgctcaaggcgtggcagtggatccatcaaatgtggaatcagttacaaagtggaccccaccaaagacagtttctcagatccggagttttcttggacttgcgggctattaccgtcggttcatcgaaaatttctctaagattgccaggcccatgacacagttgctaaagaaagataaaaaattcaaatggtcagctgagtgcaaccaaagttttgaagaactcaagaagaagttagtctccgcaccagttctaattctgccagatcagacgaaagacttccaggtctactgtgatgcatctcgccaaggattgggatgtgtgttgatgcaagaaggcagagtggtcgcatatgcttcgcgacagttgcgcccacacgagaccaattatcccactcatgaccttgagttggcagcagtggttcatgctctgaaaatctggcggcactatcttattggcaaccgctgtgaagtttacactgatcataagagcctgaagtacatcttcacccagcccgacttaaatctccggcaacgaagatggctggagttgattaaagattatgacatggggatacactatcatccaggcaaagcaaatgtggtagcagatgctctgagcagaaagagctattgcaatgcagtatgtaccgaaggcatgtgtgacaaattgcagcaagatcttgagcacctaaatttgggcatcgtagaacacgggtacgtagctgccctagaggcccggcctacgctcgtggatcaagtcagagcagctcaagtaaatgatcctgaaatagctgagctgaaaaagaatatgagggttggaaaagctcgagatttccatgaggatgagaatggcacaatctggttgggagaaagattgtgtgtgcctgacgacaaagaactgaaggatctcatactcacagaagctcatcaaactcagtattcaattcatcccggcagtactaaaatgtaccaggacctcaaagagaaattctggtgggtcagcatgagaagagagatagccgaattcgtcgcactctgcgatgtttgtcagcgagtcaaagcagaacatcagaggcccgcaggactgctacaaccccttcagatcccggaatggaaatgggaagaaatcggaatggatttcataacaggtttgcccagaacatcgtcggggcacgattcaatctgggtggtcgtggatcgactcaccaaagttgctcattttattccagtacacactacctatactgggaaaaggttggcagagctttatctttcaagaatcatgtgtttgcatggggtacctaagaagattgtatctgatcgaggaagtcaattcacttcaaagttttggcagaaactgcaagaagaattggggactcgtttgaatttcagcacggcttatcatccacaaacagatggtcagaccgagcgagtaaatcaaatcttgtaagatatgttgagagcttgtgcacttgactttggtggagcctgggataaaagtctaccgtatgcggaattctcttacaacaacagctatcagtccagtttgcaaatggtaccgtttgaagcattgtacggacgaaagtgccgcacaccacttttctgggatcaaacaggtgagcgccaactgtttgggacagaagtgttaaccgaagcagaggagaaagtcaggaccgtcagggaaagactgcgaatcgcccagtctcggcaaaagagttatgctgataaccgccgaagagagcttactttcgaagcaggggattatgtgtacccttcgtgtcactccgcttcggggagtacaccgcttccaaaccaaaggcaagttggcaccacgctttgtgagaccatacaggatcttggaacgcagaggtgaagtcgcttaccagctagagcttccacctaatatggttggtatccacgatgtgtttcatgtgtctcaactgaagaagtgtttgagggtacctgaggaacaagctagctcagagcacattgacatccaagaagatttgacctacgtggagaagccagttcgtatccttgagaccagtgagagaaggaccagaagcaaggtgatcaggttttgcaaagttcaatggagccaccactcagaggaagaggccacctgggaaagagaagatgaattgaaggccgcccatccgcacctcttcgccagctcttccgaatctcggggccgagattccgtt

SEQ ID NO: 23029 - DNA, 3930 bp, Oryza sativa; identical to SEQ ID NO: 13925
  Clone ID: TF_OsC359_6656

SEQ ID NO: 23030 - DNA, 4674 bp, Oryza sativa
  Clone ID: TF_OsC359_7205
atggtgaagacaaggaatgatccccgtgactccaacgacgccagtggcagcgaagagcagaccgatggagctcatgtcagtggtgcatctggcagcagatcatctccaccgcccgaaaacccaacagtcactcaaatgatgacaatgatgatgcaacagatgcagcaacattaccatcagatgttgcagcaggcgcaacagaaccagcagtttggtcctccaccatcacacgtgtccaaactgttagactttcttcgtatccagccacccactttctcaagcaccaccaacccaatggaggccaatgactggctccgtgctattgagaagaagctgaacctactgcaatgcaacgaccaagagaaagttgcttttgctacacaccagttgcaaggtcccgcttctgcctggtgggataactacgtggcgacccgtctagatgcaacggagaagagagagttccgtgcgctccagcaaggaaccatgtcagttacagagtacttgcatgagttcaaccgccttgcgcgctacgctcctgaggacgtgcgcaccgatgctgagaagcaggagaagtttttgtttgggctcgacgatgaattgaccaaccagctaatctccggagtctatgaggactttgagaagcttgtggacaaggctatccgccaggaagagcaacgcaacaaaatggaccgaaaaagaaaggcagctcagatcagctttcctcaggggaacaatcagaagcctcgcttcatgacgggacagctaggtgggccttccaccctgatcgtctgtcagcaccgtccctatcacccgagtaacttcgacaacgactacaacggtggcagtcacaacaacagtaagcagcacaaccacaactcgactccacccccactaatggcaccagctcagtcagatccgccagctgtgtcagctcagtcagaacaacccaagaagagggctgtaggaaagccaggaccctgcttcaactgtggcaagcacggccactttgctagcaagtgtccgaagctgaatcgcactggacccaggttcatccaggcccacgccaatcatgtgtctgcagtggaagcacaggcagcaccagaggtcgtgttgggcacgtttccagtgaactcatatccagcaacagttctctttgattcaggtgcctcgcattctttcatttccaaaagatttgctgggacacatggattatcggtagtggaacttaaaataccgatgcaggttcatacccctggaaatgatatgaggacagcacactactgcccctcggtgactatagagatcagaagatcaccgtttctatccaacctcatccttctcgaatctaaagacctggatgtcattcttggaatggattggttgaccagaaacaagggagtgattgactgcgcaagccgcaccatcaccctaaccaacgacaaaggggagaagatcaccttccgttccccagcgtcgcagaagtccgtagcgagtctgaatcaggctgctattgagggtcagacagaaacagtggagaaaagtcccaggaagttggaggatattcctatagtacaagagtatcctgaggtgttcccagaagacctcactacaatgccaccgaagagagaaatcgagttccggatcgatttggcacccgggactactccaatttacaagaggccgtacagaatggcagctaatgagctagcagaggtcaagaagcaggttgacgaacagctgcagaaagggtacatccgaccgagtacttcaccttggggtgctccggttatctttgtggagaagaaagacaagaccaagaggatgtgcgtggattatcgcgcccttaatgaggtcacaatcaagaacaaatatccgttgccaagaattgatgacctgtttgatcagctaaaaggagctaaggtgttttccaagatagacctacgatcaggctatcatcagttgagaattcgggaagaggatattcccaagacagccttcaccactcggtatgggttgtttgagtgcacggttatgtcctttggactcaccaatgcaccggctttcttcatgaacttgatgaacaaagtgtttatggagtttcttgacaagtttgtcgtggtattcattgacgacatacttatttattcaaaatcagaagaggaacatgagcaacatcttcgtctggtacttgagaaattgaaggagcaccagttatatgccaagtttagcaagtgtgacttctggttatcggaggtcaaatttctgggtcacgtcatttctgctcaaggcgtggcagtggatccatcaaatgtggaatcagttacaaagtggaccccaccaaagacagtttctcagatccggagttttcttggacttgcgggctattaccgtcggttcatcgaaaatttctctaagattgccaggcccatgacacagttgctaaagaaagataaaaaattcaaatggtcagctgagtgcaaccaaagttttgaagaactcaagaagaagttagtctccgcaccagttctaattctgccagatcagacgaaagacttccaggtctactgtgatgcatctcgccaaggattgggatgtgtgttgatgcaagaaggcagagtggtcgcatatgcttcgcgacagttgcgcccacacgagaccaattatcccactcatgaccttgagttggcagcagtggttcatgctctgaaaatctggcggcactatcttattggcaaccgctgtgaagtttacactgatcataagagcctgaagtacatcttcacccagcccgacttaaatctccggcaacgaagatggctggagttgattaaagattatgacatggggatacactatcatccaggcaaagcaaatgtggtagcagatgctctgagcagaaagagctattgcaatgcagtatgtaccgaaggcatgtgtgacaaattgcagcaagatcttgagcacctaaatttgggcatcgtagaacacgggtacgtagctgccctagaggcccggcctacgctcgtggatcaagtcagagcagctcaagtaaatgatcctgaaatagctgagctgaaaaagaatatgagggttggaaaagctcgagatttccatgaggatgagaatggcacaatctggttgggagaaagattgtgtgtgcctgacgacaaagaactgaaggatctcatactcacagaagctcatcaaactcagtattcaattcatcccggcagtactaaaatgtaccaggacctcaaagagaaattctggtgggtcagcatgagaagagagatagccgaattcgtcgcactctgcgatgtttgtcagcgagtcaaagcagaacatcagaggcccgcaggactgctacaaccccttcagatcccggaatggaaatgggaagaaatcggaatggatttcataacaggtttgcccagaacatcgtcggggcacgattcaatctgggtggtcgtggatcgactcaccaaagttgctcattttattccagtacacactacctatactgggaaaaggttggcagagctttatctttcaagaatcatgtgtttgcatggggtacctaagaagattgtatctgatcgaggaagtcaattcacttcaaagttttggcagaaactgcaagaagaattggggactcgtttgaatttcagcacggcttatcatccacaaacagatgctatcagtccagtttgcaaatggtaccgtttgaagcattgtacggacgaaagtgccgcacaccacttttctgggatcaaacaggggattatgtgtacccttcgtgtcactccgcttcggggagtacaccgcttccaaaccaaaggcaagttggcaccacgctttgtgagaccatacaggatcttggaacgcagaggtgaagtcgcttaccagctagagcttccacctaatatggttggtatccacgatgtgtttcatgtgtctcaactgaagaagtgtttgagggtacctgaggaacaagctagctcagagcacattgacatccaagaagatttgacctacgtggagaagccagttcgtatccttgagaccagtgagagaaggaccagaagcaaggtgatcaggttttgcaaagttcaatggagccaccactcagaggaagaggccacctgggaaagagaagatgaattgaaggccgcccatccgcacctcttcgccagctcttccgaatctcggggccgagattccgtttaagggggtaggtttgtcacgccctgtcggccccttcttcctcctccagccgacggcaccgccgccgccgaaaccgccaccgacgccgccggtttccccgtttcccgcgcccactccgcccgtaccccacgcccacgtcgccgcccaccttccccgcacctcccgccagctcgcgcgcccgcaaacggcgggggatttgaaatttcccccactctctctctcctcctccatttcccccacgtcgccggccaaatcggccacctttccggcctcgtccgcccctcccgagcccatataaaccatccccgcactcccctccacctttttcctctttccgccgctctctcccgtgccctccatcactcccgcaccgctacacccgccgccgccgccttttccactcctccggtcgccgctcgccgccgcaccatagccgccgccgtcggccat

SEQ ID NO: 23031 - DNA, 1396 bp, Oryza sativa
  Clone ID: TF_OsC55897_1
attccatttcatcccctcctctctctctcaaaaccctaattccccgacccgagcaagccctaggtcgccgccgcgccgcgaggttggaggagttggatttgggtctgatttgattcggattgggcgtggtggagatggcggagaaggaggtcgggaggatcttcgtgggcgggctgtcgtgggacaccacggagcgcacgctcgagcgcgccttcagcgagtacggcaaggtcatcgagacgcagatggtcgtattggaaagagacacaggccgctcccgtggatttgggtttgttacattctcagaacctcgggctgtggatgctgcaattcggggaatgcataatggagaactagatggcagaaccatttctgtgaacaaggctcaacctaggatgaacactgatgatggctatggctatggtggtggtggtggtggtggtggtacttactcatctggtgctagaggtggatatcgtggtggaggtgatgcagttccctctgcaaatgatgactgcttcaaatgtggccgtgcgggacattgggctcgtgaatgtccttattccagtggaggtgggggtggtagaactggaaggtactcacccccttccagatatggcagtggaactggtggtggacgtggtgaccgctttggaggatcagaccgttttgctaaccgctatgttgatgaccgatatgatggtgggcgctatgttgatgatcgctatggtggtggtggacgtgatcgatatgccactgatcgctatccaccaactgccgatcgttttacaggtgacagatatggtggttctgatcgttatgcatcaagtggatttaccagggaaagaagctatgaaagagatggaggacggtccggtggaagttactatcgtgatgaacctagaggctctggtggttatgacagaggtggcatgcgcatggggagtggtgacagatacgggaccggtggacctgctcgctttgctgggagttacagagataggcctgccccatatgatcgtcccagccgggcagcagcacgcacttatgatgaccgctactgatggaggttacttcggagcattgcagaagaccagaattacaaatatatgttccagttcgcagttcctactttatttgccttcctgtattagtacatcgactctttgagtgttgttcttccatgcagtttgtttaattactagtgagacaataaggcagttcttgaattgttagtatgttggcacattaagctccaggcagtgggtgattctgattccctgttatcgtggtactgtgtaattaccctccagtgtaataatcgtgttccgagtgtgctgtcttatataattttattctggatagcattgaaaattaaaaaaaaaaaaaaaaaaaa

SEQ ID NO: 23032 - DNA, 5483 bp, Oryza sativa; identical to SEQ ID NO: 13933
  Clone ID: TF_OsC359_6573

SEQ ID NO: 23033 - DNA, 3127 bp, Oryza sativa
  Clone ID: TF_OsC1528_1598
ttaggtggcaacaggcggcctgtcacacgcctcgccccatcccgtcagaatgatgagagcttcctggctctcgtctctagccgaagctggcgtgctgactcctggagttggtatgtcagtcccggtcaaatccattccaggcttcagcgcaagcgtggcaagaaaatcgctggccattgaatgaaggatgaaacgggcgtccaccgggagagctgacgagcggagcaggaggcatgtgtactgcttgtcagaggtcatttccggcgccagctccaggccggtcagaccgagcctatatggccggtcagaccgcctgccccagccgactccctcatcaaggtcgagatacctgttggttgccataggtgtcttgatgggctttgcatcctccaagccaaacctcttgagtagatccttgatgtacttggtttggctcacgaacgtcccatccttgagttgcaccaactcgttctcatcctgtttgttcctaaagacccactttgtccctatgacgttgtggtctctaggtctttcaaccaaagtccacaccttgtttcttgtaaagttgttgagctcttcatgcatagcattcatccaatccggatcacaaagagcttcatccttactaatgtcacccaacacttggttaattgggtgatccttggaaagagcggtgtgtatccttggtggcataggtggatcttgtgccttctcctcctccatttcaacttgagcttgacttggcgaagcagaagtagatggctcaccttgagtggaggtggatggcttgtgttccacttcaataggcttgacatctctaacagacatgttcttcatagctatcatcaagccttcatcacctacatcatccaaattctcgtgcccctcttgggagccattagtctcatcaaattgaacatcggcggtttcttctacaatacctttgttcttgttgtagacccagtatgccttgctatttgaggcataacttagaagaaacccggtcatgtgttgagtgcatccactatcaagcacccaatggctcccaccggtgcggtagttcaccaccaagtataggggaacccacaaatctagcaacaatgctaccatcatgagccttccattgctcttgacaaaatgagtggcacggtgagaaggtttcttacccttctttggaatgaatccaagtccctccttgttaaggatgcaccattgctcactcaaaatcttgtcaagagtgttcttacccttgaagcacttctccaaactattgttgagcttggccacttgctccttaagctcattgttctcaacaacaagtgaggcatcacaaatagaaacacaagagctagagctaggcatatccacaagatcatcacaagaggtagaaatgctagatgatgcaacatgagcaatatggcaagtagcactataatcaagcaaatcacaagatatgccaacatcaatgtgagctccatgttgagtagtggaaaggaggttgtcatgagcttccttaagcttctcatgagaaatggtgagtctctcataagaggtctttagctcctcatacaagacctccaaagaagcatgatccttctttagagccttgaacttgacaatatccttctcactataagcatggagctcctcaaacatactcacaagctcatcataggaaatatcatcacaatcatcatcactctcactatcactaagagatgttaccttagaggagccctttgccatgagacaaagtggagcgaagagtgatggagcctccttgatggcaacaacggccatcttcttcttcttggagcttgcatcatcaccaccttcttcctcggacccggatgagacggagctctcctcatttgagtcccattccccgatgaaggcctcaatcttcttgccttccttcttgagcttcttcatgagcttgtagcctccactcttcttcttggaagacttgtctccgtcatcatccttggaagggcacttggaagcaaagtgccccttctcaccacactcaaagcacctcaagttggagagagtcttgttgggtcttctatttcttcgcctattggagttagacccccttcctctctcctttctccttcccaagagatcattgaacctcctagcaagaagggcaatctcttcctctaagtccttattggcttcattcaccttgaccttgcccttgtcttcaacttcggcttggaaagcaatgcacttcttggaaggtgaggcttcctccatctccttcttcttcaacttgtacatgtcattggtgttgatcttccccaagaggcttgcgggtgtcatccttgacatgtcagagttgatgagcatggtgacaagggtctcatacttctccggtagagctctaagcatcttttgggcaacctcaagatcggtgtagtttgccccaagccccttgagatcatttacaatgacattgagcctcccatacatgtcattcacactctcatgaggcaacatggagaatgtctcatattggatcttgaggaaatgaagcttggcatccttgtactcacttgtaccctcatggatctccaccaacttgttccaaatctcatatgcggtctcaaggctgctcactctatcgaactcctcttggcacaaagagttgaacaaggcattcatggcgtgggcattgagttggaggttgcggtgatcaatctccgtcaagggtgtgccggtgatagcaaagccggccttgacatggcggtcagaccggcgatgccagccggtcagaccggccaggtggagagggtgcggccaccgccgccgctgctgcctccgccggtcagctgctggccgcgggagcccgccgaatcccctcttgccggatctggcggaggggagggcgcaacagccaccaccactgccgttgccgcctcccccaggcagccgccggtcgtgggagcccgccggatttgccgtcttcacgcaaccggtctttccgtcacctcggtacgtgttcaatcgaatgatggtcaccaaggtagagttccttggagtgattgcccgaaccatcttcttgaccacaacctcatcggtcatgtccttggagccaagtcccttgatctcgttgacgatcttg

SEQ ID NO: 23034 - DNA, 3004 bp, Oryza sativa
  Clone ID: TF_OsC1528_2224
atgtccgacgctcggtctcggcgttcggtcgcctcgagcactcggcgtcagcaggacgccgagctcgccgcagcagaagagcgcaggcgagcaacggctcagaccgctgcagcagcagcgagggcggccagactggcggcagcggagttggcagcagccagggcggaggcggaggcggaggcggcggaagatgcggcacgtgcggcggaggtagaggttgagaccttgcgcagcagcatcaacggctccattgccggcgacatcaccgccgacagggagcttgaggagctggcaagaggaagggcacgggagagagcagagcggtgggcagcagcccacctccacggcggcggcggcggcccaagggaccgcgcgtccgcagacgggaacccagacgggcgcaggcgtgccggcggcagcccggagctcgcacgcggccctcgcaggcagcacggctctctctcccctgatcggcgccatggtcaccacggtgtccagacggtggtcagggactttggtcccggcggtgggtggcctactctcaccaaaaccaactacatcgagtgggccgcggtgatgagggtgaggctccaggtgtggcacatgtgggaggcagtccggtacagtgacgtcgactacgacgaggatcggcgggcactggatgccctcatcgctgcagtcccgcccgagatgcagttctcgctttcccagaagcggactgccaaggaggcctgggacgccatcgctgcggcacgcatcggcagtgaccgcgcccgcaagtccacactgcaggcactccgcaaggagtgggagaacctggccttcaagccaggtgaggatgttgatgactttgctctccgtctcaacactctcttgcagaaaatggtgcagtacggcgacgacacctacgacgaggagagagctgtcgagaagctcttccgctgcgtccctgagaagtacagacagatcgctcgctcgatcgaatctctgctggacctctccacgatgtcgatcgaggaggcgttaggtcgcctcaaggtcgtcgatggtgatgagccacagcctctctcggggcccatcaccatcggcgggaagctccatctcactagggagcagtgggaggcctctcagggtgacgggaggaagggggagtcatcttccccgacaggcggccgtaagccgcgcaaggcgcggggaggtgtccagctacggtgggcgcgaagacgtgccgagggtggcgcccgcagaggcgcccagggcattgccaccggcaaccacaagccggcacgagacgacgcctgccgcaactatggcaagcttggccattgggccaaagactgtcgacagccacgacgcggccaggcccacgtcgcacgggtggaggaggaagagccggctctgctcctggctcacgcaagcatcgagctacctccagcggcaccggccgcagcggctttcctccaccttgatgagccgaaggtactcgtctccctctgcaacggctccagcaacgacaaggctgatgggtggtaccttgacaccggcgccacccatcacatgaccggccgacgggagttcttcaccgagttcgactccagcgtccgaggctccgtcaagttcggggacgcctccggcgtggagatcaagggtgttggctccgtcaccttcaccgccaagtccggtgagcacaggctgctcaccggagtctactacatccccgcgttgaggaattctatcatcagcgtgggacagctggatgagaacggctcacgcgtgttggtcgaggacggactcatgaggatttgggatcgccgtcgtcaccttcttgccaaggtaaccagaggcactaatcgactctacatcctcagcgcgcaggtcgcacaaccagtttgcctcgccgctcgtcgggacgacgaggcgtggcagtggcacgagcgcttcgggcacctccacttcgaggccctgaagcagctcagtgccaaggagatggtgcgaggcatgccgtgccttgatgtcacgcccagaaattcccgaatagaattccaagcagaatgtgcattaaaatccccgtccaggaccagccggggtacacaaacgacaatgttgacattcagatccacgtcggaaagaggccgtgacaggaccattcgcataaccccctctaaccaagcacaccacacctcaggtttcacccccactcctcgcaaggcagcaggcagtcccctctcgtgcctaggtgaatccggaagccgcataggccgtcgcagggcccatccaaactccatcatgcccacccttgcctggatgcgtcggctagaggaaagctacactacaagcccagccgttgcccgcgctggcttgtggtaagtacgataagttcttccagggcatcccgcgaaccggtccttacgtcggaggaatcggaatctagcgacatacaaagcaaacattgcaaacaggctataagactactgaaacagggaacaaaactattggctgacgtcatcaaggcggggcgcggcgccgacatgcgggccccaccggtcagcggctcgggagagggaggaaggggcgccggcaagcgggccccaccggtcagcggctcggggagggcggtccacggcggatcgggtccacggaccggggaggagcggcgcgccacgtggcggccgaaccgatggccccgatctacccaagggtagatcggacggcggcgggagctcgcggccggtgcacgcgggcacggcgcaaaccggcccggcgaccatggcgcgcgacggcgcggcgcacatgcggcagcggcgcaagacggcggccgacggcgaccgaccggcggcggagagcggcggctagaggtgaagcggcagctacgcggctaagcggcggcgcgacggctaaacggtgcgggagagggagaaagaggaggagaggcctcaccgataacggtcgacgacggcgggcgacggaggacgatggtgacggcgggacgagctccggaacctcc

SEQ ID NO: 23035 - DNA, 5370 bp, Oryza sativa
  Clone ID: TF_OsC1713_3706
tcaagaatccaatacacccaccctagtatgcaatcttcccaccgaagtattcaagttgccaacatcggtgcgcaagccacgaacatcttcatgcaatgcttcatgcccggtggataagcgttgaatgctttcacttagggtattaatagccccaaggaccgggttgaagaattcattgggttgcattccaaagtaggcatattgtggatggaaaaaagcacttggatcagacccatgaggaggagggggggctgcacttgagcttgcaccttgatcaaatgttggttggcgcacacgaggagctttaggggaggagagttggagacgaggcttgtactccttatgttcttttaaattgtgaccaatttgtcccaacttgctttgaatcaacctcattatgtagggagcataatagattccttgtccaatagtcccctttgagatggcaatctccttcatcataaggttgataacatcaaaccgacgaccatccaaaatggcatcaatgacatgccaagcaactccgcgtatgtcatcattgttgccgcatcttgggaggatggtggcccttaccgccacctttccatatgtgtgccttcccccgtcttcataaatctgagaaaagtgatcaatggggaaggggttgtgggtgtgctcatcatgaaggtcatccccattgttgaagcgaatgtgcaagagctccttgaattcacggcggttgatagagcattgaagggtccccgacatccacttcattgcatcacaatcgccggacacccatacggtggcatagaattgccggatgagatcttcatcaaaagattgcttcatggtgacaattctatcaatcccaacggtccagaacatctcttgcaaatcttcaaactccggtgtctcaccaatgtgcctccaagaaatccacttgtgttcggcgaaggctttgttggcatacacttgttcatacacggacttttggaactgggtatgaaatcttggatcattacaatcgttaggcctccggaattgatcatgatgacggaggatagtgtattgttgagcattcctcaaattaaacacaaattggatggtggaatcgagaggactcccatcatcacttgcctcatcatcttcaccattgccactcccattgtcatcaccatcatcacttacttccatctcatcaccctcaacattttccatattgtcatcatcactttgaacatactcatctccgcttgattcctcattctcattgacgggattgggcatgggctcacgacgaccatggcgagtgcggggaggcatagctgccgaaacatattccgcctcggcggtggagagggctacggagttttgtttcttggatgaccatgacacaagggatctaccaagcatttggcaactaccggatgtgctctttctatccactttgcaaccggcataatccgaatcggaatagccagcaagcttaaatttagcaccttttgggtaccacaagccaatagtagaggaatactttaaatatcttagaatccttttcacggccactaagtgacactccttaggagcggcttgaaaccgtgcacacgtgcaaacactaaacatgatatccggcctagatgcggtaaggtaaagcaagctaccaatcatagaacgataaagctttaaatctaccggtttacctccctcatcaaggtcgagatgcccgttggttgccataggtgtcttgatgggcttcgcatcctccaagccaaacctcttgagtagatccttgatgtacttggtttggctcacgaacgtcccatccttgagttgcttgatttgaagtccaaggaagaagctcaactctccaatcatggacatctcaaattccctcgacatcatatcaccaaatttcttgcaaaatacctcattagtagaaccgaatatgatgtcatcaacataaatttggcacacaaagaaatcatcatcaatgatttttgtaaaaagggtggtgtcaacttttccaattttgaaatcctttgacaaaagaaaatatctcaatctttcataccaagccctaggagcttgttttaaaccataaagagcttttgagagtttgtaaacatggttaggatatttagaatcttcaaaaccgggaggttgttcaacaaagacaagttcagcaatttcaccatttagaaaagcacttttcacatccatttgaaatagttttatatcaaagcatgatgcaaatgcaagaaggatgcgaatagcctcaagtcttgccacgggggcaaaagtttcaccaaagtccaaaccttcaacttttgtgaaaccttgtgccaccaaccttgccttgtttctcaccaccaacccgttctcatcttgtttgttcctaaatacccactttgtccctatgacattgtggtctctaggtctttcaaccaaagtccacaccttgtttcttgcaaagttgttgagctcttcatgcatagcattcatccaatccggatcacaaagagcttcatctacatgttttggctcaagacaagaaacaaacgagtaatgttcacaaatcgaagcgacacgagatcgagtttgaacacccttactaatgtcacccaacacttggtcaattgggtgatccttggaaagagcggtgtgtatccttggtggcataggtggatcttgtaccttctcctcctccacttcaacttgagcttgacttggcatagcggaagtagatggctcatcttgagtggaggtggatggcttgtcttccacttcaataggcttgacatctccaattgacatattcttcatggttctcatcaagccttcatcacctacatcatccaaattctcgtgcccctcttgggagccattagtctcatcaaattgaacatcggcggtttcttccacaatacctttgttcttgttgtagacccggtatgccttgctatttgaggcataacctagaagaaacccttcatcacaccgactttcaaatttggttagtctaacaccctttcggtaaatataacacttgcaaccaaaaacttgaaaataggcaacatttggcttccttccaacaattagctcatagaaagtctttttcaagagaatatgcaaataaagcctattggttgcatggcaagcggtgtttatggcttccgccccaaaagaatcggaaacaccatattcatcaagcatagtccttgccatctcaatcaatgtacgatttttcctctccactacaccattttgttgaggtgagtaggtagcggaaagttcgtgtttaatgccaagatcatcacaatagtcctcgatattggtattcttaaactcggaaccattgtcacttctaattttcacaagagtgcaactaaattcattttgggccctttttgcaaactttttgaaaagctcggcaacaatagactttcctttgctattgtctccaaatgtcactttctcttgttcattccctcctacttcaaatgtggtgaacatagccctatcaccagtcatgtgttgagtgcatccactatcaagcacccaatggctcccaccggtgtggtagttcaccaccgagtataggggaacccacatatctagcaacaatgctaccatcatgagccttccattgctcttgacaaaacgagtggcacggttagaaggtttcttacccttctttggaatgaatccaagtccctccttgttaaggatgcaccgttgctcactcaaaatcttgtcaagagtgttcttacccttgaagcacctctccaagctcttgttgagcttagccacttgctccttaagctcattgttctcaacaacaagtgaggcatcacagatagaaatacaagagctagagctagacatatccacaagatcatcacaagagatagaaatgctagatgatgcaacatgagcaatatggcaagtagcactatcatcaagcaaatcacaagatatgccaacatcaatgagagctccatgttgagtagtggaaaggaggttgtcatgagcttccttaagcttctcatgagaaatggtgagtctctcatgagaagtctttagctcctcatacaagacctccaaagaagcatgatccttctttagggccttgaacttgacaatctccttctcactataagcatggagctcctcaaacatactcacaagctcatcataggaaacatcatcacaatcatcatcactctcattatcactaagagatgttaccttagaggagccctttgccatgagacaaagtggagcgaagagtgatagagcctccttgatggcaacaacggccatcttcttctttttggagcttgcatcatcaccaccttcttcctcggacccggatgaggcggagctctcctcatttgagtcccattccccgatgaaggcctcaatcttcttgccttccttcttgagcttcttcatgagcttgtagcctccactcttcttcttgcatgacttgtctccatcatcatccttggaagggcacttggaagcaaagtgtcccttctcaccacactcaaagcacctcaagttggagagagtcttgttgggtcttctatttcttctcctattggagttggagccccttcctctctcctttctccttcccaagagatcattgaaccttctagcaagaagggcaatctcttcctccaagtcctcattggcttcattcaccttgcccttgcccttatcttcaacttcggcttggagagcaatgcacttcttggaaggtgaggcttcctccatctccttcttcttcaacttgtacatgtcattggtgttgatcttccccaagaggcttgcgggtgtcatcattgacatgtcggagttgatgagcatggtgacaagggtctcatacttctccggtagagccctaagcatcttttgggcaacctcaagatcggtgtagtttgtcccaagccccttgagatcattcacaatgacattgagccttccatacatgtcattcacactctcatgaggcaacatggagaatgtctcatattggatcttgaggaaatgaagcttggcatccttatactcactcgtgccctcatggatctccgccaacttgttccaaatctcatatgcggtctcaaggttgctcactctatcaaactcctcttggctcaaagagttgaacaaagcattcatggcttgggcattgagttggaggttgcggtgatcaatctccgtcaagggcttgccggtgatagcaaaacctacatcaacaatactccaaatatggaagctcatagctttgaggtgagtagacattttaattttccaagtggaatagtttgtgccattaaacatgggagccttccctacatggttcacctcgttcgacat

SEQ ID NO: 23036 - DNA, 4620 bp, Oryza sativa
  Clone ID: TF_OsC1713_3872
tcaagccacattagagaagtctatgacatttaactcattcctcaacttgcaaaagcgggtttcatcaagaggcttggtaaagatgtcggctagttgatcctcggttcttatgtggctaatgactatgtcacacttggcaacatggtctcttaggaagtgatggcgtatgtcaatatgcttggttctagaatgttggaccgggttattggctatctttatggcactatcattgtcacataggagtggggttttggtgaaggatatgccatagtccaacaatgtttgtttcatccaaagcaattgggcacaacaactacccgccgaaacatattccgcctcggcggtagagagggctacggagttttgtttcttcgatgaccatgacacaagggatctaccaagcatttggcaactaccggatgtactatttctatccactttgcaaccggcataatccgaatcggaatagccaacaagcttaaatttagcaccttttgggtaccacaagccaatagtagaggaatactttaaatatcttagaatccttttcacggccactaagtgacactccttaggagcggcttgaaaccatgcacacatacaaacactaaacatgatatccggcctagatgcggtaaggtaaagcaagctaccaatcatagaacgataaagctttaaatctaccggtttacctccctcatcaaggtcgagatgcccgttggttgccataggtgtcttgatgggcttcgcatcctccaagccaaacctcttgagtagatctttgatgtacttggtttgactcacgaacgtcccatccttgagttgcttgatttgaagtccaaggaaaaagctcaactctccaatcatggacatctcaaattccctagacatcatatcaccaaattccttgcaaaatacctcattagtagaaccgaatatgatgtcatcaacataaatttggcatacaaagaaatcatcaccaatgatttttgtgaaaagagtggtgtcaacttttccaattttgaaatcatggttaggatatttaggatcttcaaaaccgggaggttgttcaacaaagacaagttcggcaatttcaccatttagaaaagcacttttcacatccatttgaaatagttttatatcaaaccatgatgcaaatgcaagaaggatgcaaatagcctcaagtcttgccacgggggcaaaagtttcaccaaaatccaaaccttcaacttgtgtgaaaccttgtgccaccaaccttgccttgtttctcaccaccaacccgttctcatcttgtttgtttctaaagacccactttgtccctatgacattgtggtctctaggtctttcaaccaaagtccacaccttgtttcttgcaaagttgttgagctcttcatgcatagcattcatccaatccggatcacaaagagcttcatctacatgttttggctcaagacaagaaacaaacgagtaatgttcacaaatcgaagcgacacgagatagagtttgaacacccttactaatgtcacccaacacttggtcaattgggtgatccttggaaagagtggtgtgtatccttggtggtataggtggatcttgtgccttctcctcctccacttcaacttgagcttgacttggcgtagcgaaagtagatggctcatcttgagtggaggtggatggcttgtcttccacttcaataggcttgacatctccaaatgacatgttcttcatagctcttatcaagccttcatcacctacatcatccaaattctcgtgcccctcttgggagccattagtctcatcaaattgaacatcggcggtttcttccacagtacctttgttcttgttgtagacccggtatgccttgctatttgaggcataaccaagaagaaacccttcatcacaccgactttcaaatttggttagtctaacaccctttcggtaaatataacacttgcaaccaaaaactcgaaaataggcaacattaggcttcctcccaacaattagctcataggaagtatttttcaagagacgatgcaaataaaacctattggttgcatggcaagcggtgtttatggcttccgcccaaaaggaatcggaaacaccatattcatcaagcatagtccttgccatctcaatcaatgtacgatttttcctctccactacaccattttgttgaggtgagtaggtagcggaaagttcatgtttaataccaagatcatcacaatagtcctcgatattggtattcttaaactcggaaccattgtcacttctaattttcacaagagtgcaactaaattcattttgggccctttttgcaatttttttgaaaagctcggcaacaatagacttatcatgcaaaaagaacacccaagtatagcgagaataatcatcaacaatcacaagacaatgactattaccaccaatgctcttataggttgttgggccaaacaaatccatatgcaagagctctaatggtctagatgtggacatgatactcttagtaggatgagaacatgcaacttgcttgccggcttgacaagcactacaaagcttatctttctcaaacttcacatctttcaagcccacaactagatcacgttttgaaagtttgctcaattgattcatgccaacatgggctagccttctatgccaaagccaacccaaagaagtttttgcaactaaacaagttttcaaatttgcttcactagaattgaaatcaacaaagtaaagatttccatatctaaaacctttgaacacacaagacttgtcaagaaggctagaaacaataacttcttgcgggaagaaagcacatgacaagccaagatcacaaatttgagcaaccgaaagcaaattgaaatttagagatttaacaaaagagacattatcaattgacaaatcattggagatagcaattttacctaacccaattacctttcttttgctattgtctacaaatgtcactttctcttgttcattccctcctacttcaaatgtagtgaacatagccctatcaccggtcatgtgttgagtgcatccactatcaagcacccaatggctcccaccggtgtggtagttcacccttgaagcacctctccaagctcttgttgagcttagccacttgctacttaagctcattgttctcaacaacaagtgaggcatcacaaatagatacacaagagctagagctagagtatcatcaagcaaatcacaagatatgccaacatcaatgagagctccatgttgagtagtggaaaggaggttgtcatgagcttccttaagcttctcatgagaaatggtgagtctctcatgagaagtctttagctcctcatacaaaacctccaaagaagcatgatccttctttagggccttgaacttgacaatctccttctcactataagcatggagctcctcaaacatactcacaagctcatcataggaaatatcatcacaatcatcatcactctcactatcactaagagatgttaccttagaggagccctttgccatgagacaaagtggagcgaagagtgatggggcctccttgatggcaacaacggccatcttcttcttcttggagcttgcatcatcaccatcttcttccttggacccggaagaggcggagctctcctcatttgagtcccattccccgatgaaggcctcaatcttcttgccttccttcttgagcttcttcataagcttgtagcctccactctttttttttgatgacttgtctccatcatcatccttggaagggcacttggaagcaaagtgtcccttctcaccacactcaaagcacctcaagttggagagagtcttattgggtcttttatttcttctcctatttgagttggagccctttcctctctcctttctccttcccaagaaatcattgaaccttctagcaagaagtgcaatctcttcttccaagttcttattgacgtcattcaccttgcccttgtcttcaacttcagcttggagagcaatgcacttcttggaaggtgaggcttcctccatttccttcttcttcaacttatacatgtcattggtgttgatcttccccaagaggcttgccggtgtcatccttgacatgtcagagttgatgagcatggtgacaagggtctcatacttctccggtagagccctaagcatctttttggcaacctcaagatcggtgtagtttgccccaagccccttgagatcattcacaatgacattgagcctcccatacatgtcattcacactctcatgaggcaacatggagaatgtctcatattggatcttgaggaagtgaagcttggcatccttgtactcacttgtgccctcatggatcttcgccaacttgttccaaatctcatatgcggtctcaaggttgctcactctatcaaactcttcttggctcaaagagttgaacaaagcattcatggcttgggcattgagttggaggttgcggtgatcaatctccgtcaagggcgtgccggtgattgcaaagcctacatccacaatactccaaatatggaagctcatagctttgaggtgagtagacattttaattttccaagtggaatagtttgtgccattaaacatgggagccttccctacgtggttcacctcgttcgacat

SEQ ID NO: 23037 - DNA, 4125 bp, Oryza sativa
  Clone ID: TF_OsC1713_3951
agccacattagagaagtctatgacatttaactcattcctcaacttgcaaaagtgggtttcatcaagaggcttggtaaagatgtcggctagttgatcctcggttcttatgtggctaatgactatgtcacacttggcaacatggtgtcttaggaagtgatggcgtatgtcaatatgcttggttctagaatgttggaccgggttattggctatctttatggcactatcattgtcacataggagtgtggttttggtgaaggatatgccatagtccaacaatgtttgtttcatccaaagcaattgggcacaataactacccgccgaaacatattctgcctcggcggtagagaggtctacggagttttgtttcttggatgaccatgacacaagggatctaccaagcatttggcaactaccggatgtgctctttctatccactttgcaaccggcataatccgaatcggaatagccaacaagcttaaacttagcaccttttgggtaccacaagccaatagtacaggaatgctttaaatatcttagaatccttttcacggccactaagtgacactccttaggagcggcttgaaaccgtgcacacatgcaaacactaaacatgatatccggcctagatgcggtaaggtaaagcaagctaccaatcatagaacgataaagctttaaatctaccggtttacctccctcatcaaggtcgaaatgcccgttggttgccataggtgtcttgatgggcttcgcatcctccaagctaaacctcttgagtagatccttgatgtacttggtttggctcacgaacgtcccatccttgagttgcttgatttgaagtccaaggaagaagctcaactctctaatcatggacatctcaaattccctagacatcatatcaccaaattccttgcaaaatacctcattagtagaaccgaatatgatgtcatcaacataaatttgacacacaaagaaatcatcaccaatgatttttgtgaaaatggtggtgtcaacttttccaattttgaaatcatttagaaaagcacttttcacatctatttgaaatagttttatatcaaagcatgatgcaaatgtaagaaggatgcgaatatcctcaagtcttgccacgggggcaaaagtttcaccgaagtccaaaccttcaacttgtgtgaaaccttgtgccactaaccttaccttgtttctcaccaccaacccgttctcgtcttgtttgttcctaaagacccactttgtccctatgacattgtggtctctaggtctttcaaccaaagtccacaccttgtttcttgcaaagttgttgagttcttcatgcatagcattcatccaatccggatcacaaggagcttcatctacatgttttggctcaagacaagaaacaaatgagtaaagttcacaaatcgaagcgacacgagatcgagtttgaacacccttactaatgtcacccaacacttggtcaattgggtgatccttggaaagagcggtgtgtatccttagaggcataggtggatcttgtgccttctcctcctccacttcaacttaagcttgacttggcatagcggaagtagacggctcatcttgagtggaggtggatggcttgtcttccacttcaataggcttgacatctccaatggacatgttcttcatagctctcatcaagccttcatcacctacatcatccaaattctcatgtccctcttgggagccattagtctcatcaaattgaacatcggcggtttcttccacaatacctttgttcttgttgtagacccggtataccttgctatttgaggcataaccaagatcatcacaatagtcctcgatattggtattcttaaactcggaaccattgtcacttcttattttcacaagagtgcaattaaatttattttgggcccttttgcaaactttttgaaaagctcggcaacgatagacttgacatgcaaaaagaacacccaagtatagcgagaataatcatcaacaatcacaagacaatgactattaccaccaatgctcttataggttgttgggccaaacaaatccatatgcaagagctccaatagtctcgatgtagacatgatactcttagtaggatgagaacatgcaatttgcttgccggcttgacaagcactacaaagcttatatttctcaaacttcacatctttcaagcccacaactagatcacgttttgaaagtttgctcaattgattcatgccaacatgggctagcctcctatgctaaagccaacccaatgaagtttttgcaactaaacaagttttcaaatttgcttcactagaattgaaatcaaccaaataaagatttccatatctaaaacctttgaatacacaagacttgtcaagaaggctagaaacaataacttcttgcgggaagaaagcacatgacaagccaagatcacaaatttgagcaaccgaaagcaaattaaaatttagagatttaacaagagagacattatcaattgacaaatcattggagatagcaattttacctaacccaattacctttcctttgctattgtctccaaatgtcactttctcttgttcatttcctcctacctcaaatgtggtgaacatagccctatcatgtgttgagtgcatccactgtcaagcacccaatggctcccaccggtgcggtagttcaccaccgagtataggggaacccacatatctagcaacaatgctaccatcatgagccttccattgctcttgacaaaacgagtggcacagtgagaaggtttcttacccttctttggaatgaatccaagtccctccttgttaaggatgcaccattgctcactcaaaatcttgtcaagagtgttcttacccttgaagcacctctccaagctcttgttgagcttagccacttgctccttaagctcattgttctcaacaacaagtgagacatcacaaatagaaacacaagagctagatctagagctagacatatccacaagatcatcacaagaggtagaaatgctagatgatgcaacatgagcaatatggcaagtagcactatcatcaagcaaatcacaagatatgccaacatcaatgagagcttcatgttgagtagtggaaaggaggttgtcatgagcttccttaagcttctcaggagaaatggtgagtctctcatgagaagtctttagctcctcatacaagacctccaaagaagcatgatccttctttagggccatgaacttgacaatctttttctcactataagcatggagctcctcaaacatactcacaagctcatcataggaaacatcattacaattatcattactctcactatcactaagagatgttaccttagaggaaccctttgccatgagacaaagtggagcgaagagtgatagagcctccttgatggcaacaacggccatcttcttcttcttggagcttgcatcatcaccaccttcttcctcggacccggatgaggcggagttcttgagcttcttcatgagcttgtatcctccactcttcttcttggatgacttgtctccatcatcatctttggaagggcacttggaagcaaagtgtcccttctcaccacactcaaagcacctcaagttggagagagtcttgttgggtcttctatttcttctcctatttgagtttgagccccttcctctctcctttctccttcccaagagatcattgaaccttctagcaagaagggcaatctcttcctccaagtcctcattggcttcattcaccttgcccttgcccttgtcctcaacttcagcttggagagcaatgcacttcttggaaggtgaggcttcctccatctccttcttcttcaacttgtacatgtcattggtgttgatcttccccaagaggcttgccggtgtcatccttgacttgtcggagttgatgagcatggtgacaagggtctcatacttctctggtagagccctaagcatcttttgggcaacctcaagatcggtgtagtttgccccaagccccttgagatcattcacaataacattgagcctcccatacatgtcattcacactctcatgaggcaacatggagaatgtctcatattggatcttgacgaaatgaagcttggcatccttgtactcacttgtgccctcat

SEQ ID NO: 23038 - DNA, 5371 bp, Oryza sativa
  Clone ID: TF_OsC1713_4363
ttgtggaggagaaggaggaagcgccaaagaggaaggattaggagtatcacgacgacgatgatatacaaaagcttgggtgctctccaacatttggactcgagaatccaatgcacccactctagtgtgcaatctccccatggaagcattcaagtctccaacatcggtgcgcaagccacgaacatcctcatgcaatgcttcatgcctggtagacaagcgttgaatgctttcacttaaggtattaatagccccaagtaccgggttgaagtattcattgggttgcattccaaagtaagcatagtgaggatgaaagaagcatttggatcatacccatgaggaggaggaggtgctgggcttgagctagctccagggtgagaagagggcaccgtcctaggagcacggggagctctaggctgaaggcggggcttgtactgcttgtgcttcttcaaattttgcccagcagccccaagcttgttcttgaatcaacctcatgatgtaaggggcataatagattccctgagtgaatgtcctcttgaagatagcaatctctggcatcatgagagacacaatgtcgaactgacggccctgaatgattgcatcgatgacgtgccaagccacccccctaatgtcatcattgttgccaaggcgagggaggatagtggctctcataatccttttaaccacactggggatagtcctcaagccggcaaccttcccatgtgtgtaccgcactccatcttcatagaactgagagagatagtctatggagagcggattgtgagtgtgctcctcatgcaaatcatctccaaagtccaagcgaatgttgaggagctgccggaattgccttcgagagatagaacactggagggtgtcggacatccacttcatctcactctagtctccagccacccacatcttctggaaagcggtgtgaaaatggggatccggggtgtcccgaggcctcaagaactgatcatgatgccttaagatggtatactgcgatggattcctcatgttcaccacaaactggatggagggatcaatgttcatctcatcactttgttcatcctcatcctctccacttccactgacatcatctccacttgcctcctcactagccccctcaacattggcctcaacctcttcatcactttgagcgtaatcctctccgctcgattcctcaggctcactcatgggatccagagtgggcgcacgacaaccatggcgagtgcggggaggcatcatgggcccacctcggccggtcagaccggccctatgtggccggtcagaccgccgcacctggccggtcagaccgcgcatatagcgccggtcagactgccaggcccccaactttgttttgaaaattttctcaaattccttctcaatctcattttggggataaatctcattttggccaaaactaagaatctagtttccgccgaaacatattccgcctcggcggtagagagggcaacggagttttgtttcttggatgaccatgacacaagggatataccaagcatttggcaactaacggatgtgctctttctatccactttgcaaccggcataatccgagtcggaatagccaacaagcttaaatttagcaccttttgggtaccacaagccaatagtagagaaatgctttaaatatcttagaatccttttcacggccactaagtgacactccttaggagcggcttgaaaccgtgcacacatgcaaacactaaacatgatatccggcctagatgcggtaaggtaaagcaagctaccaatcatggaacgataaagctttaaatctaccggtttacctccctcatcaaggtcgagatgcccgttggttgccataggtgtcttgatgggtttcgcatcctccaagccaaacctcttgagtagatccttgatgtacttggtttggctcacgaacgtcccatccttgagttgcttgatttgaagtccaaggaagaagctcaactctccaatcatggacatctcaaatcccctagacatcaaatcaccaaattacttgcaaaatacctcattagtaaaaccaaatatgatgtcatcaacataaatttgacacacaaagaaatcatcaccaatgatttttgtgaaaagggtggtgtcaacttttccaattttgaaatcctttgacaaaagaaaatctttcaatctttcataccaagccctaggagcttgttttaaaccataaagagcttttgagagtttataaacatggttaggatttttaggatcttcaaaaccgggaggttgttcaacaaagacaagttcggcaatttcaccatttagaaaagcacttttcacatccatttgaaatagttttatatcaaagcatgatgcaaatgcaagaaggatgcgaatagcctcaagtcttgccacgggggcaaaagtttcaccgaagtccaaaccttcaacttgtgtgaaaccttgtgccaccaaccttgcattgtttcacaccaccaacccgttctcatcttgtttgttcctaaagacccactttctccctatgacattgtgatctctaggtcttttaaccaatgtccacaccttgtttcttgcaaagttgttgagctcttcatgcatagcatttatccaatccgaatcacaaagagcttcatctacatgttttggctcaaggcaagaaacaaacgagtaatattcacaaatcgaagcgacacgagatcgagtttgaacacccttactaatgtcacccaacacttggtcaattgggtgatccttggaaagagcggtgtgtatcctttgtggcataggtggatcttgtgccttctcctcctccacttcaacttgagcttgacttggcgtagcggaagtagatggctcatcttgagtgaaggtggatggtttgtcttccactttaataggcttgacatctctaatagacatgttcttcatagctctcatcaagccttcatcacctacatcatccaaattctcgtgcccctcttgggagccattagtctcatcaaaatgaacattggcggtttcttccacaatacctttgttcttgttgtagacccggtatgccttactatttgaggcataacctagaagaaacccttcatcacaccgacttgcaaatttggttagtctaacaccctttcgataaatataacacttgcaaccaaaaactcgaaaataggcaacatttggcttcctcccaacaattagctcataggaagtctttttcaagagatgatgcaaataaagcctattggttgcatagcaagcggtgtttatggcttccgcccaaaaggaatcggaaacaccatattcatcaagcatagtccttgccatctcaatcaatgtacgatttttcctctccacaccaatgctcttataggttgttgggccaaacaaatccatatgcaaaagctccaatggtctagatgtggacatgatactcttagtaggatgagaacatgcaacttgcttgccggcttgacaagcactacaaagcttatctttctcaaacttcacatctttcaagcccacaactagatcacgttttgaaagtttactcaattgattcatgctaacatgagctagcctcctatgccaaagccaacccaatgaagtttttacaactaacccaattacctttcctttgctattgtctccaaaagtcactttctcttgttcattccctcctacttcaaatgtggtgaacatagccctatcaccggtcatgtgttgagtgcatccactatcaagcacccaatggctcccaccggtgcggtagttcaccactgagtataggggaacccacatatctagcaacaatgctaccatcatgagccttcccttgaagcacctctccaaactcttgtctcattagccacttgctccttaagctcattattctcaacaacaagtgaggcatcgcaaatagaaacacaagagctagagctagagctaggcatatccacaagatcatcacaagaggtaggaatgctagatgatgcaacatgagcaatatggcaagtagcactatcatcaagcaaatcacaagatatgccaacatcaatgtgagctccatgttgagtagtggaaaggaggttgtcatgagcttccttaagcttctcatgagaaatggtgagtctctcatgagaggtctttagctcctcatacaagacatccaaagaagcatgatccttctttagagccttgaacttgacaatctccttctcattataagcttggagctcctcaaacatactcacaaactcatcataggaaacatcatcacaatcatcatcaccctcactatcactaagagatgttaccttagaggagcccttgagcaaagagtgtggagcctccttgatggcaacaacggccatcttcttcttcttggagctttacatcatcaccaccttcttcctcggacccggatgaggcggagctctcctcatttgagtcccattccccgatgaaggcctcaatcttcttgccttccttcttgagcttcttcatgagcttgtagcctccactcttcttcttggatgacttgtctccatcatcatccttggaagggcacttggaagcaaagtgtcccttctcaccacactcaaagcacctcaagttggagaaagtcttgttgggtcttctatttcttctcctatttgagttggagccccttcctctctccttgcccttgcccttgtcttcaacttcggcttggagagcaatgcacttcttggaaggtgaggcttcctccatctccttcttcttcaacttgtacatgtcattggtgttgatcttccccaagaggcttgcgggtgtcatccttgacatgtcggagttgatgagcatggtgaaaagggtctcataattctccggtagagccctaagcatcttttgggcaacctcaaaatcggtgtagtttgccccaagccccttgagatcattcacaataacattgagcctcccatacatgtcattcacgctctcatgaggcaacatggagaatgtctcatattagatcttgagaaaatgaagcttggcattcttgtactcgcttgtgccctcatggatctccgccaacttgttccaaatctcatatgcggtctcaaggttgctcactctatcaaactcctcttggctcaaagagttgaacaaggcattcatgcttgggcattgagttggaggttgcggtgatcaatctccgtcaagggtgtgccggtgatagcaaagccggcgccgggcctcctccacaatcttctcggagagatcaccaggcaactcctccacaagccgtctaggaggcggcaacctccaagagtaacaagcaatgacccggcgtggagatgatcaatcaagtgccacactagctc

SEQ ID NO: 23039 - DNA, 4840 bp, Oryza sativa
  Clone ID: TF_OsC1713_4366
actcccggtaaaaagatgaagtggaaggatgaaagcatttggataatacccaggaggaggaggaggtgctgagcttgagctagctccaggatgagaggagggcgccgccctaggagcacggggagctccaagctaaaggcggggcttgtactgcttgtgcttcttcaaattttgcccagcagccccaagcttgtcttgaatcaacctcatgatgtaaggggcataatagattccctaagtgaaggtccccttggagatggcaatctcttgcatcataagagacacaatgtcgaactgacggccctgaatgatggcatcgatgacgtgccaatccgcccccataatgtcatcattgttgccaaggcgagggaggatggtagctctcacaatcctgttaaccacactggggatggtcctcaagccggcaaccttcccatgtgtgtaccgcactccatcttcataaaatgtagcataaaactgccggatcaaatcttcattgtagtcttgcttgagagtaacaatccgatcaatgctaacagtcttgaagagatcctgcaacccctcaaactctggacattgatgtctctccaagaaatccccttatgctctgcaaaagctttccctgcataaacttgctcatacacactcttctggaaagcggtgtgaaaacggggatccggggtgtcccgaggcctcaaaaactgatcatggtgcctcaagatggtatattgtgatggattcctcatgttcacaacaaactggatggagggatcaatgtgcatatatcatcacttccttcatcctcatcctctccacttctactgacatcatctccactttcctcctcactatcccctttgagcgtactcatctccgctcgattcctcaggctcactcacgggattcggagtgggtgcacgacgatcatggcgagtgcggggaggcatcacaagaaactaccctctattggtgcaaatcgaagaacacctcgtgcttcaccttttgggtaccacaagccaatagtagaggaatgctttaaatatcttagaatccttttcacggccactaagtgacactccttaggagcggcttgaaaccatgcacacatgcaaacactaaacatgatatccggcctagatgcggtaaggtaaagcaagctaccaatcatggaacgataaagctttaaatctaccggtttacctccctcatcaaggtcaagatgcccgttggttgccataggtgtcttgatgggcttcgcatcctccaagccaaacctcttgagtagatccttgatgtacttggtttggctcacgaacgtcccattcttgagttgcttgatttgaagtccaaggaagaagctcaactctccaatcatggacatctcaaattccctaaacatcatatcaccaaattccttgcaaaatacctcattagtagaaccgaatatgatgtcatcaacataaatttgacacaaaaagaaatcatcaccaatgatttttgtgaaaagggtggtgtcaacttttccaattttgaaatcctttgacaaaagaaaatctctcaatctttcataccaagccctaggagcttgttttaaaccataaagaacttttgagagtttataaacatggttaggatttttaggatcttcaaaaccgggaggttgttaaacaaagacaagttcggcaatttcaccatttagaaaagcacttttcacatccatttgaaatagttttatatcaaagcatgatgcaaatgtaagaaggatgcgaatagcctcaagtcttgccacaggggcaaaagtttcaccaaagtccaaaccttcaattgtgtgaaaccttgtgccaccaaccttgctttgtttctcaccaccaacccgttctcatcttgtttgatcctaaagacccactttgtcccaatgacattgtggtctctaggtctatcaaccaaagtccacaccttgtttcttgcaaagttgttgagctcttcatgcatggcattcatccaatccggatcacaaagagcttcatctacatgttttggctcaagacaagaaacaaacaagtaatgttcacaaatcgaagcgacacgagatcgagtttgaacacccttactaatgtcacccaacacttggtcaattgggtgatccttggaaagagcggtgtgtatccttggtggcataggtggatcttgtgccttctcctcctccacttcaacttgagcttgacttggcgtagcggaagtagatggctcatcttgagtggaggtggatggtttgtcttccacttcaataggcttgacatctcctattgacatgttcttcatagctctcatcaagccttcatcacctacatcatccaaattctcgtgcccttcttaggagccattagtctcatcaaattgaacatcggcggtttcttacacaatacctttgttcttgttgtagacccggtatgccttgctatttgaggcataaccatattcattaagcatagtccttgccatctcaatcaatgtacgattttttctctccactacaccattttgttgaggtgagtaggtagcggaaagttcgtgtttaataccaagatcatcacaatagtcctcgatattggtattcttaaactcggaaccattgtcacttctaattttcacaagagtgcaactaaattcattttgggccctttttgcaaactttttgaaaagctcggcaacaatagacttatcatgcaaaaagaactcccaagtatagcgagaataatcatcaacaatcacaagccaatgactattaccaccaatgctcttataggttggtgggccaaacaaaatcatatgcaagagctccaatggtctagatgtagatatgatacttttagtaggatgagaacatgcaacttgcttgccggcttgacaagcactacaaagcttatctttctcaaacttcacatctttcaagaccacaactagatcacgttttgaaagtttgctcaattgattcatgccaacatgggctagcctcctatgccaaagccaacccaatgaagtttttgcaactaacccaattacctttcctttgctattgtctccaaaagtcactttctcttgttctttccctcctacttcaaatgtggtgaacatagccctatcaccagtcatatgttgagtgcatccactatcaagcacccaatggcttccatcggtgcggtagttcaccaaatgcccaacctcacggcacttggagcaatacttaccattgctcttgacaaaacgagtggcacggtgagaaggtttcttacccttatttggaatgaatccaagtccctccttgttaaggatgcaccgttgctcactcaaaattttgtcaagagtgttcttacccttgaagcacctctccaaactcttgttgagcttggccacttgctccttaagctcattgttctcaacaacaagtgaggcatcacaaatagaaatacaagagctagagctagagttaagcttctcatgagaaatggtgagtctctcatgagaggtctttagctcctcatacaagacctctaaagaagcatgatccttctttagggccttgaacttgacaatctccttttcactataagcatgaagctcctcaaatatactcacaagttcatcataggaaacatcatcacaatcatcatcactctcactatcactaagagatgttaccttagaggagctctttggccatgagacaaagtggagcgaagagtgatggagcctccttgatggcaacaacggccatcttcttcttcttggagcttgcatcatcaccaccttcttcctcggacccggatgaggtggagctctcctcatttgagtcccattccccgatgaaagcctcgatcttcttcccttccttcttaagcttcttcatgagcttgtagcctccactcttcttcttggatgacttgtctccatcatcatccttggaagggcacttggaagcaaagtgtcccttctcaccacactcaaaacacctcaagttggagagagtcttgttgggtcttctatttcttctcctatttgagttggagtcccttcctctctccattctccttcccaagagatcattgaactttctagcaagaaggaccatctcttcctccaagtcctcattgacttcattcaccttgctcttgctcttgtcttcaacttcggcttggagagcaatgcacttcttggagggtgaggcttcctccatctccttcttcttcaacttgtacatgtcattggtgttgatcttccccaagaggcttgcgggtgtcattcttgacatgtcgcagttgatgagcatggtgacaagggtctcatacttctccggtagggctctaagcatcttttgggcaacctcaagatcggtgtagtttgccccaagccccttgagatcattcacaatgacattaagcctcccatacatgtcattcacactctcatgaggcaacatggagaatgtctcatattggatcttgaggaaatgaagcttggtatccttgtactcacttgtaccctcatggatctccgccaacttgttccaaatctcatatgcggtctcaaggttgctcactctattgaactcctcttggctcaaagagttgaacaaggcattcatggcttgggcattgagttgaaggttgcggtgatcaatctccgtcaagggtgtgtcggtgatagcaaagcctacatccacaatactccaaatatggaagctcatagcttttaggtgagtagacattttaattttccaagtggagtagtttgtgccattaaacatgggagccttccctacatggttcacctcgttcgacat

SEQ ID NO: 23040 - DNA, 3423 bp, Oryza sativa
  Clone ID: TF_OsC1713_4557
tcaccctcgggcccgacgtccccgaaggtgccaggccacgtgggcgattgcgtctgcctcaagcctctggtcatgatactcccggtcccatatcaccgacacataccaatccctaggagcttgttttaaaccataaagagcttttgagagtttgtaaacatggttaggatttttaggatcttcaaaatcgggaggttgttcaacaaagacaagttcggcaatttcaccatttaaaaaagtacttttcacatccatttgaaatagttttatgtcaaagcatgatgcaaatgcaagaaggatgagaacagcctcaagtcttgccacgggggcaaaagtttcaccaaagtccaaaccttcaacttgtgtgaaaccttgtgccaccaaccttgccttgtttctcaccaccaacccgttctcatcttgtttgttcctaaagacccactttgtccctatgacattgtggtctctaggtctttcaaccaaagtccacaccttgtttcttgcaaagttgttgagctcttcgtgcatagccttcatccattccggatcacaaagtgcttcatctacatgttttggctcaagacaagaaacaaacgagtaatgttcacaaatcgaaacgacacgagatcgagtttgaacacccttactaatgtcacccaacacttgatcaattgggtgatccttggaaagagcggtgtgtatccttggtggcataggtggatcttgtgccttctcctcctccacttcaacttgagcttgacttggcgtagcggaagtagatggctcatcttgagtggaggtggatggcttgtcttccacttcaataggcttgacatctccaatagacatgttcttcatagctctcatcaagccttcatcacctacatcatccaaattctcgtgcccctcttgggagccattagtttcatcaaattgaacaacggcggtttcttccacaatacctttgttcttgttgtagacccggtatgtcttgctatttgaggcataacctagaagaaacccttcatcacactgacttttaaatttggttagtctaacacccttttggtaaatataacacttgcaaccaaaaactcgaaaataggcaacattaggcttcctcccaacaattagctcataggaagtctttttcaagagaggatgcaaataaagtatattggttgcatggcaagcggtgtttatggcttccgcccaaaaggaatcagaaacaccatattcatcaagcatagtccttgccatctcaatcaatgtacgatttttcctctccactacaccattttgttgagatgagtaggtagcggaaagttcgtgtttaataccaagatcatcacaatagtcctcgatattggtattcttaaactcggaaccattgtcacttctaattttcacaagagtgcaactaaattcatttttggccctttttgcaaactttttgaaaagctcggcaacaatagactttcctttgctattgtctccaaatgtcactttctcttgttcattccctcctacttcaaatgtggtgaacatagccctatcaccggtcatgtgttgagtgcatccactatcaagcacccaatggctcccaccggtgtggtagttcaccaccgagtataagggaacccacatatctagcaacaatgctaccatcatgagccttccattgctcttgacaaaacgagtggcacggtgagaaggtttcttacccttctttggaatgaatccaagtccctccttattaaggatgcaccgttgctcactcaaaatcttgtcaagagtgttcttacccttgaagcacctctccaagctcttgttgagcttagccacttgctccttaagctcattgttctcaacaacaagtgaggcatcacaaatagaaacacaggagctagagctagagctagacatatccacaagatcatcacaagaggtagaaatgctagatgatgcaacatgagcaatatagcaagtagcactatcatcaagcaaatcacaagatatgccaacatcaatgagagctccatgttgagtagtggaaaggaggttgtcatgagcttccttaagcttctcatgagaaatggtgagtctcgcatgataagtctttagctcctcatacaagacctccaaagaagcatgatccttctttagggccttgaacttgacaatctccttctcactataagcatgaagctcctcaaacatactcacaagctcatcataggaaacatcatcacaatcatcatcactctcactatcactaagagatgttaccttagaggagccctttgccatgagacaaagtggagcgaagagtgatggagcctccttgatggcaacaacggtcatcttcttggagcttgcatcatcaccatcttcttcctcggacccggatgaggcggagctctcctcatttgagtcccattccccgatgaaggcctcaatcttcttgccttccttcttaagcttcttcatgagcttgtagcctccactctttttcttggatgacttgtctccatcatcatccttggaagggcacttggaagcaaagtgtcccttctcaccacactcaaagcacctcaagttggagagagtcttgttgggtcttctatttcttctcctattagagttacagccccttcctctctcctttctccttcccaagagatcattgaaccttctagcaagaagggcaatctcttcctccaagttctcattggcttcattcaccttacccttgcccttgtcttcaacttcggcttggagagcaatgcacttcttggaaggtgaggcttcctccatctccttcttcttcaacttgtacatgtcattggtgttgatcttccccaagaggcttgccggtgtcatccttgacatgtcggagttgatgagcatggtgacaagggtctcatacttctccggtagagccctaagcatcttttgggcaacctcaagatcggtgtagtttgccccaagccccttgagatcattcacaatgacattgagcctcccatacatgtcattcacactctcatgaggcaacatggagaatgtctcatattggatctttaggaagtgaagcttggcatccttgtactcacttgtgccctcatggatctccgccaacttgttccaaatctcatatgcggtctcaaggttgctcactctatcaaactcctcttggctcaaagagttgaacaaatcatttatggcttggacattgagttggaggttgcggtgatcaatctctgtcaagggcgtgccggtgatagcaaaacctacatccacaatactccaaatatggaacctcatagctttgaggtgagtagacattttaattttccaagtggaatagtttgtgccattaaacatgggagccttccctacatggttcacctcgttcgacat

SEQ ID NO: 23041 - DNA, 5592 bp, Oryza sativa
  Clone ID: TF_OsC1713_4827
ttgtggaggagaaggaggacgtgccaaagatgaaggatgaggagcatcacggcggcgatgatatacaaaagcttgggtgctctccaacatttggactcaagaatccaatacacccaccctagtgtgcaatcttcccacggaagcattcaaatctccaacatcggtgcgtaagccatgaacatcctcatgcaatgcttaatgcccggtggataagcgttgaatgctttcacttagggtattaatagccccaagcaccggattgaagtattcgttgggttgcattccaaagtatgcatattgtggatggaagaaggcacttggatcatacccatgaggaggaggggggctgcacttgagcttgcaccttgatcaaatgttggttggcgcacacgaggagctctaggagtggagagttggagatgaggcttgtagtctttgtgttcttttaagttgttaccaatttgtctcaacttgctttgaatcaatctcattatgtagggggcatagtaaactccttgtccaatagtccccttggaaatggctatctccttcatcataaggttgatgacaccaaaccgacgaccatccatgatggcttcaatgacatgccatgcaacgccgcaaatgtcatcattgttgccacatcttgggagaatggtggccctcactatgcggttgatcagacttgggatagccctcaaactcaccacctttccataggtgtgcctcctcccttcttcataaaactgagaaaagtgatcaatggggaaggggttgtggttttgctcatcatggaggtcatccctgttgttgaagtgaatgtgcaagagctccttgaatgcacggcagttgatagagcatcgaagggtccccgacatccacttcatggcatcacaatcgccggacaccacggacttttgataccgtgtatggaatctcagatcattgcaatcattaggcctccggaattgatcgtgatgacggaggatagtgtattgctaggcattcctcaaattgagcacaaattggatggtgggatcgagaggactcccatcatcacttgcctcatcatcctcaccatcgccactgccattatcaccacttacttccacctcatccccctcaatattttccataacttcatcatcactttgaacatactcatctccgtttgattcctcattctcactgacgggatcaagcgtgggctcacgacgaccacggcgagtgcggggaggcatagccgagggccaacaaccggtcagaccgccgtccatatgtcggtcagaccgacggccgagcgcggtcaaaccggcggctggtacccggtcagaccacctcaactttgttttgaaacttttctcaaattccttctcaatcttattttggggataaatctcattttggccaaaactaagaatctagtttccgctgaaacatattccgcttcggcagtagagagggctacggagttttgtttcttggatgaccatgatacaagggatctaccaagcatttggcaactaccggatgtgctctttctatccactttgcaaccggcataatccgaatcggaatagccaactagcttaaacttagcaccttttgggtaccacaagccaataattgaggaatgctttaaatatcttagaatccttttcacggccactaagtgacactccttaggagcgacttgaaaccgtgcacacatgcaaacactaaacatgatatccggcctagatgcggtaaggtaaagcaagctaccaatcatagaatgataaagctttaaatctaccggtttacctccctcatcaaggtcgagatgcccattggttaccataggtgtcttgatgggctttgcatcctccaagccaaacctcttgagtagatccttgatgtactttgtttggctcaagaacgtcccatccttgagttgcttgatttgaagtctaaggaagaagctcaactctccaatcatggacatctcaaattccctagacatcatatcaccaaattccttgcaaaatacctcattagtagaaccgaatatgatatcatcaacataaatttgacacacaaagaaatcatcaccaatgatctttgtaaaaagggtggtgtcaacttttccaattttgaaatcctttgacaaaagaaaatctctcaatctttcataccaagccctaggagcttgttttaaaccataaagaccttttgagagtttacaaacatggttagaatttttaggatcttcaaaaccgggaggttgttcaacaaagacaagttcggcaatttcaccatttagaaaagcacttttcacatccatttgaaatagttttatatcaaagcatgatgcaaatccaagaaggatgcgaatagcctctagtcttgccacgggggcaaaagtttcaccaaagtccaaaccttcaacttgtgtgaaaccttgcgtcaccaatcttgccttgtttctcaccaccaatctgttctcatcttgattgttcctaaagacccactttgtccctatggcattgtggtctctaggtctttcaatcaaagtccacaccttgtttcttgcaaagttgttgagctattcatgcatagcattcatccaatccggatcacaaagagcttcatctacatgttttggctcaagacaagaaacaaacgagtagtgttcacaaatcgaagcgacacgagatcgagtttgaacacccttactaatatcacccaacacttggtcaattgggtgatccttggaaagagcggtgtgtatccttggtggcataggtggatcttgtgccttctcctcctccacttcaatttaagcttgacttggcgaagcggaagtagatggctcatcttgagtagaggtggatggcttgtcttccacttcaataggcttgacatccccaatagacatgttcttcatatctctcatcaagccttcatcatctacatcatccaaattctcgtgcccctcttgggagccattagtctcatcaaattgaacatcggcggtttcttccacaatacctttgttcttgttgtagacctggtatgccttgctatttgaggcataacctagaagaaacccttcatcacaacaccgactttcaaatttggttagtctaacaccctttcggtaaatataacacttgcaaccaaaaactcgaaaataggcaacatttggcttcctcccaacaattagcacataggaagtctttttcaagagacgatgcaaataaagcctattagttgcatagcaagcggtgtttatggcttccgcccaaaaggaatcggaaacaccatattcatcaagcatagtcattgccatctcaatcaatgtacgatttttcctctccacaccaatgctcttataggttgttgggccaaacaaatccatatatgcaagagctccaatggtctagatgtggacatgatactcttagtaggatgagaacatgcaacttgcttgccggcttgacaagcactacaaagcttatctttctcaaacttcacatctttcaagcccacaactagatcacgttttgaaagtttgctcaattgattcatgccaacatgggctagcctcatatgccaaagccaacccaatgaagtttttgcaactaacccaattacctttcctttgctattgcctccaaatgtcactttctcttgttctttccctcctacttcaaatgtggtgaacatagccctattaccggtcatgtgttgagtgcatccactatcaagcacccaatggctcccatcggtgtggtagttcaccactaagtatagtggaacccacatatctagcaacaatactacaatcatgagccttcccttgaaacacctctccaaactcttgttgagcttggccacttgctccttaagctcattgttctcaacaacaagtgagacatcacaaatagaaacacaagagctagagctagagctaggcatatccacaagatcatcacaagaggtagaaatgctagatgatgcaacatgagcaatatggcaagtagcactatcattaagcaaatcacaagatatgccaatatcaatgtgagctccatgttgagtagtggaaaggaggttgtcatgagtttccttaagcttctcatgagaaatggtgagtctctcatgagaggtctttagctcctcatacaagaccttcaaagaagcatgattcttctttagggccttgaacttgacaatctccttctcactataagcatggagctcctcaaacatactcacaaactcatcataggaaacatcatcacaatcatcatcactctcactatcactaagagatgtaaccttagaggagccttttgccatgagacaaagtggagcgaagagtgatggagcctccttgatggcaacaacggccatcttcttcttcttggagcttgcatcatcaccaccttcttcctcggacccagatgaggcggagctctccttatttgagtcccattccccgatgaaggcctcaatcttcttcccttccttcttgagcttcttcatgagcttgtagcctccactcttcttcttggatgacttgtctccatcatcatccttggaagggcacttggaagcaaagtgtcccttctcaccacactcaaagcacctcaagttggagagagtcttgttgggtcttctatttcttctcctattggagttggagccccttcctctctccttgcccttacccttgtcttcaacttcggtttggagagcaatgcacttcttggaaggtgaggcttcctccatctccttcttcttcaacttgtacatgtcattggtgttgatcttccccaagaggcttgcgggtgtcatccttgacatgtcggagttgatgagcatggtgacaagggtctcatacttctccggtagagccctaagcatcttttgggcaatctcaagatcggtgtagtttgccccaagccccttgagatcattcacaatgacattgagcctcccatacatgtcattcacactctcatgaggcaacatggagaatgtctcatattggatcttgaggaaatgaagcttggcatccttgtactcgcttgtgccctcatggatctccgccaacttgttccaaatctcatatgcggtctcaaggttactcactctatcgaactcctcttggctcaaagagttgaacaaagcattcatggcttgggcattgagttggaggttgcggtgatcaatctccgtcaagggcttgccagtgatagcaaagccggcaccgggcctcctccacaatcttctcggagaggtcaccgggcaactcctccacaagccgtctaggaggcggcaacctccaagagtaacaagcgatgacccggcgtggagatgatcaagtgccacactagctgtcgcgccgtccactcccaccaccccctccgctcccaccgtcgggaaaggcggatccgtccgccgccgcccaccgcagtgctcccgactccgcatcgaccaccatccgccgccgtggccaccacatccgcctcggacgctaaggagttgagcggcgggtgtaagttcaagtgccttaatttggtttcggtgattaatgacaaatct

SEQ ID NO: 23042 - DNA, 4420 bp, Oryza sativa
  Clone ID: TF_OsC1713_4833
tcatccaaagcaattgggcacaacaactacccgccgaaacatattctgtctcggcagtaagagggctacggagttttgtttcttggatgaccatgacacaagggatctaccaagcatttggcaactactggatgtgctctttctatccactttgcaaccggcataatccggatcggaatagccaacaagcttaaatttagcaccttttgggtaccacaagccaatagtagaggaatgctttaaatatcttagaatccttttcacggccactaagtgacactccttaggagcggcttgaaaccgtgcacacatgcaaacactaaacatgatatccggcctagatacggtaaggtaaagcaagctaccaatcatagaacgataaagctttaaatctaccggtttacctccctcatcaaggtcgagatgcccgttggttgccataggtgtcttaatgggcttcgcatcctccaagccaaacctcttgagtagatccttgatgtacttggtttggctcacgaacgtcccattcttgagttgcttgatttgaagtccaaggaagaagctcaactctccaatcatggacatttcaaattccctagacatcatatcaccaaattccttgcaaaatacctcattagtagaaccgaatatgatgtcatcaacataaatttgatacacaaagaaatcatcaccaatgatttttgtgaaaagagtgatgtcaacttttccaattttgaaatcctttgacaaaagaaaatctctcaatctttcataccaagccctaggagcttgtcttaaaccataaagagcttttgagagtttgtaaacatggttaggatatttagtatcatttagaaaagcacttttcacatccatttgaaatagttttatatcaaagcatgatgcaaatgcaagaaggatgcaaatagcctcaagtcttgccacgggggcaaaagtttcaccaaagtccaaaccttcaacttgtgtgaaaccttgtgccaccaatcttgccttgtttctcaccaccaacccgttctcatcttgtttgttcctaaagacccactttgtccctatgacattgtggtctctaggtctttcaaccaaagtccacaccttgtttcttgcaaagtttttgagctcttcatgcatagcattcatccaatccggatcacaaagagcttcatctacatgttttcgctcaagacaagaaacaaacgagtaatgttcacaaatcgaagtgacacgagatcgagtttgaacacccttactaatgtcacccaacacttggtcaattgggtgatccttggaaagagcggtgtgtatccttggtggcataggtggttcttgtgccttctcctcctccacttcaacttgagcttgacttggcatagcggaagtagatggctcatcttgagtggaggtggatggcttgtcttccacttcaataggcttgacatctccaattgacatgttcttcataactctcatcaagccttcatcacctacatcatccaaattctcgtgcccctcttgggagccattagtctcatcaaattgaacatcggcggtttcttccacaatacctttgttcttgttgtagacccggtatgccttgctttttgaggcataacctagaagaaacccttcatcacaccgactttcaaatttggttagtctaacaccctttcgatgaatataacatttacaaccaaaaactcgaaaataggcaatattaggcttcctcccaacaattacctcataggaagtctttttcaagacacgatgcaaataaagcctattggttgcatggcaagcggtgtttatggcttccgcccaaaaggaatcggaaacaccatattcatcaagcatagtccttgccatctcaatcaatgtacgatttttcctctccactacaccattttgttgaggtgagtaggtagcgaaaagttcatgtttaataccaagatcatcacaatagtcctcgatattggtattcttaaactcggaaccaatgttacttctaattttcacaagagtgcaactaaattcattttgggccctttttgcaaactttttgaaaaggtcggcgacaatagacttatcatgcaaaaagaacacccaagtatagcgagaataatcatcaacaatcacaagacaatgactattaccaccaatgctcttataggttgttgggtcaaacaaatccatatgcaagagctccaatggtttagatgtggacatgatactcttagtaggatgagaacatgcaacttgcttgccggcttgacaagcactacaaagcttatctttctcaaacttcacatctttcaagcccataactagatcacgttttgaaaatttgctcaattgattcatgccaacatgggctagccttctatgccaaagccaacccaaagaagtttttgcaactaaacaagttttcaaatttgcttcactagaattgaaatcaaccaaataaagatttccatatctaaaacctttgaacacacaagacttgtcaagaaggctagaaacaataacttcttgcgggaagaaagcacatgacaagctaagatcacaaatttgagcaaccgaaagcaaattgaaatttagagatttaacaagagagacattatcaattgacaaatcattggagatagcaattttacctaacccaattacctttcctttgctattgtctccaaatgtcactttctcttgttcattccttcctacctcaaatgtggtgaacatagccctatcaccggtcatgtgttgagtgcatccactatcaagcacccaatggctcccaccggtgtggtagttcaccaccgagtataggggaacccacatatctaggaacaatgctaccatcatgagccttccattgctcttgacaaaacgagtggcacggtgagaaggtttcttacccttctttggaatgaatccaagtccctccttgttaaggatgcaccgttgctcactcaaaatcttgtcaagagtgttcttacccttgaagcacctctccaacctcttgttgagcttagccacttgctccttaagctcattgttctcaacaacaagtgaggcatcacaaatagatacacaagagctagagctagagctagacatatccacaagatcatcacaagaggtagaaatgctagatgatgcaacataagcaatatggaaagtagcactatcatcaagcaaatcacaagatatgccaacatcaattagagctccatgttgagtagtggaaaggaggttgtcatgagcttccttaagcttctcatgagaaatggtgagtctctcatgagaagtctttagctcctcatacaagacctccaaagaagcatgatccttctttagggccttgaacttgacaatctccttctcactataagcatggagctcctcaaacatactcacaagctcatcataggaaacatcatcacaatcatcatcactctcactatcactaagagatgttaccttagaggagcccggatgaggcgagctctcctcatttgagtcccattcctcgatgaaggcctcaatcttcttgccttccttcttgagcttcttcatgagcttgtagcctccactcttcttcttggatgacttgtctccatcatcatccttggaagggcacttggaagcaaagtgtcccttctcaccacactcaaagcacctcaagttggagagagtcttgttgggtcttctatttcttctcctatttgagttggagccctttcctctctcctttctccttcccaagaaatcattgaacttcttggaaggtgaggcttcctccatttcctttttcttcaacttatacatgtcattggtgttgatcttccccaagaggcttgccggtgtcatccttgacatgtcggagttgatgagcatggtgacaagggtctcatacttctctggtagagccctaagcatcttttgggcaacctcaagatcggtgtagtttgccccaagccccttgagatcattcacaatgacattgagcctcccatacatgtcattcacactctcatgaggcaacatagagaatgtctcatattggatcttgaggaagtgaagcttggcatccttgtactcacttgtgccctcatggatctccgccaacttgttccaaatctcatatgcggtctcaaggttgctcactctatcaaactcctcttggctcaaagagttgaacaaagcattcatggcttgggcattgagttggaggttgcggtgatcaatctccatcaagggcgtgccggtgattgcaaagccggcaccgggcctcctccacaatcttctcggagaggtcaccgggcagggcacgccggtgagaccgccactatgtggccggtctgaccgcccctggtcaggccgaacccagtgaatgtgtttgtgt

SEQ ID NO: 23043 - DNA, 2657 bp, Oryza sativa
  Clone ID: TF_OsC1713_5136
tgctcactcaaaatcttgtcaagagtgtccttacccttgaagcacatctccaaactctgttgagcttaaccacttgctccttaagctcattgttctcaacaacaagtgaggcatcacaaatagaaacacaagtgctagagctagagctaggcatatccacaagatcatcacaagaggtagaaatgctagatgatacaacatgagcaatatggcaaatagcactatcatcaagcaaatcacaagatatgccaacatcaatgagaactccatgttgagtagtggaaaggaggttgtcatgagcttccttaagcttctcatgagaaatggtgagtctctcatgagaggtctttagctcctcatacaagacctccaaagaagcatgatccttctttcgggccttgaacttgacaatctccttctcactataagcatagagctccttaaacatactcacaagctcatcataggaaacatcatcacaatcatcatcactctcactatcactaagaaatgctaccttagaggagtcctttgccatgagacaaagtggagcgaagagtgatggagcctccttgatggcaacaacggccatcttcttcttcttggagcttgcatcatcaccaccttcttcttcggacccggatgaggcggagctctcctcatttgagtcccattccccgataaaggcctcaatattcttgccttccttcttgagcttcttcatgagcttgtagcctccactcttcttcttggatgacttgtctccatcatcatccttggaagggcacttggaagcaaagtgtcccttctcaccacactcaaagcacctcaagttgggaagagtcttgttgggtcttctatttcttctcctattggagttggagtcccttcctctctccttgcccttgcccttgtctttaacttcggcttgtagaacaatgcacttcttggaatgtgagacttcctccatctccttcttcttcaacttgtacatgtcattggtgttgatcttccccaagaggcttgcgggtgtcatccttgacatgtcagagttgatgagcatggtgacaagggtctcatacttctctggtagagccctaagcatcttttgggcaacctcaagatcggtatagtttgccccaagtcccttgagatcatttacaatgacattgagcctcccatacatgtcattcacactctcatgaggcaacatggagaatgtctcatattggatcttgaggaaatgaagcttggcatccttgtactcgcttatgccctcatggatctccgccaacttgttccaaatctcatatgcagtctcaaggttgctcactctatcgaactcctcttggctcaaagagttgaacaaagcattcatagcttgggcattgagttggaggttgcggtgatcaatctccatcaagagcgtgccggtgatagcaaagccagcgccgggcctcctccacaatcttctcggagaggtcaccgggcaactccgaataccactccgtcggctttgtatcggccaccccgagcaacaccatcccggcctccagggggccggtcgccactatgtggccggtctgaccgccccgccactcgcctcccagctccgccctccgcctccgcgttcggcggaggagcgggaggctagcggtggagatggcgaggcggccggagagcgtggggttattgacgagcacgagacgaagaggctgcataggcgcgggaaggaggcggcgaggaggccggacgtgaggagtgtggcggtgacggaggcggagggcgcccgcgcagctcgggttggcagagaagtcagagacgtagccgagcgagatgctgacaacatgggacgcgttgccatcatcgtcgtcgtcgtcacaaaacacgccatgcgggccggcgaggcagaggtcgtcggggaagccggcaatttttccccttcccttctctgcttctcttgttcacgaggtggaggcggcgaacggtccgtcgtcctggtcgttggcatcgtggccgtccaaccacatccgccggcgaacacagagcaagctcgggcaaccggcgatggaggcggcgagttcgggcggtcggtggtggaggcggaggcagagcgcgtcacgttcgccgtagcccgctggcgacaccctagactccagcaaaggaccctacgggttagggtcctaggacgtggtggaggtgggaggggtgggagggggagggagaagagggggagctcactggctttagagggagggccgtgggaggcggcagcctggcggtgggtggcggatcgggcgggcggcgaggcgccggcggcagtgccagagccgcggggatggaggatgacggtgggctggcattggtggcaggggaaaagcaagcgtgcggttaggaggcggtggacgatggttgcggatctagtggcggggagccaccagatacggggaagacagcgaggcgggggcacctcacatcctcgccgtcgcggtgttgagaagaaagagaggggagaagggggagaggggagaggggagaggggaaggggagagggctcaccaggggtcctcgccggcgccgttgactctttccggccagtcggcgaggcgggcaaaggtgcggtggggtggtggcggggaatcgcgcgagggacggga

SEQ ID NO: 23044 - DNA, 2658 bp, Oryza sativa
  Clone ID: TF_OsC1713_5267
ttaccaccacgcgacgaggcgtgggaacgacaacgacgaacgggcgcggcggagacagacgggcacaacggagacgaacggcgaggggacggcttcggcggcgatccttggacgaaggcgagacgcggccggcacgaggcttgacgacgcggagccgaggacgaagacgacgacggggctgcagcggcccacttgacgaacgcggacgacggacgagaacggctcgacggagggacgaacgccacgacgatgaggacgacgagaggacgacgacgacgacgacgactggggccggcgaggagacgacgagggcagccggcggcagctgcacggagacggggacgacgtggaacgcgccgctgcgaatccgacgacggaggcggcaccgcgagacgacgagccggcgaggatgaacggggcggccgaggggacgtcggcgacgacgaggatggaggccggcacgggcgacggcgttccggcgaaacagaggagcagcgggaggtactggacgccgacgaggaggccactccggcgagcttcgggcgaggaggaggacgacgaccgggcggtgggacccacgcgcggcgcggtcagcgcgcggcaaacagcgcacgcgcgcgcacgtgcgcggcacgggcgggagggcgccgctcgggttgggccgagaggcggcccaggaggagaggagggcgaggaggcctttcctttgctattgtctccaaatgtcactttctcttgttctttccctccttcttcaaatgtggtgaacatagccctatcaccggtcatgtgttgagtgcatccactatcaagcacccaatggctcccaccggtgcggtaattcaccaagatggcgacctcgccggagattggatggtcggctgcgactttggaggacatgaacacgtagaggacgacgagacgaacccaacggtactcaccctcgaaccaaacgacgaacgacgacggccggcgacgaggtctattggcggcgcggcttcggtcggcggtggcgacggggctccggtgaccggcgacagcggggagagagcggccgggcttctccacacctcggcgcaccttacggcgatgacggcgaccggcggcgacgacggaggcggcggcgcgacgcggatggagctcggccggcgacgacggcggggtggagcacgtggcggcggcgcgttgctcactcaaaatcttgtcaagagtgttcttacccttgaagcatatctccaaactcttgttgagcttggccacttgctccttaagctcattgttatggcaaatagcactatcatcaagcaagtcacaagatatgccagcatcaatgtgagctccatgttgggtagtggaaaggaggttgtcatgagcttccttaagcttctcatgagaaatggtgagtctctcatgtgaagtctttagctcctcatacaagacctccaaagaagcatgatccttctttagagccttgaacttgacaatctccttctcactataagcatgaagctcctcaaacatactcacaagctcaccataagaaacatcatcacaatcatcatcactctcactatcactaagagatgttaccttagaagagccctttgccatgagacaaagtggagcgaagagtgatggagcctccttgatggcaacaacggccatattcttcttcttggagcttgcatcatcatcaccttcttcttcggacccggatgaggtggagctctcctcatttgagtcccattgcccgatgaaggcctcaatcttcttcccttccttcttgagcttcttcatgagcttgtagcctccactcttcttcttggatgacttgtctccatcattagccttggaagggcacttggaagcaaagtgtcccttctcaccacactcaaagcacctcaagttggagagagtcttgttaggtattatatttcttctcctattggagttggagccccttcctctctcctttcttcttcccaagagatcattgaaccttttagcaagaagggcaatctcttcctccaagtcatcattggcttcattcaccttgctcttccacttgtcttcaacttcggcttggagagcaatgcacttcttagatggtgaggcttcctccatctccttcttcttcaacttgtacatgtcattggtgttgatcttccccaagaggcttgcgggtgtcatccttgacatgtcggagttgatgagcatggcgattagggtctcatacttctccggtagagcactaagcatcttttgggcaacctcaagatcggtgtaggttgccccaagccccttgagatcattcacaatgacattgagcctcccatacatgtcattcacactctcatgaggcaacattgagaatgtctcatattggatcttgaggaaatgaagcttggcatccttgtactcacttgtgccctcatggatctccgccaacttgttccaaatctcatatgcgatcttaaggttgctcactctatcgaactcctcttggctcaaagagttgaacaaagcattcatgacttgagcattgagtaggaggttgctgtgatcaatctccgtcaagggcgtgccggtgagatagcaaagccgaggttcggaaactcgctggtttcctactccctgttgaggcgagcccaactccat

SEQ ID NO: 23045 - DNA, 5194 bp, Oryza sativa; identical to SEQ ID NO: 13971
  Clone ID: TF_OsC359_7758

SEQ ID NO: 23046 - DNA, 4266 bp, Oryza sativa
  Clone ID: TF_OsC1713_4406
ttaccagtcttcgaataggtgcgggtattccgtcctcaaaaattcttcactttcccaggtggcttcatcctcagtgtgattgctccattgtaccttgtacatatgccacactttgctcctagtcctcttttcggcttcatccaatatccggatcgggtgttctggatatgtgagatcattgctaatgtgaatttcttccagcggagcttgctcttctggcactcgtaaacatttctttagctgagatacatggaagactgggtgtacatccgcgatattctctggtaactgtatctgatatgcaacttctcctcgcctggcaatgatctggaatggtcccacatatcttggtgccagttttcctttgaccttaaacctttttgttcccctcatcggagaaacctttagataaacgtaatctccctccttaaattccaggtttcttcttcgggtgtcggcgtaactcttttgtcgtgattgtgctatttttagacggtcgcggatcaagcgaaccttttcttcggcctcttgaataatgtcaggtccaaataccgcccgttctccagtctcggaccacattagcggggtacgacatcgtcgaccaaacaatgcctcgttgggtgacatctttaggcttgcttgaaagctgttgttgtaggagaattcggcgtagggcaaacatctctcccaatccttgttaaaatccagagcacaagccctcagcatgtcttccaggacctggttggttctctccgtctggccatctgtctgtggatgataagctgtgctaaatgcgagataacttcctagggcttcatggactttctcccagaaatggtaggtaaattgtgtgccccgatcagatataattttctttggtacacaatgaagacatactatcctggtcatgtataactcggctagcttagcactgctataatttgtcttaacgggaatgaatctcgccgtcttggtgagtcgatccacgatcacccaaatggaatcatgtcctgttgcggttttgggcaatccaacaataaaatccatacctatctcatcccatttccattcgggaatcctgagaggttgcaacaaacctgccggcctctggtgttcagccttcaccttctggcatacgtcgcagagtgctacgtattcggccacatctctcttcatgttgggccaccagtatccttccttcagatcttggtacatcttcgtacttccggggtgcaatgaatatgccgattcgtgagcttcctttaaaattaatcccctcagtccaccctgttcgggtacgtaaattctctttttataccatagaacatctttttcgttggttgaaaattcctttgcacgtcctgcagctaagcgttccttcacctctcggacttcctcgttgtccttctgggcttcttctatttgggttctcaaaagaggttgaatgtccagggtgtttatctctaaatcatagtccttgattaattctaaccatcgcctttgcctcaagttgagatctgactgggtgaagatatactttagactcttgtggtcagtgtagatatcgcaatggtttccaatcagataatgtctccaaatctttagcgcatgaaccacagctgcgagttctaggtcatgggtagggtagttttcctcatgtggtcgcaattgtcgcgacgcataggccaccacttttccgtcctgcatcagtactcctcctagtccttgccttgacgcatcacaatatataacaaagtctttcctgatgtcgggaagaactaaaataggcgctgaggtcagcttttccttgagctgctcaaagctttcctgacactgttctgaccacacaaacttcttttccttcttgagtagttgtgtcattggtcgggctatcttagagaacccttcaatgaaccgtcggtagtatccagccaagcctagaaaactccaaatttcagtcacagatttgggtgctttccattccgtgacagcctccactttagcaggatccactgctactccaccggccgagattacgtggcctagaaaagcgacttcttttaaccagaactcgcacttgctgaattttgcatataacttatgcttccgaagtttctggagaaccaatcgtaagtgttccgcatgttcttcctcatctttggagtagatcagaatgtcatcaatgaataccaccacaaacttatccaagtaatccatgaatactttgttcataagattcatgaagtatgctggggcattggttagaccaaacgacattactgtgaattcatacaacccatagcgtgttgaaaacgcggttttggggatatcctcggtcctaatcttcagttggtggtatcctgatcgaaggtctatctttgaaaacaccttagctccctcaagttggtcgaagaggtcatcaatccgtggtagtggatacttatttttgatagttacttcgttcagtgatcggtagtctacacacattctcatgctaccgtctttctttttaacaaacaacactggggctccccaaggtgacgaactggggcgtacaaatcccttctcttgcaactccctgatttgctttttaagttcttctaactcattgaccggcatccgatatggtctcttggatatgggggcagttccgggtatcaggtcaataatgaactctatgtcacgatctggtggcattccaggtaaatcttctgggaacacatcaggaaatcgttgcactactggcattccctttaggggtagcatggtaaatatacctccggcacgttcggttagcctaggatcttgatccatggttgctctcatatccgatccccagggtgtggtcagggtaacttctctacgtctacagtcaattactcctctatgctttgctaaccaatccatacccaaaatgacatcaagagtttggggtattagcaccataagattggagggaaataccacatccctaaggcggatgggtacgttaatgcaagctgtatccactgctatctcacccccaggtgagtgtactaacattggttgtcttagtttaactctggttaaattgtgttgttgacttgctttcaaagatataaatgaatgcgatgctcctgaatcgaagagaactttaactggagtggagttgagtgaaaacatacccatcagtacgccttggtcttcctgggcctcttcggctcgaacgtggttcacttgcccgcgtccaaatcctgtagcggtcctgttagtctgcggggtcctgaatagacctcgtccagcagcaggggtagcagtcccgtgaatagccgttgcattagttccggtgcgaatgggtgtcttgtttggatgtggacatttattggcgaaatgcccatactctccacagttgaaacagcttcctggccttactgatccagtggcggcctgatttggtgcaggagcgcggttctgaatggtaaccggcctgtggaaattgctagaggcggcaggtcgactggttgtcaccactgttggtctccatgccgaggaggttgtccctttaggacgctggggtgcggtctgaggcgtgcggttcatggcaagcctccttttacgattgtgctccacgaccttccggtcgttctccaacctaacgaccttattgattaaactctggaaactatcgtggtcttgtccaatcatgggcccgcgtaactcatcattcaagccttcaatgaatttgtcgatcttttcctcctcgtcggcaagatctctagttgcgtagcgcgccagctgagtgaaacggttcaggtactcttgtactgtggtattcccttgccgtagtctcctgaactcattcttcttcatccgcatcaccgcggcaggcacaaagttgtcacggaaggctgtggtaaattcctcccagtttggttctccagcatcttcttctcgggcttctttgtacgtgtcccaccaatctccggctggtccttccaattggtttgccgcaaagatcactttatcggcctcacgtactcgaacaagagttagcttcttctcaatgatccttaaccaatcttcagcatccataggttcttcagctgtggcgaatgtgggtggcttggtcctcataaactctccaaagcttgaccctccgcggttgccttggttgttcgcgatagcttgcagaagttgagtttgggtggccataattccggccagagtgtttaagtcgggtgtctgagtttcgtcattgctggttgttgcccgacgtcggcttgccat

SEQ ID NO: 23047 - DNA, 4845 bp, Oryza sativa
  unsure (1)..(4845): unsure at all n locations
  Clone ID: TF_OsC1713_4477
atggacgcgagggggggaaaggttgggcggcggcttaccgacgacggcgacggcaacggcggcgacagcgacggtggcggggaagggaaagagataaggggaggggaagacgtgacggcggcgcggggctcggggtgggggcgcgcggcacggggctcggggcgggacgcgacgggcgacggcgtgcggcgcgcggacgagcgacgacggcgacggacgagcgacgcgacggcgatggacgagcggcgacgggacgggcaacccgacggcnnacggcgcgcggcgcgtggtncgncanacgacancggcgcggggcgcaaggcgcaacggcgacggacgagcggcgacgggacgggcgacgtgacgggcgacgcgacgggcgggcagcgncggcgcgcggcgcgaggttcgggcgcgggcgcggcagtggtgcgcggcgcgaggcggcgtcagcgcgtcaccggcggcgcggggctcgagatgacgcgacggcagcagcggcgacgcgacggctacgcggcgcggcgatggcgacggcaatggcgcgcggcgggacgaggcgcgaggcgcgacggcgacggctcggggcgcgaggcgcgcatggcaggggaggggaaggggctagggaacctcgtcgaacacctagaggctaatgaatacctcagtgtgattactccattgtaccttgtacatacgccacactttgctcctagtcctcttttctgcttcatccaatatccgaatcgggtgttctggatatgtgagatcattgctaatgtgaatctcttccagcggagcttgttcttccggcactcgtaagcatttctttaattgggatacatggaagattgggtgcacatccgcgatattctccggtaactgtaactgatatgcaacttctcctcgcctggcggtgatctggaatggccccacatatcttggtgccagttttcccttgaccttaaacctttttgttcccctcatcggagaaacctttagataaacgtaatctccctccttaaattccaggtttcttcttcgagtgtcggcgtaactcttttgtcgtgattgtgctacttttagacggtcacggatcaagcgaaccttttcttcggcttcttgaataatgtcaggtccaaacaccgcccgttctccagtctcggaccacattagcggggtacgacatcgtcgaccaaacaatgcctcagtgggtgacatctttaggcttgcttgaaagctgttgttgtaggagaattcagcgtagggcaaacatctctcccagtccttgctaaaatctagagcacaagccctcagcatgtcttctaggacctggttggttctctccgtctggccatctgtctgtggatgataagctgtgctaaatgcgagataacttcctagggcttcatggactttctcccagaaatgtgaggtaaactgtgtgcctcgatcagatataatcctcttaggtataccatgaagacacactatcctggtcatgtacaactcggcgagttttgcactgctatagtttgtcttgacgggaatgaatcttgccgttttggtgagtcgatccacgatcacccaaatggaatcatatcctgttgcggttttgggcaatccaacaataaaatccatacctatctcatcccatttccattcgggaatcctgagaggttgcaacaaacctgccggcctctggtgttcagccttcaccttctggcatacgtcgcagagtgctacgtattcggccacatctctcttcatgttgggccaccagtagccctccttcaaatcctggtacattttggtacttccggggtgtaatgagtatgccgattcgtgagcttcctttaaaattaatcccctcagtccaccctgtttgggtacgtaaattctctttttataccatagaacatctttttcgtcggttgaaaattcttttgcacgtccggcagctaagcgttccttcacctctcggacctcctcgttgtccttctgggcttcttctatttgggttctcaaaagaggttgaatgtccagggtgtttatctgtccatgaggcactatatataggttcagctgagctatttcctccctaagctcagggaccatcccttccattctcagatgattgcaatggctcttacgactcagagcgtcggctacaacgtttgctttgcctgggtgatagtgaacctctaaatcatagtccttgattaattctaaccatcgcctttgcctcaagttgagatctgactgggtgaagatatactttagactcttgtggtcagtgtagatatcgcaatggtttccaatcagataatgtctccaaatctttagcgcatgaaccacagctgcgagttctaggtcatgggtagggtagttttcctcatgtggtcgcaattgtcgcgacgcataggccaccacttttccgtcctgcatcagtactcctcctagtccttgccttgacgcatcacaatatataacaaagtctttcctgatgtcgggaagaactaaaataggcgctgaggtcagcttttccttgagctgctcaaagctttcctgacactgttctgaccacacaaacttcttttccttcttgaatagttgtgtcattggtcgggctatcttagagaacccttcaatgaaccgtcggtagtatccagccaagcctagaaaactctgaatttcagtcacagatttggatgctttccattccgtgacagcctccactttagcaggatccactgctactccaccggccgagattacgtggcctagaaaagcgacttcttttaaccagaactcgcacttgctgaattttgcatataacttatgcttccgaagtttctggagaaccaatcgtaagtgttccgcatgttcttcctcatctttggagtagatcagaatgtcatcaatgaataccaccacaaacttatccaagtaatccatgaatactttgctcataagattcatgaagtatgctggggcattggttagaccaaacgacattactgtgaattcatacaacccatagcgtgttgaaaacgcggttttggggatatcctcggtcctaatcttcagttggtggtatcctgatcgaaggtctatctttgaaaacaccttagctcccttaagttggtcgaagaggtcatcaatccggggtagtggatacttatttttgatagttacttcgttcagtgatcggtagtctacacacattctcatgctaccgtctttctttttaacaaacaacactggggctccccaaggtgacgaactggggcgtacaaatcccttctcttgcaactccctgatttgctttttaagttcttctaactcattgaccggcatccgatatggtctcttggatatgggggcagttccgggtatcaggtcaataatgaactctatgtcacgatctggtggcattccaggtaaatcttctgggaacacatcaggaaatcgctgcactactggcattccctttaggggtagcatggtaaatatacctccggcacgttcggttagcctaggatcttgatccatggttgctctcatatccgatccccagggtgtggtcagggtaacttctctacgtctacagtcaattactcctctatgctttgctaaccaatccatacccaaaatgacatcaagagtttggggtattaataccataagattggagggaaataccacatccctaaggcggatgggtacgtcaatgcaagctgtatccactgctatctcacccccaggtgaatgtattaacattggttgtcttaatttaactccgcgtccaaatccggtagcggtcctgttagtctgcggagtcctgaatagacctcgtccagcagcaggggtagcagtaccgtgaatagccgttgcattagctccggtacgaatgggtgtcttgtttggatgaggacatttattagcgaaatgcccatactctccacagttgaagcagctccctggccttactgatccagtggcggcctgattcggtgtaggagcgcggttctgaatggtaaccggcctgtggaaattgctggaggcggcaggtcgactggttgtcaccactgttggtctccatgctgagggggttgtccctttaggacgctggggggcggtctgaggcgggcggttcatggcaagcctccttttacgattgtgctccactaccttccggtcgttctccagcctgacgaccttattgattaagctctggaaactatcgtggtcttgtccaatcatgggcccgcgtaactcgtcattcaagccttcaatgaatttgtcgatcttttcctcttcgtcggcaagatctctagttgcgtagcgcgccagctgagtgaaacggttcaggtactcttgtactgtggtattcccttgccgtagtctcctgaactcgttcttcttcatccgcatcactgcggcaggcacaaagttgtcacggaaggctgtggtaaattcctcccagtttggttctccagcatcttcttctcgggcttctttgtacgtgtcccaccaatctccggctggtccttccaattggtttgccgcaaagatcaccttatcggcctcacgtactcgaacaagagttagcttcttctcaatgatccttaaccaatcttcagcatccataggttcttcagctgtggcgaatgtgggtggcttggtcctcataaactctccaaagcttgaccctccgcggttgccttggttgctcgcgatagcttgcagaagttgagtttgggtggccataattccggccagagtgtttaagtcgggtgtctgagtttcgtcattgctggttgttgcccgacgtcggcttgccat

SEQ ID NO: 23048 - DNA, 4413 bp, Oryza sativa
  Clone ID: TF_OsC1713_4736
ttaccagttgtagaatagatgcgggtactccgtcctcaagaattcttcgctttcccaggtggcttcatcctcagtgtgattactccattgtaccttgtacatacgccacactttgctcctagtcctcttttctgcttcatctaatatccgaatcgggtgttctgggtatgtgagatcattgctaatgtgaatctcttccagcggagcttgttcttccgacactcgtaagcatttctttaattgggatacatggaagactaggtgcacatcggcgatattctctggtagttgtaactgatatgcaacttctcctcgcctggcgatgatctggaatggccccacatatcttggtgccagttttcctttaaccttaaacctctttgttcccctcatcggagaaacctttagataaacgtaatctccttccttaaattccaggtctcttcttcgagtgtcggcgtaactcttttgtcgtgactgtgctacttttagacggtcacggatcaaacgaaccttttcttcggcttcttgaatgatgtcaggtccaaataccgcccgttccccagtctcggaccatattagcggggtacgacatcgtcgaccaaacaatgcctcattgggtgacatctttaggcttgcttgaaagctgttgttgtaggagaattcggcgtagggcaaacatctctcccagtccttgctaaaatccaaagcacaagccctcagcatgtcctccaggacctggttggttctctccgtctggccatccgtctgtggatgataagcggtgctaaatgcgaggtaacttcctagggcttcatggactttctcccagaaatgtgaggtaaactgtgtgcctcgatcagatataatcctcttaggtataccatgaagacacactatcctggtcatgtacaactcggcgagttttgcactgctatagtttgtcttgacggggatgaatcttgccgtcttggtgagtcgatccacgatcacccatatggaatcatatcctgttgcggttttgggcaatccaacaataaaatccatgcctatctcatcccatttccattcgggaatcctgagaggttgcaacaaacctgccggcctctggtgttcagccttcaccttctggcatacgtcgcagagtgctacgtattcggccacatctctcttcatgttgggccaccagtatccttccttcagatcttggtacatcttcgtacttccggggtgcaatgaatatgccgattcgtgagcttcctttaaaattaatcccctcagtccaccctgttcgggtacgtaaattctctttttataccatagaacatctttttcgtcggttgaaaattcctttgcacgtcctacagctaagcgctccttcacctctcggacttcctcgttgtccttctgggcttcttctatttgggttctcaaaagaggttgaatatccagggtgtttatctgtccacggggtactatatgtaggttcagctgcgccatttcctccctaagctcagggaccatcccttccgttctcagatgattgcaatggctcttacgactcagagcgtcggctacgacgtttgctttgcctgggtgataatgaacctctaaatcatagtccttgattaattctaaccatcgcctttgcctcaagttgagatctgactgggtgaagatatactttagactcttgtggtcagtgtagatatcgcaatggtttccaatcagataatgtctccaaatctttagcgcatgaaccacagctgcgagttctaggtcatgggtagggtagttttcctcatgtggtcgcaattgtcgcgacgcataggccaccacttttccctcctgcatcagtactcctcctagtccttgcctcgacgcatcacaatatataacaaagtctttcctgatgtcgggaagaactaaaataggtgctgaggtcagcttttctttgagctgctcaaagctttcttgacactgttccgaccatgcaaacttcttttccttcttgagtaattgtgtaattggtcgggctatcttagagaacccttcaatgaaccttcggtagtatccagccaagcctagaaaactccggatctcagtcaccgatttgggtgctttccattccgtgacagcctccactttagcagggtccactgctactccaccggctgagattacgtgacccagaaaagcgacttccttcaaccaaaattcgcacttgctgaattttgcgtataacttgtgctttcggagtttctggagaaccaatcttaagtgttccgcatgttcttcctcatctttggagtagataagaatgtcatcaatgaacaccaccacaaacttatccaagtattccatgaatactttgttcataagattcatgaagtatgctggggcattggttagaccaaacgacattactgtgaattcatacaacccatagcgtgttgaaaacgcggttttggggatatcctcggtcctaatcttcagttgatggtatcctgatcgaaggtctatctttgaaaacaccttagctcccttaagttggtcgaagaggtcatcaatccgtggtagtggatacttatttttgatagttacttcgttcagtgatcggtagtctacacacattctcatgctaccgtctttctttttaacaaacaacactggggctccccaaggtgacgagctggggcgtacaaatcccttctcttgcaactctctgatttgctttttaagttcttctaactcattgaccggcatccgatatggtctcttggatatgggggcagttccgggtatcaggtcaataatgaactctatgtcacgatctggtggcattccaggtaaatcttctgggaacacatcaggaaatcgctgcactactggcattccctttaggggtagcatggtaaatatacctccggcacgttcggttagcctaggatcttgatccatggttgctctcatatccgatccccagggtgtggtcagggtaacttctctacgtctacagtcaattactcctctatgctttgctaaccaatccatacccaaaatgacatcaagagtttggggtattagcaccataagattggagggaaataccacatccctaaggcgaatgggtacgtcaatgcaagctgtatccactgctatctcacccccaggtgaatgtactaacattggttgtcttaatttaactctggttaaattgtgttgttgacttgctttcaaagatataaatgaatgcgatgctcctgaatcgaagagaactttaactggagtggagttgagtgaaaacatacccatcagtacgccttggtcttcctgggcctcttcagctcgaacatggttcacttgcccgcgtccaaatccggtagcggtcctgttagtctgcggagtcctgaatagacctcgtccagcagcaggggtagcagtaccgtgaatagccgttgcattagctccggtacgaatgggtgtcttgtttggatgaggacatttattagcgaaatgcccatactctccacagttgaagcagctccctggccttactgatccagtggcggcctgattcggtgtaggagcgcggttctgaatggtaaccggcctgtggaaattgctggaggcggcaggtcgactggttgtcaccactgttggtctccatgctgagggggttgtccctttaggacgctggggggcggtctgaggcgggcggctcatggcaagcctccttttacgattgtgctccactaccttccggtcgttctccagcctgacgaccttattgattaagctctggaaactatcgtggtcttgtccaatcatgggcccgcgtaactcgtcattcaagccttcaataaatttgtcgatcttttcctcttcgtcggcaagatctccagttgcgtagcgcgccagctgagtgaaacggttcaggtactcttgtactgtggtattcccttgccgtagtctcctgaactcgttcttcttcatccgcatcaccgcggcaggcacaaagttgtcacagaaggctgtggtaaattcctcccagtttggttccccggcatcttcttctcgggcttctttgtacgtgtcccaccaatctccggctggtccttccaattggtttgccgcaaagatcaccttatcggcctcacgtactcgaacaagagttagcttcttctcaatgatccttaaccaatcttcagcatccataggttcttcagctgtggcgaatgtgggtggcttggtcctcataaactctccaaagcttgaccctctgcggttgccttggttgctcgcgatagcttgcagaagttgagtttgggtggccataattccggccagagtgtttaggtcgggcgtctgagtttcgtcattgccggttgttgcccgacgtcggcttgccat

SEQ ID NO: 23049 - DNA, 4365 bp, Oryza sativa
  Clone ID: TF_OsC1713_4922
ttaccagttttcaaatagatgcgggtattccgtcctcaagaattctttgctttcccaagtggcttcatcctcagtgtgattactccactgtaccttatacatacgccatactttgttcctagtcctcttttctgcttcatccaatatccggactaggtgttctggatacgtgagatcattgctaatgtgaatttcttccaacggagcttgttcttccggcactcgtaagcatttctttaattgagacacatggaagactgggtgcacatcagcgatattctctggtagctgtaactgatatgcgacttctcctcgtctagccgtgatttgaaaaggtcccacatatcttggcgctagttttcctttgaccttaaaccttttcgttcccctcatcagagaaacctttagataaacgtaatctccttccttaaattccaggtttcttcttcgggtgtcggcgtaactcttctgtcgtgattgtgccacttttagacggtctcgaatcaggcgaaccttttcttcggcctctttgataatgtcaggttcaaataccgcccgttcacctgtctcggaccacatcagtggggttcgacatcgtcgaccaaacaatgcctcattgggtgacatctttaggcttgcttgaaagctgttgttgtaggagaattcggcgtagggcaaacatctctcccagtccttgctaaaatccagagcacaagccctcagcatttcctccaggacctggttggttctctctgtctggccatctgtctgtggatgataagctgtgctaaatgcgaggtaacttcctagggcttcatggactttctcccagaaatgtgaggtaaactgtgtgccccgatcagatgtaattttcttaggtacaccatgaagacatactatcctggtcatgtataactcggctagcttagcactgctataatttgtcttaacgggaatgaatctcgccgtcttggtgagtcgatccacgatcacccaaatggaatcatatcctgttgcggttttgggcaatccaacaataaaatccatacctatctcatcccatttccattcgggaatcctaaggggttgcagcaagcctaccggtcgctgatgctcagccttcaccttttggcacacgtcacagagtgctatgtattccgccacatctctcttcatgttgggccaccagtatccttccttcagatcttggtacatcttggtacttccggggtgcaatgaatatgccgattcgtgagcttcctttaaaattaatcccctcagtccaccctgttcgggtacgtaaattctctttttataccatagaacatctttttcgtcggttgaaaattcctttgcacgtcctgtagctaagcgttccttcacctctcggacttcctcgttgtccttctgggcttcttctatttgggttctcaaaagaggttgaatgtccagggtgtttatctgtccacgaggtactatatgtaggttcagctgagctatctcctccctaagctcagggatcatcccttccattctcagatgattgcaatggctcttacgactcagagcgtcggccacaacgtttgctttgcctgggtgatagtgaacttctagatcatagtccttgattaattctaaccatcgcctttgcctcaagttgagatctgactgggtgaagatatactttagactcttgtggtcagtgtagatatcgcaatggtttccaatcagataatgtctccaaatctttagcgcatgaaccacagctgcgagttctaggtcacgggtagggtagttttcctcatgtggttgcaattgtcgcgacgcataggccacaacttttccgtcctgcatcagtactcctcctagtccttgccttgacgcatcacaatatataacgaagtctttcctgatgtcgggaagaactaaaataggcgccgaggtcagcttttctttgagctgctcaaagctttcctgacactgttctgaccacacaaacttcttttccttcttgagtagttgtgtcattggtcgggctatcttagagaacccttcaatgaaccgtcggtagtatccagccaagcctagaaaactccgaatttcagtcacagatttgggtgctttccattctgtgacagcctccactttagcaggatccactgctactccaccggccgagattacgtggcctagaaaagcgacttcttttaaccagaactcacacttgctgaattttgcatataacttatgcttccgaagtttctcgagtaccaatcgcaagtgttccgcatgttcttcctcatctttggagtagattagaatatcatcgatgaataccaccacaaatttgtccaagtagtccatgaacactttgttcataagattcataaagtatgccggagcgttggttaaaccaaacgacattacggtgaactcatataatccatagcgtgttgagaacgcagttttgggtatgtccccggttctaattttcaattggtggtatcctgaccgatggtcaatcttagagaacaccttagctcctttgagttgatcaaaaagatcatcaatccgtggtagtggatacttgtttttgatagttacttcgttcagtgagcggtagtccacacacattctcatgctaccatctttcttcttgacgaatagcactggggctccccaaggtgacgaactggggcgtacaaatcccttttcttgcaactccctaatttgctttttaagttcatccaactcattgaccggcatccgatatggtctcttggatatgggggcagttccgggtatcaggtcaataatgaactctgtgtctcgatctggtggcattccaggtaaatcttctgggaacacatcaggaaatcgctgcactacgggcattccctttaggggtagcatggtaaatatacctccggcacgttcggttagcctaggatcttgatccatggttgctctcatatccgatccccagggtgtggtcagggtaacttctctacgtctacagtcaattatccctctatgctttgctaaccaatccatacccagaatgacatcaagagtttggggtattagcaccataagattggagggaaataccacatcccgaaggcggatgggtacgtcaatgcaagctgtatccactgctatctcacccccaggtgaatgtactaacattggttgtcttagtttaactctgattaaattgtgttgttgacttgctttcaaagatataaatgaatgcgatgctcccatcagtacgccttggtcttcctgggcctcttcagctcgaacgtggttcacttgcccgcgtccaaattcggtagcggtcctgttagtctgcggagtcctgaatagacctcgtccagcagcaggggtagcagtcccgtgaatagccgttgcattagctccggtgcgaatgggtgtcttgttcggatgaggacatttattggcgaaatgcccatactctccacagttgaaacaacttcctggccttactgatccagtggcggcctgattcggtgcaggagcgcggttctgaatggtaaccggcctgtggaaattactggaggcggcaggtcgactggttgtcaccactgttggtctccatgccgaggaggttgtccctttaggacgctggggtgcggtctgaggcgggcggttcatggcaagcctccttttacgattgtgctccacgaccttccggtcgttctccaacctaacgaccttattgattaaactctggaaactatcgtggtcttgtccaatcatgggcccgcgtaactcgtcattcaagccttcaatgaatttgtcgatcttttcctcctcgttggcaagatctctagtcgcgtagcgcgccagctgagtgaaatggttcaggtactcttgtactgtggtattcccttgccgtagtctcctgaactcattcttcttcatccgcatcactgcggcaggcacgaagttgtcacggaaggctgtggtaaattcctcccagtttggttctccagcatcttcttctcgggattctttgtacgtgtcccaccagtctccggctggtccttccaattggtttgccgcaaagatcactttatcggcctcacgtactcgaataagagttagcttcttctcaatgatccttaaccaatcttcagcatccataggttcttcagctgtggcgaatgtgggtggcttggtcctcataaactctccaaagcttggccctccgcggttgccttggttgttcgcgatagcttgcagaagttgagtttgggtggccataactccggccagagtggctaagtcgggtgtctgagtttcgtcattgctggttgttgcccgacgtcggcttgccat

SEQ ID NO: 23050 - DNA, 3911 bp, Oryza sativa
  Clone ID: TF_OsC1713_4988
ccagttgccgaatagatgcgggtactccgtcctcaagaattcttcgccttcccaggtggcttcgtcctcagtgtgattactccattgtaccttgtacatacgccacactttgctcctagtcctctaatctgcttcatccaatatccggatcgggtgttctggatatgtgagatcattgctaatgtgaatctcttccagcggagcttgttcttccggcactcgtaagcatttctttaattgggacacatggaagactgggtgcacatcggcgatatattctggtagctgtaactgatatgcgacttctcctcgcctggcaatgatctggaatggccccacatatcttggtgccagttttcctttaaccttaaacctttttgttcctctcatcggagaaacctttagataaacgtaatctccttccttaaattccaggtttcttcttcgagtgtcggcgtaactcttttgtcgtgattgtgctacttttagacgatcacggatcaagcgaaccttttcttctgcttcttgaataatgtcaggcccaaataccgcccgttctccagtctcggaccacattagcggggttcgacatcatcgaccaaacaatgcctcgttgggtgatatctttaggcttgcttgaaagctgttgttgtaggagaattcggcgtagggcaaacatctctcccagtccttgctaaaatccagagcacaagccctcagcatgtcctccaggacctggttggttctctccgtctggccatctgtctgtggatgataagcggtgctaaatgcgaggtaacttcccagggcttcatggactttctcccagaaatgtgaggtaaattgtgtgcctcgatcagatataatcttcttaggtataccatgaagacacactatcctggtcatgtacaactcggcgagttttgcactgctatagtttgtcttgacggggatgaatcttgccgtcttgttgagtcgatccacgatcacccaaatggaatcatatcctgttgcggttttgggcaatccaacaataaaatccatgcctatctcatcccatttccattcgggaatcctgagaggttgcaacaaacctgccggcctctggtgttcagccttcaccttttggcatacgtcgcaaagtgctacgtattcggccacatctctcttcatgttgggccaccagtagccctccttcaaatcctggtacattttggtacttccggggtgtaatgagtatgccgactcgtgagcttcctttaaaattaatcccctcagtccaccctgttcgggtacgtaaattctctttttataccatagaacgtcttttccgtcggttgaaaattcttttgcacgtcctgcagctaagcgttccttcacctctcggacctcctcgtttccttctgggcttcttctatttgggttctcaaaagaggttgaatgtccagggtgtttatccgtccatgaggcactatatgtaggttcagctgagctatttcctccctaagctcagggaccatcccttccattctcagatgattgtaatggctcttacgactcagagcgtcggccacaacgtttgctttgcctgggtgatagtgaacctctaaatcatagtccttgattaattctaaccatcgtctttgcctcaagttgagatctgactgggtgaagatatactttagactcttgtggtcagtgtagatatcgcaatggtttccaattaggtaatgtctccaaatctttagcgcatgaaccacagctgcgagttctaggtcatgggtagggtagttttcctcatgtggtcgtaattgtcgcgacgcataggccacaacttttccgtcctgcatcagtactcctcctagtccttgccttgacgcatcacaatatataacaaagtctttcctgatgtcgggaagaactaaaataggtgccgaggtcagcttttctttaagctgttcaaagctttcctgacattgttctgaccatacaaacttcttttccttcttgagtagttgtgtcatcggtcgggctatcttagagaacccttcaatgaaccttcggtagtatccagccaagcctagaaaactccgaatttcagtcacagatttgggtgctttccattccgtgacagcctccactttagcagggtccactgctactccaccggctgagattacgtgacccagaaaagcgacttccttcaaccaaaattcgcacttgctgaattttttgtataacttgtgctttcggagtttctggagaaccaatcttaagtgttccgcatgttcttcttcatctttggagtagatcagaatgtcatcgatgaataccaccacaaatttttccaagtagtccatgaacactttgttcataagattcataaagtatgccggggcgttggttaaaccaaacgacattacggtgaactcatataatccatagcgtgttgagaacgcggttttgggtatatccccggtcctaattttcaattggtggtatcctaatcgaaggtcaatcttagagaacaccttagctcctttgagttgatcaaaaagatcatcaatccgtggtagtggatacttgtttttgatagttacttcgttcagtgagcggtagtccacacacattctcatgctaccatccttcttcttgacgaatagcactggggctccccaaggtgacgaactggggcgtacaaatcccttttcttgcaactccctaatttgctttttatgttcttctaactcattgaccagcatccgatatggtctcttggatataggggcagttccgggtatcaggtcaataatgaactctatgtcacgatctggtggcattccaggtaaatcttctgggaacacatcaggaaatagctgcactacgggcattccctttaggggtagcatggtaaatatacctccggcacgttcggttagcctaggatcttgatccatggttgctctcatatccgatccccagggtgtggtcagggtaacttctctacgtctacagtcaattactcctctatgctttgctaaccaatccatacccaatatgacatcaagggtctcacccccaggcgagtgtactatcataggctttctaactcctcgtccaccagcaggggtagcagccccgtgaatagccattgcattagctccggtgcgaatgggtgtcttgtttagatgaggacatttgttggcaaaatgcccatactctccacaattgaaacagcttcctggcctcattactccagtagcggcctgattcggtgcaggagctcggttctgagtggtaaccggcctgtggaagttgctatgtgcggtaggacggttcgttgttaccaccgttggtttccatcctgatgaggcagctcctttaggatgctgagttgccacctgaggtgggcggttcatggcaagcctcctcttacgattgtgctccacaaccttccggtcgttttccagcctaacgaccttattgatcaaactctggaaactctcatgatcttgcccaatcataggcccacgcaactcatcattcagcccttctatgaacttgtcgatcttttcctcttcatctgcgaggtctccgattgcgtagcgggtcaactgagtgaaccggtttagatattcttgcaccgttgtgtttccttgtcgcggccttctgaactcgttcttcttcatacgcatcaccgcagcaggcacgaagttctcatgaaaagctgcagtgaattcatcccaagtgggttctccagcatcttcttcccgagcttccttgtaagtatcccaccaatcgccagctggtccctccagttggtttactgtgaagatcactttgtcggcttcgcgcatccggacaagggtcagtttcttctctatgatgcatagccaatcttctgcctccat

SEQ ID NO: 23051 - DNA, 4291 bp, Oryza sativa
  Clone ID: TF_OsC1713_5164
ttggatttcgcttagatgcgggtaatctgtctccaagaattttttgctttcccaagtgggttcatcctcaggaagaatactccaatgtaccttggacatacgccacactttggtcctagtccttttttttggttcatcccaaatccggactgggtggtttggaaaagtgagatcaatggtatatgaattttttccaacggagcttggtcctccggcacttgtagcactttttttaattagacacaggaaaactgggtgcacatcagcgatatttttttggagctgtacatgatatgcaacttctccttgtctagcgatgattggaaaaggtcccacatatcttggtgctagtttccttaaccttaaacatttttgtacctctcatcggagaaaccttcagatatacataatccccttccttaaattctagatctcttctccgggtgtcagcgtaactcttttgtcgtgattgtgccacttttagacggtcgcggatcaagcgaaccttttcttcggcttcttgaataatgtcaggtccaagtaccgcccgttctccagtctcggaccacattagtggggttcgacatcgtcgaccaaacaatgactcattgagtgacatctttaggcttgcttgaaagctgttgttgtaggagaattcggcgtaaggcaaacatctctcccagtccttgctaaaatccagagcacaagccctcagcatgtcctccaggacctggttggttctctccgtctggccatctgtctgtggatgataagctgtgctaaatgcgaggtaacttcctagggcttcatggactttctcccagaaatgtgaggtaaactgtgtgccccgatcagatataattttcataggtacaccatgaagacatactatcctggtcatgtataactcggctagcttagcactgctataatttgtcttaacgggaatgaatctcgccgtcttggtgagtcgatccacgatcacccaaatggaatcatatcctgttgcgattttgggcaatccaacaataaaatccatacctatctcatcccatttccattcgggaatcctgagaggttgcaacaaacctgccggcctctggtgttcagccttcaccttctggcatacgtcgcagagtgctacgtattcggccacatctctcttcatgttgggccaccagtagccctccttcaaatcctggtacattttggtacttccggggtgtaatgagtatgccgattcgtgagcctcctttaggattaatcctcgcagtccaccctgttcgggtacgtaaattctctttttataccatagaacatctttttcgtcggttgaaaattcctttgcgcgtcctgcagctaagcgttccttcacctctcggatttcctcgttgtccttctgggcttcttctatttgggttctcaaaagaggttgaatgtccagggtgtttatctgtccatgaggcactatatgtaggttcagctgagctatttcctccctaagctcagggaccatcccttccattctcagatgattgcaatggctcttacgactcagagcgtcggccacaacgtttgctttgcctgggtgatagtgaacctctagatcatagtccttgattaattctaaccatcgcctttgcctcaagttgagatctgactgggtgaagatatacttcagactcttgtggtcagtgtagatatcgcaatggtttccaatcagataatgtctccaaattcctcctagtccttgccttgacgcatcacaatatataacgaagtctttcctgatgtcgggaagaactaaaataggcgccgaggtcagcttttctttgagctgctcaaagctctcctgacactgttctgaccatacaaacttcttttccttcttgagtagttgtgtcattggtcgggctatcttagagaacccttcaatgaaccgtcggtagtatccagccaagcctagaaaactccgaatttcagtcacagatttgggtgctttccattccgtgacagcctccactttagcagggtccactgctactccaccggctgagattacgtgacccagaaaagcgacttccttcaaccaaaattcgcacttgctgaattttgcgtataacttgtgctttcggagtctctggagaaccaatcgtaagtgttccgtatgttcttcctcatctttggagtagatcagaatgtcatcgatgaataccaccacaaacttatccaagtaatccatgaatactttgttcataagattcatgaagtatgctggggcattggttagaccaaacgacattactgtgaattcatacaacccatagcgtgttgaaaacgcggttttggggatatcctcggtcctaatcttcagttggtggtatcctgatcgaaggtctatctttgaaaacaccttagctcccttaagttggtcgaagagatcatcaatccttggtagtggatacttgtttttaatagttacttcgttcagtgatcggtagtctacacacattctcatgctaccgtctttctttttaacaaataacactggggctccccaaggtgacgaactggggcgtacaaatcccttctcttgcaactccctaatttgctttttaatttcttctaactcattgaccggcatccgatatggtctcttggatatgggggcagttccgggtatcaggtcaataatgaactctatgtcacgatctggtggcattccaggtaaatcttctgggaacacatcaggaaatcgctgcactacgggcattccctttaggggtagcatggtaaatatacctccggcatgttcggttagcctaggatcttgatccatggttgctctcatatccgatccccagggtgtggtcagggtaacttctctacgtctacagtcaattactcctctatgctttgctaaccaatccatacccaaaatgacatcaagagtttggggtattagcaccataagattggagggaaataccacatccctaaggcggatgggtacgtcaatgcaagctgtatccactgctatctcacccccaggtgaatgtactaacattggttgtcttagtttaactctgattaaattgtgttgttgacttgctttcaaagatataaatgaatgcgatgctcctgaatcgaagagaactttaactggagtggagttgagtgaaaacatacccatcagtacgccttggtcttcctgggcctcttcagctcgaacgtgcttcacttgcccgcgtccaaatccggtagcggtcctgttagtctgcggagtcctgaatagacctcgtccagcagcaggggtagcagtcccgtgattagccgttgcattagctccggtccgaatgggtgtcttgtttggatgaggacatttattggcgaaatgcccatactctccacagttgaaacagctccctggccttactgatccagtggcggcctgattcggtgcaggagcgcggttctgaatggtaaccggcttgtgaaaattgctagaggcggcaggtcgactggttgtcaccactgttggtctccatgccgagggggttgtccctttaggacgctggggtgcggtctgaggcgagcggttcatggcaagcctccttttacgattgtgctccacgaccttccggtcgttctccaacctaacgaccttattgattaaactctggaaactatcgtggtcttgtccaatcatgggcccgcgtaactcgtcattcaagccttcaatgaatttgtcgatcttttcctcctcgtcggcaagatctctagtcgcgtagcgcgccagctgagtgaaacggttcaggtactcttgtactgtggtattcccttgccgtagtctcctgaactcattcttcttcatcctcatcaccgcggcaggcacgaagttgtcacggaaggctgtggtaaattcctcccagtttggttctccagcatcttcttctcgggcttctttgtacgtgtcccaccagtctccggttggtccttccaattggtttgccgcaaagatcactttatcggcttcacgtacttgaacaagagttagcttcttctcaatgatccttaaccaatcttcagcatccataggttcttcagctgtggcgaatgtgggtggcttggttctcataaactctccaaagcttgaccctccgcggttgccttggttgttcgcgatagcttgcagaagttgggtttgggtggtcataactccggccagagtggttaagtcgggtgtctgagtttcgtcattgctggttgttgcccgacgtcggcttgccat

SEQ ID NO: 23052 - DNA, 4410 bp, Oryza sativa
  Clone ID: TF_OsC1713_5256
ccagtcttcgaataggtgcgggtattccgtcctcaaaaattcttcactttcccaggtggcttcatcctcagtgtgattgctccattgtaccttgtacatacgccacactttgctcctagtcctcttttcggcttcatccaatatccggatcgggtgttctggatatgtgagatcattgctaatgtgaatctcttccagcggagcttgctcttccggcactcgtaaacatttctttagctgagacacatggaagactgggtgtacatccgcgatattctctggtaactgtaactgatatgcaacttctcctcgcctggcgatgatctggaatggtcccacatatcttggtgccagttttcctttgaccttaaacctttttgttcccctcatcggagaaacctttagataaacgtaatctccctccttaaattccaggtttcttcttcgggtgtcggcgtaactcttttgtcgtgattgtgctacttttagacggtcacggattaagcgaaccttttcttcggcttcttgaataatgtcaagtccaaataccgcccgttctccagtctcggaccacattagcggggtacaacatcatcgaccaaacaatgcctcattgggtgacatctttaggcttgcttgaaagctgttgttgtaggagaattcgtcgtagggcaaacatctctcccagtccttgctaaaatccagagcacaagccctcagcatgtcctccaggacctggttggttctctccgtctggccatctgtctatggatgataagcggtgctaaatgcgaggtaacttcctagggcttcatggactttctcccagaaatgtgaggtaaactgtgtgtctcgatcagatataatcctcttagatataccatgaagacacactatcctggtcatgtacaactcggcgagttttgcactgctatagtttgtcttgacggggatgaatcttgccgtcttggtgagtcgatccacgatcacccaaatggaatcatatcctgttgcggtcttgggcaatccaacaataaaatccatacctatctcatcccatttccattcgggaatcctgagaggttgcaacaaacctgccggcctttggtgttcagcctttaccttctggcatacgtcgcagagtgctacgtattcggccacatctctcttcatgttgggccaccagtagccctccttcaaatcctggtacattttggtacttccggggtgtaatgaatatgccgattcgtgagcttcctttaaaattaatcccctcagtccaccctgttcgggtacgtaaattctctttttataccatagaacatctttttcgtcggttgaaaattcctttgcacgtcctgcagctaagcgttccttcacctctcggatttcctcgttgtccttctgggcttcttctatttgggttctcaaaagaggttgaatgtccagggtgtttatctgtccacggggtactatatgtaagttcagctgagctatttcttccctatgctcagggaccatcccttccattctcagatgattgcaatggctcttacgactcagagcgtcggccacgacgtttgctttgcctgggtgatagtgaacctctaaatcatagtccttgattaattctaaccatcgcctttgcctcaagttgagatctgactgggtgaagatatactttagactcttgtggtcagtgtagatatcgcaatggtttccaatcagataatgtcttcaaatctttagcgcatgaaccacagctgcgagttctaagtcatgggtagggtagttttcctcatgtggtcgcaattgtcgcgatgcataggccacaactttcccgtcctgcatcagtactcctcctagtccttgccttgacgcatcacaatatataacaaagtctttcctgatgtcgggaagaactaaaataggtgccgaggtcagcttttctttgagctgctcaaagctttcctgacactgttctgaccatacaaacttcttttccttcttgagtagttgtgtcattggtcgggctatctttgagaacccctcgataaacgttcggtagtatccggccaagcctagaaaactccgaatttcggtcaccgacttgggtgccttccattccgtaacagcctccacttttgcagggtccactgctactccactggctgagattacgtgacccagaaaagcgacttccttcaaccgaaattcgcacttgctgaattttgcgtataacttgtgctttcggagtttctggagaaccaatcgtaagtgttccgcatgttcttcctcatctttggagtagatcagaatgtcatcgatgaataccaccacaaacttatccaagtaatccatgaatactttgttcataagattcatgaagtatgctggggcattggttagaccaaatgacattactgtgaattcatacaacccatagcgtgttgaaaacgcggttttggggatatcctcggtcctaatcttcagttggtggtatcctgatcgaaggtttatctttgaaaacaccttagctcccttaagttggtcgaagagatcatcaatccttggtagtgggtacttgttcttaatagttacttctttcagtgatcgatagtctacacacattctcatgctaccgtctttcttcttaacaaatagcactggggctccccaaggtgacgaactggggcgtacaaatcccttttcttgcaactccctaatttgctttttaagttcttttaactcattgactggcatccgatatggtctcttggatatgggggcagttgcgggtatcaggtcaataatgaactctatgtcacgatctggtggcattccaggtaaatcttctgggaacacatcaggaaatcgctgcactacgggcattccctttaggggtagcatggtaaatatacctccggcacgttcggttagcctaggattttgatccatggttgctctcatatccgatccccagggtgtgatcagggtaacttctctacgtctacagtcaattactcctctatgctttgctaaccaatccatacccaatatgacatcaagggtctgtggtatcaaaaccataaggttggagggaaacaccacatccctaaggcgaataggtacatcaatgcaagctgtgtccacggctatttcacccccaggtgaatgtactaacattggttgccttagtttaactctggttaaattgtgttgttgacttgctttcagagatataaatgaatgcgatgctcctgaatcgaagagaactttaactggagtgaagttgagtgaaaacatacccatcagcacgccttggtcttcctgggcctcttcagctcgaacgtggttcacttgcccgcgtccaaatccggtagcggtcctgttagtctgcggagtcctgaatagacctcgtccagcagcaggagtagcagtcccatgaatagccgttgcattagctccggtgcgaatgggtgtcttgtttggatgaggacatttattggcgaaatgcccatactctccacagttgaaacagcttcctggccttactgatccagtggcggcctgattcggtgcaggagctcggttttgaatggtaaccggcctgtggaaattgctggaggtggcaggtcgactggttgtcaccactgttggtctccatgccgaagaggttgcccctttaggacgctggggtgcggtctggggcgggcggttcatggcaagcctccttttacgattgtgctccacgaccttccggtcgttctccagcctaacgaccttattgattaaactctggaaactatcgtggtcttgtccaatcatgggcccgcgtaactcgtcattcaagccttcaatgaatttgtcgatcttttcctcctcgttggcaagatctctagtcgcgtagcgcgccagctgagtgaaacggttcaggtactcttgtactgtggtattcccttgccgtagtctcctgaactcattcttcttcatccgcatcaccgcggcaggcatgaagttgtcacggaaggctgtggtaaattcctcccagtttggttctccagcatcttcttctcgggcttctttgtacgtgtcccaccagtctccagctggtccttccaattggtttgccgcaaagatcactttatcggcctcacgtactcgaacaagagttagcttcttctcaatgatccttaaccaatcttcagcatccataggttcttcagctatggcgaatgtgggtggcttggtcctcataaactctccaaagcttgaccctccacggttgccttggttgttcgcgatagcttgcagaagttgagtttgggtggccataactccggccagagtggtcaagtcgggtgtctgagtttcgtcattgctggttgttgcccgacgttggcttgccat

SEQ ID NO: 23053 - DNA, 4480 bp, Oryza sativa
  Clone ID: TF_OsC1528_2280
ttagtcttggcgtggcctgagatcacgcacacccaacaggtgccgtgcagtcgccagcttcgccgccggcagtccctttgtcattgcatctgctcgctgctcctcagaacgaacgaactcaatcagaatctgcccactctcaacacattcacgaatgaaatggtagcgggtatcaatatgcttgctcctcccgtggaacacaggattcttcatcaaggcgatcgccgacttgttgtcaacaaaaagtttcacccgctttgcttcagtacccatcatctcgctcagcaacgccctaagccagagcgcgtgacatgctgctgcagtggccgccatgaactctgcctcgcaagacgagagcgccactgtcttctgcttttgagaacaccaagacaccaagctgctgttcacatagaacgccatgccgccggtgctccgacggtcatccatgtcacctgccaagtcactgtcagtgaaacccgtgatgtccaacgagccactgccgcttgcaaacaccagaccagagtccagcgtcccctttagatatctgagtatcatcttgaccgccttgagatgcatcgttgtcggccgctccatgaacctgctcgccacgccaacggcgtaggacagatccggcctggtgtgtaacaagtatcgcaggcacccgatgacacgccggtactcggtcgcatcaattggatttccatcagcatccttgtgcagcagcgaccgtggctccatggggattgaggtgggattacatccctgcataccaaactgagacagaatcttcttcgcatacgcagcttgcttgatagcaatcccattctccccctgaattacttctatccccagatagtaagagagaagaccgagatcactcatctcaaattcccccatcatctgctgcttgaacatggctatctcatgtggattttctcctgtgacaatcaagtcatcaacatacacaccaacgattacaccagcttgcccctttcctctagtatacacggcctgctcctgcgtgcaccgtgcaaaaccgagttctttcaagcacttgtcgagacgcgtgttccacgcccgcggggcctggcgcaatccatagagcgccttgctcagcctgagcaccaagtgttcttctcctcgtttcacaaaaccctctggctgggctacgtacacttcttcttcaagatcgccattcaagaacgccgatttgacgtcgaggtggtgcacttcccaccgccgatcagctgcgatagccaggatgacacgaactgtgtcaagccgcgccactggcgcgaacacctcttcaaaatccaccccttgacgctgaacatagccctttgcaaccaaacgagccttgtgcttgattacttcgccggcagtgttctttttcagcttgtacacccacttgaggccaatgggtttgtgtcctgccggcaatgcagtgagagcccatgttgaattcttctcaatcgcctgcagctcctgtgccatggcgttctcccatgccggctggccagctgcctcgcggtagctcgatggctcctccatctctgcaagcagcgcgtccccatcgtgttcatcctccaccaggtccacgcggggtgcctcccgcatgatatcttcaagactcctgaaccggacgggaccctcatcgcttctaaggtcgccgccggaacctggtgacgccaccggcccggcagagccggtagcaggtgttgaaggcggtgtagagctcggtgatgactggggcgaagtcggcaatgacgatgacgcccctaccgggcttgccggaggcgattgcgggactgccggggatggcgcccggtaccgcggtactgggtaggccggcgctcctgccggcggtgcatcaactccatcctcctccaccgtgaactcggtagagttttgctcccctgcgactacactccattgccaaggtacattttcttcaaaaatgacatcacgacttacatggatacgcccacaacgcgggtcgaacaggcggtgcgccttgctgcctttttccacgccgagatacacatacggcgcgctccggtcatcaagtttcttctggttgggcgtcgtgatcttggcgtgtgctatgcacccaaacacccgcaggtgtcccagctgcggcttgcgccccgtccatgcctcgaacggggtccgatcgcccatcgccttcgtcggtagccggttgaggagatacaccgcatggcgcaccgcctccccccaaaacctgcccggcactgacatccctttcatcagagatcgtgccatcgccattaccgaacgatttcggcgttccaccaccccgttttgctggggtgagtatggcgccgtcagatgccgctggatgcccgcctgctcgcacaactgcgcgaattcgcccgacaggaattcgccaccgcgatccgatctcagcgtcttgatgcgccgcccggccgtgttctcggccagcggcttgaacttggtgaaagcctctagtgcctggtccttcgttttgatcacgaacatccacatccaccgtgagaaatcatcaacaattagcataaagtaacgattaccggccatagttgtcggggtgatcggtccacataaatcaatgtggagcaactcgagcggctcctccgccctgaagttcgccgttgcgggaaacggctgccttatctgctttgcaaccagacatgcctgacagagctggtttggatgtgtgatcgccgggatgccaccagccatgcccttgtcagccaacagcttcatcgcctggaaattgacatgcccaagccgtgcatgccagagccatgctggctcatccatccttgtcagcaggcacaccggagtggctagcttcagctcgatccggtacagccgattaggggtgcgcctcacccgcataaccagccgcaggggacttttgtcgaacacctcgagcacatcttcatccatcaccactctgtgccccgtttctgtgagctggcccaagctcaccatgttgcaacacagactagggatataaaaaacatcctgcagcagccattgatccccattcttgcaggagaacaggatagaccctttcccctgaattttcacagttgaggcgtccccgaacttgacgctcccggtgattgatacgtctagatctctgaacttagcacgatcacccgtcatgtggttgcttgccccattgtccaggaaccagatgtccccggtggctgctccgctgtcagccaacagcagctgcggccacacacgctcctcgtgtacgaccagcccgctcgccggctcgtcttcggtcaccgccagtaacaatgcagggtttgcgtcgtcggtttgcgcgagatgggcctccaccttcttcttcttgggatgagggcactgggtggagtagtggccgaattcttcgcagttgtagcacttgatgtggctcttgtcacggccaccgccgccagagccaccagcgccactgttccgcggcgcgctgccgcgtccaccacctccaccgtgccctctgccgcgaccgcgtccgccctgggcacggtttcccctgtcgctgggaggtttgtttttctgcggcgaagacgactcgctgccgtccttcctgaaacgcgcctcccactccgcctgagtgagaagtacttgaccgtcggcggtgacaccaccagcggccgccttcttcttgcgaactcgttcttcgtaggccttgagacgacccaccgcctcctcaaatggcatattatcaatctcataaaactgctcaatacctgcgacgaggctgatgaatttctctggcaccgtgtcgaacagcttcttcactatcgcggaatcactcagtgtcgagcccaacaccgagtgacgcacgctcatcgcggtgatgcggcccgcgtactgatccagagtttcccccggctccatcaccatggcaccaaattcacccttcaacgtctgcaggcgcgcttcgcgaacgcggtccgcgcccacgaaccttgtcttcaagcaatcccacacttcctttgccgatctcttctttgccacctgcatcagcaagtcctccgggagggactgcagcagatgggacttcgacttcttgtcccttcttgggtcgacggccaccccggccgccggctcgatggcgtcccacacgccctggtcctccatcattgcctgaacgcgaatgcaccagctggtgtaattcgtcgccgtgagttgtgggtaggagaacgcactccctgagctccccctcgccggatccgctgcggctcccgccggaaccaacgccatggtgtcagatcagccctcaacctgagtgctctgatacccacttgttggcgaagaacaccaatcgaacaccttgtgggcgtcctgtagctatccggcacagcagactgaagaaactttcagggagacagagaattcagagaatgcagagaacaagaacaaaataacttgggagagtatttgggcaactttcggtgtt

SEQ ID NO: 23054 - DNA, 4650 bp, Oryza sativa; identical to SEQ ID NO: 13996
  Clone ID: TF_OsC1528_1947

SEQ ID NO: 23055 - DNA, 3515 bp, Oryza sativa
  Clone ID: TF_OsC1528_2035
atggctgacaaccgttttgtagtcgaacaggctcatgagatacaaaccatagctaaggaactcgaactccttaagtgtgtcttacccgacaaatttgtggccgggtgcattattgcgaaactacctccatcatggagaagtttcggtactgcattcaaacacaagagacaggaatactccattgaggggttgatagcatctcttgatgttgaggagaaagctcgggaaaaagacgccgcgtctaaggatgatgctcaacagaccaccaacttcaagaggcagaagaagaacaacaacaatcctaaccaggatgagaggatttgctttgtgtgtgggcaacctggtcatctggctaggaagtatccacagcgcaaggggatgaaggcacctgcagggcagacttctaagtctgctaatgtgaccattggcaacactggagatggaagcgggtatggtaatttacctactgttttttcagttaatcagtctactaattggtgggttgatactggggccaatgtcgcacggggttccaccttcctaatggcgaatgggtcacatgcttctgttcatggtgttggcacggtagatgtgaagtttacttcgggaaagatcgtgcagctgaggaacgtgcagcatgtcccttctatcaacaggaatcttgttagtggctcccgtctaactagagatggatttaagttggtttttgagtctaataaagtagtcgtgtctaaacatggatattttattagtaaaggttatgagtgcggaggcctgttccgcttttccctttctgatttctgcaataagtctgtgaacaatatttgtggaagtgtggatgatgaggctaatgtttggcactcacgtttatgtcatattaattttggcttgatgtctcggctttccagcatgtgtttaatttctaagttttccattgtcaaaggttctaagtgccatagttgtgtgcaatcgaagcaacctcgcaagcctcacaaggctgccgaggagagaaacttggcaccactagaactcctacattcagatctttgtgaaatgaatgaggtgttgacgaagggtggaaaacaatatttcatgacgttaattgatgatgctactagattttgctatgtgtacttgttgaaaacgaaagacgaggctctagactattttaaaatttataaggcagaagttgaaaatcaacttgacagaaagataaaaaggcttaggtctgatcgtggtggagagtttttctcgaacgagtttgacttattctgtgacgaacatgacatcatacatgagaggactcctccctattctcccgagtctaatgggattgctgaaaggaagaaccgcacactgactgacttggtgaatgccatgttggacaccgcgggacaacctaaggcatggtggggggaggcattgttgaccacgaatcatgtgttaaacagagttcctaacagaaataagaacaaaacaccatatgagatatggattgggagaaaaccatcactttcttatttgcgcacatgggggtgcttggcgaaagtcaatgtaccaataacgaagaagcgcaaacttggacctaagactgtggactgtgtctttctaggatatgctcattacaacattgcctatagatttttaatagttaaattcgaggtacctgacatgcatgttggtacaattatggagtctcgtgatgctacctttttcgagagctttttcccaatgaagatacacatagtggttcgagccaaccctctgaaataattcccagttcaatcacaccaccataacaaactgaacatacacatgaacatgtcactgaggaggatgtcagtgaagctcttcgaaggagtaagagacaaaggacggctaaatcctttggtgatgatttcactgtgtacctcgtggatgacactcctaagtcaatttcagaagcataggcatctcctgatgcagactactggaaggaggctgtccgtagtgaaatggattccattatcgctaactggacttgggaggtgacagagcgaccctatggatgtaaacctgtggggtgcaagtgggtgttcaagaagaagcttaggcctgacggtactattaaaaagtacaaggctcggcttgttgctaagggctatactcagaaagaaggcgaagatttctttgacacttactcacctgttgctagattgaccacaattcgcgtgctactttccctagcagcctcacttggtcttctcgttcatcaaatggacgttaagacagcttttcttaatggagagctagatgagtagatctatatggatcaacctgatgggtttgtagttgaaggtcaagaaggcaaagtgtgcaaattgttgaagtctttgtatggtctgaaacaagatcctaagcaatggcatgagaaatttgacaaaacattgacatctgtaggctttgcagtcaatgaggcagataaatgtgtgtactatcgccatggtgggggtgagggagttattctgtgcttctatgttgacgacatactgatatttgggacaaaccttgaggtgataaatgagattaaatcattcttgtctcaaaattttgatatgaaggatttgggagtagctgatgttatcttaagcattaagctaattagaggtgataatgggattacactcttgcagtcccattatgtggagaagatcttgaatcgctttggctacattgatagtaagccttctccaacaccttatgatcctagcttgttgcttcgcaagaacaagagaattgctaggaattaactggaatactcccaaatcattggctcgctgatgtacctggctagtgcaactaggcctgatatctcctttgctgtgagcaagttgagccggtttacctctaatccgggagatgatcactggcgtgcgcttgagcgagtaatgcattatctgaaaggtactatggaattggggcttcactattctgggtatcctgcggtactggagggatatagtgattctaactggatctctgatgtggatgagatcaaagccactagtggatatgtcttcacactgggtggtggtgctgtttcgtggaggtcttgcaaacataccattttgacgaggtcaaccatggaagcagagctgacggcactggatactgctactgttgaggcaaaatggctgcgtgatctattaatggatctgcctattgttgaaaaaccggtgccggctatccttatgaactgtgacaatcaaacgacatgtgaaaagacgattgaagtctgtcaggaaattgagaaactccggagttataacgttggattacatccaaacagctagaaacctggcagaacccttcacaaagggactatcacgaaatgtgatagacaatgcatcgaaggagatgggtttgagacccattgcattcttgaaagaactcacctttgtaagcttgactgttggtcgcagtctatggagattttgggtgaatcttctaggaagcttactaaagacctaggagta

SEQ ID NO: 23056 - DNA, 5019 bp, Oryza sativa
  Clone ID: TF_OsC359_7926
gatctgtgtgactggcctggctttccacaacgcttcggagccttcctcgacagaaacgctctcctccgaacggtcggatactagagcaattaaactaaatcaacaaaacaatgatgacgtcatgctgacgtcagcaatggcggccggttagggtttgcgagctcgccggagctagggcggtcgaccgggtgattggaggacacctacgcgtagaaaacatcgagacgaacccgatggtactcaccacaacgtctatcgacgaacggtgatggccggcgacgaggaggaaggcggtggcagctcggcttgacggcgacggcggagctccggtggtcggcggcgaaggaggacgggcggccgagcttcctcacctccgtgcgcacaagagacaggaatactccattgaggggttgatagcatctcttgatgttgaggagaaagctcgggaaaaagacgccgcgtctaaggatgatggtgggcagtccagtgccaatgttgtgcacaaggcctagaacaagagcaaggggaaatataaagctcaacagaccaccaacttcaagaggcagaagaagaacaacaacaatcctaaccaggatgagaggatttgctttgtgtgtgggcaacctggtcatctggctaggaagtatccacagcgcaaggggatgaaggcacctattattaggcatagtccaatcggctatgacatcggcgagaacctcggacttgatggctgttcgtggtacaaagtggacgtcaaactggcttagctcgactacccatttcgcaatgcggccgataacgtctttgtttctcatgacttcgccaagagggaaggcggagacaactgtgaccctgtgggcttggaagtggtggtgtagctttcttgacgtcatgattactgcgtagagcagtttttggatctgtgcgtaccttgtcttcgcgtcgtggagagctttgctgacgtaatagactggtctctgtacattttctctttcgacaacaatgacagtactcacagagtagggtgtggcggtaatatagaggaataactcttcattaggttggggagcaacaagtacagggggatttgataggtagcacttgagtgcgatgaacgcttcttaggcttcttgtgtccatacaaatttgtcctgctttttagcagtgcgaagaaatgctgtccttgttctcccatcctaacgacgaacctacttagtgccgccatgcatccggttagcttcagtacctccttgagtcttgtgggcgacttcatgttctcgattgccttgatcttctcggggttcgcttctattcctctgccagagacaaggaacccaagcagtttacccgacggtaccccgaacgtgcacttctcaggattgagcatgaggcgatattgtctgaggttgtcgaaggtttcccgtagatcgtcaatcaatgagtcgcatgtcttggttttgacaacaatgtcatcgacgtaggcctcaacattgttacccagttgatcgctaagtgccccttggaccgtacgctggaaaatatttcctgcggttatcagtccaaacggcatttttacgtagcagaatacaccgaacgatgtgatgaatgttgtcttttcctcgtcctcttttgccatgcttatttggtggtagccggagtaagcgtcaaggaagcttaacagctcacaaccagctgttgagtccactagttggtctattcgagggagagggaagtgatccttggggcacgccttgttgaggtcggtgaagtcgacgcacatcctccacttcccgttggccttccgcaccatgactgggttggctagccactctggatggagtacttctctgatgaaaccagctttgagaagtttatcgagctcttctcgtatggcctgtttctgatctggtgcaaatctccgcagcttttgctttactggcttggcaacgggtcgcaccatgagtttgtactcaatcacctccctagggacccctggcatgtcggacagttgccaagcgaatacgtccgcattatcgcggaggaaggtgatgagcgcgagttctgtcttgtcggggttggcactggagagtggaacgattttaattgcgtcgtctggttttggcatcttagtcgttttgatcattttcttgggtggctcggctgtggcgggtgggctgggcgtgtgctcgaccatgtcgaggctctgcttgtcgcattggaccgccagctttgtgtttccttgaatagagattgttcccttcggctcgggcatcttgagtacctgatacgcgtagtgagatgcggccatgaacttcgcgagtgcagttcttccgatgatggcgttgtatgctgtatcaaactcagcaacatcgaatgttatcttctctgctcgaaagttgctcgcttggccgaaagacacaggaagcgtgatctagcccagtggcttggacgaagactaaggagtgattccatggaagggttgatcggtaggcgtcaactcgtttcgtggaatgcccattgcgtccaaggtgctggcaaagagaaggttgatggagctaccgccatcgacgaagactcgcgctaccttgatattccgaatagtgggttcaaccacgatcggatatcgtcgctgtggaacctccgaagatgtgcgagacatgaagatcggaatctggatacgccgagtccgagtcctgagtggttgcctcagtggccttctcaactacacgtactcgcttgcccttctccaaagccagctgctttgccaacgactttttgaagatgaggcactcctccagagaatgtttgtccgacttgtgtatggggcaccatattctcttcgtatcactgccttgtgggtctgggtgtttgggcgggcgcttgtattcagacacgaggacttccgcttgagctttcctcttcccactcttgccgcttttcttcttgcttgattcgggtgtgtccttggctggcttcttctctcctcccgcctttgactcgtcgttcttgcgtctcactgcgtcgtctgcatgggcgcatcgatcgacaacctcaaacaaacttcgagtcgttgtgattcgccttgttgccaactcctgggtagtatagcgatctctgacaccggttttgaaagcacgaatcacagaagcatcggtgatatcggggatcgtatttctgcactcattaaagcgccgaacaacacgtgtaaatcgtcttcgatcgcgtggcgcttgtaagttccctggaagttagcgacgaattgctaccacaaatctgcccatgaagagatcgagtagggtgggaggtgcatcagccacgaacgcgcagaacctttcaacgccgttggcaaatagtttgctaacgcgttgtcgtctgccccagcagcgtatagtaccgtggagtagacctggaggaattcttcagggtcagtactcccatcgtacttctctattgctccgggtcggaatctctcgggccatcggacatcacgtagagaacggttgaaagctctacacccagtgcagggggcggtgggttgtcggcgattgtgtgtcctccgtggatgtctatcggatgacgaagatgaagatgatgacgatgatgacggtggttcactcggctccggtgtgcgattccgagggcgacgtttaggttctcgagaattctgtcgtcatccaccattgttgtcctagcgccgatccccattatcatcaccgtcatgttgacgccctcgaccagcatcgtctggtgtccgctgttcgcgatcgtcgcggtcgcggcagttgtgacgtcgctcttcgttctcgcgacgttgtgaagaaacacgatgtcgggaatgattctcattgtctcgcgtgcgtcgtgcttctcggcggccattcagatggtcgcggagatcgccggtgctgcgaggtggatgggtagctcatctaggtgacgtccgctgctccggtggttcgccgttggcagcgccagctatcagtcgctcttgttgtgctctggtagcggcttcctcgaacgcgttactgagattggctaccgattcccatagtcgttctatccatcgtgcgagatcatcgttaagaacggggtcatagggagcttctctcagtactgcattgatggtgccgagatgttgggccggcgtgaccgtctggttctccgcccctgcgttagcgtgtgcagacgtgctagtcccaccgatggcaaacatgtcgcgtggtgtactggaagatgatgagccatagtcttcgagcaagtgtaggactgatggctcgtggggatcaatgtcgattactccaacaaatcgatccgaggtcaacgtcgctccttgttccttgtttgtgcccttacgagaggttcctacctgctggaccttaggaagcgtcgttttcatggcgtggagaaagaccttgtagcttgagaagtcgtgattcttcgtcttgtgaataggacaatagacatcatgagttggagaagtacgctggattccacgctctttgcaagcacgaattttagcttgtacgttgagaaaaacccagcaagcttgcaagttgtgcttcctggacttgtggataggataccaggacttttttacctcagaagttgtccttgtcggctcggagttcttgtcggaaggacaaggttcggccacactaggaaccttctcgggctcgtatgacgtcgatgttccattctctgctacggcgggaggatccttagacgcgggatcgtccggggttatagccacggcgttctcgtttccgataattgatggaccagccgagattggcaccgtggtgtaaaccgggaagatgatttcgccaacttgagtccacaccagcattgttcaagtagggactccatgaatggggccggtgctgacgccgttgtcgacgaagcttgatgtcatagtagtagaaccttgagcaccaaagctccctacgtggcgcgccactgtcgacgatgggtacccatagaccggatatagagggtattggggtacactggtacgatgat

SEQ ID NO: 23057 - DNA, 3092 bp, Oryza sativa
  Clone ID: TF_OsC1713_4658
atgtctcctctcgcccttcggcatttccttgtgaaatggtttttaaaattctcctccctgtccctctaattcttttagctgtcaaacctgaaggacaagccatcagctttgtgcatgtttggaagtcaagtcaagctaagcctcaagcttcgtgcaaagagcgagacagatggtcagcatgagggacaatttcatcgaatcaggaccctgtcagtttcatggggcaactcagtgcaattctaatagtattccacatcagcctcttgaagatcagcctcaaccccaagtcatggctaatcaaactcaaacagtggaagagttgttacaacagatgcgacgtcggtaccaaatataccagatgcaacggcaatgtcaggagtcgcgtcaatgtcaccaaccgcaggtgcaagtccagatgccagcccagaacccgaatcagagtcagagtcaggagttcccaatattggcaccgaagaccctctagtcccaatcctccttccagtccccttctcctggaaaagacatgagttctcatcaaatgcaacaatgcacttgaattggtcaatagccgagctaaccgagagaaggttaaccgttagggatatagctttaccatcctccatagctgcattagcctgaggtgcacctcggcctctaccatgatctccaatgcgacctccacggtcacctcctctaccaccatggcttcctccaaagccaccatgatttccaccaaatccaccataccatcctcgcattgatcccctaccaccactgtttcggggagtgggacaattgcagctcacatgacccacttggccacaattgtagcattccctatcatcagctacaatgtatgctgatcccataggatttgtacccctcatcaattttaacctcatttcctcctgtaccatggctgaaatggcctcttccatagtaggcaaagtagcctggtgaaacatagctgctcttctatcctcaaactcattgttcagccccttgttttgagcctcaaccatcatcattacacttccctcttctgagtacatgctgctcaatgttttccatacaactgctgcattttgaatggtttctagcatccgagcaatagatggagccaccgaattcctcaaccatgacaccacggttgaatttgtagtattccacatcctccaagctgaactttccttatcagcaggctctttataatcctcctgcaaaaaatgatccaccccttttgccctcaacattagttgggccctccttgaccaactcaaacaattcttacttccttccaatctcaattcatttggcatcaattctagtttcaattcggctgatcctccacctctagtacctatcattcccaactttactagatcctccaacaaatctttcatctcatcctttatgacaagggatgatgaagcaatcactacttctttttcctgacttcccacaacaccttccccttgcatggtaggatccatttcttcctcacaacagagtattgaaccggaccaggcttcaggcccctcatctgcatttgggttctgtggaacaattgacatgacgtcatctttagaaattcgaccttgtccatgggcaatgccatgaggaggtgcattgatgaggctggccttgacaactgatgttgggaaattcaacaagttaatcattttcctccagtgtgtaacgatggaattgcactcactgttaatacgactttggtagtgttcctccattgcatggcatacatgtttaaggaagtgtctcccattcaaatcaaaatcaacatttttaccaagcttagcaaaaatagctgacacctccccatcactgcataaatgatgtacaattattcctttgcgaccaagaaaagcaatatcatctgctctacacagaaggaaagacatgaaagcagaatatgcagtcacatcatttccaaactggggacatgtctgctcaaatgcaattaagttcctaaaatgggagacggtgctctgatcaacaaacaaataaggaaccatcaaagtaccattgtcaaagctaatatctaacagagaatggggattattcctatcaaatgactttttcttgaattgaactccagcttgatggtattgcactgcccgacggccacgaatacgtggatggtgatcctgaaagcagttaagcaaaggatctggtgacatatcgtgattgctatcggcaagcttacgtccaattttcaaatacctatagcatatattagcgaaagaatgaaaatatcttcctctctccaggtattgtgaaccctcaaccagctttttactaggcttgaggtacatctggaacaaatgcagcatatgatggaaatctttaggccgatgtgcttcctggattgctcttggatggtattgtatgaagttctccaacgattgagctactttgtctgtgagaaatgaaataggcctctcatttccagcaaaaagttcatatatcctcctaacaataaagaaaggaatttggttctctagtagcatcaggtcttgttcaatacagctgtcaaaccaggttccaatttgccaattattacattgagaagattcaagttcctcagtgtgatcaaagtcagttccttgactagtaacttcccgacttgaaccagcaaggacaagttctctctgtgtgcagatagagttatccctgctgcattgctcaccaaaattaccttgacttgtagtgcttttgtgtattgttctttccattataatgtccgaactgtcagcactacatatatttgcacccaaagtggatggaagtattccctctaaacctctgaaatggtgaacaaaaaggcaagaatcaaggagtagcatctgcagaaatttgtcatgttgcatgtcaatgtcttcatagcatgcccgtgcttcctcctctaaatctttgaccaaatttaggtagtcctccaactttatttcacgattcagtttaagaaaaagatcaaggcaattccatttttccttctcaaaggctagcaagtacgacaatccatggtggtatggaccaattgataacataattggctcataagccccatgatccat

SEQ ID NO: 23058 - DNA, 3954 bp, Oryza sativa
  Clone ID: TF_OsC97167_1
caattcatgcatatagaagaatttaggcgatatatgttttgtgagactcgtcttcacataacccgtttgtatttgtgcaacacaagctgaattatcttcataaataatggttggagttggtgtgatattcagcccacatctattcagtacatgttgtatcaccctcctcaaccacatgcattccttgctcgcttcaaataatgctataatctccgagtgatttgttgatgtcgcgaccatcgtctgcttcgtcgacttccatgagatggctgtaccaccacagagaaacacatacccagtctgtgacaatgctttatgggggtctgacaaatatccagcattagcatatcccgccatggtcaaatcgatatcttgtgtgccacgtaaataacggaagatttgcttaatgccattccaatgccgtttggtaggaaccgaactgaaccttgcaagtaggttaacagcaaatgcaatatcaggcctggtaccattcgcgagatacattaaagctccaatggcgcttaaatatggacattcaggtcccaataattcgtcgttattttcctgtggtctaaatgggtcactctctactgctagagatcttactaccatgggggttctcgtcggatatgaatccttcatattaaatttctccaatatcttctggatatatgcagactggtgtaacaataccccttcatgagtgtgctcaagctgcagacctaagcaatatttagtcttacagggacagtcatcattcttgatgaatccttttccttctaggaattcactgagccggttgtaccacatcctaccggattgttttaacccatacaatgatgtttgcaatttaacactgtatatgttgcattttgtttcttcaggaacttgaatcccatcgggaactttcatatagatttcagaatccaatgacccatataaatatgcggtcactacatccatcaactgcatttctaagttcaaattgactgccatagatattaagaaccggaatgtaattccatccattaaaggtgaataggtttcatcgaaatcgatgccaggtctctgcgtaaacccttgtgctactaatctcgctttataccgaactacctggttgttctcatcccgttttcggacgaacacccatttatatcctacaggggatatccctacgggggtacgatcaacaggaccgaatacttttcttttattgagcgagattaactctgcctttattgcttctttccatttgacccagtctgaacgctttttgcattctgccatggactttggttctggatccagatcaatgatcttagcgatcttttcggcaaagtatatgtcgacaatagtagtctctctattgtatgtttcacctgtatccacataactggtggatatttcctctattctttcacattcctgatcttcattgtttcccgcaatgtttaagtcaggaatttccggtctcccagtgctagtagtaattgcgcgcgcattctcactgggttcattgccatccgggcatatcactgcaggtggctcatctacctggtgagctccttcactattctctggtgctgtggtattctatccaatctgttgtttcataggacgtctcctagaaactttagtttggttgtgtgcaaccggtggtctccccctcttcctagaagttggggtagatgtagaaattaatttgaaaaccggttcctctgcgtcatgaggtatttctactctttccggtgcattcacaacaggtatatgagatttcatgatcccctttgggttagtgaaggcttctggcagattattttcaattctttgcaaatcaattatggtctgaacttcctggtcagattccttagtacgtggatctaaatgtaggagatttttagtttcccactcaatttcgcggcattcgaccttctgtaggtactttcctccccctaatgccgggaaatgatcttccttaaatatacaatcagcgtatcgacccatatgtaggtctcctgtcaatggttctaaaaatttaatgatagacggagattcaaatcctacatagattcccaattttctatgaggacccattgacgtacgcttaggtggcggtataggggcgtatacagcgcatccaaatttgcgcagatgggaaatatttggtgcatatccacgtgtaagctgcataggggatacagcattgtatgcagtaggtctgatttgaagtaacgccgctgcatgcaaaacagcgtgtccccaacatgtagttggtaggttgctatgcagtagcaatggcctagcgataagcttaatcctcttaattaatgattcggcgagaccattctgagtgtggacgtgtggtacagaatgttccactttaattcccaaagccatgcaatattcattaaataccttagaggtaaactccccggcattgtccattctaatggattgtatccggttatccgggaaacggaatgatccggacatgggattaattggtccacatatgtctccctgtattcgttgcaagaatactggtgattctgcgttcacctttagattagagggtctaacgattaatttccctgttgcacaatcagtgcaaacaaaatcttcttggtttgggaaatcgttagttcgtaaattatggccatttgaagttgagatgattcttctcatcatccctagacctggatgtcctaacctgtcatgccatattctgtatgactcaggatttttaaatattgttttcagtgcaacattttcgggttttatatgagtgtagtataggccagatttcaaggaagggagtttttcaacaacagtcttacgatttccgtctaatttcgttatgagaagaaattcgagtttattctcatctttggtttctacatgataaccattagcacggatatctttaaagcttagtagagtacgactggactctggatataacagagcattatttataatgatcttggtaccatgtgggagaactactgttgctcgtcccactccaacgatgtgtgcattgcttccggcaatagtagcgatttgaccagtatgcttgtcgatatgcatggcagccatcttctcctctgagtgctggatctcaacagtgaagtgtgactcatgctctgacttcttcttcccgtgcttctcttgataaagctcaatgagatgcttaggggtgcggcaaatgcgagaccagtgtcccctagtgccacacttgaagcatacctgatcttgctttccatattcaccactagtagagcctttcttagacttactgtgatttcctttcttcttgaaagacatcttgttaactttaccaccatttttccagaaattcttccctttgttctggttattttggttttcccccttcttaaaggagctagcatttgcttcgggtgttgctgaactttcattggggcgagacgtatgattttcaacaagtgtctcatcttctccttgcacttccatgagcacggagaccagttcagaatacttctcgtatttagcctggcggtattgcctctgaatattcacatgattggcatggaaggtggacaaagttttgtctatcatgtcagcatcagtgattttctctccacatagcttaagaaaagtgacaatgcggtgaagaactgagttatattgctccatatatttgtaatcctggaaacgtaagtgaagccactcacgttttgcttttgggagcaaagcctttacttgatggccatagcgatccttcagtgagtcccaaaggaccttcggatcttcctcagtcatatactcattcttgagagtagtattcaaatggtgcctcaggaaatgcagtgcctgatttttctcggctgaagttggtaaattattaactcctccagctgatgttgcaatagttgggtcctgaatgcagttcaggagtttcttagcaccaagcat

SEQ ID NO: 23059 - DNA, 4230 bp, Oryza sativa
  Clone ID: TF_OsC1528_1805
ttaattctgccgtgaccctagtgaacgaacaccaagaaggtgtctcgccgtcaccagcttcgccgccggcaatcctttcgtcagtgcatccgctcgctgctcctcagtccggacgaactccacaacaatttgcccgccatccacacactcccgtatgaagtgataacgggtgtcaatatgcttacttctcccatgaaacaccgggttcttcatcaatgcaattgctgacctattgtcgacgaagagcttcactgctttctcctccactcccgccacttctgctagcaacaatcttaaccagagcgcttgacaggccgccgtcgtggctgccatgaactcggcttcacacgacgatagtgccacagttttctgcttttgcgagctccacgccaccagactctgattgatgtagaacgccattccaccagtgctgcgccgatcatccaagtccccggcgaggtcactgtcagtataccctgtaatcttcagtgccccagtgcctgcagcatacacgagaccataatccatcgttcccttgatgtatctgagaatttgcttcacagccttgaaatgcatcacggttggcctctccatgaacctgcttgccaccccgacagcatatgacagatccggcctcgtgtgaagcaaataccgaagactaccgatgatccgccgatactcagttgcatccaccgggtgaccttctggatccttgctcagctgcgatctcggatcgattggaattgaaactgagttgcactccatcatcccaaactgagacagtaatttcttggcatatgcagtctgtttcaatgtggtagcactctcatcctgatcaacctctatcccgagataatatgtgagcaaaccgagatcactcatctcaaactcccccatcatttgttccttgaaaaccttcaattcagagggattttctccggtgacaatgagatcatcaacgtaaacgccgacaattatgccatcacttcctctgcctcgggtgtatactgcctgctcctgcgtacaccgatcaaagccgagctccctcaagcttctgtccaggcgtatattccaggctcgcggtgcctgccggagtccatacaatgccttatgcagcttgagcacaagatgctcttttcctgatctagcaaacccttccggttgtgcaacatacacctcttcttcaagttcaccattaaggaatgccgatttgacatcaagatgatgaacctgccagcggcgatcagccgccactgcaagcacaacacgaacggtatcaagcctcgctaccggagcaaacacctcttcaaaatcgaccccttgtttctgcacatatccttttgcaaccaaccgtgccttgtgcttgattatctcccctgccgtgttcttcttgagcttatacacccatttcagcccaatcgctcggtgcccggctggcaacatggccaactcccacgttttgttcttctcgattgcctccatctccctctgcattgcttcttcccacgcaggttggccggcagcttctcgatagcttgatggctcttctgactcagctaggagcgcctctccatcacattcgtcctccaccaaatccacacgcggggcctcacgcaggacatctgccagcgatctataccgcctaggcccatcatctgtatcgatgttgtcatctgtgcccggtgacggcaccaccccggcagagtttgtcgatggagaaccgggcgtgggcgttccaggcagagtcggtgatgctgccaccgggcttgccggtgacggtacttcttctgccgccaccactgcttccttcccggcgcgcctgccaggagacggtgcctggtacggcggtaccacgccggccgctgttgccgggctcggcagctgctcaccaggctcctcctccatcgcgaaatccgttggctcctgtcctgcagctgatgtccactcccaaggtacattttcctcaaatacaacgtcacgacttacatgtatgcgcccacgacgcggatcgaacagacgatgagccttgctcccttcctccacaccgagatacacgtacggtgcactcctgtcgtccagcttcttgaggtgcggctgcgtgtttttcgcgtgtgccgtgcagccgaacaccttgagatgtcccagctgtggcttcctccccgtccatgcctcgaacggagtacgatcacccattgccttcgtcgggagccggttaaggagatgcaccgcgtgacgcaccgcctccccccaaaacctgcccggtacgcgcatccccttcagtagtgagcgtgccatggccatcaccgtgcggttgcgcctctccaccaccccgttttgctggggcgagtacggcgctgtcaggtgacgttgaatccccgcctcctcgcacacctgtgcaaactcgcctgacaggaattcaccaccccggtctgaccgcaacgtcttcacgcgccgcccagccgtgttctcggccagtggcttgaactttacgaaagcatcgagcgattgatccttcgtcttgagtacgaacacccatatccaccgggaataatcatcaactataagaaaaaaatagcgattaccagacatcgtattcggtgtaatcgggccgcacagatctatgtgcagcagctcgagcggctcctccgccctgaagtgcgccgccgccgggaacggcgccctggcctgtttcgccaccaggcaagattggcacagctgattcgggtggacgattgccggaacacccccgccatctccttgtccaccagcagtttcattgcttgaaaatttacgtgtcccagccgcgcatgccacagccaagccgggtcgtcgaggcttcatcaccagccgccatggacttttgtcgaacacttcgagtacatcctcatccatgaccacgcgatgcccggtctctgttagttggcccaaactcaccatgttacattgcagactggggatgtagtagacgtcctgtagcagccattgatcatcgttcttgcatgaaaaaagaatcgaccccttccccttgatctgcactgtggaagcgtcgccgaacttcacccgtccggtgatcgactcgtccagctcccggaatttgcttcgatcgccggtcatgtggttgctggccccgttgtccaggaaccagacatcgccagcatgtccaccagcgtctgccagcagcagcttgggccacacgcgctgctcgcgtacgaccaagccgcacgacgcgcgctctggcacatcctccgtcaccgcaagcaacagggcaggcccggcgtcctccgtctgtgcaagatgtgcttctcccttcttcttcttcggatgtgggcattggttagagtagtgcccgtactcctcgcaattgaagcacttgatgtgactcttgtcacggccaccgccgccagagcctgcacctgagtcgccccgcggcgtcccgccgcgtccgcctgcgccacggcctctgccgcgaccgcgaccgccctggccgcgcccagcaccttcacctgaaggtttgttcttctgtggtggcgaggattccccgccgttcttcttgaagtgagcttcccactccgcttgagtgaggagcacctgcccgtcggtggtgaccccgccggcggcagccttcttcttccgcatgcgctcctcgtaggccttcagtcgacccactgcctcctcaaatggcatagtatcaatgtcataaaattgctcaatacctgcgacgaggctgacgaatttttccggcaccgtgtcgaacagcttcttcaccatcgcggaatcacccagcgtcgagcccaacgccgagtgacgcacgctcatcgcggtgatgcggcccgcgtactgatccagagtttcccctggctccatcaccatggcaccaaattcacccttcaacgtctgcaagcgcgcttcgcgaacgcggtccgcgcccacgaaccttgtcttcaagcaatcccacacttccttcgccgatctcttcttcgccacctgcatcagcaagtcctccggctgggactgcaacagatgggacctcgccttcttgtcccttcttgggtcgacggccaccccggccgccggctcgatggcgtcccagacaccctggtcctccatcatcgcctgaacccgaatgcaccagctggtgtagttcgttgccgtgagttgtgggtaggagaaagcactccccgagctccccctcgccggatccgctcccgctcccgccggaaccaacgccat

SEQ ID NO: 23060 - DNA, 4302 bp, Oryza sativa
  Clone ID: TF_OsC1528_1995
ttaattctgccgtggccctagtgaacgaacaccaagaaggtgtctcgccgtcgccagcttcgccgccggcaatcctttcgtcagtgcatccgcccgctgctcctcagtccggacgaactccacaacaatttgcccgccatccacacactcccgtatgaagtgataacgggtgtcaatatgcttacttctcccatgaaacaccgggttcttcatcaatgcaattgctgacctattgtcgacgaagagcttcactgctttctcctccactcccgccacttctgctagcaacactcttaaccagagcgcttgacaggccgccgtcgtggctgccatgaactcggcttcacacgacgatagtgccacagttttctgcttttgcgagctccacgccaccagactctgattgatgtagaacgccattccaccagtgctgcgccgatcatccaagtccccggcgaggtcactgtcagtataccctgtaatcttcagtgccctagtgcctgcagcatacacgagaccataatccatcgttcccttgatgtatctgagaatttgcttcacagccttgaaatgcatcacggttggcctctccatgaacctgcttgccaccccgacaacatatgacagatccggcctcgtgtgaagcaaataccgaagactaccgatgatccgccgatactcagttgcatccaccgggtgaccttctggatccttgctcagctgcgatctcggatcgattggaattgaaactgagttgcactccatcatcccaaactgagacagtaatttcttggcatatgcagtctgtttcaatgtggtagcactctcatcttgatcaacctctatcccgagataatatgtgagcaaaccgagatcactcatctcaaactcccccatcatttgttccttgaaaaccttcaattcagagggattttctccggtgacaatgagatcatcaacgtaaacgccgacaattatgccatcacttcctctgcctcgggtgtatactgcctgctcctgcgtacaccgatcaaagccgagctccctcaagcttctgtccaggcgtatattccaggctcgcagtgcctgccggagtccatacaatgccttatgcagcttgagcacaagatgctcttttcctgatctagcaaacccttccggttgtgcaacatacacctcttcttcaagttcaccattaaggaatgccgatttgacatcaagatgatgaacctgccagcggcgatcagccgccactgcaagcacaacacgaacggtatcaagcctcgctaccggagcaaacacctcttcaaaatcgaccccttgtttctgcacatatccttttgcaaccaaccgtgccttgtgcttgattatctcccctgtcgtgttcttcttgagcttatacacccatttcagcccaatcgctcggtgcccggctggcaacatggccaactcccatgttttgttcttctcgattgcctccatctccctctgcattgcttcttcccacgcaggttggccggcagcttctcgatagcttgatggctcttctgactcagctaggagcgcctctccatcacattcgtcctccaccaaatccacacgcggggcctcacgtaggacatctgccagcgatctataccgcctaggcccatcatctgtatcgatgttgtcatctgtgcccggtgacggcaccaccccggcagagtttgtcgatggagaaccgggcgtgggcgttccaggcagagtcggtgatgctgccaccgggcttgccggtgacggtacttcttctgccgccaccactgcttccttcccggcgcgcctgccaggagacggtgcctggtacgacggtaccacgccggccgctgttgccgggctcggcagctgctcaccaggctcctcctccatcgtgaaatccgttggctcctgtcctgcaactgatgtccactcccaaggtacattttcctcaaatacaacgtcacgacttacatgtatgcgcccacgacgcggatcgaacagacgatgagccttgctcccttcctccacaccgagatacacgtacggtgcactcctgtcgtccagcttcttgaggtgcggctgcgtgtttttcgcgtgtgccgtgcagccgaacaccttgagatgtcccagctgtggcttcctccccgtccatgcctcgaacggagtacgatcacccattgccttcgtcgggagccggttaaggagatgcaccgcgtgacgcaccgcctccccccaaaacctgcccggtacgcgcatccccttcagtagtgagcgtgccatggccatcaccgtgcggttgcgcctctccaccgccccgttttgctggggcgagtacggcgctgtcaggtgacgttgaatccccgcctcctcgcacacctgtgcaaactcgcctgacaggaattcaccaccccggtctgaccgcaacgtcttcacgcgccgcccagccgtgttctcggccagtggcttgaactttacgaaagcatcgagcgattgatccttcgtcttgagtacgaacacccacatccaccgggaataatcatcaactataagaaaaaaatagcgattaccagacatcgtactcggtgtaatcgggccgcacagatctatgtgcagcagctcgagcggctcctccgccctgaagtgcgccgccgccgggaacggcgccctggcctgtttcgccaccaggcaagattggcacagctgattcgggtggacgattgccggaacaccccccgccatctccttgtccaccagcagtttcattgcttgaaaatttacgtgtcccagccgcgcatgccacagccaagccgggtcgtcgaggctggacagcagggacacgggatgcgccagcttcaactcaattcggtaaagacgatttacagtgcgcctcaccttcatcaccagccgccatggacttttgtcgaacacttcgagtacatcctcatccatgaccacgcgatgcccggtctctgttagttggcccaaactcaccatgttacattgcagactggggatgtagtagacgtcctgtagcagccattgatcaccgttcttgcatgaaaaaagaatcgaccccttccccttgatctgcactgtggaagcgtcgccgaacttcacccgtccggtgatcgactcgtccagctcccggaatttgcttcgatcgccggtcatgtggttgctggccccattgtccaggaaccagacatcgccagcatgtccaccagcgtctaccagtagcagcttgggccacacgcgctgctcgcgtacgaccaatccgcacgacgcgcgctctggcacatcctccgtcatcgcaagcaacagggcaggcccggcgtcctccgtctgtgcaagatgtgcttctcccttcttcttcttcggatgtgggcattggttagagtagtgcccgtactcctcgcaattgaagcacttgatgtgactcttgtcacggccaccgccgccagagcctgcacctgagtcgccccgcggcgtcccaccgcgtccgcctgcgccacggcctctgccgcgaccgcgaccgccctggccgcgcccagcaccttcacctgaaggtttgttcttctgtggtggcgaggattccccgccgttcttcttgaagtgagcttcccactccgcttgagtgaggagcacctgcccatcggtggtgaccccgccagcggcagccttcttcttccgcatgcgctcctcgtaggccttcggtcgacccactgcctcctcaaatggcatagtatcaatgtcataaaattgctcaatacctgcgacgaggctgacgaatttttccggcaccgtgtcgaacagcttcttcaccatcgcggaatcacccagcgtcgagcccaacgccgagtgacgcacgctcatcgcggtgatgcggcccgcgtactgatccagagtttcccctggctccatcaccatggcaccaaattcacccttcaacgtctgcaagcgcgcttcgcgaacgcggtccgcgcccacgaaccttgtcttcaagcaatcccacacttccttcgccgatctcttctttgccacctgcatcagcaagtcctccggcagggactgcaacagatgggacctcgccttcttgtcccttcttgggtcgacggccaccccggccgccggctcgatggcgtcccagacaccctggtcctccatcatcgcctgaacccgaatgcaccagctggtgtagttcgttgccgtgagttgtgggtaggagaaagcactccccgagctctccctcgccggatccgctcccgctcccgccggaaccaacgccat

SEQ ID NO: 23061 - DNA, 1101 bp, Oryza sativa
  Clone ID: TF_OsC359_6150
gaaccgtttttccgtgtttttccccccaaaagcgggagaaacccgtcatgtcgccagctcgtgtgccactatatgcgttcattgcgaggaagaccatccacccgacaggtgtccaacgagcaggatcacttgtttcttttgtgaaggaactgatcatgtaccaaaagattgtcaattcagttttctgctgacgaagaagatggctaaccaacccgccagttccaacggagagaagcatcaaggcaacaccaatcctcgccaagattacagtttcagcctaactccagtgccaggacagaggaatcaaaatgagaaaagaaaatgccgagtccgggaagatatctgttgcttcaattgtcaaggaatgggtcatttcgccgacaagtgcccaaaaccgagaaacataactgccagcacgtcagtccacgcaactccctgcaatctgaagcttgctcctcagcgaattgtcatccatgcatcccgaagcagtcctatagcccgcgttgcaacagctccaactccagcgagtgcattaccacaaggtgtcaatgctcactttcagccccagcaaagaattgtcgtcgatggaagaagttgtgtctctccccgacctactccaggccaagcaaagggcaatcgacctccggagggcgataccaagcagaagaccgtcatccgcttcaaccagcaatcagaaggaagcttctcctgtgaatgatagcaatatgcagtcctatcacatcatcacagaaccaatcaaggatgcagtcactagaacaatgccagctgcaaggagtgaaatcttcaactcggtatcagatgctacacggagtgaaaagtgcaagccccggttaccaggttgactccgaagatatgaatcatgagaagttctggaacggaagcatcattgaactaccgcaacctagtctgagtcagccaaaaggtgcaccctggtccaagtcaggtgaagagaagattccatccgcaacaggaggtcaagccaagcagttccgagtggtgaagttttgctggaagtttgtcaagacgcaacggaagaagtcagacaagaagagaagaccgcccaacctatcttcttgctag

SEQ ID NO: 23062 - DNA, 4822 bp, Oryza sativa
  Clone ID: TF_OsC1713_5144
ttaccagttttcgaataggtgcaggtattccgtcctcaagaattcttcgctttcccaggtggcttcgtcctcagtgtgattactccattgtaccttgtacatacgccacactttgctcctagtcctcttttcggcttcatccaatatccggaccgggtgttctggatacgtgagatcattgctaatgtgaatctcttccagcggagcttgttcctccggcactcgtaagcacttctttaattgagacacacggaagactgggtgtacatcggcgatattttctggtagctgtaactgatatgcgacttctcctcgtctagccatgacttggaaaggtcccacatatcttggcgctagtttctctttgaccttaaacctttttgtgcctctcatcggagaaaccttcagacaaacataatctccttccttgaattccaggtttcttcttcgggtgtcagcgtgactcttttgtcgtgattgtgccacctttaaatggtcacggatcaggctaaccttttcttcggcctctttgataatgtcaggtccaaataccgcccgttctaccgtctgatttgttctctttgtctggccatctgtctgtggatgataagctgtgctaaaagcaagataacttcttagggcttcatgtactttttcccagaaatgcgaggtaaactgtgtgcctcgatcggatataattctcttaggcacaccatgaagacacactatcctggtcatgtacaactcggcgagtttggcaccgctatagtttgtcttgacagggatgaatcttgccgtcttggtgagtcgatccacaatcacccagatggaatcatatcctgttgcggtcttgggcaacccaactataaaatccatacctatttcatcccatttccattcgggaattctaaggggttgcaacaaacctgctggtctctggtgctcagccttcaccttctggcatacgtcatagagcgctacgtattctgccacatctctcttcatgttgggccaccagtatccttccttcagatcctggtacatttcagtacttccggggtgcaatgaatatgccgattcgtgagcttcctttaggattaatcctctcagtccaccctgttcgagtacaaagattcgctttttataccataggacatctttctcatcggtcgaaaattcctttgcaaaccctgcagctaagcgttctttcacctcttggatttctctgttctccctctgggcttcttctatttgggttctcaaaagaggtcgaatgtccagggtgtttatccgcccacgaagtactatatgcaggtttagctgggctatttcctctttaagctcaggagccatctcttccattctcagatgattgcaatgactcttacgactcaaagcgtcggccacaacgtttgccttgcctgggtgatagtgaacctctagatcatagtccttgattaattccaaccatcgcctttgcctcaagttgagatctgactgggtgaaaatatacttcagactcttgtggtcagtgtagatatcgcaatggtttccaatcaaatagtgtctccaaatctttagtgcatgaaccacagctgctagttctaggtcatgggtagggtaattttcctcgtgtggtcgcagttgtcgcgatgcataggccacaacctttccgtcctgcatcagtactcctcctagtccttgccttgatgcatcacaatatataacaaagtctttcctattgtcggggagaactagaataggcgcagaggtcaacttttctttgagctgctcaaagctctccttgcactgttctgaccacacaaactccttttcctttttgagtagttgcgtcattggtcgagctatcttagagaatccctcaatgaaccttcggtagtatccggccaaacctagaaaactccgaatctcggtcacagatttaggtgccttccattccgtaacagcctccactttagcaggatccactgctactccaccggctgagatcacatggcctagaaaggcgacttcctttaaccagaactcacatttactaaattttgcatataacttatgcttccgaagtttctcgagtaccaaacgcaagtgctccgcatgctcttctgtgaactcatacaatccatagcgtgttgagaacgcggttttgggtatatccccagtcctaattttcagttggtggtatcctgatcgaaggtcgatcttagagaacaccttagctcctttaagttggtcgaagagatcatcaatccgtggtagtggatacttgtttttgatagttacttcgttcagtgaacggtagtttacacacattctcatgctaccatcttttttcttgacgaataacactggggctccccaaggtgacgaactggggcatacaaatcccttctcttgcaactctctgatttgctttttaagttcctccaactcattgactggcatccgatatggtctcttggatatgggagcagttccgggtatcaggtcaataatgaactctatgtcacgatctggtggcattccaggtaaatcttctggaaacacatcgggcaatcgctgcactatgggcattcccttcatgggtagcatggtgaatatgcctccggcacgttcggccagtctaggatcttgatccatagttgctcttatatccgatccccagggtgtggtcagggtaacttctctacgtctacagtcgattactcctctgttctttgttaaccaatccatacccaatatgacatccagggtctgaggtatcacaactataaggttggagggaaacaccacatccctaaggcgaataggtatgttgatgcaagcatgacttacggttatctcgcccccaggggagtgtactatcataggctttctaagtcccactagggttaagttgtgcttttgactagcctccagggatatgaatgaatgcgatgcaccagaatcgaacagaactttaaccgggctagaattgatagagaacatacccattagtacgcccttatcttcctgggcctcttcagctcggacatggttcacttgtccgcgtccaaatccggtagcggtcctgttagtctgcggagtcttgaatagacctcgtccgacagcaggggtagcagttccacgaacagtcattgcattagcgccagtacggacaggagttttgcgtggatgtgggcaggtgttggcataatgcccatactccccgcagttgaagcagtccacattcttcttgactccaggggcagccagggttggtgtaggggtgcggttctgaaccgcaactggcctattgaaattgctaggcgcagcgggacggttggttgccacaatagtgggcttccgtccagacgaagtggcccccttgagtcgctgaggtactccctgaggcgggcgattcatagcaagcctcctcttgcggttgtgctctacagtcctttgatcattctccaacttgtcgatcttttcctcttcatctgcgaggtctccgattgcgtagcgggccaactgagtgaaccggttcagatattcttgcaccgttgtgtttccttgtcgcagccttctgaactcgttcttcttcatgcgcatcaccgcggcaggcacgaagttctcacgaaaagctgcagtgaattcttcccaagtgggttctccagcatcttcttctcgagcttccttgtaagtatcccaccaatcaccagctggtccctccagttggtttactgcgaagatcactttgtcggcttcgcgcatccggacaagggtcagtttcttctttatgttgcgtagccaatcttctgcccccataggctcgtctgccgtagcgaaagtgggtggcttagtcctcataaactctccaaagctcgatcctccgcggttgccttgattgtttgcaatagcttgcagaagttgggtttgagtggccataactccggccagggtggttaggtcgggtacttgagtttcttcattgctggttgacgccctatgtcggcttgccatctctggatctggcttgggcttcttgcccggaggtcgtgtgctcttgcgagcagtgctgagggtatgagggcctccgacaaaggtgatgcggtggacaggagtctcatcctctgaaggatcagtgatgtccggctctatctctggctcagtgtcggtcccctctgtctgaagctgtgccttcagtgagtctatctcactgccccaagcctggtgctcctcctctagctgaagctgctgcactgtgaggttagtcacctcagtctctaactctcccacacgtctctgctggtcgtcaatctctaacagagcctcctcgtagaagtcgtctactgcctcagcccatcgggacagtcgagtcactatcgggttgtagcagcaaggtgtgtcctggactgtgcagacggagttgctctcctcttgaaacgggtggtgagcaaactcggtactcgctaactcagctcgttgaatagagctaagtcggaggaaggcctcccgggctgcatcctgcatcgcggtctccggtaagtcgtgacggtggcgtgtcggaaagctgtagtctgactctaaaggaactcgtgtatgaacctcaacccgagcctcccaaacgggtccacaccatctcactcggtagatcggaaatctggggtaccgtaggcgcctcatcaaccggtgtagctcaatgacgtatccctctgagcggggtacgcccatctcccagtggtggtgaatcctgatctgccatctttccatctagagggtgcaaacttgttagattcctcgtgccgaattcctcagcccg

SEQ ID NO: 23063 - DNA, 5044 bp, Oryza sativa
  Clone ID: TF_OsC359_6360
ttattctgcacttgtgggtgtgtcttgttgagtacggtggttgtacttagtcttgctcaatttttcccaaacccagaagaggagcccctcgatgatgaaggctttggtgtctagctcgtgcctgccgtcaagcgcctgtggtagtcgccctagtcttccgctgtttctcgtttgtctctgtgtgtgctgggccttcgctgcccatatggccggcagcgtcagccgtcgtggtttggacatgactggcttcgtcttggagctacggggcatgtgcgttgtcctggggtatccgcctggagtggactaccaggccaggccgcttccggagcaggagggtgacgatgcagagccccacgctgcgtgggaggttactgcagtgatcctcactggctctcccgagcggacttcgctggcagtcaccgcgggtggagattccttccccgccgcttgccagaacgccgctctcctcgccatcggcactcttcaccagcgctacccggacgagttgcagcactcgccctaccgctaccaccctcgctgcggaggagcccgcgacttcgccaccttccgggatgctagctcggaggatgacgctaccatcgtgcacctggcgcgcatggtggaggcgtacgacgcggctcgtatcgacttccaacagatggtgcgccgtgggatggtcgagaacaacatgaagatcctggagctgcgtcaggagaatctgcagctgaagaaggacctacacgcgttggaggcgcagctgtgtcagcttaaggtcgcccagggtgagatggtgatgaccaggagaagtgctaataccggtgatggcaaccaacctgagggcagcaaccacaacaaccatggcagcccacccccacctcctcctccgcctccaccaccaccaccagataccaacgctattctcacccaaatcctcgcccagcaggccaacatgatgactgctttcctccaccacctccaaaatccgccacaacataatgctccaccaccacctccccaacactcaaaactcgctgagttcctccgcatccgcccacctaccttctccagctccaacaaccccgtggatgcgttggattggttgcatgccgtggggaaaaagctagacactgtgcagtgcagcgatgaggagaaagtcgtcttcgccgcccaccagctgcaggggcccgcatctctatggtgggaccatttgcaggctacgcagccagagaggcagcctattacttgggcccgtttcaccgccgatttccggaggacccatgtgcccgccggagtcgtggcccttaagaaaagagaattccgagagttgaagcaaggcaaccgctccgatgtgcgggaagatgaggagaagcaagagaagttcttggcaggaatggaccctgagctgtccgtccgtctagtctccggggactatccggatttccaacgtctggtggacaagagcatccgcttggaagccaagcacaaggaactggagtcgcacaagcgccgcttggcgaatttccgcaatcaacagggtgctaaccaaagggtccgctacaccaatccctatccagggggatcctcctcgcagcagcaacaacagcagcagcaacctcgctccgcgcctcgacctcaattcgtggtgcgcgtcccacagccgcagcagcagcagaatcaacaagggactcgtgcgccccgtcctcctacgccaactgtgcagcctggtcaaggccgcagggacgctcaaggtccgcagcgtctgtgcttcaactgctacgagcccgggcactttgcggataaatgcccaaagccgaggcgccagcaaggcaaagcgcctccccgctccaacaatggtggtaacgatgtcattcggggtcgtgtgaaccacgtgacggccgagaacgtgctgacaactccagacgtcatcgttggtacgttcctcattcattccatccctgctaccattttgttcgactctggagcttcccactcgtttatatctgtgccattcgtggggagaaatcagttgggggtagaaaggcttaggaaccctctgctcatcaccacccctggagtggttatgacagcaaagtattatagccctgccgtccctatagaaattcaggggattccttttccctcggatcttattctgctagacaccaagaacttggatgtgatccttgggatgaattggttggctcaattccaaggagtagtggattgcgcgagacgcactgtcactctgtaccgagggccggaacaaccggttgttttctttgcgcccccaacctctgtcagtagttcagaacttcatcagataggactgtcagaaatccccatcgtcagagagttcggagacgtgtttccggaagaactactcggtatgccacccaagcgagagattgagttccggatagatcttgctccaggaaccactcctctgtacaagcgaccctaccgtatggcagcaaatgaactggctgaagtcaagaaacagttggaagagttgaaaggaaaggggtatatacgtccgagtacttcccccaggggtgctcctgtgatttttgtggagaagaaagacaagacgaagaggatgtgcgttgactacagaactctcaatgaagtcaccatcaaaaacaagtaccctcttccccggatcgatgatctgttcgatcagcttaaaggtgccactgtattctccaagattgatcttcgttccggatatcaccaattacgtattcgtgaagaagatattccgaagaccgcattcaccacacgatacggactcaattgtgagttctggttgtccgaagtcaaattcttagggcacatgatatctgctaaaggagctgctgtggaccccgaaacagtgaccgccgtcactgattggaagcaacccaagaccgtcactcaaattcgcagtttcttaggtttggcaggatactatcggaggttcatcgagaacttctcccaaatcgctcgacccatgacacagttgttgaagaaagaagagaaatttgtgtggagcccgcaatgcgagaaggcgtttcaaactctcaaggaaatgctggtttcctcgccagtgttagtcttgccagatactcgtaaggatttcatggtgtattgtgacgcttcgcgccaaggactgaggtgcgtgctcatgcaggaaggacatgtggtagcctatgcctcacgccagttacggccccatgaaggcaactaccctacccatgatttggagttagccgcggtggttcatgctctaaaaatctggcggcactatctcattgggaatcgctgtgaaatatatactgatcataagagtttgaaatacatcttcacccagtcggatctgaatcttcggcagaggagatggttagaactcatcaaggattatgatgtgggaattcactatcatcctggtagggctaacgtggttgccaacgctctaagccgaaaaagccattgcaacactcttaacatccgtggcattccacccgaacttaatcaacagatggcagccctgaaactaagcatagttagccgtggattcttggctgcgttggaagccaagcctaccttgctcgatcaaatccgcgaggctcagaagaatgatccggacatgcatggactcctcaagaatatgaaacagggtaaagccgctggtttcacagaggatgaacatggaaccctatggaacggaaatcgggtatgcgttccagataacagagaacttaaacagctgatacttcaggaagcccacgaaagtccttattccatccaccctggcagtacgaagatgtacttagacttgaaggagaaatactggtgggtcagtatgaagcgggaaattgcagagttcgtggccctttgtgatgtgtgccagcgtgtcaaggcagagcaccaacgaccggccggacttctccaacctctccaagtaccagaatggaaatgggatgaaattgggatggatttcatcaccggacttccaaaaacccaaggtggatatgattctatatgggtagttgtggatcggttaaccaaggtagctcgatttattcctgtgaagaccacctatggagggaacaaattagccgagctctacttcgctaggatcgtgagtctccatggcgttcccaagaaaatcgtatctgattggggaagccaattcacctctcacttttggaagaagctccaagaagagctgggtacccgattaaatttcagcaccgcatatcacccgcagacggatggacagaccgagtgtctaaatcagatcctagaagatatgcttcgcgcatgtgtcctagatttcgggaagacctgggataagagtctcccctacgccgagttctcctacaataacagctaccaagccagtatacaaatggcaccttatgaagcgttgtatgggcgcaaatgccggacaccgctcttgtgggaccaagttggggaaagccaagtgttcgggactgatatcttgagagaagctgaagcgaaggtcagaaccattcgggataatcttaaggtggcacagtcccggcagaaaagttatgcatataaccgtcgccgtgacctggaattcgcaatggatgactttgtgtatcttcgggtcacgccattgcgaggtgtacacaggtttcagacaaaagggaagctcgcacctcggttcgtgggtcctttccgtatcattgctcggcgcggagaagtcgcttaccagctggagctgcccgcctctttgggcaacgtgcatgatgtgttccatgtgtcgcaactcaagaaatgccttcgagtgccatccgagcaggccgactcagagcaaattgaagttcgcgaagacttgacctacgtggagaggccagtgaaaatcctggacaccatggaacgcaggaccaggaaccgggtaatccgtttttgcaaggtccagtggagcaaccacgccgaggaagaagctacttgggagcgtgaagacgagctgaaggcagcccatcccgatctcttcgccagttcttccgaatctcggggtcgagattccgtttaa

SEQ ID NO: 23064 - DNA, 9826 bp, Oryza sativa
  Clone ID: TF_OsC359_7817
atggttatgccgatggtgacgaccaggagaaatgctgccaccgatgatggcaaccaacctgagggcagcaaccacaacaaccatggcagcccacctccacctcctcctccgcctccaccaccaccaccagataccaacgccattctcacccaaatcctcgcccagcaggccaacatgatgactgctttcctccaccacctccaaaatccgccacaacataatgctccaccaccacccccacaacactctaaactcgccgagttcctccgcatccgcccacctaccttctctaactccaacaaccccgtggatgcgttggattggttgcatgcagtggggaaaaagcaagacactgtgcagtgcagcgatgaggagaaagtcatcttcgccgcccaccagctgcaggggcccgcatctctatggtgggaccatttccaggctacgcagccagagggacagcctattacttgggctcgcttcaccgccgctttccggagaacccatgtgcccgccggagtcgtggcccttaagaaaagagaattccgagagttgaagcaaggcaaccactccgtgatggagtatttgcatgagttcaacaacctggcccgttacgccccggaggatgtgcgggaagatgaggagaagcaagagaagttcttggcaggaatggaccctgagctgtccgtccgtctagtctccggggactatccggatttccaacgtctggtggacaagagcatccgcttggaagccaagcacaaggaactggagtcgcacaagcgccgcttggcgaatttccgcaatcaacagggtgctaaccaaagggtccactacaccaatccctatccagggggatcctcctcgcagcagcaacaacaacagcagcaacctcgctccgcgcctcgacctcaattcgtggtgcgcgtcccacagccgcagcagcagcagaatcaacaagggactcgtgcgccccgtcctcctacgctagccgtgcagcctggtcaaggccgcagggacgctcaaggtcagcagcgtctgtgcttcaactgctacgagcccgggcactttgcggataaatgcccgaagccgaggcgccagcaaggccaagcgcctccccgctccaacaacggtggtaaggatgtcattcggggtcgtgtgaaccacgtgacggccgaggacgtgctgacaactccagacgtcatcgttggtacgttcctcattcattccatccctgctaccattttgtttgactctggagcttcccactcgtttatatctgtgccattcgtggggagaaatcagttgagggtagaaaggcttaggaaccctctgctcatcaccacccctggaggggttatgacagcaaagtattatagccctgccgtccctatagaaattcaggggattccttttccctcggatctgattctgctagacaccaagaacttggatgtgatccttgggatgaattggttggctcaattccaaggagtagtgataggactgtcagaaatccccatcgtcagagagttcggcgacgtgtttccggaagaactactcggtatgctgcccaagcgagagattgagttccggatagatcttgctccaggaaccactccgctgtacaagcgaccctaccgtatggcagcaaatgaactggccgaagtcaagaaacagttggaagagttgaaagaaaaggggtatatacgtccgagtacttccccctggggtgctcctgtgatttttgtggagaagaaagacaagacgaagaggatgtgcattgactacagagctctcaatgaagtcaccatcaaaaacaagtaccctcttccccggatcgatgatctgttcgatcagcttaaaggtgccacggtattctccaagatcgatcttcgttccggatatcaccaattacgcattcgtgaagaagatattcctaagaccgcattcaccacgcgatacggactgtatgaattcacggtgatgtcgttcggtttaaccaatgcacctgccttcttcatgaacttaatgaacaaagtgttcatggaatacttggataagtttgttgtggttttcattgatgacattctgatatactcacaatcagaggaagaccatcagcaccatctccgtctggtgttgggaaagttgcgggaacatcaattgtatgccaaacttagcaagtgtgagttctggttgtccgaagtcacattcttagggcacgtgatatctgctaaaggagttgctgtggaccccgaaacagtgaccgccgtcactgattggaagcaacccaagacagtcactcaagttcgcagtttcttaggtttggcaggatactaccggaggtttatcgagaacttctccaaaatcgctcgacccatgacacagttgttgaagaaagaagagaaatttgtgtggagcccgcaatgcgagaaggcgttcaaaactctcgaagaaaagctggttgcctcgccagtcttaatcttgccggatactcgcaaggatttcatggtgtattgtgacgcttcgcgccaaggattggggtgcgtgctcatgcaggacggtcatgtggtggcctatgcctcacgccagctacggcctcatgaaggcaactaccctacccatgatttggagttagccgcggtggttcatgctctaaaaatctggcggcactatctcattgggaatcgctgtgaaatatatactgatcataagagtttgaaatacatcttcactcagtcggacctgaatcttcggcagaggagattgttagaactcatcaaggattatgatgtgggaattcactatcatcttggtaaggccaacgtggttgccgacgctctaagtcgaaaaagccattgcaacactcttaacgtctgtggcattccacccgaacctaaccaacagatggaagccctgaacctaagcatagttagtcgtggattcttggctacgctggaagccaagcctaccttgctcgatcaaatccgcgaggctcagaagaatgatccggacatgcatggactcctcaagaatatgaaacagggtaaagccgctagtttcacagaggatgaacacggaaccctatggaacggaaaccgggagaaatattggtgggttagtatgaagcgggaaattgcagagttcgtggccctctgtgatgtgtgccagtgtgtcaaggcagagcaccaacgaccggccggacttctccaacctctccaagtaccagaatggaaatgggatgaaattgggatggattttatcaccggacttccaaaaacccaaggcggacatgattctatatgggtagtcgtggatcgactaaccaaggtagcacggttcattcccgtaaagaccacctatggagggaacaaactagctgaactctacttcgctaggatcgtaagtctgcatggcgtccccaagaaaattgtatctgatcggggaagccagttcacctctcacttttggaagaagctccaagaagagctgggtacccgattaaatttcagcaccgcgtatcacccgcagacagatgggcagaccgagcgtctaaatcagatcctagaagatatgctttgcgcatgtgtcctagatttcgggaagacctgggataagagtctcccctatgccgagttctcctacaataacagttatcaagccagcatacaaatggcaccttatgaagcgttgtatgggcgcaaatgccggacaccgctcttgtgggaccaagttggggaaagccaagtgttcgggactgatatcctgagagaagctgaagctaaagtcagaaccatttgggataatctaaaggtggcacagtcccggcagaaaagttatgaaaataaccgtcgccgtgacctggaattcgcagtgggtgactttgtgtatcttcgggtcacgcccttgcggggtgtgcacaggtttcagacaaaggagaagctcgcacctcggtatgtgggtcctttccgtatcattgctcggcgtggagaagtcgcttaccagttggagctgcccgcctccttgggcaacgtgcacgatgtgttccatgtgtcgcaactcaagaaatgtcttcgagtgccatccgaacaggccgactcagaccaaattgaagtttgcgaagacttgacctacgtggagaggccagtaaaaatcctggacaccatggagcgcaggaccaggaaccgggtaatccgtttttgcaaggtccagtggagcaaccacgccgaagaagaagctacctgggagcgcgaagacgagctgaaggcagcccatcccgatctcttcgccaggccgccgccggcgaccataggggcgcgggcgcgccgcctcccgtcggccgtgtcggcgaggccgccttcgggcgcgccccgcggctgccaggtggggcccggccgtcagccgcccgcgccctcggcacctcggccatttaaggaccggtcttcgggcctctgttgcaaagcactaccgtacttccacatgtctagtggggcaaatgaaggctacacgagctgcggcccggtagtcgagatgtcatggcacagggccggtgtcctgctgctaggggctcagtcctgcctgcctgtcccgggggttccggccgtaggtgggattgggtcgatgtacacctctgatcagagtataatctattcgaatagccgcgccctcggttatgggcaagccgagcaatgtacccaaatggccggcagcgtcacccgtcgtggtttgagcatgactggcttcgtcttggagctgcggggcatgtgcgtggtcctggggtatccacatggagtggactaccaggccaggccgcttccggagcaggagggtgacgacgcagagccccacgctggttgggaggtcactgcagtgatcctctctggctctcccgagcggacttcgctggcagtcaccgcgggtggagattctttccccgccgcttgccagaacgccgctctcctcgccatcggcactcttcaccagcgctacccggacgagttgcagcactcgccctaccgctaccaccctcgccacgaaggagcccgcgactacgccaccttccgagatgctagctcggaggatgacgctactatcgtgcacctggcgcgcatggtggaggcgtacgacgtggctcgtatcgacttccatcagatggtgcgccgtgggatggtcgagaacaacatgaagatcctggagctgcgtcaggagaacctgcagctcaagaaggacttagacgcggtggaggcgcagctgcatcagctcaagatcgcccagggagaggtctgccgccccaagcgtcgccgcgtctgccgcagccagaagatcaccgcccgcaagagcacctccaggcccgagcttgttcgtcagtccctggcgtggacctgcttcatggagacccctcgtgccgagcccgcgcccgtggttccccaggagggggaagcctccggcgttggtagcacggaggatgcgctgttgctcaccttccatggtgacgaccaggagaaatgctgccaccggtgatggcaaccaacctgaaggcagcaaccacaaccaccaaggcaacccacctccacctcctcctccgcctccaccaccaccaccagacaccaacgccattctcacccaaatcctcgcccagcaagccaacatgatgactgctttcctccaccacctccaaaatccgccacaacataatgctccaccaccacctcccgaacactctaaactcgctgagttcctccgcatccgtccacctaccttctctagctccaacaaccccgtggatgcgttggattggttgcatgccgtggggaaaaagttagacaccgtgcagtgcagcgatgaggagaaagtcatcttcgccgcccaccagctgcaggggcccgcatctctatggtgggaccattttcaggctacgcagccagaagggcagcctattacttgggctcgcttcaccgccgctttccggagaacccatgtgcccgccggagtcgtggcccttaagaaaagggaattccgagagttgaagcaaggcaaccgctccgtgatggagtatttgcatgagttcaacaacctggcccgttacgccccggaggatgtgcgggaagatgaggagaagcaagagaagttcttggcaggaatggaccccgagctgtccgtccgtctagtctctggggactatccggattttcaacgtctggtggacaagagcatccgcttggaagccaagcacaaggaactggagtcgcacaagcgccgcttggcgaatttccgcaatcaacatggtgctaaccaaagggtccgctacaccaatccctatccagggggatcctcctcgcaacagcaacaatagcagcagcaacctcgctccgcgcctcgacctcaattcgtggtgcgcgtcccacagccgcagcagcagcagaatcaacaagggactcgtgcgccccgtcctcctacgccaactgtgcagcctggtcaaggccgcagggacgctcaaggtcagcagcgtctgtgcttcaactgcttcgagcccgggcactttgcggataaatgcccgaagccgaggcgtcagcaaggccaagcgcctccccgctctagcaatggtggtaaggatgtcattcggggtcgtgtgaatcacgtgacggccgaggacgtgctgacaactccagacgtcatcgtcggtacgttcctcatacattccatccctgctaccattttgttcgactctggagcttcccactcgtttatatctgtgccattcgtggggagaaatcagttgggggtagaaaggcttaggaaccctctgctcatcaccacccctggaggggttatgacagcaaagtattatagctctgccgtccctatagaaattcaggggattccttttccctcggatctaattctgctagacaccaagaacttggatgtgatccttgggatgaattggttggctcaattccaaggagtaatggattgcgcgagacgcactgtcactctgtaccgagggccggaacaaccagttgttttctttgcacccccaacctctgtcaaaagttcagaacttcatcagataggactgtcagaaatccccatcgtcagagagttcggagatgtgtttccggaagaactacccggtatgccgcccaagcgagagattgagttccggatagatcttgctccaggaaccactccgttgtacaagcgaccctaccgtatggcagcaaatgaactggccgaagttaagaaacagttggaagagttgaaagaaaaggggtatatacgtccgagtacttccctctggggtgctcctgtgatttttgtagagaagaaagacaagacgaagaggatgtgcgtcgactacagagctctcaatgaagtcaccctcaaaaacaagtatcctcttccccggatcgatgatctgttcgatcagcttaaaggtgccactgtattctccaagattgatcttcgttccggatatcaccaattacgtattcgtgaagaagatattccgaagaccgcattcaccacgcgatacggactgtatgaattcacggtgatgtcattcggtctaactaatgcacctgccttcttcatgaacttaatgaacaaagtgttcatggaatacttggataagtttgtcgtggttttcattgatgacattctgatatactcacgatcagaggaagaccatcagcaccatccccgtctggtgttgggaaagttgcgtgaacatcaattgtatgccaaacttagcaagtgtgagttctggttgtccgaagtcaaattcttagggcacgtgatatctgctaaaggagttgccgtggaccccgaaacagtgaccgccgtcactgattggaagcaacccaagacagtcactcaagtccgcagtttcttaggtttggcaggatactaccggaggttcatcgagaacttctccaaaatcgctcgacccatgacacagttgttgaagaaagaagagaaatttgtgtggagcccgcaatgcgagaaggcgttccaaactctcaaagaaaagctggtttcctcgccagtgttaatcttgccggatactcgcaaggatttcatggtgtattgtgacgcttcgcgccaaggattggggtgcgtgctcatgcaggacggtcatgtggtggcctacgcctcacgccagctacgacctcatgaaggcaactaccctacccatgacttggagttagccgcggtggttcatgctctaaaaatctggcggcactatctcattgggaatcgctgtgaaatatatactgatcataagagtttgaaatacatcttcacccagtcggatctgaatcttcggcaaaggagatggttagaactcatcaaggattatgatgtggggattcactatcatcctggtaaggccaacgtggtcgctgacgctctaagtcgaaagagccattgcaacactcttaacgtccgtggcattccacccgaacttaatcaacagatggaagccctgaacctaagcatagttggtcgcggattcttggctgcgttggaagccaagcctaccttgctcgatcaaatccgcgaggctcagaagaatgatccggacatgcatggactcctcaagaatatgaaacagggtaaagccgctggtttcacagaggatgaacacggaaccctatggaacggaaagcggcgtgtcaaggcagagcaccaacgaccggccggacttctccagcctctccaagtaccagaatggaaatgggatgaaattgggatggatttcatcaccggacttccaaaaacccaaggtggatatgattctatatgggtagttgtggatcgattaaccaaagtagctcgatttattcctgtgaagaccacttatggagggaacaaactagccgagctctacttcgctaggattgtgagtctccatggcgttcccaagaaaattgtatctgataggggaagccaattcacctctcacttttggaagaagctccaagaagagctgggtacccgattaaatttcagcaccgcgtatcacccgcagacagatggacagaccgagcgtctaaatcagatcctagaagatatgcttcgcgcatgtgtcctagatttcgggaagacctgggataagagtctcccctatgccgagttctcctacaataacagctatcaagccagcatacaaatggcaccttatgaagcgttgtatgggcgcaaatgccggacaccgctattgtgggaccaagttggagaaagccaagtgttcgggactgatatcctgagagaagctgaatctaaagtcagaatcattcgggataatctaaaggtggcacagtctcggcagaaaagttatgcagataaccgtcgccgtgacctggaattcgcagtgggtgattttgtgtaccttcgggtcacaccattgcgaggtgtacacaggtttcagacaaaagggaagctcgcacctcggtatgtgggtcctttccgtatcattgctcggcgcggagaagtcgcctaccagttggagctgcccgcctccttgggcaacgtgcatgatgtgtttcatgtgtctcaactcaagaaatgccttcgagtgccatccgagcaggccgactcagagcagattgaagttcgcgaagacttgacctatgtggagaggccagtgaaaatcctggacaccatggagcgcaggaccaggaaccgggtaatccgtttttgcaaggtccagtggagcaaccacgctgaagaagaagctacctgggagcgtgaagacgagctgaaggcagcccatcccgatctcttcgtcagtccttccgaatctcggggtcaagattccgtt

SEQ ID NO: 23065 - DNA, 6230 bp, Oryza sativa
  unsure (1)..(6230): unsure at all n locations
  Clone ID: TF_OsC359_5747
acggccgggcccacctggcagccgcggggcgcgcccgaaggcggcctcgccggcacggccgacggaaggcggcgcacccgcgccccgatggtcgccgccggcgaccaacggcgcgacggagcggcgcccgagagaggggagggaagggggaagtgaaacaacggtcctcggctcaccccgggacgacgaggacggcggaaacgacgaccggagcggaggaaggcggcggcgcggttcggatcgacgaggacggcggcgctccgacggtcggcgggcgaaacggaggcgcggacgaggtcgacgaggacgcggcgaagccgatggaggtgacgccgagacgggaggaggtccggggcgacgacggcggcgaactgaagctcggcggcgacggcggagagagaggacgacggcgcgagcacgaatccgacggggagagtccttttttccccccttccctcttgggccggctcggcccacttccctccctctctctcctctcccccgcggcccaatcggcctcctccccgccgcgtgccgctgacgggcgggcccgcccgccaccctcgctgacgggtggggcccacccgcacgcacgtaaggaacgcccgttggtgatcctcgctggctctcccgagcggacttcgctgacagtcaccgcgggtggagattctttccccgccgcttgccagagcgccgctctcctcgccatcggcactcttcaccagcgctacccggacgagttgcagcactcgccctaccgctaccaccctcgccgcggaggagcccgcgactacgccaccttccgggatgctagctcggaggatgacgctaccatcatgcacctggcgcgcatggtggaggcgtacgacgcggctcgtatcgacttccatcagatggtgcgccatgggatggtcgagaacaacatgaaaatcctggagctgcgtcaagagaacctgcagctcaagaaggacctagacgcggtggaggcgcagctgcatcagctcaagatcgcccagggagaggtctgccgccccaagcgtcgccgcgtctgccgcagccagaagatcaccgcccgcaagagcacctccaggcccgagcttgttcgtcagtccctggcgtggacttgcttcgtcgagacccctcgtgccgagcccgcgcccgtggttccccaggagggggaagcctccggcgttggtagcacggaggatgcgctgttgctcaccttccgtcctggcccgtcgcagcagagaaatgctgccaccggtgatggcaaccaacccgaaggcagcaaccacaaccaccagggcagcccacctccacctccacctcctcctccgcctccaccaccgccagataccaacgccattctcacccaaatcctcgcccagcaggccaacatgatgactgctttcctccaccacctccaaaatccgccacaacataatgctccaccaccacctccccaacactctaaactcgccgagttcctccgcatccgcccacctaccttctctagctccaacaaccccgtggatgcgttggattggttgcatgccgtggggaaaaagctagacactgtgcagtgcagcgatgaggagaaagtcatcttcgccgccaaccagctgcaggggcccgcatctctatggtaggaccatttccaggctacgcagccagaggggcaacctattacttgggctcgcttcaccgccgctttccggaggacccatgtgcccgccggagtcgtggcccttaagaaaagagaattccgagagttgaagcaaggcaaccgctccgtgacggagtatttgcatgagttcaacaacctggcccgttacgccccggaggatgtgcgggaagatgaggagaagcaagagaagttcttggtaggaatggaccctgagctgtccgtccgtctagtctccggggactatccggatttccaacgtctggtggacaagagcatccgcttggaagccaagcacaaggaactggagtcgcacaagcgccgcttggcgaatttccgcaatcaacagggtgctaaccaaagggtccgctacaccaatccctatccagggggatcctcctcgcagcagcaacaacagcagcagcaacctcgctccgcgcctcgacctcaattcgtggtgcgcgtcccacagccgcagcagcagcagaatcaacaagggactcgtgcgccccatcctcctacgccaactgtgcagcctggtcaaggcagcaggcacgctcaaggtccgcagcgtctgtgcttcaactgcttcgagcccgggcacttcgcggataaatgcccgaatccgaggcgtcagcaaggccaagcgcctccccgctccaacaacggtgggaaggatgtcattcggggtcgggtgaaccacgtgacggccgaggacatgctgacaactccagacgtcatcgttggtacgttcctcattcattctatccctgctaccattctgttcgactctggagcttcccactcgtttatatctgtgccattcgtggggaggaatcagttgggggtagaaaggcttaggaaccctctgctcatcaccacccctggaggggttatgacagcaaagtattatagccctgccgtccccatagaaattcaggggattccttttccctcggatctgattctgctagacaccaagaacttggatgtgatccttgggatgaattggttggctcaattccaaggagtagtggattgtgcgagacgcactgtcactctgtaccgagggccggaacaaccggttgttttctttgcacccccaacctctgtcagtagttccgaacttcatcagataggactgtcagaaatccccatcgtcagagagttcggagacgtgtttccggaagaactacccggtatgccgcccaaacgagagattgagttccggatagatcttgctccaggaaccactcctctgtacaagcgaccctatcgtatggcagcaaatgaactggccgaagttaagaaacagttggaagagttgaaagaaaaggggtatatacgtccgagtacttccccctggggtgctcctgtgatttttgtggagaagaaagacaagacgaagaggatgtgcgttgactacagagctctcaatgaagtcaccatcaaaaacaagtaccctcttccccggatcgatgatctgttcgatcagcttaaaggtgccactttattctccaagatcgatcttcgttctggatatcaccaattacgtattcgggaagaagatatccctaagaccgcattcaccacgcgatacggactgtatgaattcacggtgatgtcattcggtttaaccaatgctcctgccttcttcatgaacttaatgaacaaagtgttcatggaatacttggataagtttgttgtggttttcattgatgacattctggtatactcacaatcagaggaagaccatcagcaccatctccgtctggtgttgggaaagttgcgggaacatcaattgtatgccaaacttagcaagtgtgagttctggttgtccgaagtcaaattcttagggcacgtgatatctgctaaaggagttgctgtggaccccgaaacggtgaccgccgtcactgattggaagcaacccaagacagtcactcaagtccgcagtttcttaggtttggcaggatactaccggaggttcatcgagaacttctccaaaatcgctcgacccatgacacagttgttgaagaaagaagagaaatttgtgtggagcccgcaatgcgagaaggcgttcaaaactctcaaagaaaagctggttgcctcgccagtgttaatcttgccggatactcgcaaggatttcatggtgtattgtgacgcttcgcgccaaggattggggtgcgtgctcatgcaggatggtcatgtggtggcctatgactcacgccagctacggcctcaagaaggcaactaccctacccatgatttggagttagccgcggtggttcatgctctaaaaatctggcggcactatctcattgggaatcgctgtgaaatatatactgatcataagagtttgaaatacatcttcactcagtcggacctgaatcttcggcaaaggagatggttagaactcatcaaggattatgatgtgggaattcactatcatcctggtaaggccaacgtggtcgccgacgctctaagtcgaaaaagccattgcaacactcttaacgtccgtggcattccacccgaacttagtcaacagatggaagcccctgacacctaagcaatagttggtcgcggatttttggctgcgtggaggnnnnnnnnnnnnnnnnnnnnnnnnnnnnnnnnnnnnnnnnnnnnnnnnnnnnnnnnnnnnnnnnnnnnnnnnnnnnnnnnnnnnnnnnnnnnnnnnnnnntagaattcacggagttncgnaccctttgtgatgtgtgccagcgtgtcaaggcagagcaccaacgaccggccggacttctccaacctctccaagtacctgaatggaaatgggatgaaattgggatggatttcatcaccggacttccaaagacccaaggtggatatgattctatatgggtagtggtggatcgattaaccaaggtagctcgattcattcctgtgaagaccacctatggagggaacaaactagccgagctctacttcgctaggatcgtgagtctccatggcgttcccaagaaaatcgtatctgataggggaagccaattcacctctcacttttggaagaagctccaagaagagctgggtacccgattaaacttcagcaccgcataccacccgcagacagatgagcagaccgagcgtctaaatcagatcctagaagatatgcttcgcgcatgtgtcctggatttcgggaagacctaggataagagtctcccctatgccgagttctcctacaataacagctatcaagccagcatacaaatggcaccttatgaagcgttgtatgggcgcaaatgccggacaccgctcttgtgggatcaagttggggaaagccaagtgttcgggactgatatcctgagagaagctgaagctaaagtcagaaccattcgggataatctaaaggtggcacagtcccggcagaaaagttatgcagataaccgtcgccgtaacctggaattcgcagtggacgattttgtgtatcttcgggtcacgccattgcggggtgtacacaggtttcagacaaaagggaagctcgcacctcggtatgtgggtcctttccgtatcgttgcccgacgcggagaagtcgcttaccaattggagctgcccgcctccttgggcaacgtgcatgatgtgttccatgtgtcgcaactcaagaaatgccttcgagtgccatccgagcaggccgactcagagcaaattgaagttcgcgaagacttgacctacatggagaggccagtgaaaatcctggacaccatggagcgcaggaccaggaaccgggtaatccgtttttgcaaggtccagtggagcaaccacgccgaagaagaagctatctgggagcgtgaagacgagcttctcccgcctcggcgtcgcctccttcggctccgccgcgtcctcgccgacctcgtccacccctccgttttgcccgccgaccgccggaacgccgccgtccccgtcgacccgagccacaccgccgccttcctccgctccggtcgccgttcccgtcgtcgccgtcgacccggggtgagccgtggaccgcccttttcgtttcccccttccctcccctctctcggccgccgctccgccgtgcctatggccgccgccggcgaccataggggcgcgggcgcgtcgcctcccgtcggctgtgccggcgaggctgccttcgggcgcgccccgcggcgtctccccgccggaatcgagctcgcgccgtcgccctctctctccaccgtcgccgacgacctccggccggccttctccgctcgccgggaccgtctcccgccccggcgtcgcctcctccggcttcgccgcaccgccgtcgaccccgtccaccccctcgacgagctcgccgaccgccggaacgccgccgaccccgtcgaccagagccgcgccgccgccttcctccgctccggccgccttttttgtcgtcgccgtcgacctagggtgagccgtggaccgccgcctcttttcccccttcccttcccctctctcggccgctgctccgccgtgcctatggccaccgccggcgaccataggggcgcgggtgccgcctcccgctggctgcgccat

SEQ ID NO: 23066 - DNA, 4528 bp, Oryza sativa
  Clone ID: TF_OsC1713_4419
aaatgtaaattgcacaaatgtaaatgcgacaatcaaatgagacaaggagacaagagatttttcaccgaggttcggaaactcgccggtttcctactccccgttgaggcgagcccaactccaccactcaaccacgaagccaccgcacgcccccttcgtcaaggggtgggcaaggcgtgagccggcccacggagaggactacccaagcctcgatcactagggtagttcttccttcactctgaagaccgtgctactttgcaacggctagaaaactagccgttgtagtgctgtcagagggccccatcggcctggccggtcagaccggcctcggctcggtcagaccgccatcggctcggtttgaccgaatacggctccgtcggctctgtatcagccaccctgagcagcaccatcccggcctctagtgggccggtctgaccgcgcatgtgccgccggtcagaccggccttatgcgccggtcagaccgccgtcttgtggccagtcagaccggccagggcacgccggtctgaccgcccctggtcaggccgaacacggggagctccaagctgaaggcggggcttgtactgcttgtgcttcttcaaattttgcccagcagccccaagcttgtctttaatcaacctcatgatgtaaggggcataatagattccctgagtgaaggtccccttggagatggcaatctcttgcatcataaaagacacaatgtcgaactgacgaccctgaatgattgcatcgatgacgtgccaagccaccccccaaatgtcatcattgttgccaaggcgagggaggatagtggctctcacaatcctgttaaccacactggggatagtcctcaagccggcaaccttcccatgtgtgtaccgcgctccatcttcatagaactgagagagatagtctatggagagcggattgtgggtgtgcgcctcatgcaaatcatgtccaaaatccaagcgtatgttaaggagccgccggaactgcctccgagagatagaacactgaagggtgtcggacatccacttcatatcactatagtctccagccacccacactgtagcatagaactgccggatcaaatcttcattatagtcttgcttgagggtcacaatccggtcaatgccaacagtcttgaagagatcctgcaagctcttaaactctggagtctcattgatgtctctccaagaaatccacttatactctgcaaaagctttccctacataaacctgctcatacactgtcttctggaaaacggtgtgaaaccggggatccggggtgacccgaggcctcaagaactgatcatgatgcctcaagatggtatactgcgatggattcctcatgttcaccacaaactggatggagggatcaattttcatctcatcactttgttcatcctcatcctccccactatcactgacatcatctctacttgcctcctcactagccccctcaacatttgcctcaacctcttcatcactttgagcgtaatcctctccactcgattcttcaggctcactcatgggatccggagtgggcgcacgacgactatggcgagtgcggggaggcatcactccctcatcaaggtcgagatgcccgttggttgccataggtgtcttgatgggcttcgcatcctccaggccaaacctcttgagtagatccttgatgtacttggtttggctcacgaacgtcccatccttgagttgcgccaccaatcttgccttatttctcaccaccaacccattctcatcttgtttgttcctaaagacccactttgtacctatgacattgtggtctctaggtctttcaaccaaagtccacaccttgtttcttgcaaagctgttgagctcttcatgcatagcattcatccaatccggatcaaaaagagcttcatctatatgttttggctcaagacaagaaacaaacgagtaatgttcacaaatcgaagcgacacgagatcgagtttgaacacccttactaatgtcacccaacacttggtcaattgggtgatccatggaaagagcggtgtgtatacttggaggcataggtggatcttgtgccttctcctcctccacctcaacttgagcttgacttggcgtagcggaagtagatggctcatcttgagtggaggtggatggcttgtcttccacttcaataggcttgacatctccgatagacatattcttcatagctctcatcaagccttcatcacctacatcatccaaattctcgtgcccctcttgggagccattagtttcatcaaattgaacatcggcggtttcttccacaatacctttgttcttattgtagacccggtatgccttgctatttgaggcattacctagaagaaacccttcatcacaccgactttcaaatttggttagtctaacaccctttcggtaaatataacacttgcaaccaaaaattcgaaaataggcaacattaggcttcctcccaacaattagctcatagaaagtctttttcaagagacgatgcaaataaagcctattggttgcatggcaagcggtgtttatggcttcggcttgacaagcactacaaagcttatctttctcaaacttcacatctttcaaacccacaactaggtcacgttttgaaagtttgctcaattgattcatgccaacatgggctagcctcctatgccaaagccaacccaatgaagtttttgcaactaactcaattacctttcctttgctattgtctccaaatgtcactttctcttgttctttccctcctacttcaaatgtggtgaacatagccctatcaccggtcatgtgttgagtgcatccactatcaagcacccaatggctcccaccggtgcggtagttcaccaccgagtataggggaacccacatatctagcaacaatgctaccatcatgagccttcccttgaagcatctctccaaactcttgttgagcttagccacttgctccttaagctcattgttctcaacaacaagtgaggtatcacaaatagaaacacaagagctagagctaggcatatccacaagatcatcacaagaggtagaaatgctagatgatgcaacatgagcaatatggcaagtagtactatcatcaagcaaatcacaagatatgccaacatcaatatgagctccatgttgagtagtgaaaaggaggttgtcatgagcttccttaagcttctcatgagaaatggtgagtctctcatgagaggtctttagctccttatacaagacctccaaagaagcatgatccttctttagagtcttgaacttgacaatctccttctcactataagcatggagctcctcaaacatactcacaagctcatcataggaaacatcatcacaatcattattactctcactatcactaagagatgttaccttagaggagccctttgccatgagacaaagtggagcgaagagtgatggagcctccttgatggcaacaacggtcatcttcttcttcttggagcttgcatcatcaccaccttcttcctcggacccggatgaggcggagctctcctcatttgagtcccattccccgatgaaggcctcaatcttcttcccttccttcttgagcttcttcaagagcttgtagcctccactcttcttcttggatgacttgtctccatcatcatccttcgaagggcacttggaagcaaagtgtcccttctcaccacactcaaagcacctaaagttggagagagtcttattgggtctactatttcttctcctattggagttagagcctcttcctctctcctttctccttcccaagagatcattgaaccttctagcaagaagggcaatctcttcctccaagtcctcattggcttcattcaccttgcccttgcccttgtcttcaacttcggcttggagagcaatgcacttcttggaaggtgatgaggcttcctccatctccttcttcttcaacttgtacatatcattggtgttgatcttccccaagaggcttgcgggtgtcatccttgatatgtcggagttaatgagcatggtgacaagggtctcatacttctccggtagagccccaagtatcttttgggcaacctcaagatcggtgtagtttaccccaagccccttgagatcattcacaatgacattgagcctcccatacatgtcattcacactctcatgaggcaacatggagaatgtctcatattgaatcttgaggaaatgaagcttggcatccttgtactcgcttgtgacctcatggatctccgccaacttgttccaaatctcatatgcggtctcaaggttgctcactctatcgaactcctcttggctcaaagagttgaacaaagcattcatagcttgggcattgagttggaggtagcggtgatctatctccgtcaatggcgtgccggtgatagcaaagcctacatccacaatactccaaatatggaagctcatagctttgaggtgagtagacattttaattttccaagtggagtagtttgtgccattaaacataggagccttccctacatggttcacctcgttcgacat

SEQ ID NO: 23067 - DNA, 1972 bp, Oryza sativa
  unsure (1)..(1972): unsure at all n locations
  Clone ID: TF_OsC1713_4729
tcacgccgagtgatagaacactgcataggccctgacatccacttcatagcactctataatacggccttctgaaactgtgtggaatcttggatcatctgagtctctgggcacccggaactgatcatgatggcgaagaatggtgtattgagtgggattcctcaagttgagcacaaactgaatggaaggatcaagaggtccctcatcatcctcgccatcatcgttaccatcatcattttcttcttcctcagcccccttaacctcttcttcttcctctttctcactctgagcgtattgttccgcatccttaagctcattgttctcaacaacaagtgaggcatcacaaatagaatcacaagagctagagttaggcatatccataagatcatcacaagaagtagagatgctagatgatgcaacatgagtaatatgacaggtagtactatcatcaagcaagtcacaagatatgccaacatcaatatgagctccatgttgagtaatggaaaggagggtgtcatgagcttccttaatcttctcctgagaaatggtgagtctctcatgtgaagtctttagctcctcatacaagacctcgaaagaagcatgatccttctttagagccttgaacttgacaatctctttctcactacgcatgatcatactcacaagcttaaaagaaccctttgccatgaggtaaagtgaagcgaagagtgatggagcttccttgatagcaactacggccatcttcttcttcttggagcttgcatcatcatcactatcttctgcttcgaacccggatgaagcggagctctcttcatttgagtcccattgcccaatgaatgccttaatcttctttctctccttctgaagcttgttcatgagcttgtagcctccactcttcttcttggatgacttgtctccatcatcatcctttgaaggacacttggaagcaaagtgtcccttctcaccacactcaaagcatctaaagttggagaaagtcttgttgggtctcctatttcttcttctattggagttagagccctttcctctctcatttcttcctaatagatcattgaacattctagcaagaagagcaatctcttctggtgtcatccttgacatgtcggagttgatgacgaaggtgactaagtgctcatacttgtccgatagagcccatagcatcttttgagccaccttaatgtcggagtagattgcctcaagccccttgagatcattgactatcgcattcaacatcatggcaaacgcctcatattggatcttgaggaaatgaagctttgcatccttgtactcactagtgccctcatgaatctcactcaacttgttccatatctcatatgcggtctcaaggttgttcactctatcaaactcctcttggctcaaagagttgaacaatgcattcatggcttgagcattgagttggaggttgtggtgatcagcttccgttaaggggctaccggtgatggcaaaacctttgagagcaatcaaggttcgaagccgagacaaggcagatgctcgattcatatgctgtgatctatcctccacagcctgggcgatgatgccagtggggcggtggcggaggcggacggcggactcgcgcttgttgcggtgctggccgccggggccggacgccttgaacgtgcccatctcgcactgccccatcagctcgtcgtcgctcatccccaggtagtcatcccacccgccgccgccgccgcccttctcaccgggaccatccgagctattcgcggtcgccgcagcagaggaggatggggccgaggaagatgagagggagaggaagcggaagcggagaggaggcgcggcgccgcggtggtggagcggcggcgggaggcgtggggacggggagagcgggcaatagctgcgggttattcggaggagggctcgagccatggcgccgcgccgcgccgncnagtgcgctgccaccgcacggagccgactgcgg

SEQ ID NO: 23068 - DNA, 5876 bp, Oryza sativa
  Clone ID: TF_OsC1528_2012
atggccggcttttctttgatcagttgcgctgtgggtatcatcttcttctccgtttgctacctgcctgcggctcctgccgccgccttgtccttcaactactccaccttcagctcggacaaccaggaggacttcacattcgaaggcaacgcctccatccacgacgggtgtattgatttcgttgcgaacgggacctggggcaggggctacaggccctacagcaccggacgggtgtcctacaaattgccggtgcggctctgggacgctgccaccggcgaggtggccagcttcaccacaaccttctccttcaacatcacgccgatgaatattagcgacaagggcgatggcatggccttctttctcgtcagctatccatcaaggatgccgctgaccgccgacggcgacactctcggcctcgtgagcaacaaacccgaaaacgctccggccggcggcgaccaattcgtcgccgtcgagtttgacacctacccaaaccccggcttggaccctaacgctaccggtgaccacatcggcatcgacatcaactcagtccgatcgttgacgaccgaacccttgaccaactccagcctcatcggtaacatgaccgccatcgtccactacgatagcagttcgagcatcctgtcggtgaagctgtggataaatgacacgacgaagccgccttacaaccttagctacgaaattgttgatctcaagaaaaaattgccggagaacgtcaccatcggcttctcggcggcaacgggcgcatcagatgagctacaccagctgacttcttggtacttcaactcgagctcgtcgttcgagcataagcatggacgtgccggggttgtagcgggagccaccgtcggcgcgacgttgttcgttgtgctgctcttcactgctgcagctatcctcatacggcgacgtcggatcaaaaacaggaaggaggcagaggatgagcaggacataagctcggacagcgaagacaatgacggcgagcccatcgtggagattgagatggggactgcgccaaggcgattgccatactatgagctcgtcgaggcgaccaagaacttcgcggtggaggagaagctcgggcaaggcggcttcggttcggtgtaccgaggctacctaagagagcagggcctcgccgtcgccattaaacgcttcgccaaagattcctccaagcaagggaggaaggagtataagtcggagatcaaggtgataagccggctgcgccaccgcaatctcgtgcagctcgtcggctggtgccatggacgcaacgagctcctccttgtctatgagctcgtccccaaccgcagtcttgacgtccatctccatggcaatggcaccttccttacttggccaatgaggatcaagattgttctcgggctcggatcagcactactctacctccaccaagagtgggaacaatgtgtcgtgcaccgtgacatcaaaccaagcaacgtcatgttggatgaatccttcagtgccaagctaggtgacttcgggctcgcgaggctcatcgaccacaccatcggtataaagacaatgaccgccatgtcaggaacaccgggctaccttgaccctgaatgtgtgatcaccggtagagcgagtgccgagtcctacgtttacagtttcggcattgtcctactggaggtggcatgcgggaggagaccgatgagcctactagacagccagaataacggcgtcttccgactggttgagtgggcctgggatttgtatggcaagggagatgttctcatggccgccgacaagcgtctcgacggcgactacgattctgcggagatggagcgtgtcatcgctctcgggctctggtgcgtgcaccctgacccaagtgtgcgaccgtctatcagagacgccatggccatactccagtcgagtggaggccaactgccagtgctatcggccaagatgcccgtgccaatgtacgcgccgccgatggcctcgtttgacgggctagctgtttgcgtcatctacagggatgtcgtcgtcctcaggtgtgacgcagtcgtcgtccacatcgacgacgagcggccatgctattcacacctcgtgttcctcgactactccatcccgatcgtcagcgtgcaccggcaatcgggagagcaggtctccggaacctctgccttcgacgtcctgcaccgggagaaggcggcaataaggcgctgtgattttactatggctggttttgccgatgcactgaggccggataaattcaccggtgtgcactttaagagatggcagatcagggtcgctttgtggctgacagctatgaaatgcttctgggtgagtactggtaaacctgaaggaattcttgctgctgatcagcataagcaattcgagaaagccactactctctttgtgggatgcattcttagcgttcttggcaatcgtctggtcgaggtgtatatgcacatgaccaacgctaaggagttgtgggatgcactgaatactaaattcggtgctactgatgctagcaatgatctgtacatcatggagcagtttcatgactacaggatggctgacaaccgttctgtagtcgaacaggctcatgaggaatactccgttgaggggttgatagtgtctcttgatgttgaggagaaagctcgggaaaaggacgccgcgtctaagggcgacggtgggcagtccagtgccaatgttgtgcacaaggcccagaacaagagcaaggggaaatacaaagctcagcagaccaccaacttcaagaagcagaagaagaacaacaacaatcctaatcaggatgagaggacttgctttgtgtgtagccaacctagtcatctggctaggaagtgtccacagcgcaaggggatgaaggcacctgcagggcagacttctaagtctgctaatgtgaccattggcaacactggagatggaagcgggtatggtcgcacggggttccaccgtcctaatggggaatgggtcacatgcttctgttcatggtgttggcacggtagatctgaagtttacttcgggaaagatcgtgcagctgaagaacgtgcagcatgtctcttctatcgacagaaatcttgttagtggctcccgtctgactagagacggatttaagttgttttttgagtctaataaagtagtcgtgtctaaacatggatattttattggtaaaggttatgagtgcggaggcctgttccgcttttcctttctgatttctgcaataagtctgtgaaccatatttgtggcagtgtggatgatgaggctaatgtttagcactcacgtttatgtcatattaattttggcttgatgtctcggctttccagcatgtgtttaattcctaagttttccattgtcaaaggttctaagtgccatagttgtgtgcaatcgaagtaacctcgcaagcctcacaaggctgccgaggaaagaaacttggcaccactagaactcctacattcagatctttgtgaaatgaatggggtgttgacaaagggtggaaaacgatatttcatgactttgattgatgatgctactagattttgctatgtgtacttgttgaaaacgaaagacgacgctctagactattttaaaatttataaggcagaagttgaaaatcaacttgacagaaagataaaaagacttaggtctgatcgtggtggagagtttttctcaaacgagtttgacttattctgtgaggaacatggcatcatacatgagaggatgcctccctattctcccgagtctaatgggattgctgaaagaaagaaccgcacactgactgacttggtgaatgccatgttggacactgcgggactacctaaggcatggtggggggaggcattgttgaccttgaatcatgtgttaaacagagttcctaacagaaataaggacaaaacaccatatgagatatggattgggagaaaaccatcactttcttacttgcgcacatggggtgcttggcgaaagtcaatgtaccaataacgaagaagcgcaaacttggacctaagactatggactgtgtcattctgggatatgcttatcacagcattgcctatagatttttaatagttaaatctgaggaacctgacatgcatgttggtacaattatggagtctcgtgatgctaccttctttgaaagctttttcccaatgaaggatacacatagtagttcgagccaatcatctgaaataattcccagttcaatcacaccaccagaacaaactgaacatacacatgaacatgtcactgaggaggatgacagtgcagctccacgaaggagtaagagacaaaggacggctaagtcttttggtaaggattttactttgtacctcgtggatgacactcctaagtcaatttcagaagcatatgcatctcctgatgctgactactggaaggagactgtccgtagtgaaatggattccattatcgctaacgggacttgggaggtgacagagcgaccctatgggtgtaaacctatgggatgcaagtgggtgttcaaaaagaagcttaggcctgacggtactattgaaaagtacaaggctcggcttattgctaagggctatactcagaaagaaggcggagatttctttgacacttactcacctgttgctagattgaccacaattcgtgtgctactttccctagcagcctcacatggtcttctcgttcatcaaatggacgttaagacaacttttctgaatggagagctggatgaggagatctatatggatcagcctgatgggtttgtagttgaaggtcaagaaggcaaggtgtgcaaattgttgaagtctttgtatggtctgaaacaagcttctaagcaatggcatgagaaatttgacaaaacattgacatctgcaggcttcgcagtcaatgaggcagataaatgtgtgtactatcgccatggtgggggtgagggagttattttatgcttgtatgttgatgacatactgatatttgagacaaatcttgaggtgataaatgaggttaaatcattcttgtctcaaaattttgatatgaaggatttgggagtagctgatattatcttaaacattaagctaattagaggtgagaatgggattacactcttgcagtcccattatgtggagaagatcttgaatcgctttggctatattgatagtaagccttctccaacacctgatgatcctagcttgttgcttcgcaagaacaagagaattgctaggaatcaactggaatactcccaaatcattatctcgttgatgtacctggctagtgcaactaggcctgatatctcctttgctgtgagcaagttgaaccgatttacctctaatccgggagatgatcactggcgtgtgcttgagcgagtaatgcgctatctgaaaggtactgtggaattggggcttcactatactgggtatcctgcggtactggagggttatagtgattctaactggatctctgatgtggatgagatcaaagccactagtggatatgtcttcacactgggtggcggtgctgtttaatggaggtcttgcaaacagaccattttgacgaggtcaaccatggaagcagagctgatggcactggatactgctactgttgaggcagaatggctgcatgatctattaatggatctgcctattgttgaaaaatcgacatgtgaaaagacgattgaagtctgtcaggaaattaagaaactctagagttataacgttggattacatccaaacagctagaaacctggcagatcctttcacgaagggactatcacgaaatgtgatagacaatgcatcgaaggagatgggtttgagacccatagtattcttcaaagaactcacctttgtgagcttgattgttggtcgcagtctatggagattttgggtgaatcttctaggaagcttactatagacctaggagta

SEQ ID NO: 23069 - DNA, 5730 bp, Oryza sativa
  Clone ID: TF_OsC1528_1880
atggcgaggggcgtagcgcgcgcggcgtcgttcggtggccgcgccgcgaccgcgaggtggtgctcgtaccggcgcatcacggtagccgtctgcctcgggaacctcgtcgccgcgctcctcgtgctccgctccctcacctccctcgcccccacaccgcccaaacgtgaggaagtggtggagtatacggaggagcagattaggaaggcggaggagtcgatccggattcgccgcgaggcggagcccgtcgagcttgtcgaggcggtgaagaatctgcggaagattttcaggcgggaggagaagaggcggaaggagttgccactggagttgaagcagaaggtctcgtatgagattgtgcagctcctgctcgatttgggggataacagcagtttcgctcagcaacgagctcggttgagctctcagccagcagcagcaccggctgctcctccttcccctttccctcccccctctccacgcagcagccccccggaggtgcgccatttccgacgttcggttgcctcgagcactcggcgtcagcaggacgccgagctcgccgcagcagaagagcgcaggcgagcaacggctcagaccgctgcagcagcagcgagggcggctagactggcggcagcggagttggcagcagccagggcggaggcggaagcagaggtggcggaagatgcggcacgtgcggcggaggtagaggttgagaccttgcgcagcagcatcaatggctccatcgccggcgacatcaccgccgacagggagcttgaggagctagcaagaggaagggcacgggagcgggcagagcggtgggcagcagcccacctccacggcggcggcggcggccaaagggaccgtgcgcccgctgacgggaacccagatgggcgcgggcgtgtcggcggcagcacggagcccgcgcgctgccctcgcaggcagcgtgactctctctcccttgaccggcgccatggccaccacggcgtccagacggtggtcagggactttggtcccggcggtgggtggcctaccctcaccaaaaccaactacatcgagtgggccgcggtgatgagggtgaggctccaggtgcggcacatgtgggaggcagtatggtacggcgacgtcgactacgacgaggatcggcgggcactggatgccctcatcgctacagtcccgcccgagatgcagttctcgctttcccagaagcggactgccaaggaggcctgggatgccatcgctgcggcacgcatctgcagtgaccgcgcccgcaagtccacactgcaggcactccgcaaggagtgggagaacatggccttcaagccagagaagtacaggcagatcgctcgctcgatcgagtctcagctggacctctccacgatgtcgatcgaggaggcgttaggtcgcctcaaggtcgtcgacggtgatgagccacagcctctctcggggcctatcaccattggcgggaagctccatctcactcgggaccagtgggaggcctctcagggtgacgggaggaagggggagtcatcttccccgacaggcggccgtaagctgcgcaaggtgcggggaggtgtccagctacggtgggcgcgaagacgtgccgagggtggcgcccgcagaggcgcccaaggcggcgccaccggcaaccacaagccggcacgagacgacgcctaccgcaactgtggcaagcttggccattgggccaaagactgtcgacagccacgacgcggccaggcccacgtcgcacgtgtggaggaggaagagccggctctgctcctggctcacgcaagcatcgagctacctccaacggcaccggccgcagcagtttttctccaccttgatgagccgaaggtactcgtctccctctgcaacggctctagcaacgacaaggctgatgggtggtacctcgacaccggcgccacccatcacatgaccggccgacgggagttcttcaccgagttcgactccagcgtccgaggctccgtcaagtttggggacgcctccggcgtggagatcaagggcgttggctccgtcaccttcaccgccaagtccggtgagcacaggttgctcaccggagtctactacatccccgcgttgaggaattctatcatcagcgtgggacagctggatgagaacggctcacgcgtgttggtcgaggacggtctcatgaggatttgggatcgccgtcgtcgccttcttgccaaggttgcacaaccagtttgcctcgccgctcgtcgagacgatgaggcgtggcagtggcacgagcgcttcgggcacctccacttcgaggcgttgaagcggctcaatgccaaggagatggtgcgaggcatgccgtgccttgaccacgtggagcaactctgcgacgtctgcgtggtaacgaagcaacggcgactcccctttccccagcagacgagcttccgagccaaggagcggctcgagctcgtgcacggggacttgtgtggcccagtgacaccggccacaccaggaggacgacgttacttcctgctgctcgtcgacgacctctcccgctacatgtgggtgatggtcctcgacagcaagggagaggctgcggacgccatcaggcgcgcgcaggctgctgcagaggcggagtgtggccgcaagctgcgcgtgctgcgcaccgacaacggcggcgaattcacggcggctgaatttgcttcgtactgcgctgatgagggcattcagcgccactacatcgcgccgtacagcccgcagcagaacgacgtcgtcgagcggcgcaaccagacggtggtggggatggctcgggctctcctcaagcagagggggatgccggccatcttctggggagaggcggtggtgacggccgtctatatcctcaaccgctctcctaccaagaccctcgatggcaggacaccgtacgaggcatggcatgggcgcaagccggcggtctcccacctgcgggtcttcggctacctcgcgttcgccaaggagcttggccacatcggcaagctcgacgacaggagcaccccaggggtgttcatcggctacgcggagggctcgaaggcctaccgcatcctcgacccggagacacatcgtgtgcgcacagcgcgcgacgtagtgttcgacgaagggcgagggtgggtatgggacaaggcggtggacgatggttcgactccgacgtacgacgacttcaccatcgagtacgtccacttcgagggagctgggggagtaggcagctcttcttcaccgagcgtgtctaccccagtccccgagcctccaccgactccgacatcaacacatcctcgggccacgacttcgactacgacgagctcttcgccgacaccaccccagccggtgaccccacgcactccagcaccaacagccactcctccaggcacgtatactcagacgccagctcgtgttgagcgcagcccggtggagttcgctactccgctctcccacgacggggagcgcatcgacgcataccacgacggcgagcagctacggtaccgtacgatggaggatcttctcggcgaccagccggtgccgggactggtgcctcgcgacctggaggcgcagttacaccttgcgtgcgacgacggtgagcctcggtcttttgcagaggccgagaaacacgcggcatggcgtgccgcgatgcagtcggagatggacgcggttcaggagaaccgcacctgggagcttgttgacctccctcgtggtcaccgcacgatcacccttaagtgggtgttcaagctgaagagggatgaagccggagccatcgtcaagcacaaggctcgcttggtggcacgcggtttcgtgcagcaagaggggatcgactacgacgatgccttcgctcccgtggcacggatggagtccgtgcgactccttgcgctggctactcaggaaggctggggcgtccatcacatggacgtcaagtcggcgtttctgaacggcgacttgaaggaggaggtctacgtgcaccagccgccgggatttgtgatccctggcaaggagggcaaggatgcggaggtcgcggcgttcaaggaggagatgaaggccaccttccagatgagtgatctcgggcctctctccttctacatggggatcgagaccgcctacgccaagcgcatcgttgagctggctgggctcaccgattgcaacccagctctcactccgatggaggagagactaaagctgagccgcgatagcacgacggaggaagtggatgctacacagtaccggcatcttgtggggagccttcgctacctcacccacacacggccggacttggccttctccgtcggctacgtcagtcggttcatgcagcgaccgacgacggagcaccagcaggctgtgaagaggatcatccgctacgttgcggggactctcgaccacggtctctactacccgaggtgtcctggcaaggcacacttcatcggctgcgaggccgagtacatggcggccttcgccgcttcgacccaggcgctctggcttgctcgactgcttagtgatctcctcggcagagacactggagcggtggagctcagggtggatagcaagtccgctctggccttggcaaagaaccccgtttttcacgaacagagcaagcacatccgggtgaggtaccacttcatccgaagctacttggaggaagggagcatcaaggcgagctacatcaacaccaaggaccagcttgcggacttgctcaccaagcctcttgggaggatcaaactaggagggtgcagcaataggcttgcagccagctatggttatatatatgtatccaacctccctcgggaagaagcagtggaatcatggcgtttcgagaagttaaaagatataaaaagtgcatctattcagaactcaacaaagttagacctctccaacgaggaagcaagaaccttaaagcgagcactacagttcaactggcatgtgctgctggaagacattggtctttggataccatcagaagtctcacacactgaacatgatgacaaacctgagaatgaaccagaagaagaagagataatagctggtccacctttgccctcacaatgcaatgctgagctacatactgattacgatggtgctgctgttagatggggcttaacacaccccaaagaatctgctgccgattgctgtcaagcatgtctagaccaggctaagaatgccaggccaggtgaactaaggtgtaatatatgggtttattgcccatcagagtttggatgtttctctccagataaatatgagcataaacatcaggagtgctggttgaaacaggctgaccaccctaaactcaacttcaaagacaagtattccgagtcatacagagattctcatcccactgcccctgtcgttgtgccctggatgtcaggtgtcatcagcgcatgagctgttagtccccagaggctcatctgagattgggagatttgtaccgatgaaaaacttaaccaaagcaacttcatataccgattcttcctcgttttttttttcttttgccatgatacgtttctctttctcttgtcttgggtatatacgaatatgatgtaaaccttagattagtcgttctgatagcaaaaggttcatttgagggaggcttattttgtggccaagggaatgtgagtagactgattaaatacaatggttccatcaagagaaatgatggtgctcttgcacattttccgctccaattcttttgtctctgatcacgaactttcctaaagcaccattcggattactaatccaaaacggacttaatct

SEQ ID NO: 23070 - DNA, 4548 bp, Oryza sativa; identical to SEQ ID NO: 14064
  Clone ID: TF_OsC91_2308

SEQ ID NO: 23071 - DNA, 1410 bp, Oryza sativa
  Clone ID: TF_OsC1528_1619
tcactgcaagccgcccgacgagtctgcgccagacccgccgccaccaaaagcaattgctatcccagcaaccgcttcctcctggactccacctgcaacagtgcacccacgcagcttataaagatgcgactccaccttctctccagtcatcacagccatcttgccattcatgatctcaatggtcttcctattccgattaccgcggaatattaacccttcttcatgcaaggttccaagcgaaatcagattcctctttagccctggtacatgcctgactccctgaagaacatgttcacctccatcttctagcttgattttgacttcacctactcccatggccggataacttgtgtcatcgcctaagtagacaaaaccaaactcaccagacttgtatgaagagaaccactccttccttggcgtcatatgaaacaagctagctgaatctaatatccacgcttctgcatccttagactgtgcacttgacatcgtgagaaaatcacaaccatcgctatccgagtcatttgaagaagtcactgtattagcctttgcttttcccttcagtgttggacactccctgcttatatgcccccactcatcacatctgaagcattgcaccatcttcttctttttgttcttctttaccttatgcccagcatgatcttctttgactagcaaaccctccgcttgagatgtttcaccctctttattctttctcatctgatcacgagccagcaacgcagaagtgatatctttagttttgatggtctccttgccgtacgtcaaagtagtcaccacatgctcatacgatttaggtaacgaacacaaaagaactatggccttgtcttcatcgtcaacttccacatccatcttcacaagatcagtgactagttgattgaaaacgttcacatgtgctgtcagatccgccccttcctgcatttttaacccatacaacttctgatctgagagacatagccttattgtcgcagccgcctgcaactgcatctcctcccaatcgtcatcctccatcttggccggtttgacacccttcaaagcctttgaacctccttgttgagctaacaaatctttgaccctagtcgtgttcgctataatccgatgtgaccaatcttccaccctcgatgtgcctctactccgcatgatctcgtcggcctggcttggtcgacccatacgcgcgcactttgtcacgagcctctgcacagcaagcctattgagccccttgtaccatgtttgaccaatgtcctgccgagccgcccaaaaatcgctgccgctttgttgctttggttcggctctctcttcggcacgtgcgtcgggcgcgccgtccatggcgctacccctcagatctctccagtcgccttcggccacgcccggccccgtcttccggtcattttccgccat

SEQ ID NO: 23072 - DNA, 3339 bp, Oryza sativa; identical to SEQ ID NO: 14079
  Clone ID: TF_OsC359_5822

SEQ ID NO: 23073 - DNA, 5291 bp, Oryza sativa; identical to SEQ ID NO: 14082
  Clone ID: TF_OsC359_6222

SEQ ID NO: 23074 - DNA, 3373 bp, Oryza sativa
  Clone ID: TF_OsC359_7153
aaggtgggttgtgagcatatggttttgatggttgtgctcatgacaattaaggaccggttcgcgagctactgttgtgaaacatttaccgtgccaaccacaagccagcatgggcaacggctttatcttttgtatagcatgatttattatggtgtgccagactgtgaagcggcgagaagtctgtgggggtcgctggggagtccattgcctctggttttgagggggagatcatgatccaggaacggtgcactgtgatgagttgtgttgtgcgaggggtattgtcacagttcctttccaagaaattccaggcgtgacacgtagctcctccagcacctcccgcagttcccgcagcgctcgcagctccagctccggttccggctcccgttccagtgtcagctccggcgtccgctctctccttctctccagcgtcagccgccaggggtccagccagtggcaacggagatggtcaacatcaggaatggcagccgcgcagccggtgagggcagcaatggcgaagagcacaccgacagtggatatcccaacagcgcctctggcaatgggcaacagggcagtaactgagtacctccatgagttcaatcgccaagcgcgatatgcaccggaggatgtccgcactgacgcggagaagcaggagaagttcctagcaggcctggatgacgagctgaccaaccagttgatctctagggattacgctgacttcgagaagctggtagacaaggcaatccgccaggaggatcagcgcaacaaaatggacaggaagagaaaggcagcgcagttccggtccaaccaaggaagtcaccagcgaccgcgcttcactcccggacagcagggtggacctaccaccatgattgtccaccagtatcgcccgttcaactcaagtagcttccaccaggtcgccagtggcagccagaaccacccgggaggtcagcccaaccgcagtgcagctccgcgcccaccaatggccacagcacaggcagctccatcagtccaagccaagaaggagactggagtaaagccagggtcctgcttcaactgtggcgagcatggccactttgctgacaagtgcccgaagctaaggcgtgctgggccaaggtttgcccaagctcgtgtcaaccacgcgtccgcggaagaggcgcaagcagcactagaggtcgtactggaaatccaaatatcaccatttctagccaacctcgtccttctcgaatccaaagacctagatgtcattcttgggatggattggctgaccaagttcaagggtatcattgattgtgcgaatcgcacggtcaccttgaccaatgagagaggggaaacagtggtgtacaagtcaccagtcgcactgaagcagggaatctccttaaatcagattgaggtggagaattcggtggtcaccgcggagaaaagttcgaggaaattggaagatatccccatagtctgcgagtattcagaggtgttccctgaggacctcactaccatgccacccaagagagagattgaattccggattgatttggcaccggggactgctccaatttacaagagaccgtacagaatggcagccaatgagctggcagaggtcaagaagcaggttgatgagcaactgcagaaagggtacattcgaccaagtacttcaccttggggtgctccggtcatttttgtggagaagaaggacaagacgaagagaatgtgcgtcgattatcgcgcactcaatgaggtcacaatcaagaacaaataccctttgccacggattgatgatctgtttgatcagctgaaaggagccaaggtgttttccaaaatagacctacgatcaggttaccaccagttgaggattcgggaagaggatattcccaagacagctttcaccactcggtatgggttgtatgagtgcacggttatgtcttttggacttaccaatgcacctgcattcttcatgaatctgatgagcaaagtgtttatggagtttcttgacaagtttgtcatggtgttcattgacgacatacttatctattcaaagtccgaagaagaacatgagcaacatctccgtctggtactcgagaagttgaaggagcaccagttatatgccaagttcagtaagtgtgacttctggttgtcggaagtcaaatttctgggtcacgtcattactgctcaaggtgtggcagtggatccatcgaatgtggagtcagttaccaagtggaccccacctaagacagtgtcacagattcggagtttccttggacgtgcgggttattaccgtcggttcattgaaaatttttccaggattgccagacctatgactcagttgcttaagaaagacgagaaattcaagtggacagccgagtgtgacaagggttttgaggagctcaagaagaaattagtgtctgctctagttctgaatttgcccgaccagacgaaagacttccaagtctattgcgacgcgtctcgtcatgggcttggatgcattctaatgagggcagagtggtcgcttatgcctcacggcagttgcgtctgcatgaaggaaactatccaacacatgacctggaattggcagcgaggcacggcctacgctcgtggatcaagtcagagcagctcatgtaaatatcctgagatagctgaactgaaaaagaatatgagggtcggaaaagcccgggatttccacgaagatgaacatggcacaatctggttgggagaaagattgtgcgtacctgatgacaaagagctgaaagatctgatactcaccgaggctcaccagactcagtactccattcatccaggtagtaccaagatgtaccaagatctcaaagagaaattttggtgggccagtatgagaagagaaatcgctgaattcgtcgcactctgcgatgtttgtcagcgagtcaaagcagaacataagaggcccgcaggactgcttcaacctcttcagatcccggaatggaaatgggaagagattgggatggatttcatcacagatggccagaccgagagcgtcaatcagattttggaggatatgttgcgagcctgtgcgcttgattttggaggagcttgggataaaagtctgccttatgcggagttctcctacaacaacaattaccaggctagtctgcaaatggcaccgttcgaagcgttgtatggccggaagtgccgcacacctctcttctgggatcaaacaggcaaacgtcaactgtttggaacagaagtgctaacggaagcagaggagaaagtcagaaccatcagagagaggctgagaattgcacaatctcgacagaagagctacgcagacaaccgccgaagggagctcacttttgaagcaggggattatgtgtaccttcgtgttactccgctccggggagtacaccgtttctag

SEQ ID NO: 23075 - DNA, 529 bp, Oryza sativa
  unsure (1)..(529): unsure at all n locations
  Clone ID: TF_LIB4371-025-R1-K1-B10
gggagatgagtgcgtcttcgtccaccttccgccccccaccggcggctgctcactccgacggccgccgtccaggaaaagcccagctgctgccccctcgtcctcctgggcagatgtcgtcagggccccgcgcgcgggcccgcctaccttgtcgcagcgggacattgaagctggctggtgcgtggtgaagcgtcggagtaaaagctcttctgccggtccaaccaccgccatttctccgcctgcgagcgctcgtccgattccccgatggctccagggcagatgcttctgctgtctcggtctggggcaccttaaagcagcctgcaaggaaccccggcgctgctaccggtgttggtaccccggccatctggagagagactgcaaagagggttcgncctcccccaagcgagcggctncgggcactgcggcggcggnaacccttgcgaaagcggctncggnccagattgcgacggcgaagaagggaggcgcggnccccgncctgactncggcgcgtctggcggngaagaaggggggc

SEQ ID NO: 23076 - DNA, 6024 bp, Oryza sativa
  Clone ID: TF_OsC359_5505
atggagcccgagatttccgcggccgattccttcccctccggccgccctctctcactcccgacgctatttaaacgctccccgtgcctctctcctccgtttccgccactcgccgcactctctccccgtcggattcgagctcgcgccgtcgtcctctctctccgccgtcggcgccgagctccggttcgccgccgtcgtcgccccgtacctcctcccgcttcggcatcgcctccttcggcttcgccgcgttctcgtcgacctcgtccactcctccgtttcgcccgccaaccgccggagcaccgccgtcctcgtcgacccgagccgcgccgccgcctctctccgctttggtcgccgttcccgtcatcgccgtcgacccggggtgagccgaggaccgccatttcgtttcccccttccctcccctctctcggccgccgctccgcgtgcctatggccgccgccggcgaccataggggcgcgggcgcgccgcctcccgtcggccgtgccggcgaggccgccttcgggcgcgccccgcggctgccaggtggggcccggccgtcagccgcccgcgcctgcgggtacggctgacgcgtgggacccacggcgccagccggcgtcagccgcgtgcgcccggtccaccgtggacccacctcggccatataaggaccggtcttcgggcctctgttgcaaagcactaccgtactttcacatgtctagtggggcaaatgaaggctacacgagctgcggcccggtagtcgagatgtcatggcacagggccggtgtcctgctgctaggggctcagtcctgcctgcatgtcccgggggttccggccgtaggtgggattgggtcggtactcttgtctatggctaggatgggttggaaactatgtcacgtctttcgtctgtataccgtggtgatggccggcagcgtcacccgtcgcggtttggacatgactggtttcgtcttggagctgcggggcatgtgcgttgtcctggggtatccacatggagtggactaccagggcaggccgcttccggagcaggagggtgacgatggagagccccacgctgcttgggaggtcactgcagtgatcctcgctggctctcccgagcggacttcgctggcagtcaccgcgggtggagattctttccccgccgctagccagagcgccgctctcctcgccatcggcactcttcaccagcgctacccggacgagttgcagcactcgccctaccgctaccaccctcgccgcggaggagcccgcgactacgccaccttccgggatgctagctcggaggatgacgctaccatcgtgcacctggcgcgcatggtggaggcgtacgacgcggctcgtatcgacttccatcagatggtgcgccgtgggatggtcgagaacaacttgaagatcctggagctgcgtcaggagaacctgcagctcaagaaggacctagacgcggtggaggcgcagctgcatcagctcaagatcgcccagggagaggtctgccgccccaagcgtcgccgcgtctgccgcagccagaagatcaccgcccgcaagagcacctccaggcccgagcttgttcgtcagtccctggcgtggacttgcttcgtcgagacccctcgtgccgagcctgcgcccgtggttccccaggagggggaagcctccggcgttggtagcacggaggatgcgctgttgctcaccttccgtcctggcccgtcgcagcggaggagtgctaacaccggtgatggcaaccagcctgaaggaagcaaccaccaccaccagggcagcccacctccacctcctcctccgcctccaccaccaccaccagataccaacgccattctcacccaaatcctcgcccagcaggccaacatgatgactgctttcctccaccacctccaaaatccgccacaacataatgctccaccaccacccccacaacactctaaactcgccgagttcctccgcatccgcccacctaccttctctagctccaataaccccgtggatgcgttggattggttgcatgccgtggggaaaaagctagacactgtgcagtgcagcgatgaggagaaagtcatcttcgccgcccaccagctgcaggggcccgcatctctatggtgggaccatttccaggctacgcagccagaggggcaacctattacatgggcccgtttcaccgccgctttccggagaacccatgtgcccgccggagtcgtggcccttaagaaaagggaattccgagagttgaagcaaggcaaccgctccgtgatggagtatttgcatgagttcaacaacctggcccgttacgccccggaggatgtgcgggaagatgaggagaagcaagagaagttcttggcaggaatggaccctgagctgtccgtccgtctagtctccggggactatccggatttccaacgtctggtggacaaaagcatccgcttggaagccaagcacaaggaactggagtcgcacaagcgccgcttggcgaatttccgcaatcaacagggtgctaaccaaaggatccgctacaccaatccctatccagggggatcttcctcgcagcagcaacaacagcagcagcaacctcgcttcgcgcctcgacctcaattcgtggtgcgcgtcccacagccgcagcagcagcagaatcaacaagggactcgtgcgccccgtcctcctacgccaactgtgcaacctggtcaaggccgcagggacgctcaaggtccgcaacgtctgtgcttcaactgcttcgagcccgggcactttgcggataaatgcccaaagctgaggcgtcagcaaggccaagcgccttcccgctccaacaacggtgagaaggatgtcatttggggtcgggtgaaccacgtgacagccgaggacgtgctgacaactccagacgtcatcgtcggtacgttcctcattcattccatccctgctaccattctgttcgactctggagcttcccactcgtttatatctgtgccattcgtggggagaaatcagttgggggtagaaaggcttaggaaccctctgctcatcaccacccctggaggggttatgacagcaaagtactatagccctgccgtccctatagaaattcaggggattccttttccctcggatctgattctgctagacaccaagaacttggatgtgatccttgggatgaattggttggctcaattccaaggagtagtggattgtgcgagacgcactgtcactctgtaccgagggccggaacaaccggttgttttctttgcacccccaacctctgtcagtagttccgaacttcaccagatagaactgttagaaatccccatcgtcagggagttcggagacgtgtttccggaagaactacccggtatgccgcccaaacgagagattgagttccggatagatcttgctccaggaaccactcctctgtacaagcgaccctaccgtacggcagcaaatgaactggccgaagtcaagaaacagttggaagagttgaaagaaaaggggtatatacgtccgagtacttccccctggggtgctcctgtgatttttgtggagaagaaagacaagacgaagaggatgtgcgttgactacagagctctcaatgaacttaaaggtgctactgtattctccaagatcgatcttcgttccggatatcaccaattacgtattcgtgaagaagacattccgaagaccgcattcaccacgcgatacggactgtatgaattcacggtgatgtcgttcggtttaaccaatgcacctgcctttttcatgaacttaatgaacaaagtgttcatggaatacttggataagtttgttgtggttttcattgatgacattctggtatactcacaatccgaggaagaccatcagcaccatctccgtctggtattgggaaagttgcgggaacatcaattgtatgccaaacttagcaagtgtgagttctggttgtccgaagtcaaattcttagggcacgtgatatctgctaaaggagttgctgtggaccccgaaacagtgaccgccgtcactgattggaagcaacccaagacagtcactcaagtccgcagtttcttaggtttggcaggatactaccgaaggtttatcgagaacttctccaaaatcgctcgacccatgacacagttgttgaagaaagaagagaaatttgtgtggagcccgcaatgcgagaaggcgtttaaaactctcaaagaaaagctggtttcctcgccagtgttaatcttgccggatactcgcaaggatttcatggatggtcatgtggtggcctacgcctcacgccagctacggcctcatgaaggcaactaccctacccatgatttggagttagctgcggtggttcatgctctaaaaatctggcggcactatctcattgggaatcgctgtgaaatatatactgatcataagagtttgaaatacatcttcactcagtccgacctgaatcttcggcaaaggagatggttagaactcatcaaggattatgatgtgggaattcactatcatcctggtaaggccaacgtggtcgccgacgctctaagtcgagaaagccattgcaacactcttaacgttcgtggcattccacccgaacttagtcaacagatggaagccctgaacctaagcatagttggtcgcggattcttggctgcgttggaagccaagcctaccttgctcgatcaaatccgcgaggctcagaagaacgatccggacatgcatggactcctcaagaatatgaaacagggtaaagccgctggtttcacagaggatgaacacggaaccctatggaacggaaatcgagtatgcgttccagataacagagaacttaaacagctgatacttcaggaagctcacgaaagtccttattccatccaccctggcagtacgaagatgtacttagacttgaaggagaaatactggtgggttagtatgaagcgggaaattgcagagttcgtggccctttgtgatgtgtgccagcgtgtcaaggcagagcaccaacgaccggccggacttctccaacctctccaagtacctgaatggaaatgggatgaaattgggatggatttcatcaccggacttccaaagacccaaggtggatatgattctatatgggtagttgtggatcgattaaccaaggtagctcgattcattcctgtgaagaccacctatggagggaacaaactagccgagctctacttcgctaggatcgtgagtctccatggcgttcccaagaaaatcgtatctgacaggggaagccaattcacctctcacttttggaagaagctccaagaagagctgggtacccgattaaacttcagcaccgcataccacccgcagacagatgggcagaccgagcgtctgaatcagatcctagaagatatgcttcgcgcatgtgtcctggatttcgggaagacctgggataagagtctcccctatgccgagttctcctacaataacagctatcaagccagcatacaaatggcaccttatgaagcgttgtatgggcgcaaatgccggacaccgctcttgtgggatcaagttggggaaagccaagtgttcgggactgatatcctgagagaagctgaagctaaagtcagaaccattcgagataatctaaaggtggcacagtcccggtttcggacaaaagggaagctcgcacctcggtatgtgggtcctttccgtatcgttgcccgacgcggagaagtcgcttaccaattggagctgcccgcctccttgggcaacgtgcatgatgtgttccatgtgtcgcaactcaagaaatgccttcgagtgccatccgagcagactgacccagagcaaattgaagttcgcgaagacttgacctacgtggagaggccagtgaaaatcctggacaccatggagcgcaggaccaggaaccgggtaatccgtttttgcaaggtccagtggagcaaccacgccgaagaagaagctacctgggagcgtgaagacgagctgaaggcagcccatcctgatctcttcgccagttcttccgaatctcggggtcgagattccgtttaa

SEQ ID NO: 23077 - DNA, 5361 bp, Oryza sativa; identical to SEQ ID NO: 14171
  Clone ID: TF_OsC359_5520

SEQ ID NO: 23078 - DNA, 2513 bp, Oryza sativa
  Clone ID: TF_OsC359_5522
atgtcatggcacagggccggtgtcctgctgctaggggctcagtcctgcctgcctgtcccgggggttccggccatggccggcagcgtcacccgtcgcggtttggacatgactggtttcgtcttggagctgcggggcatgtgcgttgtcctggggtatccacatggagtggactaccagggcaggccgcttccggagcaggagggtgacgatggagagccccacgctgcttgggaggtcactgcagtgatcctcgctggctctcccgagcggacttcgctggcagtcaccgcgggtggagattctttccccgccgctagccagagcgccgctctcctcgccatcggcactcttcaccagcgctacccggacgagttgcagcactcgccctaccgctaccaccctcgccgcggaggagcccgcgactacgccaccttccgggatgctagctcggaggatgacgctaccatcgtgcacctggcgcgcatggtggaggcgtacgacgcggctcgtatcgacttccatcagatggtgcgccgtgggatggtcgagaacaacttgaagatcctggagctgcgtcaggagaacctgcagctcaagaaggacctagacgcggtggaggcgcagctgcatcagctcaagatcgcccagggagaggtctgccgccccaagcgtcgccgcgtctgccgcagccagaagatcaccgcccgcaagagcacctccaggcccgagcttgttcgtcagtccctggcgtggacttgcttcgtcgagacccctcgtgccgagcctgcgcccgtggttccccaggagggggaagcctccggcgttggtagcacggaggatgcgctgttgctcaccttccgtcctggcccgtcgcagcggaggagtgctaacaccggtgatggcaaccagcctgaaggaagcaaccaccaccaccagggcagcccacctccacctcctcctccgcctccaccaccaccaccagataccaacgccattctcacccaaatcctcgcccagcaggccaacatgatgactgctttcctccaccacctccaaaatccgccacaacataatgctccaccaccacccccacaacactctaaactcgccgagttcctccgcatccgcccacctaccttctctagctccaataaccccgtggatgcgttggattggttgcatgccgtggggaaaaagctagacactgtgcagtgcagcgatgaggagaaagtcatcttcgccgcccaccagctgcaggggcccgcatctctatggtgggaccatttccaggctacgcagccagaggggcaacctattacatgggcccgtttcaccgccgctttccggagaacccatgtgcccgccggagtcgtggcccttaagaaaagggaattccgagagttgaagcaaggcaaccgctccgtgatggagtatttgcatgagttcaacaacctggcccgttacgccccggaggatgtgcgggaagatgaggagaagcaagagaagttcttggcaggaatggaccctgagctgtccgtccgtctagtctccggggactatccggatttccaacgtctggtggacaaaagcatccgcttggaagccaagcacaaggaactggagtcgcacaagcgccgcttggcgaatttccgcaatcaacagggtgctaaccaaaggatccgctacaccaatccctatccagggggatcttcctcgcagcagcaacaacagcagcagcaacctcgcttcgcgcctcgacctcaattcgtggtgcgcgtcccacagccgcagcagcagcagaatcaacaagggactcgtgcgccccgtcctcctacgccaactgtgcaacctggtcaaggccgcagggacgctcaaggtccgcaacgtctgtgcttcaactgcttcgagcccgggcactttgcggataaatgcccaaagctgaggcgtcagcaaggccaagcgccttcccgctccaacaacggtgagaaggatgtcatttggggtcgggtgaaccacgtgacagccgaggacgtgctgacaactccagacgtcatcgtcgggagttcggagacgtgtttccggaagaactacccggtatgccgcccaaacgagagattgagttccgaatagatcttgctcaagaaaccactcctctgtacaagcgaccctaccgtatggcagcaaatgaactggctgaagttaagaaacagttggaagagttgaaagaaaaggggtatatacgtccgagtacttccccctggggtgctcctgtgatttttgtggagaagaaagacaagacgaagaggatgtgcattgactacagagctctcaatgaagtcaccatcaaaaccaagtaccctcttccccggatcgatgatctgttcgatcagcttaaaggtgccactgtattctccaagatcgatcttcgttccggatatcaccaattacgtattcgtgaagaagatattccgaagaccgcattcaccacgcgatacggattgtatgaattcacg

SEQ ID NO: 23079 - DNA, 1624 bp, Oryza sativa
  Clone ID: TF_OsC359_5526
atgaagatcctggagctgcggcaggagaacctgcagctcaagaaggacctcgacgcggtggaggcgcagctgcatcagctcaagatcgcccagggagaggtctgccgccccaagcgtcgccgcgtctgccgcagccagaagatcaccgcccgcaagagcacctccaggcctgagcttgttcgtcagtccctggcgtggacctgcttcgtcgagacccctcgtgccgagcccgcgcccgtggttccccaggagggggaagcctccggcgttggcagcaaccacaaccaccagggcaacccacctccaccttcttcttccgcctccgccaccaccaccagacaccaacgccattctcacccaaatcctcgcccagcaagccaacatgatgactactttcctccaccacctccaaaatccgccacaacagaatgctccaccaccacctccccaacactctaaactcgccgagttcctccgcatccgcccacctaccttctctagctccaacaaccccgtggatgcgttggattggttgcatgccgtggggaaaaagctggacactgtgcagtgcagtgatgaagagaaagtcatcttcgccgcccaccagctgcagggacccgcatctctatggtgggaccacttccaagctacgcagccagagggacagcctattacatgggctcgcttcaccgccgctttccggagaacccatgtgctcgccggagtcgtggccctcaagaaaagggaattccgagagttgaagcaaggcaaccgctccgtgatggagtatttgcatgagttcaacaacctggcccgttacgccccggaggatgtgcgggaagatgaggagaagcaagagaagttcctggcaggaatggaccccgagctgtccgtccgtctagtctctggggactatccggatttccaacgtctggtggacaagagcatccgcttggaagccaagcacaaggagctggagtcgcacaagcgccgcttggcgaatttccgcaatcaacagggtgctaaccaaagggtccgctacaccaatccctatccagggggatcctcctcgcagcagcaacaacagcagcagcaacctcgctccgcgcctcgacctcaattcgtggtgcgcgtcccacagccgcagcagcagcagaatcaacaagggactcgtgcgccccgtcctcctacgccagccgtgcagcctggtcaaggccacagggacgctcaaggtcagcagcgtctgtgcttcaactgctttgagcccgggcactttgcggataaatgcccgaagccaaggcgtcagcaaggccaagcgcctccccgctccaacaacggtggcaaggacgtcattcggggtcgtgtgaatcacgtgacggccgaggacgtgctgacaactccagacgtcatcgttgagaagaaagacaagacgaagaggatgtgcgtcgactacagagctctcaatgaagtcaccatcaaaaacaacgtgtcaaggcagagcaccaacgaccggccggactcctccaaccactccaagtacccgaatggaaatgggatgaaattgggatggatttcatcaccggacttccaaagacccaaggtggatatgattctatatgggtag

SEQ ID NO: 23080 - DNA, 2359 bp, Oryza sativa
  Clone ID: TF_OsC359_5535
atgtcgtggcagagggttggtgccctgctgcttggggctcagtcctgcctgcctgtcccggagatggccggcagcgtcacccgtcgtggtttggacatgactggcttcgtcttggagctgcggggcatgtgcgtggccctggggtatccacatggagtggactaccaggccaggccgcttccggatcaggagggtgacgacgcggagccccacgctggttgggaggtcaccgcagtgatcctctctggctctcccgagcggacttcgctggcagttaccgcgggtggagattccttccccgccgcttgccagaacgccgctctcctcgccatcggcactcttcaccagcgctacccggacgagttgcagcactcgccctaccgctaccaccctcgtcgcggaggagcccacgactacgccaccttccgggatgctagctcggaggatgacgctaccatcgtgcacctggcgcgcatggtggaggtgtacgacgcggctcgtatcgacttccatcagatggtgcgtcgcgggatggtcgagaacaatctgaagatcctggagctgcgtcaggagaacctgcagctcaagaaggacctagacgcggtggaggcgcagctgcatcagctcaagatcgcccagggagaggtctgccgccccaagcgtcgccgcgtctgccgcagccagaagatcaccgcccgcaagagcacctccaggcccgagcttgttcgtcagtccctggcgtggacttgcttcgtcgagacccctcgtgccgagcccgcgcccgtggttccccaggagggggaagcctccggcattggtagcacggaggctctttctctgtttgctggttctgtgtggggttttcagatggtgacgaccaggagaaatgctgccaccggtgatggcaaccaacccgaaggcagcaaccacaaccatcagggcaacccacctccacctcctcctccgcctccaccaccaccaccagacaccaacgccattctcacccaaatcctcgcccagcaagccaacatgatgactgctttcctccaccacctccaaaatccaccacaacataatgctccaccaccacccccacaacactctaaactcgccgagttcctccgtatccgcccacctaccttctctagctccaacaaccccgtggatgcgttggattggtttcatgccgtggggaaaaagctagacacggtgcagtgcagcgatgaggagaaagttatcttcgccgcccaccaactgcaggggcccgcatctctatggtgggaccatttccaggctacgcagccagaggggcagcctattacttgggcccgcttcaccgccgctttccggagaacccatgtgcccgccggagtcgtggcccttaagaaaagggaattccgagagttgaagcaaggcaaccgctccgtgatggagtatttgcatgagttcaacaacctagcccgttacgccccggaggatgtgcgggaagatgaggagaagcaagaaaagttcttggcaggaatggaccctgaactgtccgtccgtctagtctctggggactatccggattttcaacgattggtggacaagagcatccgcttggaagccaagcacaaggagctggagtcgcacaagcgccgcttggcgaatttccgcaatcaacagggtgctaatcaaaggggccgctacaccaatccctatccagggggatcctcctcgcagcagcaacaacagcagcagcaacctcgccccgcgccccgacctcaattcgtggtgcgcttcccacagccgcagcaacagcagaatcaacaagggactcgtgcgccccgtcctcctacgccaacggtgcagcctggtcaaggccgcagggacgctcaaggtcagcagcgtctgtgcttcaactgcttcgagcccgggcactttgcggataaatgcccaaagccaaggcgtcagcaaggccaagcgcctccccgctccaacaacggcgggaaggatgtcattcggggtcgtgtgaatcacgtgacggccgaggacgtgctgacaactccagacgtcatcgttgggagttcggagatgtgtttccggaagaactacccggtatgccgcccaagcgagagattgagttccggatagatcttgctccaggaaccactcctttgtacaagcgaccctaccgtatggcagcaaatgaactggccgaagtcaagaaacatcgggatacctggcgggcagctggattaaatgaatcgcgcaacccccggggagaggcggtttggtattggggccttttccgcttcctcgaaaactacaatttgtccacaaggccccctcaagggtcgcgcaacctcaacaaggccgc

SEQ ID NO: 23081 - DNA, 3960 bp, Oryza sativa; identical to SEQ ID NO: 14114
  Clone ID: TF_OsC359_5541

SEQ ID NO: 23082 - DNA, 3205 bp, Oryza sativa
  Clone ID: TF_OsC359_5556
atggcggccggatcttccgcggccgagtccccctcatccggccgctctctccccctcccaacactatacaaaaactccccgtgcctccctccaccgtttccgccactcgccgctctctctccccgtcggattcgagctcgcgccgtcgccttctctctccgccgtcgccgccgagctccggtccgccgccgtcgtcgccccggacctcctcccgcttcggcatcgcctccttcggcttcgccacgtcctcgccgacctcgtccactcctccgtttcgcccgccgaccgccggaacaccgccgtcctcgtcaacccgagccgcgccgccgccttcctccgctccggtcgtcgtttccgccgtcctcgtcgacccggggtgagccgtggaccgaccctttcgcttcccccttccctcccctctctcgggcgccgctccgccgcgtcggtggtcgccggcggcgaccatcggggcgcgggcgcgccgcctcccgtcggccgtgccggcgaggtcaccttcgggcgcgccccgtggctgccatgtggggcccggccgtcagccgcccgcgcccgcgggtgcggctgacgcgtgggacccacggcgccggccggcgcaagccgcgtgctcccggtccaccgtggacccacctcggccatataaggaccggtcttcgggcctctgttgcaaagcactaccgtacttccacatgtctagtggggcaaatgaaggctacacgagctgcggcccggtagtcgagatgtcatggcacagggccggtgtcctgctgctaggggctcagtcctgcctgcctgtcccggaggttccggccgtaggtgggattgggtcgatgtacacctctgatcagagtataatctattcgaatagccgcgccctcggttatgggcaagccgagcaatgtacccaaatggccggcagcgtcacccgtcgtggtttggacatgactggcttcgtcttggagctgcggggtatgtgcgttgtcctggggtatccacatggagtggactaccaggccaggccgcttccggagcaggagggtgacgacgcagagccccacgctggttgggaggtcactgcagtgatcctcgctggctctcccgagcggacttcgctggcagtcaccgcgggtggagattccttccccgccgcttgcaaaacgccgcttttctcgccatcggcactcttcaccagcgctacccggacgagttgcagcactcgccctaccgctaccaccctcgtcgcggaggagcccgcgactacgccaccttccgggatgctagctcggaggatgacgctaccatcatgcacctggcgcgcatggtggaggcgtacgacgcggctcgtatcgacttccatcagatggtgcgccgtgggatggtcgagaacaacatgaagatcctggagctgcgtcaggagaacctgcagctcaagaaggacctagacgcggtggaggcgcagctgcatcagctcaagatcgcccagggagaggtctgccgccccaagcgtcgccgcgtctgccgcagccagaagatcaccgcccgcaagagcacctccaggcccgagcttgttcgtcagtccctggcgtggacttgcttcgtcgagacccctcgtgccgagcccgcgcccgtggttcctcaggagggggaagcctccggcgttggtagcacggaggatgcgctgttgctcaccttccgtcctggcccgtcgcagcggagaagtgctgccaccggtgatggcaaccaacctgaaggcagcaaccaccaccagggcagcccacctccacctcctcctccgcctccaccaccaccgccagataccaacgccattctcacccaaatcctcgcccagcaggccaacatgatgactgctttcctccaccacctccaaaatccgccacaacataatgctccaccaccacctccccaacactctaaactcgccgagttcctccgcatccgcccacctaccttctctagctccaacaaccccgtggatgcgttggattggttgcatgccgtgggaaaaaagctagacactgtgcagtgcagcgatgaggagaaagtcatcttcgccgcccaccagctgcaggggcccgcatctctatggtgggaccatttccaggctacgcagccagaggggcagcctattacttgggcccgtttcaccgccgctttccggaggacccatgtgcccgccggagtcgtggcccttaagaaaagagaattccgagagttgaagcaaggcaaccgctccgtgatggagtatttgcatgagttcaacaacctggcccgttacgccccggaggatgtgcgggaagatgaggagaagcaagagaagttcttggcaggaatggaccctgagctgtccgtccgtctagtctccggggactatctggatttccaacgtctggtggacaaaagcatccgcttggaagccaagcacaaggaactggagtcgcacaagcgccgcttggcgaatttccgcaatcaacagggtgctaaccaaagggtccgctacaccaatccctatccagggggatcctcctcgcagcagcaacaacagcagcagcaacctcgctccgcgcctcgacctcaattcgtggtgcgcgtcccacagccgcagcagcagcagaatcaacaagggactcgtgcgccccgtcctcctacgccaactgtgcagcctggtcaaggccgcagggacgctcaaggtccgcagcgtctgtgcttcaactgcttcgagcccgggcactttgcggataaatgcccaaagccgaggcgtcagcaaggccaagcgcctccccgctccaacaacggtgggaaggatgtcattcggggtcgggtgaaccacgtgacggccgaggacgtgctgacaactccagacgtcatcgttggtacgttcctcattcattccatccctgctaccattctgttcgactctggagcttcccactcgtttatgtctgtgccattcgtggggagaaatcagttgggggtagaaaggcttaggaaccctctgctcatcaccacccctggaggggttatgacagcaaacgtgtcaaggcagagcaccaacgaccggccggacttctccaacctctccaagtaccagaatggaaatgggatgaaattgggatggatttcatcaccggacttccaaaaacccaaggttgatatgattctatatgggtag

SEQ ID NO: 23083 - DNA, 6041 bp, Oryza sativa; identical to SEQ ID NO: 14243
  Clone ID: TF_OsC359_5558

SEQ ID NO: 23084 - DNA, 3547 bp, Oryza sativa
  Clone ID: TF_OsC359_5560
aaagggttttataaaaagaaaaatccctaaaagtcttttccccctccccttttcccttcttgggccggctcggcccagtccctccctctctctctctcttcccccgcggcccattggcctcccccgcgcgcgcgcgccgctgacaggcgggcccgcccgccgccctcgctgacgggtgggtcccacctgtcatccctgtcctcgcgccgcgcccgccgccgcccgtgccctagcgccgccgccgccgcggattccgccgcatcccgccgtccccgcgcgcattaaagagggggaaatcactccccgtgattccctctcccgtttccccctcttttccctctctctctccctcggattcgtccgatttgaatcccgcaatcgtcgccggcgtcttcaatggagccgagatctccgcggccgattcctccctctccggccgcgctctccccctcccggcgctatatatttgctccccgtgccttcctcctccgtttccgccgttcgccgcttgctctcgccgtcggattcgtgctcgcgacgtccacctctctctccgccgtcgccgccgacctccggtacgccgccgacgtcgctccgggctccctcccgactcggcgtcacctccatccgcttcgccgcgtcgtcgtccaccccgtccgccccttcgcttcgcccgccgaccgccggagctccgtcgccctcgtcatcccgaaccgcgccgccgtcttcctccgcttcggtcgccgttgccgtcgccgccgtcgacccggggtgagccgaaggccgtcgcttcgcttccctcttctctcctctctctcgggcgccgctccgccgcgccggtggtcgccggcggtgaccatcggggcgcgggtgcgccgcctcccgtcggccgtgccggcgaggccgccttcgggcgcgccccgcggctgccaggtggggcccggccgtcagccgcccgcgcccgcgggtgcggctgacgcgtgggacccacggcgccgaccgccgccagccgcgtgctcccggtccaccgtggacccacctcggccgtttaaggaccggtcttcgggcctctgttgcaaagcactaccgtacttccacatgtctagtggggcaaatgaaggctacacgagctgcggcccggtagtcgagatgtcatggcagagggttggtgccctgctgctaggggctcagtcctgcctgcctgtcccgggggttccggccgtaggcgggattgggtcgatgtacacctctaatcagagtataatctattcgaatagccgcgccctcggttatgggcaagccgagcaatgtacccaaatggccggcagcgtcacccgtcgtggtttggacatgactggcttcgttttggagctgcggggcatgtgcgtggtcttggggtatccacatggagtggattaccaggccaggccgctcccggagcaggagggtgaggatgcagagccccacgctggttgggaggtcactgcagtgatcctctctggctctcccgggcggacttcgctggcagtcaccgcgggtggagattccttccccgccgcttgccagaacgccgctctcctcgccatcggcacccttcaccagcgctacccggacgagttgcagcactcgccctaccgctaccaccctcgtcgcggaggagcccgcgacttcgccaccttccgagatgctagctcggaggatgacgctaccatcgtgcacctggcacgcatggtggaggcatacgacgcagctcgtatcgacttccatcagatggtgcgccgtgggatggtcgagaataacatgaagatcctggagctgcggcaggagaacctgcagctcaagaaggacctcgacgcagtggaggcgcagctgcaccagctcaagatcgcccagggagaggactgccgccccaagcgtcgccgcgtctgccgcagccagaagatcaccgcccgcaagagcacctccaggcctgagcttgttcgtcagtccctggcgtggacttgcttcgtcgagacccctcgtgtcgagcctgtgcccgtggttccccaggagggggaagcctccggcgttggtagcacggaggatgcgccgttgctcaccttccatggtgacgaccagaagaaatgttaacaccggtgatggcaaccaacccgaaggcagcaaccacaaccaccaaggcaatccacctccacctcctcctccgcctccaccaccaccaccagacaccaacgccattctcacccagatcctcgcccagcaagccaacatgatgactgctttcctccaccacctccaaaatccgtcacaacagaacgctccaccaccacctccacaacactctaaactcgccgagttcctccgcatccgcccacccaccttctctagctccaacaaccccgtggatgcgttggattggttgcatgccgtggggaaaaagttagacacggtgcagtgcagtgatgaagagaaagtcatcttcgccgcccaccaactgcaggggcccgcatctttatggtgggaccacttccaagctacgcagccagaggggcaacctatcacttgggctcgcttcaccgccgctttccggagaacccatgtgcccgccggagtcgtggctcttaagaagagggagttccgagagttgaagcaaggcaaccgctccgtgatggagtatttgcatgagttcaacaatctggcccggtacgctccggaggatgtgcgggaagatgaggagaagcaagagaagttcttggcgggaatggaccctgaactgtccgttcgtctagtttctggggactacccggacttccaacgtctggtggacaagagcatccgcttggaggccaagcacaaggaactggagtcgcacaagcgccgcttggcgagtttccgcaatcaacagggtgctaaccaaagggtccgctacaccaatccctatccagggggatcctcctcacagcagcaacaacagcagcagcaacctcgctccgcgcctcgacctcaattcgtggtgcgcgtcccacagccgcagcagcagcagaatcaacaagggactcgtgcgccccgtcctcctacgccggctgtgcagcccgttcaaggccgcagggacgctcaaggtccgcagcgtctgtgcttcaactgctttgagcccgggcactttgcggataaatgcccaaagccaaggcgtcagcaaggccaagcgcctccccgccccaacaacggtggcaaggacgtcattcggggtcgtgtgaaccacgtgacggccgaggacgtgctgacaactccaaacgtcattgttggtacgttcctcattcattccatccctgctactattctgttcgactctggagcttcccactcatttatatctgtgccattcgtggggaaaaatcagttgggggtagaaaggcttagaaaaccctctgctcatcaccacccctggaggggttatgacagcaaagtattatagccctgccgttcctatagaaattcaggggattccttttccctcggatctgattctgctaaataccaacaacttggatgt

SEQ ID NO: 23085 - DNA, 5991 bp, Oryza sativa
  Clone ID: TF_OsC359_5596
atggagcccgagagcgccgcgccggtttccttctcctccggccgccctctctcactcccaaccctatataaaccatccccgtgcctccctcctccgtttccgccgctcgccgctctctctccccgtcggaatcgagctcgcgccgtcgccctctctctccgccgccgccgccgagctccggtctgccgccgtcgtcgccccggaccttctcccgtttcggcgtcgccttcttcgggttcgccgcaacatcgccgacctcgtccacccctccgtttcgcccgccgaccgccggaacgccgccgtcctcgtcgacccgagccgcgccgccgcctttttccgctccggtcgccgttcccgtcgtcgccgtcgacccggggtgagccgtggaccgcccatttcgtttcccccttccctcccctctctcggccgccgctccgccgtgcctatggccgccgccggcgaccataggggcgcgggcgcgccgcctcccgtcggctgtgccggcgaggccgccttcgggcgcgccccgcggctgccatgtggggcccggccgtcagccgcccgcgcctcgggtacggctgacgcgtgggacccacggcgccggccggcgtaagccgcgtgcacccgttccaccgtggacccacctcggccatataaggaccggtcttcgggcctctgttgcaaagcactaccgtacttccacatgtctagtggggcaaatgaaggctacacgagctgcggcccggtagtcgagatgtcatggcacagggccggtgtcctgctgctaggggctcagtcctgcctacctgtcccgggggttccggccgtaggtgggattgggtcgatgtacacctctgatcagagtataatctattcgaatagccgcgccctcggttatgggcaagccgagcaatgtacccaaatggccggcagcgtcacccgtcgtggtttggacatgactggcttcgtcttggagctgcggggcatgtgcgtggtcctggggtatccgcatggagtggactaccaggccaggccgcttccgaagcaggagggtgacgatgcagagccccacgctgcttgggaggtcactgcagtgatcctcgctggctctcccgagcggacttcgctggcagtcaccgcgggtggagattctttccccgccgcttgccagaacgccgctctcctcgccatcggcactcttcaccagcgctacccggacgagttgcagcactcgccctaccgctaccaccctcaccgcggaggagcccgcgactacgccaccttccgggatgctagctcggaggacgacgctaccatcgtgcacctggcgcgcatggtggaggcgtacgacgcggctcgtatcgacttccatcagatggtgcgccgtgggatggtcgagaacaacctgaagatcctggagctgcgtcaggagaacctgcagctcaagaaggacctagacgcggtggaggcgcagctgcatcagctcaagatcgcccagggagaggtctgccgccccaagcgtcgccgtgtctgccgcagccagaagatcaccgcccgcaagagcacctccaggcccgagcttgttcgtcagtccctggcgtggacctgcttcgtggagacccctcgtgccgagcccgcgcctgtggttccccaggagggggaagcctccggcgttggtagcacggaggatgcgctgttgctcaccttccatggtgacgaccaggagaagtgctaatgccggtgatggcaaccaacctgaaggcagcaaccgcaaccaccatggcagcccacctccacctcctcctccgcctccaccaccaccaccagataccaacgccattctcacccaaatcctcgcccagcaggccaacatgatgactgctttcctccaccacctccaaaatccgccacaacagaatgctccaccaccacccccgcaacactctaaactcgccgagttcctccgcatccgcccacccaccttctctagctccaacaaccccgtggatgcgttggattggttgcatgccgtggggaaaaagctagacactgtgcagtgcagcgatgaggagaaagtcatcttcgccgcccaccaactgcaggggcccgcatctctatggtgggaccatttccaggctacgcagccagaggggcagcctattacttgggcccgtttcaccgccgctttccggagaacccatgtgcccgccggagtcgtggctcttaaaaaaagggaattctgagagttgaagcaaggcaaccgctccgtgatggagtatttgcatgagttcaacaacctggcccgttacgccccggaggatgtgcgggaagatgaggagaagcaagagaagttcttggcaggaatggaccctgagctgtccgtccgtctagtctccggggactatccggatttccaacgtctggtggacaagagcatccgcttggaagccaagcacaaggaactggagtcgcacaagcgccgcttggcgaatttccgcaatcaacagggtgctaaccaaagggtccgctacaccaatccctatccagggggatcctcctcgcagcagcaacaacagcagcagcaacctcgctccgtgcctcgacctcaatacgtggtgcgcgtcccacagccgcagcagcagcagagtcagcaagggactcgtgcgccccgtcctcctacgccagccgtgcagtctggtcaaggctgcagggacgctcaaggtcagcagcgtctgtgcttcaactgcttcgagcccgggcactttgcggataaatgcccgaaaccgaggcgccagcaaggccaagcgcctccccgctccaacaacggtgggaaggatgtcattcagggtcgtgtgaaccacgtgacggccgaggacgtgctgacaactccagacgtcatcgttggtacgttcctcattcattccatccctgctaccattttgttcgactctggagcttcccactcgtttatatctgtgccattcgtggggagaaatcagttgggggtagaaaggcttagaaaccctctgctcatcaccacccctggaggggttatgacagcaaagtattatagtcctgccgtccctatagaaattcaggggattccttttccctcggacctgattctgctagacaccaagaacttggatgtgatccttggaatgaattggttggctcaatttcaaggagtagtggattgcgcgagacgcactgttactctgtaccgaggaccggaacaaccggttgttttctttgcacccccaacctctgtcagtagttcagaacttcatcagataggactgtcagaaatccccatcgtcagagagttcggagatgtgtttccggaagaactacccggtatgccgcccaagcgagagattgagttccggatagatcttgctccaggaaccactcctctgtacaagcgaccctaccgtatggcagcaaatgaactggccgaagttaagaaacagttggaagagttgaaagagaaggggtatatacgtccgagtacttccccctggggcgctcctgtgatttttgtggagaagaaggacaagacgaagaggaggtgcgtcgactacagagccctcaatgaagtcaccatcaaaaacaagtaccctcttccccggatcgatgacctgttcgatcagcttaaaggtgccacggtattctccaagattgatcttcgttccggatatcaccagttgcgcatccgcgaagaagatattccgaagaccgcattcaccacgcgatacggactgtatgaattcacggtgatgtcgttcggtttaaccaatgcacctgccttcttcatgaacttaatgaacaaagtgttcatggaatacttggataagtttgttgtggttttcattgacgacattctgatatactcacaatcagaggaagaccatcagcaccatctccgtctggtgttgggaaagttgcgggaacatcaattgtatgccaaacttagcaagtgtgagttctggttgtccgaagtcaaattcttagggcacgtgatatctgctaaaggagttgctgtggaccccgaaacagtgaccgccgtcactgattggaagcaacccaagaccgtcactcaagtccgcagtttcttaggtttggcaggatactaccggaggttcatcgagaacttctccaaaatcgctcgacccatgacacagttgttgaagaaagaagagaaatttgtgtggagcccgcaatgcgagaaggcgtttcaaactctcaaagaaaagctggtttcctcgccagtgttagtcttgccagatactcgcaaggatttcatggtgtattgtgacgcttcgcgccaaggattggggtgcgtgctcatgcaggacggtcatgtggtggcctatgcctcacgccagctacgacctcatgaaggcaactaccctacccatgatttggagttagccgcggtggttcatgctctaaaaatctggcggcactatcttattgggaatcgctgtgaaatatataccgatcataagagtttgaaatacatcttcacccagtcggatctgaatcttcggcagaggagatggttagaactcatcaaggattatgatgtgggaattcactatcatcctggtaaggccaacgtggtcgccgacgctctgagtcgaaaaagccattgcaacactcttaacgtccgtggcattccacccgaacttaatcaacagatggaagccctgaaccttggcatagttagtcgtggattcttggctgcgttggaagccaaacctaccttgctcgatcaaatccgcgaggctcagaagaacgacccggacatgcatggactcctcaagaatatgaaacagggtaaagccgctggtttcacagaggatgaacacgggaccctatggaatggaaatcggcgtgtcaaggcagagcaccagcgaccggccggacttctccaacctctccaagtaccagaatggaaatgggatgaaattgggatggatttcatcaccggacttccaaaaacccaaggtggatatgattctatatgggtagttgtggatcgattaaccaaggtagctcgatttattcctgtgaagaccacctatggagggaacaaactagccgaactctacttcgctaggatcgtgagtcttcatggcgttcccaagaaaatcgtatctgataggggaagccaattcacctctcacttttggaagaagctccaagaagagctgggtaaatcagatcctagaagatatgcttcgcgcatgtgtcctagattttgggaagacctgggataagagtctcccctatgccgagttctcctacaataacagctaccaggccagtatacaaatggcaccttatgaagcgttgtacgggcgcaaatgccggacaccgctattgtgggaccaagttggggaaagccaagtgttcgggactgatatcctgagggaagctgaagctaaagtcagaaccattcgggataatctaaaagtggcacagtcccggcagaaaagttatgcagataaccgtcgccgtgacctggaattcgcagtgggtgactttgtgtatcttcgggtcacgccattgcgaggtgtacacaggtttcagacaaaagggaagctcgcacctcggtatgtgggtcctttccgtatcattgctcggcgcggagaagtcgcttaccagttggagctgcccgcctccttgggcaacgtgcatgatgtgttccatgtgtcgcaactcaagaaatgtctccgagtgccatccgagcaggccgactcagcgcaaattgaagttcgcgaagacttgacctacgtggagaggccagtgaaaatcctggacaccatggagcgcaggaccaggaaccgggtaatccgtttttgcaaggtccaatggagcaaccacgccgaggaagaagctacctgggagcgtgaagacgagctgaaggcggcccatcccgatctcttcgccagttcttccgaatctcggggtcgagattccgtt

SEQ ID NO: 23086 - DNA, 5337 bp, Oryza sativa; identical to SEQ ID NO: 14287
  Clone ID: TF_OsC359_5714

SEQ ID NO: 23087 - DNA, 2017 bp, Oryza sativa
  Clone ID: TF_OsC359_5748
caaatactcgcccagcaggccaacatgatggctgctttcctccaccacatccagaatctgccgcaaaacaatgctccacctccaccaccacccccacagcactctaagcttgccgagttcctccgcatccgcccgcctaccttctctagctcccataaccccattgatgctttggactggttgcatgccgtggggaaaaagttggacaccgtacagtgcaatgatgaggagaaagtcatcttcgccgctcaccaactgcaggggcccgcatctctatggtgggaccacttccaggctacgcagccagagggacagcctatcacctgggcccgtttcactgccgccttccggaggacccatgtgcccgccggagtcatggcccttaagaagagggaatttcgggagttgaaacaaggcaaccgctccgtgatggagtatttgcacgagttcaataatttggcccggtacgccccagaggatgttcgtgaagatgaggagaagcaggagaaattcctggcagggatgaaccctgagctgtctgtgcgtctggtctccggggactatcctgatttccagcgcctggtggacaagagcatccgcctggaagccaagcaaaaggaattggagtcgcacaagcgtcgcttggcgaatttccgcaaccaacgggggctaaccaaaggatccgctacaccaatccttatccaaggggatcctcctcgcagcagcagcaacagcaacctcgctccgcgcccttacctcaattcgtgcctggacaaggccacagggatgctcaaggtcaacagcgtctgtgcttcaactgcttcgagcccgggcactttgcggataaatgcccaaagccgaggcgccagcaaggccaagcgcctccccgccccaacaacggtggtaaggatgtcattcggggccgtgtgaaccacgtgactgccgaggatgtgttgacaactccagacgtcatcgttggtacgttcctcattcattccatccctgctaccattttgttcgactctagagcttcccactcgtttatttctgtgccattcgtggggagaaatcagctgggggtagaaaggcttatgaaccctctgctcatcaccacccctggaggtgttatgacaacaaagtattatagccctgccgttcctatagaaatccaaggaattcctttcccctcggatttgatacttctagacaccaagaacttgatgtgatcctcgggatgaattggttggctcaattccaaggagtagtggattgcgcaaggcgcactgtcactctgtatcggggccctgatcaaccggttgttttctttgcacccccaacttccgccggcagttcagtacttcattagctaggattgccagaaatacccatcgtcaatgagttcggagatgtgtttccagaagagctacccggtatgccgcccaagcgagagattgagttccggatagatcttgctccaggaaccactcctttatacaagcgaccctaccgtatggcagcaaataaactagccgaagtcaagaaacagttggaagagttgaaagaaaagggatatatacggccgagcacttccccctggggtgctcccgtgatttttgtggagaagaaagacaagacaaagaggatgtgcgttgactacagagctctcaatgaagttactataaaaaacaagtaccctcttccccggatcgatgatctgttcgatcaacttaaaggtgccactgtattctccaagattgatcttcgttccggatatcaccagttgcgcatccgtgaaaaagatatcccgaagaccgcattcaccacgctatacggactatatgaattcacggtgatgtcgttcggtctgaccaatgcttctgccttcttcatgaacttaatgaacaaagtgttcatggaatacctggataagtttgttgtggtctttattgacgacatactggtgtactcacaatcagaggaagaccatcagcatggctgccgcgtggggcccggccgt

SEQ ID NO: 23088 - DNA, 5109 bp, Oryza sativa
  Clone ID: TF_OsC359_5749
atggacatctctagggcaaatgaaggctacacgagctgcggcccggtagtcgagatgtcatggcacagggccggtgtcctgctgctaggggctcagtcctgcctacctgtcccggagattccggccgtaggtgggattgggtcggtactcttgtctatggctaggatgggttggaaactatgtcacgtcttccgtctgtataccgtggtgatggccggcagcatcaaccgtcgtggtctggacctgactggctttgttttggagctgcggggcatgtgtgttgtcctggggtatccgcatggagtggactaccagggcaggcagctcccggagcaggagggtgacgatgcagagccccacgctgcttgggaggttactgcagtgatcctcactggctctcccgagaggacttcgttggcagtcaccgcgggtggagattctttctccgccgcttgccagaacgccgctctcctcgccatcggcactcttcaccagcgctacccggacgagttgcagcactcgccctaccgctaccaccctcgccgcggaggagcccgcgaccacgccacctttcgggatgctagctcggaggatgacgctaccatcatgcatctggcgcgcatggtggaggcgtacgacgcggcccgtatcgacttccatcagatggtgcgccgtgggatggtcgagaacagcatgaagatcctggagctgcgtcaggagaatctgcagctgaagaaggacctagacgcagtggaggcgcagctgcatcagctcaagatcgcccagggagaggtctgtcgccccaagcgtcgccgcgtctgccgcagccagaagatcaccgcccgcaagagtacctccaggcccgagcttgttcgccagtccttggcatggacctgcttcgtcgagacccctcgtgccgagcccgcgcccgtggttcctcaggagggggaagcctcaggcgttggtagcacggaggatgcgctgttgctcaccttccgtcctggcccgtcgcagcggagaagtgctaacaccggtgatggcaaccaacctgaaggcagcaaccacaacaaccatggcagcccacctccacctcctcctccgcctccaccaccaccactagacaccaatgccatcctcacccaaatcctagcccagcaggccaacatgatggctgctttcctccaccacatccaaaatccgccacaacataatgctccaccaccacccccacaacactctaaactcgccgagttcctccgcatccgtccacctaccttctctagctccaataaccccgtggatgcattggattggttgcatgccgtggggaaaaagttagacaccgtgcagtgcagcgatgaggagaaagtcgtcttcgccgcccaccagctgcaggggcccgcatctctatggtgggaccatttccaggctacgcagccagaggggcagcctattacttgggcccgcttcaccgccgccttccggaggacccatgtgcccgccggagtcatggcccttaagaaaagggaattccgagagttgaagcaaggcaaccgctccgtgatggagtatttgcatgagtttaacaacctggcccggtacgccccggaggatgtacgggaagatgaggaaaagcaggagaagttcttggcaggaatggaccctgagctgtccgtgcgtctagtctccgggggatcgtcctcgcagcagcaacagcagcaacaacctcgctccgcgccccgacctcaattcgtggtgcgcatcccacagccgcaacaacagcagagtcagcaagggacccgtgcgccccgtcctcctacgacagccgcgcagtctggtcaaggccgcagggacgttcaaggtccgcagcgtctgtgcttcaattgcttcgagcctgggcactttgcggataaatgcccaaagccgaggcgccagcaaggccaagcgcctccccgctccaacaacggtggtaaggatgtcattcggggtcgtgtgaaccacgtgacggccgaggacgtgctgacaactccagacgtcatcgttggtacgttcctcattcattccatccctgctaccattttgttcgactctggagcttcccactcgtttatatctgtgccattcgtggggagaaatcagttgggggtagaaaggcttaggaaccctccgctcatcaccacccctggaggggttatgacagcaaagtattatagccctgctgttcctatagaaattcagggaattccttttccttcggatctgattcttctagacaccaagaacttggatgtgatccttgggatgaattggttggctcaattccaaggagtagtggattgcgcgagacgcactgtcactctgtaccgagggccggaacaaccggttgttttctttgcacccccaacctctgtcagtagtttagaacttcatcagataggactgtcagaaatccccatcgtcaaagagttcggagacgtgtttccggaagaactacccggtatgccgcccaagcgagagattgagttccggatagatcttgctccaggaaccactcctctgtacaagcgaccctaccgtatggcagcaaatgaactggccgaagttaagaaacagttggaagagttgaaagaaaaggggtatatacgtccgagtacttccccctggggtgctcctgtgatttttgtggagaagaaagacaagacgaagaggatgtgcgttgactacagagctctcaatgaagtcaccatcaaaaacaagtaccctcttccccggatcgatgatctgttcaatcagcttaaaggtgccacggtattctccaagattgatcttcgttccggatatcaccagttgcgcatccgtgaagaagatattccgaagaccgcattcaccacgcgatacggactgtatgaattcacggtgatgtcgttcggtttaaccaatgctcctgccttcttcatgaacttaatgaacaaagtgttcatggaatacttggataagtttgttgtagttttcattgatgacattatggtatactcacaatcagaggaagaccatcagcaccatctccgtctggtgttgggaaagttgcgggaacatcaattgtatgccaaacttagcaagtgcgagttctggttgtccgaagtcaaattcttagggcacgtgatatctgctaaaggagttgctgtggaccccgaaacagtgaccgccgtcaccgattggaagcaacccaagacagtcactcaaattcgcagtttcttaggtttggctggatactaccggaggttcatcgagaacttctccaaaatcgctcgacccatgacacagttgttgaagaaagaagagaaatttgtgtggagcccgcaatgcgagaaggcgttccaaactctcaaagaaaagctggaaggtcatgtggtggcctatgcctcacgccagctacggccccatgaaggcaattaccctacccatgatttggagttagccgctgtggttcatgctctaaagatctggcggcactacctcattgggaatcgctgtgaaatatatactgatcataagagtttgaaatacatcttcacccagtcggatctgaatcttcggcagaggagatggttagaactcatcaaggattatgatgtgggaattcactatcatcctggtaaggccaacgtggtagccgacgctctaagtcgaaaaagccattgcaacactcttgtcgtccgtggcattccacccgaacttaatcaacagatggaagccctgaatctaagcatagttagtcgtggattcttggctacgctggaagccaagccttccttgctcgatcaaatccgcgaggctcagaagaacgatccggacatgcgtggactcctcaagaatatgaaacagggtaaagccgctggtttcacagaggatgaacacggaaccctatggaacggaaatcgggtatgcgttccagatgtcagagaacttaaacagctgatacttcaggaagctcacgagagtccttattccatccaccctggcagcacgaagatgtacttagacttgaaagagaaatactggtgggttagtatgaagcgggaaattgcagagttcgtggccctttgtgacgtgtgccagcgtgtcaaggcagagcaccaacgaccggccggacttctccaacctctccaagtaccagaatggaaatgggatgaaattgggatggatttcatcaccggacttccaaaaacccaaggtggatatgattctatatgggtagttgtggaccgattaaccaaggtagctcggtttattcctgtgaaaaccacctatggagggaacaaactagccgagctctacttcgctaggatcgtgagtctccatggcgttcctaagaaaattgtatctgataggggaagccaattcacctctcacttttggaagaagctccaagaagagctgggtacccgattaaatttcagcaccgcgtatcacccgcagacagatggacagaccgagcgtctaaatcagatcctagaagatatgcttcgcgcatgtgtcctagatttcgggaagacctgggataagagtctcacctatgccgagttctcctacaataacagctatcaagccagcatacaaatggcaccctatgaagcgttgtatggacgcaaatgccggacaccgctattgtgggaccaagttggggaaagccaagtgttcgggactgatatcctgagagaagctgaagctaaagtcagaaccattcgggataatctaaaggtggcccagtctcggcagaagagttatgcagacaaccgacgccgtgacctggaattcgcagtggatgactttgtgtatcttcgggtcacgccattgcgaggtgtacacaggtttcagacgaaagggaagctcgcacctcggttcgtgggtcctttccgcatcattgctcgacgcggagaagttgcttaccagttggagctgcccgcctccttgggcaacgtgcatgatgtgttccatgtgtcgcaactcaagaaatgtcttcgagtgccatccgagcaggccgactcagagtccaatggagcaaccacgccgaggaagaagctacctgggagcgtgaagacgagctga

SEQ ID NO: 23089 - DNA, 4995 bp, Oryza sativa
  Clone ID: TF_OsC359_5759
atggacatctctagggcaaatgaaggctacacgagctgcggcccgatggccggcagcatcaaccgtcgtggtctggacctgactggctttgttttggagctgcggggcatgtgtgttgtcctggggtatccgcatggagtggactaccagggcaggcagctcccggagcaggagggtgacgatgcagagccccacgctgcttgggaggttactgcagtgatcctcactggctctcccgagaggacttcgttggcagtcaccgcgggtggagattctttctccgccgcttgccagaacgccgctctcctcgccatcggcactcttcaccagcgctacccggacgagttgcagcactcgccctaccgctaccaccctcgccgcggaggagcccgcgaccacgccacctttcgggatgctagctcggaggatgacgctaccatcatgcatctggcgcgcatggtggaggcgtacgacgcggcccgtatcgacttccatcagatggtgcgccgtgggatggtcgagaacagcatgaagatcctggagctgcgtcaggagaatctgcagctgaagaaggacctagacgcagtggaggcgcagctgcatcagctcaagatcgcccagggagagatggtgacgaccaggagaagtgctaacaccggtgatggcaaccaacctgaaggcagcaaccacaacaaccatggcagcccacctccacctcctcctccgcctccaccaccaccactagacaccaatgccatcctcacccaaatcctagcccagcaggccaacatgatggctgctttcctccaccacatccaaaatccgccacaacataatgctccaccaccacccccacaacactctaaactcgccgagttcctccgcatccgtccacctaccttctctagctccaataaccccgtggatgcattggattggttgcatgccgtggggaaaaagttagacaccgtgcagtgcagcgatgaggagaaagtcgtcttcgccgcccaccagctgcaggggcccgcatctctatggtgggaccatttccaggctacgcagccagaggggcagcctattacttgggcccgcttcaccgccgccttccggaggacccatgtgcccgccggagtcatggcccttaagaaaagggaattccgagagttgaagcaaggcaaccgctccgtgatggagtatttgcatgagtttaacaacctggcccggtacgccccggaggatgtacgggaagatgaggaaaagcaggagaagttcttggcaggaatggaccctgagctgtccgtgcgtctagtctccggtgactatccggatttccaacgtctggtggacaagagcatccgcttggaagccaagcacaaggaactggagtcgcacaagcgccgcttggcgaatttccgcaatcaacagggagctaaccaaaggatccgctacaccaatccctatccagggggatcgtcctcgcaacagcaacagcagcagcaacctcgctccgcgccccgacctcaattcgtggtgcgcgtcccacagccgcagcaacagcagagccagcaagggacccgtgcgccccgtcctcctacgccagccgcgcagtctggtcaaggccgcagggacgttcaaggtccgcagcgtctgtgcttcaactgcttcgagcctgggcactttgcggataaatgcccaaagccgaggcgccagcaaggccaagcgcctccccgctcaaacaacggtggtaaggatgtcattcggggtcgtgtgaaccacgtgacggccgaggacgtgctgacgactccagacgtcatcgttggtacgttcctcattcattccatccctgctaccattttgttcgactctggagcttcccactcgtttatatctgtgccattcgtggggagaaatcagttgggggtagaaaggtttaggaaccctctcctcatcaccacccctggaggggttatgacagcaaagtattatagtcctgccgtccctatagaaattcaggggatcccttttccctcggatctgattcttctagacaccaagaacttggatgtgatccttgggatgaattggttggctcaattccaaggagtagtggattgtgcaagacgcactgtcactctgtaccgagggccggaacaaccggttgttttctttgcacctccaacctctgtcagtagttcagaacttcatcagataggactgtcagaaatccccatcgtcagagagttcggagacgtgtttccggaagaactacccgatatgccgcccaagcgagagattgagttccggatagatcttgctccaggaaccactcctctgtacaaacgaccctaccgtatggcagcaaatgaactggccgaagttaagaaacagttggaagagttgaaagaaaaggggtatatacggccgagtactttcccctggggtgctcctatgatttttgtggagaagaaagacaagacgaagaggatgtgcgttgactacagagctctcaataaagtcaccatcaaaaacaagtaccctcttccccggatcgatgatctgttcgatcagcttaaaggtgccacggtattctccaagattgatcttcgttccggatatcaccagttgcgcatccgtgaagaagatattccgaagaccgcattcaccacacgatacggactccatggtcacatcattctggtatactcacaatcagaggaagaccatcagcaccatctccgtctggtgttgggaaagttgcgggaacatcaattgtatgccaaacttagcaagtgtgagttctggttgtccgaagtcaaattcttagggcacgtgatatctgctaaaggagttgctgtggaccccgaaacagtgaccccgtcccgattggaagcaacccaagacagtcactcaaatccgcagtttcttaggtttggcaggatactaccggagttgttgaagaaaaaatataaatttgtgtggagcccgcaatgcgagaaggcgttcaaaactctcaaagaaaagctggtttcctcgccagtgttaatcttgccggatactcgcaaggacttcatggtgtattgtgacgcttcgcgccaaggattggggtgcgtgctcatgcaggaaggtcatgtggtggcctatgcctcacgccagctacggcctcatgaaggcaactaccctacccatgatttggagttagccgcggtggttcatgctctaaaaatctggcggcattatctcattgggaatcgctgtgaaatatatactgatcataagagtttgaaatacatcttcacccagtcggatctgaatcttcggcagagaagatggttagagctcatcaaggattatgatgtgggaatccactatcatcccggtaaggccaacgtggtcgtcgacgctctaagtcaaaaaagccattgcaacactcttaacgtccgtggcattccacccgaacttaatcaacagatggaagccctgaacctaagcatagttggtcgcggattcttggctgcgttggaggccaagcctaccttgctcgatcaaatccgcgaggctcagaagaatgatccggacatgcgtggactcctcaagaatatgaaacagggtaaagccgctggtttcacagaggatgaatacggaaccctatggaacggaaatcgggtatgcgttccagataacagagaacttaaacagctgatacttcaggaagctcacgaaagtccttattccatccaccctggcagtacgaagatgtacttagacttgaaggagaaatactggtgggttagtatgaagcgggaaattgcagagttcgtggccctttgtgatgtgtgccagcgtgtcaaggcagagcaccaacgaccggccggactcctccaacctctccaagtaccagaatggaaatgggatgaaattgggatggatttcatcaccggacttccaaaaacccaaggtggatatgattctatatgggtagttgtggaccgactaaccaaagtagctcggtttattcctgtgaagaccacctatggagggaacaaactagccgagctctacttcgctaggatcgtgagtctccatggcgttcctaagaaaattgtatctgataggggaagccaattcacctctcacttttggaagaagctccaagaagagctgggtacccgattaaatttcagcaccgcgtatcacccgcagacagatggacagaccgagcgtctgaatcagatcctagaagatatgcttcgcgcatgtgtcctagatttcgggaagacctgggataagagtctcccctatgccgagttctcctacaataacagctaccaagccagcatacaaatggcaccctatgaagcgttgtatggacgcaaatgccggacatcgctattgtgggaccaagttggggaaagccaagtgttcgggactgatatcctgagagaagctgaagctaaagtcagaaccattcgggataatctaaaggtggcacagtcctggcagaaaagttatgcagataaccgtcgccgtaacctggaattcgcagtggacgattttgtgtaccttcgggtcacgccattgcgaggtgtacacaggtttcagacgaaagggaagctcgcacctcggtatgtgggtcctttccgtatcgttgcccgacgcggagaagtcgcttaccagttggagctgcccgcctccttgggcaacgtgcatgatgtgttccatgtgtcgcaactcaagaaatgtcttcgagtgccatccgagcaggccgactcagagcaaattgaagttcgcgaagacttgacctacgtggagaggccagtgaaaatcctggacaccatggagcgcaggaccaggaaccgggtaatccgtttttgcaaggtccaatggagcaaccacgccgaggaagaagctacctgggagcgtgaagacgagctgaaggcagcccatcccgatctcttcgccagttcttccgaatctcggggtcgagattccgtttaa

SEQ ID NO: 23090 - DNA, 7068 bp, Oryza sativa
  Clone ID: TF_OsC359_5812
atggatgaagtcgggggtcgatggacattctccagggcaaatgaaggctacacgagctgcggcccgatggccggcagcgttacccgtcgtggtttggacatgaccggcttcgtcttggagctgcgaggcatgtgcgtggtcttggaatatccacatggagtggattaccaggccaggccgctcccggagcaggagggtgaggatgcagagcctcacgctggttgggaggtcactgcagtgatcctctccggctctcccgagcggacttcgctggcagtcacagcgggtggggactccttccccgccgcttgccagaacgccgctctcctcgccatcggcacccttcaccagcgctacccggacgagttgcagcactcgtcctaccgctaccaccctcgtcgcggaggagcccgcgacttcgccaccttccgagacgccagctcggaggatgacgctaccgtcgtgcatctggcacgcatggtggaggcgtacgacgcggctcgtatcgacttccaccagatggtgcgtcgtggcatggtggagaacaacatgaagatcctggagctgcgtcaggagaatctgcagctcaagaaggacctcgacgcgttggaggcgcagctgcaccagctcaagatcgcccagggagagatcagccgtcccaagcgtcgccgcgtctgccgcagccagaagatcaccgcccgcaagagcacctccaggcccgagcttgttcgtcagtccctggcgtggacctgcttcgtcgagacccctcgtgccgagcctgcgcccgtggttccccaggagggggaagcctccggcgttggtagctcggagggtgcgctgttgctcaccttccgtcctggcccgtcgcagcggagaaatgttaacaccggtgaaggcaaccaacccgagggcagcaaccccaacccccaaggcaatccacctccaccaccaccaccagacaccaacgccattctcacccagatcctcgcccaacaagccaacatgatgaatgctttcctccaccacctccaaaacccgccacaacagaatgctccaccaccacctccccaacactccaaactcgccgagttcctccgcatccgcccacctaccttctctagctccaacaaccccgtggatgcgttggattggttgcatgccgtggggaagaagctagacacggtgcagtgcagtgatgaagagaaagtcatcttcgccgcccaccagctgcaggggcccgcatctatctggtgggaccacttccaggctacgcagccagcgggacaaccgatcacttgggctcgcttcacctccgctttccggagaacccattatttgcacgagttcaacaatctggcccggtacgctccggaggatgtgcgggaagatgaggagaagcaagagaagttcttggcaggaatggaccctgagctgtccgttcgtctagtctctggggactatcctgacttccaacgactggtggacaagagcatccgcttggaagccaagcacaaggagctggaatcgcacaagcgccgcttggcgaatttccgcaatcaacagggtgctaaccagagggttcgctacaccaatccctacccagggggatcctcctcgcagcagcagcagcagcagcagcaacctcgctccgcgcctcgacctcaattcgtggtgcgcgtcccacagccgcagcagcagcagaatcagcaagggactcgtgcaccccgtcctcctacgccagccgtgcagcccgttcaaggccgcagggacgctcaaggtcagcagcgtctgtgcttcaactgtttcgagcccgggcactttgcggataaatgcccgaagccaaggcgtcagcaaggccaagcgcctccccgctccaacaacggcgggaaggatgtcattcgaggtcgtgtgaatcacgtgacggccgaggacgtgctgacaactccagacgtcatcgttggtacgttcctcgtccaatccatccctgctactattttgttcgactctggagcttcccactcgttcatatctgtgccattcgtggggagaaatcagttgggggtagaaaggcttagaaaccctctgctcatcaccacccctggcggggttatgacagcaaagtattatagccctgccgttcctatagaaatccaggggattccttttccctcggatctgattctgctagacacaaagaacttggatgtgatccttgggatgaattggttggctcaattccaaggagtagtggactgcgcgagacgcactgttactctgtaccgaggaccagaacaaccggttgttttctttgcacccccaacctctgtcagaagttcagaactgcatcagatagaactgtcagaaatccccatagtcagagagttcggagacgtgtttccggaagaactacctggtatgccgcccaagcgagagattgagttccggatagatcttgctccaggaaccactcctctgtacaagcgaccctaccgtatggcagcaaatgaactggccgaagtaaagaaacagttggaagagttgaaagaaaaggggtacatacgtccgagtacttccccatggggtgctcctgtgatttttgtggagaagaaagacaagacgaaaaggatgtgcgtcgactacagagctctcaatgaagtcaccatcaaaaacaagtaccctcttccccggatcgatgatctgttcgatcagcttaaaggtgccaccgtattctccaagattgatctccgttccggatatcaccaattacgtattcgtgaagaagatattccgaagaccgcattcactacgcgatatggactgtatgaattcacggtgatgtcgttcggcttaaccaatgctcctgccttcttcatgaacttgatgaacaaagtgttcatggaatacttggataaattcgttgtggttttcatcgatgacattctgatatactcacaatcagaggaagaccatcagcaccatctccgtctggtgttgggaaagttgcgggaacatcaattgtatgccaagcttagcaagtgtgagttctggttgtccgaagtcaaattcttggggcacgtgatatctgctaaaggagttgctgtggaccccgaaacagtgaccgccgtcaccgattggaagcaacccaagacagtcactcagattcgcagtttcttaggtttggcaggatactatcggagattcatcgagaacttctccaaaatcgctcgacccatgacacagttgttgaagaaagaagaaaagtttgtgtggagcccgcaatgcgagaaggcgttccaaactctcaaagaaaagctggtttcctcgccagtgttaatcttgccggatactcgcaaggatttcatggtgtactgtgatgcttcgcgccaaggattggggtgcgtgctcatgcaggacggtcatgtggtagcctatgcttcacgtcagctacgacctcatgagggcaactaccctacgcatgacttggaattagccgcagtggttcatgctctaaaaatctggcggcactatctcattgggaaccgctgtgaaatatatactgatcataaaagtttgaaatacatcttcactcagtcagatctgaatcttcggcaaaggagatggttagaactcatcaaggactatgatgtgggaattcactatcaccctggtaaggccaacgtggttgccgacgctctaagtcgaaagagccattgcaacactcttaacgtccgtggcattccacccgaacttagtcaacagatggaagccctgaacctaagcatagttggtcgcggattcttggctgcgttagaagccaagcccaccttgctcgatcaaatccgcgaggctcagaagaatgatccggacatgcatggactcctcaagaatatgaaacagggtaaggccgctggtttcacagaggatgaacacggaaccttatggaacggaaagcgggtatgcgttccagatagcagagaacttaaacagctgatacttcaggaagctcacgaaagtccttactccattcacccgggcagtaccaagatgtacttagacttgaaggagaaatactggtgggtcagcatgaagcgggaaattgcagagtttgtggccctatgtgatgtgtgccagcgtgtcaaggcagaacaccaacgaccggccggacttctccaacctctccaagtgccggaatggaaatgggatgaaattgggatggatttcatcaccggcctcccaaaaacccaaggtggatatgactctatatgggtaatagtggatcgattaaccaaggtagctcgattcattcctgtgaagaccacctatggagggaacaaactagcggagctctacttcgctaggatcgtgagtctccatggcgttcccaagaaaatcgtatctgataggggaagccaattcacctctcacttttggaagaagctccaagaagagcttggtacccgactaaatttcagcaccgcgtatcacccgcagacagatggacagaccgagcgtctaaatcagatcttagaagatatgctccgcgcatgtgtcctagatttcgggaagacttgggataagagtctcccctatgccgagttctcctacaataacagctaccaagccagcatacaaatggcaccctatgaagcgttgtacgggcgcaaatgccggacaccgctattgtgggaccaagttggagaaagccaagtgttcgggactgatatcctgagagaagctgaagctaaagtcagaatcattcgggataatctaaaggtggcacagtctcggcagaaaagttatgcagataaccgtcgccgtgatctggaattcgcagtggatgattttgtgtaccttcgggtcacgccattgcgaggtgtgcacaggtttcagacaaaagggaagctcgcacctcggtatgtgggtcccttccgtatcatcgctcgacgtggagaagttgcttaccagctggagttgcccgcctccttgggcaacgtgcatgatgtgttccatgtgtcgcaactcaagaaatgtcttcgagtgccatccgagcaggccgactcagagcaaattgaagttcgcgaagacctgacgtatgtggagaagccagtgaaaatcctggacaccatggagcgcaggaccaggaaccgtgtaatccgtttttgcaaggtccagtggagcaaccacgccgaagaagaagctacttgggagcgcgaagacgagctgaaggcagcccatcccgatctcgttgaagtcgaagccgtcgattgggaaaacgagcaaggcaagacacatcatcttgatcatattgaatcccagacgagctgggacccagggtcgggttgccagttcggtctgaatcatcataggccttgggttaaggcagccgcccgggctgaggaagccgctaaggaggaggccgcccgggctcgccaggctgaggcaacagctgctgctggcgcgtcaactgggcccactccctcgggcaaccctcaggcgacagcctccggggaggcacgcgacgtggccgcgggcacatcgcctgggcccacctccccgggcgacgcccaggatcaaacgggtccgggggacatccctgagcccagcacgtcctccggggggccgagccgcatcgccttctctccaaggcggctcttctcctcatcttccgtcgccccgctgagcgccgagcccattctgcaggccttggccgccgcaaacaccgcggtgctggatgggtttagcgcccaagtggaggccctgcgcgcggaacgagcggagctcgaggccgcatgggcacgcgttgaggaggggcggcgctcggtggacgccatggtggaggtgggccgtaaggctcaccgccgccacatctcggagcttgaagcccgcaaggcggcgctggcggagatcgcccgagaggtggaggaggagcgagaggccgccctcatcgccaccaccgcgatgatcgaggcgcaagacaccctccgccttcagcacgcaagctgggaggcggagctgaagaaaaagctcgacgccgcccaaggggtccttgactccgccgctgcccgagagcggcgggtaacggagactgaagcggcgtctcggcggcgcgaggaggcccttgaggcccgtgccatggcgctggaagaacacgccggcgccgtggagaggggcttgacggaccgcgaggccgccgctgttctccgggaggcgacgctggcggcgcacgaggccgcctgcgccgaggaggagtgcgcgctccgcctccgcgaggacgcactcgctgagcgggagcgagctctcgaggaggctgaggccacgaccaaacggctggcggacagcctgtcccttcgcgaggcggcgcaggaggagcaggcgcgccgcaatcttgaatgcgtccgcgccgagagagccgcactggagcagcgggctgccgacctcgaggcgcgggaaaaagagctggacgcaagggcgcgcgtcggtggggcggctgcgggcgaaagcgacttagccgctcgcctcgcggctgccgaacacaccgtcgctgacatgcagcgcgcactagattcctccatcggggaggccgaggccctccgcttggcgggcgagatggggcccgacatgctttgggactcggtctcccgcatggatcgcgccggtcggcaagcgggcctctggaaaggccagacgaggatgcgccccgccaacctggaaggcctcgctccgcacctcaacaggatggcctgggtcctcgaacaactccccgaggagctcgagaagaccatcaagtcatcctcgagggacctcgcccggggggcggtcgaactcgtgctagcgagttaccaggcccgggaccccaacttctccccatggatggcgctggaggagttccctcccgggaccgaggacgatgcgcgcgcgcgcgtccgggatgccgccgaccacatcgtcaacggcttcgagggctcggcccctcggctcgcgttcgcccccagctccgacgaggagggcgatgccagcggtgaggacgacggtggcgacgaggccggcgacccgggcgcgtcagaatga

SEQ ID NO: 23091 - DNA, 3888 bp, Oryza sativa
  Clone ID: TF_OsC359_6001
atggttacgccgatggtgacgaccaggagaaatgttaacaccggtgaaggcaaccaacccgagggcagcaaccccaacccccaaggcaacccacctccaccaccaccaccagacaccaacgccattctcacccaaatcctcgcccagcaagccaacatgatgaatgctttcctccaccacctccaaaatccgccacaacagaatgctccaccaccccctccccaacactccaaactcgccgaattcctccgcatccgcccacccaccttctctagctccaacaatcccgtagatgcgttggattggttgcatgccgtggggaaaaagctagacacggtgcagtgcagcgatgaggagaaagtcgtcttcgccgcccatcagctgcaggggcccgcatctctctggtgggaccacttccaggctacgcagccagaagggcaacctattacttggactcgcttcaccgccgctttccggaaaacccatgtgcccgccggagtcgtggctcttaagaaaagggaattccgagagttgaagcaaggcagccgctccgtgatggagtatttgcatgagttcaacaatctagcccgttatgccccggaggatgtgcgggaagatgaggagaagcaagagaagttcttggcaggaatggaccctgagctgtccgttcgtctagtctctggggactatcctgattttcaacgactggtggacaagagcatccgcttggaagccaagcacaaggagctggaatcgcacaagcgccgcttggcgaatttccgcaatcagcagggtgctaaccagagggtccgctacaccaatccctacccagggggatcctcctcgcagcagcagcagcagcagcagcagcaacctcgctccgcgcctcgacctcaattcgtggtgcgcattccacagccgcagcagcagcagaatcagcaagggactcgtgcaccccgtcctcctacgccaactgtgcagcctgttcaaggtcgcagggacgctcaaggtccgcagcggctgtgcttcaactgcttcgagcccgggcactttgcggataaatgcccgaagccaaggcgtcagcaaggccaagtgcctccccgctccaacaacggcgggaaggatgtcattcggggccgtgtgaatcatgtgacggccgaggacgtgctgacaactccagacgtcatcgttgaacttcatcagataggtctgtcagaaatccccatagtcagagagttcggagacgtgtttccggaagaactacctggtatgccgcccaagcgagagattgagttccggatatatcttgctccaggaaccactcctctgtacaagcgaccctaccgtatggcagcaaatgaactggccgaagttaagaaacagttggaagagttgaaagaaaaggggtatatacgtccgagtacttccccttggggtgctcctgtgatttttgtggagaagaaagacaaaacgaagaggatgtgcgttgactacagagctctcaatgaagtcaccatcaaaaacaagtaccctcttccccggatcgatgatctgttcgatcagcttaaaggtgccactgtattctccaagattgatcttcgttccggatatcaccaattacgtattcgtgaagaagatattcctaagaccacattcaccacgcgatacggactgtatgaattcacggtgatgtcgttcggtttaaccaatgcacctgccttcttcatgaacttaatgaacaaagtgttcatggaatacttggataagtttgttatggtgttcattgatgacattctggtgtactcacaatcagaggaagaccatcagcaccatctccgtctggtgttgggaaagttgcatgaacatcaattgtatgccaaacttagcaagtgtgagttctggttgtccgaagtcaaattcttagggcacgtgatatctgctaaaggagtcgctgtggaccccgaaacagtgaccgccgtcaccgattggaagcaacccaagacagtcactcaaattcgcagtttcttaggtttggcaggatactaccggaggttcatcgagaacttctccaaaatcgctcgacccatgacacagttgttgaagaaagaagagaaatttgtgtggagcccgcaatgcgagaaggcgtttcaaactctcaaagaaaagctggtttcctcgccagtgttaatcttgccggatactcgcaaggacttcatggtgtattgtgatgcttcgcgccaaggattggggtgcgtgctcatgcaggatggtcatgtggtggcctatgcctcacgccagctacggcctcatgaaggcaactaccctacccatgatttggagttagccgcggtggttcatgctctaaaaatctggcggcactatctcattgggaatcgctgtgaaatatatactgatcataagagtttgaaatacatcttcactcagtcggacctgaatcttcagcagaggagatggttagaactcatcaaggattatgatgtgggaattcactatcatcctggtaaggccaacgtggtcgccgacgctctaagtcgaaagagccattgcaacactcttaacgtccgtggcattccacccgaacttaaccaacagatggaagccctgaatctaagcatagtgggtcgtggattcttggctgcgttggaagccaagcccaccttgctcgatcaaatccgcgaggctcagaagaacgacccggacatgcatggactcctcaagaatatgaaacagggtaaagccgctggtttcacagaggatgaacacggaaccctatggaacggaaatcgggagaaatactggtgggttagtatgaagcgagaaattgcagagttcgtggccctttgtgttgtgtgccagcgtgtcaaggcagagcaccaacgaccggccggactcctccaacctctccaagtaccagaatggaaatgggatgaaattgggatggatttcatcaccggacttccaaaaacccaaggtggatatgattctatatgggtagttgtggatcgcttaaccaaggtagctcgatttattcctgtgaagaccacctatggagggaacaaactagccgagctctacttcgctaggatcgtgaatctccatggcgttcccaagaaaatcgtatctgataggggaagccaattcacctctcacttttggaagaagctccaagaagagctgggtacccgattaaatttcagcaccgcgtatcacccgcagacagatggacagaccgagcgtctaaatcagatcctagaagatatgcttcgcgcatgtgtcctagatttcgggaagacctgggataagagtctcccctatgccgagttctcctataataacagctatcaagccagcatacaaatggcaccttatgaagcgttgtatgggcgcaaatgccggacaccgctcttgtgggaccaagttggggaaagccaagtgttcgggactgatatcctgagagaagctgaagcaaagacaaaagggaagctcgcacctcggtttgtgggtcctttccgtatcattgctcggcgcggagaagtcgcttaccagttggagctgcccgcctccttgggcaacgtgcatgatgtgttccatgtgtcgcaactcaagaaatgtcttcgagtgccatccgagcaggccgactcagagcaaattgaagttcgcgaagacttgacctacgtggaaaggccagtgaaaatcctggacaccatggagcgcaggaccaggaactgggtaatccgtttttgcaaggtccagtggagcaaccacgccgaggaagaagctacttgggagcgtgaagacgagctgaaggcagcccatcctgatctcttcgccagttcctccgaatctcggggtcgagattccgtttaa

SEQ ID NO: 23092 - DNA, 5525 bp, Oryza sativa
  unsure (1)..(5525): unsure at all n locations
  Clone ID: TF_OsC359_6007
attctgcatttggggtgtgtcttgttgagtacggtggttgtactcagtcttgctcaatttttcccaagcccagaagaggagctccttgaagatgaaggctttggtgtctagctcgtgcctgccgtcaagcgcctgtggttgtcaccctagtcttccgctgtctctcgttagtctttgtgtgtgctgggccttgcctcctgggacaaggattaatgcacgcacgtaaggaatgcccgttgggttatttccggtcgtgacaacttctccgcgccgagcagtgatacggaaaggacccacataccgaggtgcgagcttcccctttgtccgaaacctgtgtacacctcgcaatggcgtgacccgaacatacacaaagtcatccgctgcgaattccaggtcacggcgacggttatctgcataacttttctgccgggactgtgccatctttagattatcccgaatggttctgaccttcgcttcagcttgtctcaggatatcagtcccgaacacttggctttccccaacttggtcccacaatagcggtgtccggcatttgcgtccatacaacgcttcataaggtgccatttgtatgctggcttggtagctgttattgtaggagaactcggcataggggagactcttatcccaggtcttcccgaaatccaggacacatgcgcgaagcatatcttctaggatctgatttagacgctcggtctgcccatctgtctgcgggtgatacgcggtgctgaagtttaatcgggtacccagctcttcttggagcttcttccaaaagtgagaggtgaactggcttcccctatcagatacgattttcttggggacgccatgcagacttacgatcctagcgaagtagagttcagctagtttgttccctccataggtggtctttacgggaatgaaccgtgctaccttggttaatcgatccacaactacccatatagaatcatatccaccttgggtttttggaagtccggtgatgaaatccatcccaatttcatcccatttccattctggtacttggagaggttggagaagtccggccggtcgttggtgctctgccttgacacgctggcacacatcacaaagggccacgaactctgcaatttcccgcttcatactaacccaccagtatttctccttcaagtctaagtacatcttcgtactgccagggtggatggaataaggactttcgtgagcttcctgaagtatcaactgtttaagttccctgatatctggaacgcatacccgatttccgttccatagggttccgtgttcatcctctgtgaaaccagcggctttaccctgtttcatattcttgaggagcccatgcatgtccggatcattcttctgagcctcgcggatttgatcgagcaaggtaggcttggcttccagcgcagccaagaatccacgactaactatgcttaggttcagggcttccatctgttgattaagttccggtggaatgccacggacgttaagagtgttgcaatggctctttcgacttagagcgtcggcgaccacgttggccttaccaggatgatagtgaattcccacatcataatccttgatgagttctaaccatctcctttgccgaagattcagatccgactgggtgaagatgtatttcaaactcttatgatcagtatatatttcacagcgattcccaatgagatagtgccgccagatttttagagcatgaaccaccgcggctaattccaagtcatgggtagggtagttgccttcatgaggtcgaagctggcgtgaggcataggccaccacatgaccgtcctgcatgagcacgcaccccaatccttggcgcgaagcgtcacaatacactatgaagtccttgcgagtatccggcaagattaacactggcgaggcaaccagcttttctttgagagttctgaacgccttctcacattgcgggctccacacaaatttctcttctttcttcaacaactgtgtcatgggtcgagcgattttggagaagttctcgatgaaccttcggtagtatcctgccaaacctaagaaactgcgaacttgagtgactgtcttgggttgcttccaatcggtgacggcgatcactgtttcggggtccacagcaactcctttagcagatatcacgtgccctaagaatttgacttcggacaaccagaactcacacttgctaagtttggcatacaattgatgttcccgcagctttcccaataccagacggagatggtgctgatggtcttcctctgattgtgagtatatcagaatgtcatcaatgaaaaccacaacaaatttatccaagtattccatgaacactttgttcattaagttcatgaagaaggcgggtgcattggttaaaccgaatgacatcaccgtgaattcatacagtccgtatcgcgtggtgaatgcggtcttcggaatatcttcatcacgaatacgcagttggtgatatccggaacgaagatcaatcttggaaaatacagtggcacctttaagctgatcgaacagatcatcgatccggggaagagggtacttgttttttatggtgacttcattgagagctctatagtcaacgcacatcctcttcgtcttgtctttcttctccacaaaaatcacaggagcaccccagggggaagtgctcggacgtatgtaccccttttctttcaactcttccagctgtttcttgacttcggccagttcatttgctgccatacggtagggtcgcttgcacagaggagtggttcctggagcaagatctatctggaactcaatctctcgcttgggcggcataccaggtagttcttccggaaacacgtctccgaactctctgactatggggatttctgacagacctatctgatgcagttctgaactactgacagaggttgggggtgcaaagaaaacaaccggttgtcccggccctcggtacagagtgacagtgcgtctcgcgcaatccactactccttggaattgagccaaccaattcatcccaaggatcacatccaagttcttggtgcctagcagaatcagatccgagggaaaaggaatcccctgaatttctatagggacggcagggctataatactttgctgtcataacccctccaggggtggtgatgagcagagggtttctaagcctttctacccccaactgatttctccccacgaatggcacagatataaatgagtgggaagctccagagtcgaacaaaatggtagcagggatggaatgaatgaggaacgtaccaacgatgacgtctggagttgtcagcacgtcctcggccgtcacatggttcacacgaccccgaatgacgtccttaccaccgttgttggggcggggaggcgcttggccttgctgacgccttggcttcgggcatttatccgcaaagtgcccgggctcgaagcagttgaagcacagacgctgcggaccttgagcgtccctgcggccttgaccaggctgcacagtcggtggaggaggacggggcgcacgagtcccttgttgattctgctcctgctgcggctgtgggacgcgcaccacgaattgaggtcgaggcgcggagcgaggttgctgctgctgctgttgctgctgcgaggaggatccccctggatagggattggtgtagcggaccctttggttagcaccctgttggttgtggaaattcgccaagcggcgcttgtgcgactccagttccttgtgcttggcttccaagcggatgctcttgtccaccagacgttggaaatccggataatccccggagactagacagacggacagctcagggtccattcctgccaggaacttctcttgcttctcctcatcttcccgcacatcctccggagcgtaacgggccaggttgttgaactcgtgcaaatactccatcacggagcggttgccttgcttcaactctcggaattcccttttcttaagggccacgactccggcgggcacatgggttcttcggaaagcgggggtgaagcgagcccatgtaataggctgtccctctggctgcgtagcctggaaatggtcccaccatagagatgcgggtccctgcagctggtgggcggcgaagatgactttctcctcatcgctgcactgcacagtgtctagctttttccccacggcatgcaaccaatccaacgcatccacggggttgttggagctagagaaggtaggtggacagatgcggaggaactcggcgagtttagagtgttggggaggtggtggtggagcattatgttgtggcggattttggaggtggtggagaaaagcagtcatcatgttggcctgctgggcgaggatttgggtgagaatggcattggtatctggtggtggtggtgaaggcgnagnagnaggtgaaggtgggctgccatggttgttgtggttgctgccttcgggttggttgccatcactggtgccagcatttctcctggtagaacacacgcgcaagcctactaactgctcgtctactgctgcgacgggccaggacggaaggtgagcaacagcgcatcctccgtgctaccaacgccggaggcttccccctcctggggaaccacgggcgcgggctcggcacgaggggtctccacgaagcaagtccacgccagggactgacgaacaagctcgggcctggaggtgctcttgcgggcggtgatcttctggctgcggcagacacggcggcgcttggggcggcagacctctccctgggcgatcttgagctgatgcagctgcgcctccaccgcgtctaggtccttcttgagctgcaggttctcctgacgcagctccaggatcttcatgttgttctcgaccatcccacgacgcaccatctgatggaagtcgatacgagccgcgtcgtacgcctccaccatgcgcgccaggtgcacgatggtagcgtcatcctccgagctagcgtcccggaaggtggcgtagtcgcgggctcctccgcgacgagggtggtagcggtagggcgagtgctgcaactcgtccgggtagcgctggtgaagagtgccgatggcgaggagagcggcgctctggcaagcggcggggaaggagtccccacccgcggtgactgtcagcgaagtccgctcgggagagccagcgaggatcactgcagtgacctcccaagcagcgtggggctctgcatcgtcaccctcctgctccggaaatggcctggcctggtagtccactccatgtggataccccaggaccacgcacatgccccgcagctccaagacgaagccagtcatgtccaaaccacgacggctgacgctgccggccatttgggtacattgctcggcttgcccataaccgagggcgcggctattcgaatagattttactctgatcagaggtgtacatcgacccaatcccatctacggccggaacccccgggacaggcaggcaggactgagcccctagcagcaggacaccggccctgtgccatgacatctcgactaccgggccgcagctcgtgtagccttcatttgccctggagaatgtccatcgacccccgacttcatccac

SEQ ID NO: 23093 - DNA, 5415 bp, Oryza sativa; identical to SEQ ID NO: 14174
  Clone ID: TF_OsC359_6023

SEQ ID NO: 23094 - DNA, 7806 bp, Oryza sativa
  Clone ID: TF_OsC359_6034
atggttatgccgatggtgacgaccaggagaaatgttaacaccggtgaaggcaaccaacccgaaggcagcaaccccaaccaccaaggcaacccacctccacctccacctccacctccaccaccaccaccagataccaacgccattctcactcaaatcctcgcccaacaggcaaacatgatgactgctttcctccaccacctccaaaacccgccacaacagaatgctccaccaccacctccccaacactctaaactcgccgagttcctccgcatccgcccacctaccttctctagctccaacaaccccgtggatgcgttggactggttgcatgccgtggggaaaaagctagacacggtgcagtgcagcgatgaggagaaagtcgtcttcgccgcccatcagctgcagggacccgcatctctatggtgggaccacttccaggctacgcagccagaggggcaacctattacttggactcgcttcaccgccgctttccggagaacccatgtgcccgctggagtcgtggctcttaagaaaagggaattccgggagttgaagcaaggcaaccgctccgtgatggagtatttgcatgagttcaacaatctagcccgttacgctccggaggatgtacgggaagatgaggagaagcaagagaagttcttggcaggaatggaccctgagctgtccgtccgtctagtctctggggactatcctgattttcaacgactggtggacaagagcatccgcttggaggccaagcacaaggagctggaatcgcacaagcgccgtttggcgaatttccgcaatcaacagggtgctaaccagagggtccgctacaccaatccctacccagggggatcctcctcgcagcagcagcaacagcagcagcaacctcgctccgcgcctcgacctcaattcgtggtgcgcgtcccacagccgcagcagcagcagaatcaacaagggactcgtgcaccccgtcctcctacgccaactgtgcagcccgttcaaggccgcagggacgctcaaggtcagcagcgtctgtgcttcaactgcttcgagcccgggcactttgcggataaatgcccgaagccaaggcgtcagcaaggccaagcgcctccccgctccaacaacggcgggaaggatgtcattcggggccgtgtgaatcatgtgacggccgaggacgtgctgacaactccagacgtcatcgttgaacttcatcagatagaactgtcagaaattcccatcgtcagagagttcggagacgtgtttccggaagaactacccggtatgccgcccaagcgagagattgagttccgaatagatcttgctccaggaaccactcctctgcacaagcgaccctaccgtatggcagcaaatgaactggccgaagttaagaaacagttggaagagttgaaagaaaaggggtacatacgtccgagtacttccccatggggtgctcctgtgatttttgtagagaagaaagacaagacgaagaggatgtgcgttgactacagagctctcaatgaagtcaccatcaaaaacaagtaccctcttccccggatcgatgatctgttcgatcagctcaaaggtgccactgtattctccaagattgatctccgttccggatatcaccaattacgtattcgtgaagaagatattccgaagaccgcattcaccacgcgatacgggctgtatgaattcacggtgatgtcgttcggtttgaccaatgcacctgccttcttcatgaacttaatgaataaagtgttcatggaatacttggataagtttgttgtggttttcattgatgacattctgatatactcacaatcagaggaagaccatcagcaccatctccgtctggtgttgggaaagttgcgggaacatcaattgtatgccaagcttagcaagtgtgagttctggttgtccgaagtcaaattcttagggcacgtgatatctgcaaaaggagttgctgtggatcccgaaacagtgaccgccgtcaccgactggaagcaacccaagacagttacccaagtccgcagtttcttaggtttggcaggatactaccggagattcatcgagaacttctccaagatcgctcgacccatgacgcagttgttgaagaaagaagagaaatttgtgtggagcccgcaatgcgagaaggcgtttcaaactctcaaggaaaagctggtttcctcgccagtgttaatcttgccggatactcgcaaggacttcatggtgtattgtgatgcttcgcgccaaggattggggtgcgtgctcatgcaggacggtcatgtggtagcctatgcctcacgccagctacgtcctcatgaaggcaactaccctacacatgatttggagttagccgcagtagttcatgctctaaaaatctggcggcactatctcattgggaatcgctgtgaaatctataccgaccataagagtttgaaatacatcttcactcagtcggacctgaatcttcggcaaaggagatggttagaactcatcaaggactatgatgtgggaattcactatcatcctggtaaggccaacgtggttgccgacgctctaagtcgaaagagccattgcaacaatcttaacgtccgtggcattccacccgaacttagtcaacagatggaagccctgaacctaaacatagttggtcgtggattcttggctgcgttagaagccaagcctaccttgctcgatcaaatccgcgaggctcagaagaatgatccggacatgcatggactcctcaagaatatgaaacagggtaaagccgctggtttcacagaggatgaacacggaaccctatggaacggaaatcggcgtgtcaaggcagagcaccaacgaccggccggacttctccaaccactccaagtacccgaatggaaatgggatgaaattgggatggatttcatcactggacttccaaagacccaaggcggatatgattccatatgggtagttgtggatcgattaaccaaggtggctcgatttattcctgtgaagaccacctatggagggaacaaactagcggagctctacttcgctaggatcgtgagtctccacggcgttcccaagaaaatcgtatctgataggggaagccaattcacctctcacttttggaagaagctccaagaagagctgggcactcgattgaatttcagcaccgcctatcacccgcagacagatggacagaccgagcgtctaaatcagatcctagaagatatgctccgcgcatgtgtactagatttcgggaagacctgggataagagtctcccctatgccgagttctcctacaataacagctatcaagccagcatacaaatggcaccatatgaagcgttgtacgggcgcaaatgccggacaccgctcctgtgggaccaagttggggaaagccaagtgttcgggactgatatcctgagagaagctgaagctaaagtcagaatcattcgggataatctaaaggtggcacagtcacggcagaaaagttatgcagataaccgtcgccgtgatctggaattcgcagtggatgactttgtgtatcttcgggtcacgccattgcgaggtgtacacaggtttcagacgaaagggaagcttgcacctcggtatgtgggtcctttccgtatcgttgctcgacgcggagaagtcgcttaccagttggagctgcccgcctccttgggcaatgtgcatgatgtgttccatgtgtcgcaactcaagaaatgtcttcgagtgccgtccgagcaggccgactcagagcaaattgaagttcgcgaagacttgacctatgtggaaaggccagtgaaaatcctggacaccatggagcgcaggaccaggaaccgggtaatccgtttttgcaaggtccagtggagcaaccacgccgaagaagaagctacttgggagcgtgaagacgagctgaaggcagcccatcccgatctcttcgccacggcaaagggaggtcctgtcaaaaaggtggctaagaagaaaggactcgtcgatgtcgctcgcgtttttagcgacgatgagtcctccgacgggactccgacctcgcccgctggtcgcagcctggatctttcggccgcccccattccttcactcggcgtcgctggagtgggcggtagtaccgccgctggggcttcggcttctgcggaaaggattgtgacggccgcggcgaaagtattcggcagtcctccgcatcagccggttgcgtcgccgctgattgaggcgaagggaaagagagcggtcgctgagacgtccacttcggaatattcgctctcggtaccccgcttcgcccctggcgatttcgagacgcgggcggacctccttccttttgtggagggggtaagcaatcttgtactgcccgccagtgccccgagcttgttcaccgaactgaatgagttcgatgaggggtgtactgctataaaaagcctggctgttcggatcctcgcggctcactgctcaatggagcgaaccgtgcgagcccgacttgatgggttcaaaagccatcttcgggccaaggatgatgaactaggccgtaaaaatttggagatggacgcccttgccaactcccttaaggaggcgaaggctgaaaacaagcggctccaatcggaactggagaaagggaaagaagccagggccgaagtcgatcgcttaaaggccgaactggagaaagagaaggcccacaccgccgtgctcatagattattacagcctcaccgagccgaagatggaggctcttcggcaggaggttcgcaaggccgaagcaagcgctgcagaggagtcgtggcggttttcgcgggagatagtgaaaaccaccgagtccgcgcggacagcgtgccaaacgcttcgcctcgcccgtattgacatgggcgcgaaagtgtggggtgtcccctccgaagatgcatcagccttcgacttctccgaatggacccaacaggctggtggttcggtttccgactgcgccaccgcatacggcgactgctgtgcgcgcgtgtcagcgacctttaccatgggcctcctgcagcagttcggctgcgagcacatcgccgagttccccaagtacgcgaagggggattgggaaatcagtgcgcaagacatttcgcccacacttcgtgcgtggcgaaaacaattttggcagaaggacggccgctccgccgctaaggcgcgccttttggagcagctggcgaaagctgaggcggcggacctttgtgaagatgaaggcgcggcggccagagggggtggaggcgatgcccgggaccatgcagagatcatactggggcgcggcttggcttcggccatgacgctggcaactttcgcacttcttgatttgctcaacacagactttcaacacagtgggccaataaactccttgtctaaatactttggaggccactgttcttgcagcctggtgcgcgccacatagtccctggtgtatttcctttgccatttcttcgccttcggcaaaagagatgcaacaaagtaagggttgaagtaccccggagcggtaaagctgacccgagaccatcttatacttcgtggctctaagttgcaaacgctttgcttttgcttcgtctaccggaagccagccagtttcaaggtgtttcacaaatggggttcgccagtcatatgggtcttcgcccagtttctcctggtcgattgccatgacttccgagctgtccatggacacacttggagcatgtaggacttcgaaaaagatgccaggcgaatgtgggccaccacaagcagcggatttcgccagggcgtctgcttcctcgttctggcttctaggtaagtgttcgaccgttatgccagtgaagtatttttccatgaaccgaacagcctccagatacctcttcattccttcttcttttgcttcgaaggagttgtcaacatgacctgctaccaacttggagtcgattcgaattagcaagcgccggactcctagtgctttcgcctttcttaggcccaggaaaacggcttcgtattctgctgcgttgttggttgtgtcgaactgcagtcttgctgcgtaccgaatcggcacatcattcggcgaaaagaggactgccgcaatacctgcccccctgtgcgaccacgagccatcagagcacatcacccagaattgttcggcgggctcggggtcgagggcaagtaccggtgtccattcagctacgaagtcagctagcacttgagacttgatagcagagcgtgcaacaaaatgcaagtcgaacggggatagctctgccgcccacttgctgagccggcccgtgacttccttgcctcggagtatttcgcccaaggggtactgtgatggcactatgactttgtgggcctggaagtagtgcttaagctggcacgaggccatcactagggcgtaagcgagcttttccatttcgatgtatcttgtcttcgctccttgcagtgcttcggagacgaagtagaccggtttctgtccgaactctgtttcttggacgagtgcagcactgactgccaccggcgaagctgctaagtataatagcagttcgcttcctgggggtgggcttatcagggctggcgggctttgcaagtattgctttagctcgtcgaatgttgcctggcactctggggtccaatcaaactttcccgcgcccaggagggtcttgaagaagggcaaacctctttcggctgcctttgagaggaatcgactgagtgccgcaattcggcctgcaagcttttgtacttcatgtacgcttgacggaggcttcatttgctggatggcatcgattttctcgggattcgcctcgatgccaaggactttgtacaccagtctggcgaaggttgctcctgcattccttaagccgaaaggcatcctgaggtgacaaaatgtgccaaacggagtgatgaaggatgctttggggatgtcaagcgggttcatgtggatctggtggtagtcggaatatgcgtccaggaaactcatgagctcgcatccagctgttgaatccacgagctggtcgatccgtggcaaggggaagtcgtctttcggatacgctttgtttaggtctgagaaatcgacacacatgcgccatttgccatttgacttccgcaccaacactggattcaccaaccactccggatggtcaatctcttggattacccctgccctgagcaatttttgtacctcggctttcgccgcttcttggcggtcggcagacatcttgcgcaacttctgttttcttggcttaatgtccagcttgaccgccaggtgatgcatgatgagatctgccggaacaccccccacctcgtcagggctccaggcgaatgtgtcgatgttcttcttgagcacctctaggatactctcaacttcttcttcgcccatgtcgccccccagtgatacaagctttgtggggtcggcatcatcaatctgcactttcgttatcttgccgtgaggggtgggctttggcatgttcttcggctgttcatgcggttcggtctcaacgctgtgcactgctctgttgattatggctagatcgcttttcgaagcggccgaagactgaagccccttgactactatcacccctgccaggccgggcatcttgagcttgaggtaattgtggtgggaaatggcttcaaacttgttcagggttgcacggccgaagatggcgttgtagttgtacgggatgtcgacgacgtcgaacagtatttgctcttcacgtctgttctcccccgagccaaaggctatcagcaagagtgcttggccgagtacttgaactgcttctccgccgaaaccgcggagtgatgctggtgctggggtaagtgcttgggtaggcaaccccat

SEQ ID NO: 23095 - DNA, 5487 bp, Oryza sativa
  Clone ID: TF_OsC359_6104
atgtcatggcacagggctggtgtcctgctgctaggggctcagtcctgcctgcctgtcccggtggttccggccgtaggcggggttgggtcggtactcttgtctaaggctaggatgggttggaaactatgtcacgtcttccgtctgtataccgtggtgatggccggcagcgttacccgtcgtggtttgcacatgactggcttcgtcttggagctgcggggcatgtgcgtggtcttggggtatccacatggagtggattaccaggccaggccgctcccggagcaagagggtgaggatgcagagcctcacgctggttgggaggtcactgcagtgattctctccggctctcccgagcggacttcgctggcagtcaccgcgggtggggattccttccccgccgcttgccagaacgccgctctcctcgccatcggcacccttcaccagcgctacccggacgagttgcagcactcgccctaccgctaccaccctcgtcgcggaggagcccgcgactacgccaccttccgagacgccagctcggaggatgacgctaccgtcgtgcatctggcacgcatggtggaggcgtacgacgcggctcgtatcgacttccatcagatggtgcgccgtggcatggtggagaacaacatgaagatcctggagctgcgccaagagaatctgcagctcaagaaggacctcgacgcgttggaggcgcagctgcatcagctcaagatcgcccagggagaggacagccgtcccaagcgtcgccgcgtctgccgcagccagaagatcaccgcccgcaagagcacctccaggcccgagcttgttcgtcagtccctggcgtggacctgcttcgtcgagacccctcgtgccgagcctgcgcccgtggttccccaggagggggaagcctccggcgttggtagctcggaggttttaatcgtcagctctccttctctgtttgctggttctgtgaggggttttcagatggtgacgaccaggagaaatgttaacaccggtgaaggcaaccaacccgagggcagcaaccccaaccaccaaggcaatccacctccacctccgcctccaccaccaccaccagacaccaacgccattctcacccaaatcctcgcccagcaagctaacctgatgaatgctttcctccaccacctccaaaacccgccacaacacaatgctccaccaccccctccccaacactccaaactcgccgaattcctccgtatccgcccacccaccttctctagctccaacaaccccgtggatgcgttggattggttgcatgccgtggggaagaagttagacactgtgcagtgcagtgacgaagagaaagtcatcttcgccgcccatcagctgcaggggcccgcatctctatggtgggaccatttccaggccacgcagccagaagggcaacctattacttggactcgcttcaccgccgctttccggagaacccatgtgcccgccggagtcgtggctcttaagaaaagggaatttcgggagttgaagcaaggcaaccgctccgtgatggagtatttgcatgagttccacaatctagcccgttatgccccggaggatgtgcgggaagatgaggagaagcaagagaagttcttggcaggaatggaccctgagctgtccgttcgtctagtctcttgggactatcctgattttcaacgactggtggacaagagcatccgcttggaagccaagcacaaggagctggaatcgcacaagcgccgcttggcgaatttccgcaatcagcagggtgctaaccagagggtccgctacaccaatccctacccagggggatcctcctcacagcagcagcagcagcagcaacctcgctccgcgcctcgacctcaattcgtggtgcgcgtcccacagcagcaacagcagcagaatcagcaggggactcgtgcgccccgtcctcctacgccaactgtgcagcccgttcaaggccgcagggacgctcaaggtcagcagcgtctgtgcttcaactgcttcgagcccgggcactttgcggataaatgcccgaagccaaggcgtcagcaaggccaagcgcctccccgctccaacaacggcgggaaggatgtccttcggggccgtgtgaatcacgtgacggccgaggacgtgctgacaactccagacgtcatcgttggtacgttcctcgttcattccatccctgctaccattttgttcgactctggagcttcccactcgtttatatctgtgccattcgtggggaaaagtcagttgggggtagaaaggcttagaaaccctctgctcatcaccacccctggaggggttatgacagcaaagtactatagccctgccgtccctatagaaattcaggggattccttttccctcggatctgattctgctagacaccaagaatttggatgtgattcttgggatgaattggttggcccaattccaaggggtagtggattgcgcgagacgcactgtcactctgtaccgaggaccagagcaaccggttgttttctttgcacctccaacctctgtcagaagttcagaactgcatcagataggtctgtcagaaatccccatagtcagagagttcggagacgtgtttccggaagaactacctggtatgccgcccaagcgagagattgagttccggatagatcttgctccaggaaccactcctctgcacaagcgaccctaccgtatggcagcaaatgaactagccgaagtaaagacacagttggaagaattgaaagaagaggggtacatacgtccgagtacttccccatggggtgctcctgtgatctttgtagagaagaaagacaagacgaagaggatgtgcgttgactacagagctctcaatgaagtcaccatcaaaaacaagtaccctcttccccggatcgatgatctgttcgatcagcttaaaggtgccactgtattctccaagattgatcttcgttccggatatcaccaattacgtattcgtgaagaagatattccgaagaccgcattcactacgcgatacgggctgtatgaattcacggtgatgtcgttcggcttgaccaatgctcctgccttcttcatgaacttaatgaacaaagtgttcatggaatacttggacaagtttgttgtggttttcatcgatgacattctgatatactcacaatcagaggaagaccatcagcaccatctccgtctggtgttgggaaagttgcgggaacatcaattgtatgccaagcttagcaagtgtgagttctggttgtccgaagtcaaattcttaggacacgtgatatctgctaaaggagttgctgtggaccccgaaacagtgaccgccgtcaccgattggaagcaacccaagacagtcactcagattcgcagtttcttgggtttggcaggatactaccggaggttcatcgagaacttctccaaaatcgctcgacccatgacacagttgttgaagaaagaagagaagtttgtgtggagcccgcaatgcgagaaggcgttccaaactctcaaagaaaagctggtttcctcgccagtgttaatcttgccggatactcgcaaggatttcatggtgtactgtgatgcttcgcgccaaggattggggtgcgtgctcatgcaggacggtcatgtggtagcctatgcctcacgccagctacgacctcatgaaggcaactaccctacacatgacttggagttagcagcggtggttcatgctttaaaaatctggcggcactatctcattgggaaccgctgtgaaatatatactgatcataagagtttgaaatacatcttcacccagtcggatctgaatcttcggcaaaggagatggttagaactcatcaaggattatgatgtgggaattcactatcaccctggtaaggctaacgtggttgccgacgctctaagtcggaagagccattgcaatactctcaacgtccgaggcattccacccgagcttaatcaacagatggaagccctgaacctaaacatagttggtcgtggatttttggccgcgctagaagcccagcccaccttgctcgatcaaatccgcgaggctcagaagaatgatccggacatgcatggactcctcaagaatatgaaacagggtaaagccgctggtttcacagaggatgaacacggaaccttatggaacggaaagcgggtatgcgttccagatagcagagaacttaaacagctgatacttcaggaagctcacgaaagtccttattccattcacccgggcagtaccaagatgtacttagatttgaaggagaaatactggtgggtcagcatgaagcgggaaattgcagagtttgtggctctatgtgatgtgtgccagcgtgtcaaggcagaacaccaacgaccggccggacttctccaacctctccaagtgccagaatggaaatgggatgaaattgggatggatttcatcaccggccttccaaaaacccaaggtgggtatgattctatatgggtaatagtggatcgattaaccaaggtagctcgatttattcctgtgaagaccacctatggagggaataaactagcggagctctacttcgctaggatcgtgagtctccatggcgttcccaagaaaatcgtatctgataggggaagccaattcacctctcacttttggaagaagctccaagaagagctgggtactcgattgaatttcagcaccgcatatcacccgcagacagatggacagaccgagcgtctaaatcagatcctagaagatatgctccgcgcatgtgtcctggacttcgggaagacttgggataagagtctcccctatgccgagttctcctacaataacagctaccaagccagcatacaaagggcaccctatgaagcgttgtacgggcgcaaatgccggacaccgctattgtgggaccaagtcggagaaagccaagtgttcgggactgatatcctgagagaagctgaagctaaagtcagaatcattcgggataatctaaaggtggcacagtctcggcagaaaagttatgcagataaccgtcgccgtgatctggaattcgcagtgtatgactttgtgtatcttcgggtcacgccattgcgaggtgtgcacaggtttcagacaaaagggaagctcgcacctcggtatgtgggtcccatccgtatcactgctcgacgcggagaagtcgcctaccagctggagttgcccgcctccttgggcaacgtgcatgatgtgttccatgtgtcgcaactcaagaaatgtcttcgagtgccatccgagcaggccgactcagagcaaattgaagttcgcgaagacttgacctatgtggagaagccagtgaaaatcctggacgccatggagcgcaggaccaggaaccgagtaatccgtttttgcaaggtccagtggagcaaccacgccgaagaagaagctacttgggagcgcgaagacgagctgaaggcagcccatcccgatctcttcgccagttcttccgaatctcggggtcgagattccgtttaa

SEQ ID NO: 23096 - DNA, 3999 bp, Oryza sativa; identical to SEQ ID NO: 14270
  Clone ID: TF_OsC359_6110

SEQ ID NO: 23097 - DNA, 4218 bp, Oryza sativa; identical to SEQ ID NO: 14104
  Clone ID: TF_OsC359_6132

SEQ ID NO: 23098 - DNA, 5416 bp, Oryza sativa
  Clone ID: TF_OsC359_6141
atggatgaagtcgggggtcgatggacattctccagggcaaatgaaggctacacgagctgcggcccgatggccggcagcgttacccgtcgtggtttggacatgactggcttcgtcttggagctgcggggcatgtgcgtggtcttggggtatccacatggagtggattaccaggccaggccgctcccggagcaggagggtgaggatgcagagcctcacgctggttgggaggtcactgcagtgatcctctccggctctcctgagtggacttcgctggcagtcactgcgggtggagattccttccccgccgcttgccagaacgccgctctcctcgccatcggcactcttcaccagcgctacccggacgagttgcagcactcgccctaccgctaccacccccgtcgcggaggagccagcgaccacgccaccttccgagacgccagctcggaggatgacgctaccgtcgtgcatctggcacgcatggtggaggcgtacgacgcggctcgtatcgacttccatcagatggtgcgtcgtggcatggtggagaacaacctgaagatcctggagctgcgccaagagaatctgcagctcaagaaggacctcgacgcgttggaggcgcagctgcatcagctcaaggtcgcccagggagagatctgccgccccaagcgtcgccgcgtctgccgcagccagaagatcaccgcccgcaagagcacctccaggcccgagcttgttcgtcagtccctggcgtggacttgcttcgtcgagacccctcgtgccgagcctgcgcccgtggttccccaggagggggaagcctccggcgttggtagctcggagggtgcgctgttgctcaccttccgccctggcccgtcgcagcgctctccttctctgtttgctggttctgtgtggggttttcagatggtgtcgaccaggagaaatgttaacaccggagaaggcaaccaacccgaaggcagcaaccccaacccccaaggcaacccacctccaccaccaccaccaccagacaccaacgccattctcacccaaatcctcgcccagcaagccaacatgatgaatgctttcctccaccacctccaaaatctgccacagcagaatgctcccccaccacctccccaacactccaaactcgccgaattcctccgcatccgtccacccaccttctctagctccaacaaccctgtggatgcgttggattggttgcatgccgtggggaagaagctagacacggtgcagtgcagcgacgaagagaaagtcatcttcgccgcccaccagctgcaggggcccgcatctctatggtgggaccacttccaggctacgcagccagaggggcaaccgattacttgggctcgcttcaccgccgctttccgaagaacccatgtgcccgctggagtcgtggctcttaagaaaagggaattccgggagttgaagcaaggcaaccgctccgtgatggagtatttgcatgagttcaacaatctagcccgttatgccccggaggatgtgcgggaagatgaggagaagcaagagaagttcttggcaggaatggaccctgagctgtctgttcgtctagtctctggggactacccggattttcaacggctggtggacaagagcatccgcttggaagccaagcacaaggaactggagtcgcacaagcgccgcttgggcgaatttccgcaatcagcagggtgctaaccagagggtccgctacaccaatccctacccagggggatcctcctcgcaacagcagcagcagcagcaacctcgctccgcgccccgacctcaattcgtggtgcgcgtcccacagcagcaacagcagcagaatcagcaagggactcgtgcgccacgtcctcctacgccaactgtgcagcctgttcaaggtcgcagggacgctcaaggtcagcagcgtctgtgcttcaactgtttcgagcctgggcactttgcggataaatgcccaaagccaaggcgtcagcaaggccaagcgcctccccgctccaacaacggtggcaaggacgtcatccgtggtcgcgtgaatcacgtgacggccgaggacgtgctgacaactccagacgtcatcgttggtacgttcctcgttcattccatccctgctacaattttgttcgactctggagcctcccactcgtttatatctgtgccattcgtggggaaaaatcagttgggggtagaaaggcttagaaaccctctgctcatcaccacccctggaggggttatgacagcaaagtattatagccctgccgttcctatagaaattcagggaattccttttccctcggatctgattctgttagacacaaagaacttggatgtgattcttgggatgaattggttggcacaattccaaggagtagtggattgcgcgaggcgcactgtcactctgtaccgaggaccggaacagccggttgttttctttgcacctccaacctctgtcagaagttcagaactgcatcaggtaggtctgtcagaaatccccatagtcagagagttcggagacgtgtttccggaagaactacctggtatgccgcccaagcgagagattgagttccggatagatcttgctccaggaaccactcctctgtacaagcgaccctaccgtatggcagcaaatgagctagccgaagttaagaaacagttggaagaattgaaagaaaaggggtatatacgtccgagtacttccccatggggtgctcctgtgatttttgtagagaagaaagacaaaacgaaaaggatgtgcgttgactacagagctctcaatgaagtcaccatcaaaaacaagtaccctcttccccggatcgatgatctgttcgatcagcttaaaggtgccaccgtattctccaagattgatcttcgttccggatatcaccaactacgtattcgtgaagaagatattccgaagaccgcattcactacgcgatatggactgtatgaattcacggtgatgtcgttcggtttgaccaatgctcctgccttcttcatgaacttaatgaataaagtgttcatggaatacttggacaagtttgttgtggtttttatcgatgacattctgatatactcacaatcagaagaagaccatcagcaccatctccgtctggtgttgggaaagttgcgggaacatcaattgtatgccaagcttagcaagtgtgagttctggttgtccgaagtcaaattcttggggcacgtgatatctgctaaaggagttgctgtggatcccgaaacagtgaccgccgtcaccgattggaagcaacccaagacagtcactcagattcgcagtttcttgggtttggcaggatactatcggagattcatcgagaacttctccaaaatcgctcgacccatgacacagttgttgaagaaagaagagaagttcgtgtggagcccgcaatgcgagaaggcgttccaaactctcaaagaaaagctggtttcctcgccagtgttaatcttgccggatactcgcaaggatttcatggtgtactgtgatgcttcgcgccaaggattggggtgcgtgctcatgcaggacggtcatgtggtagcctatgcttcacgccagctacgacctcatgaaggcaactaccctacacatgacttggagttagcagcggtggttcatgctctaaaaatctggcggcactatctcattgggaaccgctgtgaaatatatactgatcacaagagcttgaaatacatcttcactcagtcagatctgaaccttcggcaaaggagatggttagaactcatcaaggattatgatgtgggaatacactatcatcctggtaaggccaacgtggttgccgacgctctaagtcgaaagagccattgcaacactctcaacgtccgaggcattccgcccgagcttaatcaacagatggaagccctgaacctaagcatagttggtcgcggattcttggccgcgttagaagcaaagcccaccttgctcgatcaaatccgcgaggctcagaagaatgatccggacatgcatggactcctcaagaatatgaaacaaggtaaagccgctggtttcacagaggatgaacacggaactctatggaacggaaagcgggtatgcgttccagatagcagagaacttaaacagctgatacttcgggaagctcacgaaagtccttattccattcacccgggcagtaccaagatgtacttagacttgaaggagaaatactggtgggtcagcatgaagcgggaaatcgcagagtttgtggctctatgtgatgtgtgccagcgtgtcaaggcagaacaccagcgaccggccggactcctccaacctctccaagtgccagaatggaaatgggatgaaattgggatggatttcatcaccggacttccaaaaacccaaggtggatatgattctatatgggtaatagtggatcgattaaccaaggtggctcgattcattcctgtgaagaccacctatggagggaataaactagcggagctctacttcgctaggatcgtgagtctccacggtgttcccaagaaaatcgtgtctgataggggaagccaattcacctctcacttttggaagaagctccaagaagagctgggtactcgattgaatttcagcaccgcatatcacccgcagacagatggacagaccgagcgtctgaatcagattctagaagatatgctccgcgcatgtgtcctagatttcgggaagacttgggataagagtctcccctatgccgagttctcctacaataacagctatcaagccagcatacaaatggcaccttatgaagcgttgtacgggcgcaaatgccggacaccgctattgtgggaccaagttggagaaagccaagtgttcgggactgacatcctaagagaagccgaagctaaagtcagaatcattcgggaaaatctaaaggtggcacagtcccggcagaaaagttatgcagataaccgtcgccgtgatctggaattcgcagtggatgattttgtgtatcttcgggtcacgccattgcgaggtgtgcacaggtttcagacaaaagggaagctcgcacctcggtatgtgggtcccttccgtatcactgctcgacgcggagaagttgcttaccagctggagttgcccgcctccttgggcaacgtgcatgatgtgttccatgtgtcgcaactcaagaaatgtcttcgagtgccatccgagcaggccgactcagagcaaattgaagttcgcgaagacttgacctatgtggagaggccagtgaaaatcctggacaccatggagcgcaggaccaggaaccgggtaatccgtttttgcaaggttcagtggagcaaccacgccgaagaagaagctacttgggagcgcgaagacgagctgaaggcagcccatcccggtctcttcgccagttcttccgaatctcggggtcgagattccgtttaa

SEQ ID NO: 23099 - DNA, 5473 bp, Oryza sativa; identical to SEQ ID NO: 14294
  Clone ID: TF_OsC359_6142

SEQ ID NO: 23100 - DNA, 4792 bp, Oryza sativa; identical to SEQ ID NO: 14101
  Clone ID: TF_OsC359_6230

SEQ ID NO: 23101 - DNA, 2957 bp, Oryza sativa
  Clone ID: TF_OsC359_6231
atgggcactcttcaccagcgctacccgtacgagttgcaacactcgccctaccgctaccaccctcgtcgcggaggagcccgcgactacgccaccttccgggatgctagctcagaggatgacgctaccatcgtgcacctggcgcggatggtggaggcgtacaacgcggctcgtatcgacttccaccagatggtacgtcgcgggatggtcgagaacaacatgaagatcctggaactgcgccaggagaacctgcagctcaagaaggacctagacgcggtggaggcgcagctgcatcagctcaagatcgcccagggaaaggtctgtcgccccaagcgtcgccgcgtctgccgcagccagaagatcaccgcccgcaagagcacctccaggcccgagcttgttcgtcagtccctggcgtggacttgcttcatcgagacccctcgtgccgagcccgcgcccgtggttccccaggagggggaagcctccggcgtcgctctttctctgtttgctggttccgtgtggggttttcagatggtgacgaccaggagaaatgcggttaccggtgatggcaaccaacccgaaggcagcaaccacaaccaccaaggcaacccaccttcaccttctcctcctcctccaccaccaccaccagacaccaacgccattctcacccaaatcctcgcccagcaggccaacatgatgactgctttcctccaccacctccaaaatccgccacaacagaatgccccaccaccacctccccaacactctaaactcgccgagttcctccgcatccgcccacctaccttctctagctccaacaaccccgtggatgcgttggattggttgcatgccgtggggaaaaagctagacactgtgcagtgcagcgatgaggagaaagtcatcttcgccgcccatcagctgcagggacccgcatctctatggtgggaccatttccaggctacgcagccagagggacagcctattacttgggctcgcttcaccgccgcttttcggaggacccatgtgcccgctggagtcgtggcccttaagaaaagggaattccgagagttgaagcaaggcaaccgctccgtgatggagtatttgcatgagttcaacaacctggcccgttacgctccggaggatgtgcgggaagatgaggagaagcaagagaagttcctggcaggaatggaccccgagctgtccgtccgtctagtctctggggattatccggatttccaacgtctggtggacaagagcatccgcttggaagccaagcacaaggaactggagtcgcacaagcgccgcttggcgaatttccgcaaccaacagggtgctaaccaaagggtccgctacaccaatccctatccagggggatcctcctcgcagcagcaacagcagcagcagcaacctcgctccgcgcctcgacctcaattcgtggtgcgcgtcccacagccgcagcaacagcagaatcaacaagggactcgtgcgccccgtcctcctacgcaaactgtgcagcctggtcaaggccgcagggacgctcaaggtcagcagcgtctgtgcttcaactgcttcgagcccgggcactttgcggataaatgcccgaagccaaggcgtcagcaaggccaagcgcctccccgccccaacaacggtgggaaggatgtcattcggggtcgtgtgaaccacgtgatggccgaggacgtgctgacaactccagacgtcatcgttgtgaccgccgtccccgattggaagcaacccaagacagttactcaagtccgcagtttcttaggtttggcaggatactaccggagcgtgtcaaggcagagcaccaacgaccggccggacttctccaacctctccaagtaccagaatggaaatgggatgaaattgggatggatttcatcaccggacttccaaaaacccaaggtggatatgattctatatgggtagttgtggatcgattaaccaaggtagctcgatttattcctgtgaagaccacctatggagggaacaaactagccgagctctacttcgctaggatcgtgagtctccatggcgttcccaagaaaatcgtatctgataggggaagccaattcacctctcacttttggaagaagctccaagaagagctgggtacccgattaaacttcagcaccgcatatcacccgcagacagatgggcagaccgagcgtctaaatcagatcctagaagatatgcttcgcgcatgtgtcctagatttcgggaagacctgggataagagtctcccctatgccgagttctcctacaataacagctatcaagccagcatacaaatggcaccttatgaagcgttgtatgggcgcaagtgccggacaccgctattgtgggaccaagttggggaaagccaagtgttcgggactgatatcctgagagaagctgaagcgaaggtcagaaccattcgggataatctaaaggtggcacagtcccggcagaaaagttatgcagataaccgtcgccgtgacctggaattcgcagtgggtgattttgtgtatcttcgggtcacgccattgcgaggtgtacacaggtttcagacaaaagggaagctcgcacctcggttcgtgggtcctttccgtatcattgctcggcacggagaagtcgcttaccagctggagctgcccgcctccttgggcaacgtgcatgatgtgttccatgtgtcgcaactcaagaaatgtctccgagtgccatccgagcaggccgactcagagcaaattgaagttcgcgaagacttgacctacgtggaaaggccagtaaaaatcctggacaccatggagcgcaggaccaggaaccgggtaatccgtttttgcaaggtccaatggagcaaccacgccgaagaagaagctacttgggagcgtgaagacgagctgaaggcagcccatcccgatctcttcgccagtccttccgaatctcggggtcgagattccgtttaa

SEQ ID NO: 23102 - DNA, 5421 bp, Oryza sativa; identical to SEQ ID NO: 14268
  Clone ID: TF_OsC359_6295

SEQ ID NO: 23103 - DNA, 5352 bp, Oryza sativa; identical to SEQ ID NO: 14209
  Clone ID: TF_OsC359_6321

SEQ ID NO: 23104 - DNA, 5340 bp, Oryza sativa
  Clone ID: TF_OsC359_6368
atgtcatggcacagggccggtgtcctgctgctaggggctcagtcctgcctgcctgtcccgggggttccggccgtaggaggaatggttggcctgggttggcttgggacgagctgggacccagggtcgggttgccggttcggtctgaatcatcgtaggccttgggttaaggcagatggccggcagcatcagccgtcgtggtctggacctgactggtttcgtcttggagctgtggggcatggcaggccgctcccggagcaggagggtgacgatgcagagccccacgctgcttgggaggttactgcagtgatcctcactagctcacccgagaggacttcgttggcagtcaccgcgggtggagattctttctccgccgcttgccagaacgccgctctcctcgccatcggcactcttcaccagcgctacccggacgagttgcagcactcgccctaccgctaccaccctcgccacggaggagcccgcgacttcgccaccttccgggatgctagctcggaggatgacgctaccatcatgcacctggcgcgcatggtggaggcgtacgacgcgacttgtatcgacttccatcagatggtgcgccgtgggatggtcgagaacaacatgaagatcctggagccgcgtcaggagaatctgcagctgaagaaggacctagacgcagtggaggcgcagctgcatcagctcaagatcgcccagggagaggtctgtcgccccaagcgtcgccgcgtctgccgcagccagaagatcaccgcccgcaagagcacctccaggcccgagcttgttcgtcagtccctggcgtggacttgcttcgttcagacccctcgtgccgagcccgcgcccgtggttcctcaggagggggaagcctccggcgttggtagcacggaggatgcgctgttgctcaccttccgtcctggcccgtcgcagcggagaagtgctaataccggtgatggcaaccaacctgagggcagcaaccacaacaaccatggcagcccacctccacctcctcctccgcctccaccaccaccaccagacaccaacgccattctcacccaaatcctcgcccagcaggcctacatgatgactgctttcctccaccacctccaaaatccgccacaacagaatgctccaccaccacccccacaacactctaaactcgccgagttcctccgcatccgtccacctaccttctctagctccaacaaccccgtggatgcgttggattggttgcatgccgtggggaaaaagctagacaccgtgcagtgcagcgatgaggagaaagtcgtcttcgccgcccaccgactgcaggggcccgcatctctatggtgggaccatttccaggctacgcagccagaggggcagcctattacttgggcccgcttcaccgccgccttccggaggacccatgtgcccgccgaagtcatggcccttaagaaaagggaattccgagagttgaagcaaggcaaccgctccgtgatggagtatttgcatgagtttaacaacctggcccggtacgccccggaggatgtacgggaagatgaggaaaagcaggagaagttcttggcaggaatggaccctgagctgtccgtgcgtctagtctccggtgactatccggatttccaacgtctggtggacaagagcatccgcttggaagccaagcacaaggaactagagtcgcacaagcgccgcttggcgaatttccgcaatcaacagggtgctaaccaaagggtccgctacaccaatccctatccagggggatcgtcctcgcagcagcaacagcagcaacaacctcgctccgcgccccgacctcaattcgtggtgcgcgtcccacagccgcagcaacagcagagtcaacaagggactcgtgcgacccgtcctcctatgccagccgtgcagcctggtcaaggccgcagggacgttcaaggtccgcagcgtctgtgcttcaactgcttcgagcccgggcactttgcggataaatgcccgaagccgaggcgccagcaaggccaaccgcctccccgctccaacaacggtggtaaggatgtcattcgggatcgtgtgaaccacgtgacggccgaggacgtgctgacaactccagacgtcatcgttggtacgttcctcattcattccatccctgctaccattttgttcgactctggagcttcccactcgtttatatcggtgccattcgtggggagaaatcagttgggggtagaaaggcttaggaaccctctgctcatcaccacccctggaggggttatgacagcaaagtattatagtcctgccgtccctatagaaattcaggggattccttttccctcggatctgattcttctagacaccaagaacttggatgtgatccttgggatgaattggttggctcaattccaaggaatagtggattgtgcaagacgcactgtcactctgtaccgagggccggaacaaccggttgttttctttgcacccccaacctctatcagtagttcagaacttcatcagataggactgtcagaaatccccatcgtcagagagttcggagacgtgtttccggaagaactacccggtatgccgcccaagcgagagattgagttccggatagatctttctccaggaaccactcctctgtacaagcgaccctaccgtatggcagcaaatgaactggccaaagttaagaaacagttggaagagttgaaagaaaaggggtatatacgtccgagtacttccccctggggtgctcctgtgatttttgtggagaagaaagacaagacgaagaggatgtgcgttgactacagagctctcaatgaagtcaccatcaaaaacaagtaccctcttccccggatcgatgatctgttcgatcagcttaaaggtgccacggtattctccaagattgatcttcgttccggatatcaccagttgcgcatccgtgaagaagatattccgaagaccgcattcaccacgcgatacggactgtatgaattcacggtgatgtcattcggtttaaccaatgctcctgccttcttcatgaacttaatgaagaaagtgttcatggaatacttggataagtttgttgtggttttcattgatgacattctggtatactcacaatcagaggaagaccataagcaccatctccgtctggtgttggggaagttgcgggaacatcaattgtatgccaaacttagcaagtgtgagttctggttgtccgaagtcaaattcttagggcacgtgatatctgctaaaggagttgctgtggaccccgaaacagtgaccgccgtcactgattggaagcaacccaagacagtcactcaaattcgcagtttcttaggtttggcaggatactaccggaggtttatcgagaacttctccaaaatcgctcgacccatgacacagttgttgaagaaagaagagaaatttgtgtggagcccgcaatgcgagaaggcgttccaaactctcaaagaaaagctggtttcctcgccagtgttaatcttgcaggatactcgcaaggacttcatggtgtattgtgacgcttcgcgccaaggattggggtgcgtgctcatgcatgacggtcatgtggtggcctatgcctcacgccagctacggcctcatgaaggcaactaccctacccatgatttggagttagccgcggtggttcatgctctaaaaatctggcggcactatctcattgggaatcactgtgaaatatatactgatcataagagtttgaaatacatcttcacccagtcggatctgaatcttcggcagaggagatggctagaactcatcaaggattatgatgtgggaattcactatcatcctggtaaggccaacgtggtcgccgacgctctaagtcgaaaaagccattgcaacactcttaacgtccgtggcattccacccgaacttaaccaacagatggaagccctgaatctaagcataaatatgaaacagggtaaagccgctggtttcacagaggatgaacacggaaccctatggaacggaaatcgggtatgcgttccagataacagagaacttaaacaactgatacttcaggaagctcacgaaagtccttattccatccaccctggcagtacgaagatgtacttagacttgaaggagaaatactggtgggttagtatgaagcgggaaattgcagagttcgtggccctttgtgatgtgtgccagcgtgtcaaagcagagcaccaacgaccggccggacttctccaacctctccaagtaccagaatggaaatgggatgaaattgggatggatttcatcaccggacttccaaaaacccaaggtggatatgattctatatgggtagttgtggatcgattaaccaaggtagctcgatttattcctgtgaagaccacctatggagggaacaaactagccgagctctacttcgctaggatcgtgagtctccatggcgttcccaagaaaatcgtatctgataggggaagccaattcacctctcacttttggaagaagctccaagaagagctgggtacccgattaaatttcagcaccgcgtatcacccgcagacggatggacagaccgagcatctaaatcagatcctagaagatatgcttcgcgcatgtgtcctagatttcgggaagacctgggataagagtctcccctatgccgagttctcctacaataacagctaccaagccagtatacaaatggcaccttatgaagcgttgtatgggcgcaaatgccggacaccgctcttgtgggaccaagttggggaaagtcaagtgttcgggactgatatcctgagaaaagctgaagcgaaggtcagaaccattcgggataatctaaaggtggcacagtcccggcagaaaagttatgcagataaccgtcgccgtgacctggaatttgcagtggacgattttgtgtaccttcgggtcacgccattgcggggtgtacacaggtttcagacaaaagggaagctcgcacctcggttcgtgggtcctttccgtatcattgctcggcgcggagaagtcgcttaccagttggagctgcccgcctccttgggcaacgtgcatgatgtgttccatgtgtcgcaactcaagaaatgtcttcgagtgccatccgagcaggccgactcagagcaaattgaagttcgcgaagacttgacctacgtggagaggccagtgaaaatcctggacaccatggagcgcaggaccaggaaccgggtaatccgtttttgcaaggtccaatggagcaaccacgccgaggaagaagctacctgggagcgtgaagacgagctgaaggcagcccatcccgatctcttcgctagttcttccgaatctcggggtcgagattccgtttaa

SEQ ID NO: 23105 - DNA, 1221 bp, Oryza sativa; identical to SEQ ID NO: 14304
  Clone ID: TF_OsC359_6432

SEQ ID NO: 23106 - DNA, 4033 bp, Oryza sativa
  Clone ID: TF_OsC359_6549
atggttatgccgatggtgacgaccagaagaaatgctgccaccggtgatggcaaccaacccgaaggcagcaaccacaaccaccagggtaacccacctccacctcctcctccgcctccaccaccaccaccagacaccaacgccattctcacccaaatcctcgcccagcaagccaacatgatgactgctttcctccaccacctccaaaatccaccacaacataatgctccaccacctccccaacactctaaactcgccgagttcctccgcatccgcccacctaccttctctagctccaacaaccccgtggatgcgttggattggttgcatgccgtggggaaaaagctagacacggtgcagtgcagcgatgaggagaaagttatcttcgccgcccaccagctgcagggacccgcatctctatggtgggaccatttccaggctacgcagccagaggggcagcctattacttgggcccgcttcaccgccgctttccgaagaacccatttcaataacctggcccgttacgctccagaggatgtgcgggaagatgaggagaaacaggagaagttcttggcaggaatggaccccgagctgtccgtccgtctagtctccggggactatccggatttccaacgactggtggacaagagcatccgcttggaagccaagcacaaggaactggagtcgcacaagtgccgcttggcgaatttccgcaatcagcagggtgctaaccagagggtccgctacaccaatccctatccagggggatcctcctcgcagcagcaacaacagcagcagcagcaacctcgctccgcgcctcgacctcaattcgtggtgcgcatcccacagccgcagcagcagcagaatcaacaagggactcgtgcgccccgtcctcctacgccaactgtgcagcctggtcaaggccgcagggacgctcaaggtcagcagcgtctgtgcttcaactgcttcgagcccgggcactttgcggataaatgcccaaagccaaggcgtcagcaaggccaagcgcctccccgctccaacaacggcgggaaggatgtcattcggggtcgtgtgaaccacgtgacggccgaggacgtgctgacaactccagacgtcatcgttgaactgcatcagattggactgtcagaaatccccattgtcagagagttcggagacgtgtttccggaagaactacctggtatgccgcccaagcgagagattgagttccggatagatcttgctccaggaaccactcctctgcataagcgaccctaccgtatggcagcaaatgaactggccgaagtaaagaaacagttggaagagttgaaagaaaaggggtacatacgcccgagtacttccccatggggtgctcctgtgatttttgtagagaagaaagacaagacgaagaggatgtgcgtcgactacagagctctcaatgaagtcaccatcaaaaacaagtaccctcttccccggatcgatgatctgttcgatcaacttaaaggtgccactgtattctccaagattgatcttcgttccggatatcaccaattacgtattcgtgaagaagatattccgaagaccgcattcaccacgcgatacgggctgtatgaattcacggtgatgtcgttcggtttaaccaatgcacctgccttcttcatgaacttaatgaacaaagtgttcatggaatacttggataagtttgttgtggttttcattgatgacattctgatatactcacaatcagaggaagaccatcagcaccatctccgtctggtgttgggaaagttgcgggaacatcaattgtatgccaagcttagcaagtgtgagttctggttgtccgaagtcaaattcttagggcacgtgatatcagctaaaggagttgctgtggaccccgaaacagtgaccgccgtcaccgattggaaacaacccaagacagttactcaagtccgcagtttcttaggtttggcaggatactaccggagattcatcgagaacttctccaagatcgctcgacccatgacacagttgttgaagaaagaagagaaatttgtgtggagcccgcaatgcgagaaggcgtttcaaactctcaaggaaaagctggtttcctcgccggtgttaatcttgccggatactcgcaaggacttcatggtgtattgtgacgcttcgcgccaaggattggggtgcgtgctcatgcaggacggtcatgtggtagcctatgcctcacgtcagctacgacctcatgaaggcaactaccctacccatgatttggagttagcagcggtggttcatgctctaaaaatctggcggcactatctcattgggaatcgctgtgaaatctatactgatcataagagtttgaaatacatcttcactcagtcggacctgaatcttcggcaaaggagatggttagaacttatcaaagactatgatgtgggaattcactatcatcctggtaaggccaacgtggttgccgacgctctaagtcgaaagagccattgcaacactcttaacgtccgtggcattccacccgagcttaaccaacagatggaagccctgaacctaagcatagttagtcgtggattcttggccgcgttggaagccaagcccaccttgctcgatcaaatccgcgaggctcagaagaacgacccggacatgcatggactcctcaagaatatgaaacagggtaaagccgctggtttcacagaggatgaacacggaaccctatggaacggaaagcgggtatgcgttccagataacagagaacttaaacagctgatacttcaggaagctcacgaaagtccttattccatccaccctggcagtacgaagatgtacttagacttgaaggagaaatactggtgggttagtatgaagcgggagattgcagagtttgtggccctacgtgatgtgtgccagcgtgtcaaggcagagcaccagcgaccggccggacttctccaacctctccaagtacctgaatggaaatgggatgaaattgggatggatttcatcaccggacttccaaagacccaaggtggatatgattctatatgggtagttgtggatcgattaaccaaggtagctcgattcattcctgtgaagaccacctatggagggaacaaactagcggagctctacttcgctaggatcgtgagtctccatggcgttcccaagaaaatcgtatctgataggggaagccaattcacctctcacttttggaagaagctccaagaagagctgggtactcgattaaatttcagcaccgcctatcacccgcagacagatgggcagaccgagcgtctaaatcagatcctagaagacatgcttcgtgcatgtgtactagatttcgggaagacctgggataagagtctcccctatgccgagttctcctacaataacagctatcaagccagcatacaaatggcaccttatgaagcgttgtacgggcgcaaatggcggacaccgctattgtgggaccaagttggagaaagccaagtgttcgggactgatatcctgagagaagctgaagctaaagtcagaatcattcgggataatctaaaggtggcacagtcccggcagaaaagttatgcagataaccgtcgccgtgacttggaattcgcagtggatgactttgtgtaccttcgggtcacgccattgcgaggtgtacacaggtttcagacgaaagggaagctcgcacctcggtatgtgggtcctttccgtatcgttgctcgacgcggagaagtcgcttaccagttggagctgcccgcctccttgggcaacgtgcatgatgtgttccatgtgtcgcaactcaagaaatgccttcgagtgccatccgagcaggccgactcagagcaaattgaagttcgcgaagatttgacctacgtggagaggccagtgaaaatcctggacaccatggagcgcaggaccaggaaccgggtaatccgtttttgcaaggtccagtggagcaatcacgccgaagaagaagctacttgggagcgtgaagacgagctgaaggcagcccatcccggtctcttcgcca

SEQ ID NO: 23107 - DNA, 5412 bp, Oryza sativa; identical to SEQ ID NO: 14274
  Clone ID: TF_OsC359_6552

SEQ ID NO: 23108 - DNA, 4617 bp, Oryza sativa; identical to SEQ ID NO: 14155
  Clone ID: TF_OsC359_6647

SEQ ID NO: 23109 - DNA, 5605 bp, Oryza sativa
  Clone ID: TF_OsC359_6674
atggatgaagtcgggggtcgatggacattctccagggcaaatgaaggctacacgagctgcggcccggtagtcgagatgtcgtggcagagggttggtgccctgctgcttggggctcagtcctgcctgcctgtcccggaggttccggccgtaggcgggattgggtcgatggccggcagcgtcacccgtcgtggtttggacatgactggcttcgtcttggagctgcggggcatgtgcgtggccctggggtatccacatggagtggactaccaggccaggccgcttccggatcaggagggtgacgacgcggagccccacgctggttgggaggtcaccgcagtgatcctctctggctctcccgagcggacttcgctggcagttaccgcgggtggagattccttccccgccgcttgccagaacgccgctctcctcgccatcggcactcttcaccagcgctacccggacgagttgcagcactcgccctaccgctaccaccctcgtcgcggaggagcccacgactacgccaccttccgggatgctagctcggaggatgacgctaccatcgtgcacctggcgcgcatggtggaggtgtacgacgcggctcgtatcgacttccatcagatggtgcgtcgcgggatggtcgagaacaatctgaagatcctggagctgcgtcaggagaacctgcagctcaagaaggacctagacgcggtggaggcgcagctgcatcagctcaagatcgcccagggagaggtctgccgccccaagcgtcgccgcgtctgccgcagccagaagatcaccgcccgcaagagcacctccaggcccgagcttgttcgtcagtccctggcgtggacttgcttcgtcgagacccctcgtgccgagcccgcgcccgtggttccccaggagggggaagcctccggcattggtagcacggaggctctttctctgtttgctggttctgtgtggggttttcagatggtgacgaccaggagaaatgctgccaccggtgatggcaaccaacccgaaggcagcaaccacaaccatcagggcaacccacctccacctcctcctccgcctccaccaccaccaccagacaccaacgccattctcacccaaatcctcgcccagcaagccaacatgatgactgctttcctccaccacctccaaaatccaccacaacataatgctccaccaccacccccacaacactctaaactcgccgagttcctccgtatccgcccacctaccttctctagctccaacaaccccgtggatgcgttggattggtttcatgccgtggggaaaaagctagacacggtgcagtgcagcgatgaggagaaagttatcttcgccgcccaccaactgcaggggcccgcatctctatggtgggaccatttccaggctacgcagccagaggggcagcctattacttgggcccgcttcaccgccgctttccggagaacccatgtgcccgccggagtcgtggcccttaagaaaagggaattccgagagttgaagcaaggcaaccgctccgtgatggagtatttgcatgagttcaacaacctagcccgttacgccccggaggatgtgcgggaagatgaggagaagcaagaaaagttcttggcaggaatggaccctgaactgtccgtccgtctagtctctggggactatccggattttcaacgattggtggacaagagcatccgcttggaagccaagcacaaggagctggagtcgcacaagcgccgcttggcgaatttccgcaatcaacagggtgctaatcaaaggggccgctacaccaatccctatccagggggatcctcctcgcagcagcaacaacagcagcagcaacctcgccccgcgccccgacctcaattcgtggtgcgcttcccacagccgcagcaacagcagaatcaacaagggactcgtgcgccccgtcctcctacgccaacggtgcagcctggtcaaggccgcagggacgctcaaggtcagcagcgtctgtgcttcaactgcttcgagcccgggcactttgcggataaatgcccaaagccaaggcgtcagcaaggccaagcgcctccccgctccaacaacggcgggaaggatgtcattcggggtcgtgtgaatcacgtgacggccgaggacgtgctgacaactccagacgtcatcgttggactgtcagaaatccccatcgtcagggagttcggagatgtgtttccggaagaactacccggtatgccgcccaagcgagagattgagttccggatagatcttgctccaggaaccactcctctgcacaagcgaccctaccgtatggcagcaaatgaactggccgaagtaaagaaacagttggaagagttgaaagaaaaggggtacatacgtccgagtacttccccatggggtgctcctgtgatttttgtagagaagaaagacaagacgaagaggatgtgcgtcgattacagagctctcaatgaagtcaccatcaaaaacaagtaccctcttccccggatcgatgatctattcgatcagcttaaaggtgccactgtattctccaagattgatcttcgttccggatatcaccaattacgtattcgtgaagaagatattccgaagaccgcattcaccacgcgatacggactgtatgaattcacggtgatgtcattcggtttaaccaatgctcttgcattcttcatgaacttaatgaacaaagtgttcatggaatacttggataagtttgttgtggtgttcattgatgacattctgatatactcacaatccgaggaagaccatcagcaccatctccgtctggtgttgggaaagttgcgggaacatcaattgtatgccaagcttagcaagttcatcgagaacttctccaaaatcgctcgacccatgacacagttgttgaagaaagaagagaaatttgtgtggagcccgcaatgcgagaaggcgtttcaaactctcaaggaaaagctggtttcctcgccggtgttaatcttgccggatactcgcaaggacttcatggtgtattgtgacgcttcgcgccaaggattggggtgcgtgctcatgcaggacggtcatgtagtagcctatgcctcacgtcagctacgacctcatgaaggcaactaccctacacatgacttggagttagccgcggtggttcatgctctaaaaatctggcggcactatctcattgggaatcgctgtgaaatatataccgaccataggagtttgaaatacatcttcacccagtcggatctgaatcttcggcaaaggagatggttagaactcatcaaagactatgatgtgggaattcactatcatcctggtaaggccaacgtggttgccgacgctctaagtcgaaagagccattgcaacactcttaacgtccgtggcattccacccgaacttagtcaacagatggaagccctgaacctaagcatagttagtcgcggattcttggctgcgttagaagccaagcctaccttgctcgatcaaatccgcgaggcttcagaagaatgatccggacatgcatggactcctcaagaatatgaaacagggtaaagccgctggttttacagaggatgaacacagaaccctatggaacggaaagcgggtatgcgttccagataacagagaacttaaacagctgatacttcaggaagctcacgagagcccttattccattcacccgggcagtacaaagatgtacctagacttgaaggagaaatactggtgggttagcatgaagcgggaaattgcagagtttgtggccctatgtgatgtgtgccagcgtgtcaaggcagagcaccaacgaccggccggacttctccaacctctccaagtaccagaatggaaatgggatgaaattgggatggatttcatcaccggacttccaaaaacccaaggtggatatgattctatatgggtagttgtggatcgattaaccaaggtagcacggttcattcccgtaaagaccacctatggagggaacaaactagccgagctctacttcgctaggatcgtgagtctccatggcgttcccaagaaaatcgtatctgataggggaagccaattcacctctcacttttggaagaagctccaagaagagctgggtactcgattgaatttcagcaccgcctatcacccgcagaaagatggacagaccgagcgtctaaatcagatcctagaagatatgctccgcgcatgtgtactagatttcgggaagacctgggataagagtctcccctatgccgagttctcctacaataacagctatcaagccagcatacaattggcaccttatgaagcgttgtacgggcgcaaatgccggacaccgctattgtgggaccaagttggagaaagccaagtgttcgggactgatatcctgagagaagctgaagctaaagtcagaatcattcgggataatctaaaggtggcacagtcccggcagaaaagttatgcagataatcgtcgccgtgacctggaattcgcagtgggtgattttgtgtaccttcgggtcacgccattgcgaggtgtacacaggtttcagacaaaagggaagctcgcacctcggtatgtgggtcctttccgtatcgttgctcgacgcggagaagtcgcttaccagttggagctgcccgcctccttgggcaacgtgcatgatgtgttccatgtgtcgcaactcaataaatgccttcgagtgccatccgagcaggccgactcagagcagattgaagttcgcgaagatttgacctacgtggagaggccagtgaaaatcctggacaccatggagcgcaggaccaggaaccgggtaatccgtttttgcaagctccagtggagcaaccatgccgaagaagaagctacctgggagcgtgaagacgagctgaaggcagcccatcccgatctcctcgccaccgcccgcgcccgcgggtgcggtgacgcgtgggacccacggcgccggccggcgtcagccgcgtgcgcccggtccaccgtggaccgtgagggtgacgcgtgggccccactcccgtggacccgccccacggtccacggtggaccgggcgcacgcggctggcggcggtcggcgccgtgggtcccgcgcgtcagccgcacccgcgggcgcgggcggctgacggccgggcccacttggcagccgcgagggcgcgcccgagggcggcctcgccggcgcggccgacgggagcggcgcgcccgcgccccgatggtcaccgccggcgaccaccggcgcggcggagcggcgcccgagagagaggagggaagggggaaggcgaacggcggtcctcggctcaccccgggacaacgacgacgacgagaacggcggccggagcggaggaagacggcggcgcggctcgggatgacgatggcgacggcgctccgacggtcggcgagcgaaacggaggcgcggacgaggtcgacggcgatgcggcgatgccgagggaggtggcgccgagtaaggaggaagtccggagcggcggcggcggcggaacggagctcggcggcgatggcggagagagcggagcacggcgcgagcacgaatccgacggcgagagcgagcggcgagcggcggaaacggaagagcggagctcgggcaacgtttaaatag

SEQ ID NO: 23110 - DNA, 5848 bp, Oryza sativa
  Clone ID: TF_OsC359_6898
agaagtcaagaacccatttttgtgctttgtttctgctgttatgtggagtttagtagagtaaaagcccttttcttttccgttggtcgtgtagacgctgcagcttcggaagatccgctcttcgggaagttgaagccgacgtttgggaaagcgagcaaggcaagtcacatcatcacctctcttcctctttcaaaacccctaaaacctgttttcggtgaggtttgggtgcatgccagttatgggaagtagcaccccggccactataaggattaagctcgggcctctgttgcaaagcactaccgtacttccacatgtctagtgggtaaggcttagtttgtggctcagtctggttataaacaaaagtacacggatggaggtggatgaagtcgggggtcgatggacattctccagggcaaatgaaggctacacgagctgcggcccggtagtcgagatgtcatggcacagggccggtgtcctgctgctaggggctcagtcctgcctgcctgtcccgggggttccggccgtaggtgggattgggtcggtactcttgtctatggctaggatgggttggaaactatgtcacagcttccgtctgtataccgtggtgatggccggcagcgtcacccgtcgtggtttggacatgactggcttcgtcttggagctgcggggcatgtgcgtggtcttggggtatccacatggagtggattaccaggccaggccgctcccggagcaggagggtgaggatgcagagccccacgctggttgggaggttactgcagtgatcctctctggctctcccgagcggacttcgctggcagtcaccgcgggtggagattccttccccgccgcttgccagaacgccgctctcctcgccatcggcactcttcaccagcgctacccggacgagttgcagcactcgccctaccgctaccaccctcgtcgcggaggagcccgcgactacgccaccttccgggatgctagctcggaggatgacgctaccatcgtgcacctggcgcgcatggtggaggcgtacgacgcagctcgtatcgacttccaccagatggtacgccgtgggatggtcgagaacaacatgaagatcctggagctgcgtcaggagaacctgcagctcaagaaggacctagacgcggtggaggcgcagctgcagcagctcaagatcgcccagggggaggactgccgtcccaagcgtcgccgcgtctgccgcagccagaagatcaccgcccgcaagagcacctccaggcccgagcttgttcgtcagtccctggcgtggacttgcttcgtggagacccctcgtgccgagcccgcgcccgtggttccccaggagggggaagcctccggcgttggtagcacggaggatgcgctgttgctcaccttccgtcctggcccgtcgcagcggagaaatgctaacaccggtgatggcaatcaacctgaaggcagcaaccacaaccgccagggcaacccacctccacctcctcctccgcctccaccaccaccaccagataccaacgccattctcacccaaatcctcgcccagcaagccaacatgatgacggctttcctccaccacctccaaaatccgccacaacataatgctccaccaccacctccccaacactctaaactcgccgagttcctccgcatccgtccacccaccttctccagctccaacaaccccgtggatgcgttggattggttgcatgccgtggggaaaaagctagacactgtgcagtgcagcgatgaggagaaagtcgtcttcgccgcccaccagctgcaggggcccgcatctctatggtgggaccatttccaagctacgcagccagaggggcagcctattacttgggcccgcttcaccgccgctttccggagaacccatgtgcccgccggagtcgttgctcttaagaagagggagttccgagagttgaagcaaggcaaccgctccgtgatggagtatttgcatgagttcaacaatctggcccgttacgccccggaggatgtgcgggaagatgaggagaagcaagagaagttcttggcaggattggaccctgaactgtccgtccgtctagtctctggggactatccggatttccaacgtctggtggacaagagcatccgcttggaggccaagcacaaggaactggagtcgcacaagcgccgcttggcgaatttccgcaatcaacagggtgctaaccaaagggtccgctacaccaacccctatccagggggatcctcctcgcaacagcaacaacagcagcagcaacctcgctccgcgccccgacctcaattcgtggtgcgcgtcccacagccgcagcagcagcagaatcagcaagggactcgtgcgccccgtcctcctacgccaactgtgcagcctggtcaaggccgcagggacgctcaaggtcagcagcgtctgtgcttcaactgcttcgagcccgggcactttgcggataaatgcccgaagccaaggcgtcagcaaggtcaagcgcctccccgctccaacaacggtgggaaggatgtcattcggggtcgtgtgaatcacgtgacggccgaggacgtgttgacaactccagacgtcatcgttggtacgttcctcgttcattccatccctgctaccattttgttcgactctggagcttcccactcgtttatatctgtgccattcgtggggagaaatcagttgggggtagaaaggcttaggaaccctctgctcatcaccacccctggaggggttatgacagcaaagtattatagccctgccgtccctatagaaattcaggggattccttttccctcggatctgattctgctagacaccaagaacttggatgtgattcttgggatgaattggttggctcaattccaaggagtagtggattgcgcgagacgcactgtcactctgtaccgagggccggaacaaccggttgttttctttgcacccccaacctctgtcagtagttcagaactgcatcagataggactgtcagaaatccccatagtcagggagttcatagatgtgtttccggaagaactacccggtatgccgcccaagcgagagattgagttccggatagatcttgctccaggaaccactcctctgcacaagcgaccctaccgtatggcagcaaatgaactggccgaagtaaagaaacagttggaagagttgaaagaaaaggggtatatacgtccgagtacttccccctggggtgctcctgtgatttttgtggagaagaaagacaagacgaagaggatgtgcgttgactacagagctctcaatgaagtcaccatcaaaaacaagtaccctcttccccggatcgatgatctgttcgatcagcttaaaggtgccactgtattctccaagattgatcttcgttccggatatcaccaattacgtattcgtgaagaagatattccgaagaccgcattcaccacgcgatacgggctgtatgaattcacggtgatgtcattcggtctaaccaatgcacctgccttcttcatgaacttaatgaacaaagtgttcatggaatacttggataagtttgttgtggttttcattgatgacattctgatatactcacaatcagaggaagaccatcagcaccatctccgtctggtgttgggaaagctgcgggaacatcaattgtatgccaagcttagcaagtgtgagttctggttgtccgaagtcaaattcttaggacacgtgatatctgctaaaggagttgctgtggaccccgaaacagtgaccgccgtcgccgattggaagcaacccaagacagttactcaagtccgcagtttcttaggtttggcaggatactaccggagattcatcgagaacttctccaaaatcgctcgacccatgacacagttgttgaagaaagaagagaaatttgtgtggagcccgcaatgcgagaaggcgttccaaactctcaaggaaaagctggtttcctcgccggtgttaatcttgccggatactcgcaaggacttcatggtgtattgtgacgcttcgcgccaaggattggggtgcgtgctcatgcaggacggtcatgtggtagcctatgcctcgcgtcagctgcgacctcatgaaggcaactaccctacacatgatttggagttagccgcggtggttcatgctctaaaaatctggcggcactatctcattgggaatcgctgtgaaatatataccgatcataagagtttgaaatacatcttcacccagtcggatctaaatcttcggcaaaggagatggttagaactcatcaaggactatgatgtgggaattcactatcatcctggtaaggccaacgtggttgccgacgctctaagtcgaaagggccattgcaacactcttaacgtccttggcattccacccgaacttaatcaacagatggaagccctgaacctaagcgtagttggtcgcggattcttggctgcgctagaagccaagcctaccttgctcgatcaaatccgcgaggctcagaagaatgatccggacatgcatggactcctcaagaatatgaaacaggataacagagaacttaaacagctgatacttcaggaagctcacgagagcccttattccattcacccgggcagtacaaagatgtacttagacttgaaggagaaatactggtgggttagtatgaagcgggaaattgcagagttcgtggccctttgtgatgtgtgccagcgtgtcaaggcagagcaccaacgaccggccggacttctccaacctctccaagtaccagaatggaaatgggatgaaattgggatggatttcatcacaggacttccaaaaacccaaggtggatatgattctatatgggtagttgtggatcgattaaccaaggtagctcgatttattcctatgaagaccacctatggagggaacaaactagccgagctctacttcgctaggatcgtgagtctccatggcgttcccaagaaaatcgtatctgataggggaagccaattcacctctcatttctggaagaaactccaagaagagttgggaacccgattaaatttcagcaccgcgtatcacccgcagacagatggacagaccgagcgtctaaatcaaatcctagaagatatgctccgcgcatgtgtactagatttcgggaagacctgggataagagtctcccctatgccgagttctcctacaataacagttatcaagccagcatacaaatggcaccttatgaagcgttgtacgggcgcaaatgccggacaccgctcttgtgggaccaagttggagaaagccaagtgttcgggactgatatcctgagagaagctgaagctaaagtcagaatcattcgggataatctaaaggtggcacagtcccggcagaaaagttatgcggataaccgacgccgtgatctggaattcgtagtggatgactttgtgtatcttcgggtcacgccattgcgaggtgtacacaggtttcagacaaaagggaagctcgcacctcggtatgtgggtcctttccgtatcgttgctcgacgcggagaagtcgcttaccagctggagctgcccgcctccttgggcaacgtgcatgatgtgttccatgtgtcgcaactcaagaaatgccttcgagtgccatccgagcaggccgactcagagcaaattgaagttcgcgaagatttgacctatgtggagaggccagtgaaaatcctggacaccatggagcgcaggaccaggaaccgggtaatccgtttttgcaaggtccagtggagcaaccatgctgaagaagaagctacttgggagcgtgaagacgagctgaaggcagcccatcccgacctcttcaccagttcttccgaatctcggggtcgagattccgtttaa

SEQ ID NO: 23111 - DNA, 4536 bp, Oryza sativa; identical to SEQ ID NO: 14135
  Clone ID: TF_OsC359_6901

SEQ ID NO: 23112 - DNA, 5271 bp, Oryza sativa; identical to SEQ ID NO: 14228
  Clone ID: TF_OsC359_6955

SEQ ID NO: 23113 - DNA, 5001 bp, Oryza sativa; identical to SEQ ID NO: 14185
  Clone ID: TF_OsC359_7002

SEQ ID NO: 23114 - DNA, 6051 bp, Oryza sativa
  Clone ID: TF_OsC359_7171
aatggagccgagatctccgcggccgtttcctccctctccggccgcgctctccccctctcggcgctatatatttgctccccgtgcctctctcctccgtttccgccgctcgccgctcgctctcgccgtcggattcgtgctagcgccgtcctcctctctctccgccgtcgccgccaaccttcggttcgccgccgtcgtcgctccggacttcctcccgactcggcgccacctccatcggcttcgccgcgtcgtcgtcgaccccgtccgctcctccgtttcgcccgccgaccgccggagcaccgtcgccctcgtcatcccgaaccgcgccgccgcctctcgccgcttcggtcgtcgtttccgccgccctcgtcgtcccggggtgagccgaggaccgccgttcgctttccctcttctctccgctctctcgggcgccgctccgccgcgccggtggtcgccggcggtgaccatcggggagcgggtgcgccgcctcccgtcggccgtgccggcgaggccgccttcggccgcctcccgcggctgccaggtggggcccggccgtcagccgcccgcgcccgcgggtgcggctgacgcgtgggacccacggcgccgaccgccgccagccgcgtgctcccggtccaccgtggacccacctcggccatataaggaccggtcttcgggcctctgttgcaaagcactaccgtacttccacatgtctagtggggcaaatgaaggctacacgagctgcggcccggtagtcgagatgtcatggcagagggttggtgccctgctgctaggggctcagtcctgcctgcctgtcccggaggttccggccgtaggcgggattgggtcgatgtacacctctgatcagagtttaatctattcgaatagccgcgccctcggttatgggcaagccgagcaatgtacccaaatggccggcagcgtcacccgtcgtggtttgcacatgactggcttcgtcttggagctgcggggcatgtgcgtggtcttggggtatccacatggagtggattaccaggccaggccgctcccggagcaggagggtgaggatgcagagccccacgctggttgggaggtcactgcagtgatcctctctggctctcccgagcggacttcgctggcagtcaccgcgggtggagattccttccccgccgcttgccagaacgccgccctcctcgccatcggcacccttcaccagcgctacccggacgagttgcagcactcgccctaccgctaccaccctcgtcgcggaggagcccgcgacttcgccaccttccgggatgctagctcggaggatgacgctaccatcgtgcacctggcacgcatggtggaggcgtacgacgcggctcgtatcgacttccatcagatggtgcgccgcggtatggtcgagaacaacatgaagatcctggagctgcggcaggagaacctgcagctcaagaaggacctcgacgcggtggaggcgcagctgcatcagctcaagatcgcccagggagaggtctgccgccccaagcgtcgccgcgtctgccgcagccagaagatcaccgcccgcaagagcacctccaggcctgagcttgttcgtcagtccctggcgtggacctgcttcgtcgagacccctcgtgccgagcccgcgcccgtggttccccaggagggggaagcctccggcgttggtagcacggaggatgcgctgttgctcaccttccatggtgacgaccaggagaaatgctgttaccggtgatggcaatcaacctgaaggcagcaaccacaaccaccagggcaacccacctccacctcttccttcggcctccgccaccaccaccagacaccaacgccattctcacccaaatcctcgcccagcaagccaacatgatgactactttcctccaccacctccaaaatccgccacaacagaatgctccacctccacctccccaacactctaaactcgccgagttcctccgcatccgcccacctaccttctctagctccaacaaccccgtggatgcgttggattggttgcatgccgtggggaaaaagctggacactgtgcagtgcagtgatgaagagaaagtcatcttcgccgcccaccagctgcagggacccgcatctctatggtgggaccacttccaagctacgcagccagagggacagcctattacatgggctcgcttcaccgccgctttccggagaacccatgtgcccgccggagtcgtggccctcaagaaaagggaattccgagagttgaagcaaggcaaccgctccgtgatggagtatttgcatgagttcaacaacctggcccgttacgctccggaggatgtgcgggaagatgaggagaagcaagagaagttcctggcaggaatggaccccgagctgtccgtccgtctagtctctggggactatccggatttccaacgtctggtggacaagagcatccgcttggaagccaagcacaaggaactggagtcgcacaagcgccgcttggcgaatttccgcaatcaacagggtgctaaccaaagggtccgctacaccaatccctatccagggggatcctcctcgcagcagcaacaacagcagcagcaacctcgctccgcgcctcgacctcaattcgtggtgcgcgtcccacagccgcagcagcagcagaatcaacaagggactcgtgcgccccgtcctcttacgccagccgtgcagcctggtcaaggccacagggacgctcaaggtcagcagcgtctgtgcttcaactgctttgagcccgggcactttgcggataaatgcccgaagccaaggcgtcagcaaggccaagcgcctccccgctccaacaacggtggcaaggacgtcattcggggtcgtgtgaatcacgtgacggccgaggacgtgctgacaactccagacgtcatcgttggtacgttcctcgttcattccatccctgctaccattttgttcgactctggagcttcccactcgtttatatctgtgccattcgtggggagaaatcagttgggggtagaaaggcttaggaaccctctgctcatcaccacccctggaggggttatgacagcaaagtattatagccctgccgtccctatagaaattcaggggattccttttccctcggatctgattctgctagacaccaagaagttggatgtgatccttgggatgaattggttggctcaattccaaggagtagtggtttgcgcgagacgcactgtcactctgtaccgagggccggaacaaccggttgttttctttgcacccccagcctctgtcagaagttcagaacttcatcagataggactgtcagaaatccccatagtcagggagttcggagacgtgtttccggaagaactacctggtatgccgcccaagcgagagattgagttccggatagatcttgctccaggaaccactcctctgtacaagcgaccctatcgtatggcagcgaatgaactggccgaagtcaagaaacagttggaagagttgaaagaaaaggggtatatacgtccgagtacttccccatggggtgctcctgtgatttttgtagagaagaaagacaagacgaagaggatgtgcgtcgactacagagctctcaatgaagtcaccatcaaaaacaagtaccctcttccccggatcgatgacctgttcgatcaacttaaaggtgccactgtattctccaagattgatcttcgttccggatatcaccaattacgtatccgtgaggaagatattccgaagactgcattcaccacgcgatacgggctgtatgaattcacggtgatgtcgttcggcttgaccaatgctcctgccttcttcatgaacttaatgaacaaagtgttcatggaatacttggataagtttgttgtggttttcattgatgacattctgatatactcacaatcagaagaagaccatcagcaccatctccgtctggtgttgggaaagttgcgggaacatcaattgtatgccaagcttagcaagtgtgagttctggttgtccgaagtcaaattcttagggcacgtgatatctgctaaaggagttgctgtggatcccgaaacagtgaccgccgtcaccgattggaagcaacccaagacagtcactcaaattcgcagtttcttaggtttggcaggatactaccggaggttcatcgagaacttctccaaaatcgctcgacccatgacacagttgttgaagaaagaagagaaatttgtgtggagcccgcaatgcgagaaggcgtttcaaactctcaaggaaaagctggtttcctcgccggtgttaatcttgccggatactcgcaaggacttcatggtgtattgtgacgcttcgcgccaaggattggggtgcgtgctcatgcaggacggtcatgtggtagcctatgcctctcgccagcttcggcctcatgaaggcaattaccctacccatgatttggagttagccgctgtggttcatgctctaaaaatctggcggcactatctcattgggaatcgctgtgaaatatataccgatcataagagcttgaaatacatcttcacccagtcggatctgaatcttcggcaaaggagatggttagaactcatcaaggattatgatgtgggaattcactatcatcctggtaaggccaacgtggttgccgacgctctaagtcgaaagagtcattgcaacactcttaacgtccgtggcattccacccgaacttagtcaacaaatggaagccctgaacctaagcatagttggtcgtggattcttggctgcgttggaagccaagcctaccttgctcgatcaaatccgtgaggctcagaagaatgatccggacatgcatggactcctcaagaatatgaaacagggtaaagccgctggtttcacagaggatgaacacggaaccctatggaacggaaatcggcgtgtcaaggcagagcaccagcgaccggccggactcctccaacctctccaagtgccagaatggaaatgggatgaaattgggatggatttcatcaccggacttccaaaaacccaaggcggatatgattctatatgggtagttgtggatcggttaaccaaggtggctcgattcattcctgtgaagaccacctatggagggaacaaactagcggagctctacttcgctaggatcgtgagtctccatggtattcccaagaaaatcgtatctgataggggaagccaattcacctctcacttttggaagaagctccaagaagagcttggtacccgattaaatttcagcaccgcgtaccacccgcagacagatggatagaccgagcgtctaaatcagatcctagaagatatgcttcgcgcatgtgtcctagatttcgggaagacctgggataagagtctcccctatgccgagttctcctacaataacagttatcaagccagcatacaaatggcaccttatgaagcgttgtacgggcgcaaatgccggacaccgctattgtgggaccaagttggagaaagccaagtgttcgggactgatatcctgagagaagctgaagctaaagttagaaccattcgggataatctaaaggtggcccagtcccggcagaaaagttatgcagataaccgtcgccgtgacctggaattcgcagtggatgattttgtgtaccttcgggtcacgccattgcgaggagtacataggttccagacaaaagggaagctcgcacctcggtatgtgggtcctttccgtatcattgctcggcgcggagaagtcgcttaccagttggagctgcccgcctccttgggcaacgtgcatgatgtgttccatgtgtcacaactcaagaaatgtcttcgagtgccatccgagcaggccgactcagagcaaattgaagttcgcgaagatttgacctacgtggagaggccagtgaaaatcctggacaccatggagcgcaggaccaggaaccgggtaatccgtttttgcaaggtccagtggagcaaccacgccgaagaagaagctacttgggagcgtgaagacgagctgaaggcagcccatcccgatctcttcgccagttcttccgaatctcggggtcgagattccgtt

SEQ ID NO: 23115 - DNA, 2987 bp, Oryza sativa
  Clone ID: TF_OsC359_7226
atggcggccggacctcccgcgccggtttcctcccttccccggccaccctctctcgacccggctctatttaaaccctccccgctcctcctccttcagtttccgcctctcgccgcccttcctcctcgccggaatcaaggtcgcgccgtcgctctctccctccgccgtcgccatcgagctccggtccgccgccgtcgtcgtcccggatcacctcccacctcggcgccgcctccttcggctttgccgcatcctcgccgacctcgtccacccctccgtttcggtcgccgaccgccggaacgccgtcgaccccgtcgactcgagccgcgccgccgccttcctccgctccggccgcctttttcgtcgtcgccgtcgacctagggtgagccgtggaccgccgcttcttttcccccttcccttcccctctctcggccgccgctccgccgtgcctatggccgccgccggcgaccataggggcgcgggcgccgcctcccgccggccgcaccggcttggccgccctcgggcgcaccgagtggctgccgcgtggggcccggccgtcagccgcccgcgcccttaggtgcggctgacgcgtgggacccacggtgccggccggtgtgagcccgggtgcacccggtccaccgtggacccacctcggccatataaggaccggtcttcgggcctctgttgcaaagcactaccgtacttccacatgtctagtgggacaaatgaaggctacacgagctgcggcccggtagtcgagatgtcatggcacagggccggtgtcctgctgctaggggctcagtcctgcctacctgtcccgggggttccggccgtaggtgggattgggtcgatgtacacctctgatcagagtataatctattcgaatagccgcgccctcggttatgggcaagccgagcaatgtacccaaatggccggcagcatcaatcgtcgtggtctggacctgactggcttcgttttggagctgcggggcatgtgcgttgtcctggggtatccgcatggagtggactaccagggcaagcagctcccggagcaggagggtgacgatgcagagccccacgctgcttgggaggttactgcagtgatcctcactggctcacccgagaggacttcgttggcagtcaccgcgggtggagattccttctccgccgcttgccagaacgccgcactcctcgccatcggcactcttcaccagcgctacccggacgagttgcagcactcgccctaccgctaccaccctcgccgcggaggagcccgcgactacgccaccttccgggatgctagctcggaggatgacgctaccatcatgcacctagcgcgcatggtggaggcgtacgacgcggcccgtatggacttccatcagatggtgcgccgcgggttggtcgagaacaacatgaagatcctggagctgcgtcaggagaatctgcagctgaagaaggacctagacgtagtggaggcgcagctgtgtcagctcaagatcgcccagggagaggtctgtcgccccaagcgtcgccgcgtctgccgcagcctgaagatcaccgcccgcaagagtacctccaggcccgagcttgttcgtcagtccctggcgtggacctgcttcgtcgagacccctcgtgccgagcccgcgcccgtggttcctcaggaggatggagtctccggcgttggcagcacggaggatgcgctgctgctcaccttccatggtgacaaccaggagaagtgctgctaccggtgatggcaaccaacccgtaggcagcaaccacaacaaccatggcagcccacctccacctcctcccccgcctccaccaccaccactagacaccaacaccatcctcacccaaatcatcgcccagcgggccaacatgatggctgctttcctccaccacatccaaaatccgccacaacataatgctccaccaccacccccacaacactctaaactcgccgagttcctccgcatccgtccacctaccttctctagctccaataaccccgtggatgctttggattggttgcatgccgtggggaaaaagttagacaccgtgcagtgcaacgatgaggagaaagtcatctttgccgctcactaactgcaggggcccgcatctctatggtgggaccacttccaggctacgtagccagaggggcagcctattacttgggcccgcttcaccgcctctttccagagaacccatgtgcccgtcggagtcatggcccttaagaaaagggaattctgagagttgaagcaaggcaaccgctccatgatggagtatttgcatgagtttaacaacctggcccggtacgccccggaggatgttcgtgaagatgaggagaagcaagagaagttcttggcaggaatggaccctgagctgtccgtgcgtctggtctccggggactatccggatttccaacgtctggtggacaagagcatccgcttggaagccaagcacaaggaactggagtcgcacaagcgtcgcttggcgaatttccgcaaccaacagggggctaaccaaagggtccgctacaccaatccctatccagggggatcctcctcgcagcagcagcagcagcagcaacctcgctccacgtcccgacctcaattcgtggtgcatgtcccacagccgcagcaacagcagagtcagcaagggactcgtgcgccccgtcctcctacgccagccgtgcagcctgttcaaggccgcagggacgctcaaggtcagcagcgtctgtgcttcaactgcttcgagcctgggcactttgcggataaatgcccaaagccgaggtgccagcaaggccaagcgcctccccgctccaacaacggtggtaaggatgtcattcggggtcgtgtgaaccacgtgacggccgagaacgtgctgacaactccagacgtcatcgttggtacgttcctcattcattccatccctgctaccatttttgtcacgtcccaaaacgactctaaaatacatcctctaaattatgcctag

SEQ ID NO: 23116 - DNA, 3140 bp, Oryza sativa
  Clone ID: TF_OsC359_7283
tcaggtccgcagcgtctgtgcttcaactgcttcgagcccggacactttgcggataaatgcccgaagccaaggcgtcagcaaggccaagcgcctccccgctccaacaacggtgggaaggatgtcattcgtggtcgtgtgaatcacgtgacggccgaggacgtgctgacaactccagacgtcatcgttggtacgttcctcgttcattccatcctctgtaccgagggccagaacacccagttgttttctttgcacctccaacctctggtatgccgcccaagcgagagattgagttccggatagatcttgctccaggaaccactcctctgcacaagcgaccctaccgaatggcagcaaatgaactggccgaagtaaagaaacagttggaagagttgaaggaaaaggggtatatacgtctgagtactttcccatggggtgctcctgtgatttttgtggagaagaaagacaagacgaagaggatgtgcgttgactacagagctctcaatgaagtcaccatcaagaacaagtaccctcttccccggatcgatgatctgttcgatcagcttaaaggtgccactgtattctccaagatcgatcttcgttccggatatcaccaattacgtatttgtgaagaagatattccgaagaccgcattcaccacgcgatacgggctgtatgaattcacggtgatgtcgttcggtctaaccaatgcacctgccttcttcatgaacttaatgaacaaagtgttcatggaatacttggacaagtttgttgtggttttcatcgatgacattctgatatactcacaatcagaggaagaccatcagcaccatctccgtctggtgttgggaaagttgcgggaacatcaattgtatgccaagcttagcaagtgtgagttctggttgcccgaagtcaaattcttggggcatgtgatatctgctaagggagttgctgtggaccccgaaacagtgaccgccgtcaccgattggaagcaacccaagacagttactcaagtccgcagtttcttaggtttggcaggatactaccggagattcatcgagaacttctccaaaatcgctcgacccatgacacagttgttgaagaaagaagagaaatttgtgtggagcccgcaatgcgagaaggcgttccagactctcaaagaaaagctggtttcctcgccggtgttaatcttgccggatactcgcaaggatttcatggtgtactgtgatgcttcgcgccaaggattcgggtgcgtgctcatgcaggatggtcatgtggtggcctatgcctcacgccagctacggcctcatgaaggcaactatcctacccatgatttggagttagccgcggtggtgcatgctctaaaaatctggcggcactatctcattgggaatcgctgtgaaatatatactgatcataagagtttgaaatacatcttcactcagtcggacctgaatcttcggcaaaggagatggttagaactcatcaaggattatgatgtgggaattcactatcatcctggtaaggccaacgtggttgccgacgctctaagtcggaaaagccattgcaacactcttaacgtccgtgacatcccacccgaacttaatcaacagatggaagccctgaacctaagcatagttggtcgtggattcttggctgcgttggaagccaagcctaccttgctcgaccaaatccgcgaggctcagaagaatgacccggacatgcatggactcctcaagaatatgaaacagggtaaagccgctggtttcacagaggatgaacacggaaccctatggaacggaaagcgggtatgcgttcccgataacagagaacttaaacagctgatacttcaggaagctcacgagagcccttattccattcacccgggcagtacaaagatgtacctagacttgaaggagaaatactggcagagcactagcgaccggccggacttctccaacctctccaagtaccagaatggaaatgggatgaaattgggatggatttcatcaccggacttccaaaaacccaaggtggatatgattctatatggcaccgcgtatcacccgcaaacagatggacagaccgagcgtctaaatcagatcctagaagatatgcttcgcgcatgtgtactagatttcgggaagacctgggataagagtctcccctatgccgagttctcctacaataacagctatcaagccagcatacaaatggcaccttatgaagcgttgtacgggcgcaaatgccggacaccgctcttgtgggaccaagttggagaaagccaagtgttcgggactgatatcctgagagaagctgaagctaaagtcagaatctttcgggataatctaaaggtggcacagtcccggcagaaaagttatgcagataaccgtcgccgtgacctggaattcgcagtgggtgattttgtataccttcgggtcacgccattgcgaggtgtacacaggtttcagacgaaagggaagcttgcacctcggtatgtgggtcctttccgtatccttgctcggcgcggagaggtcacttaccagctggagctgcccgcctccttgggcaacgtgcatgatgtgttccatgtgtcgcaacttaagaaatgtcttcgagtgccatccgagcaggccgactcagagcaaattgaagttcgcgaagatttgacctacgtggagaggccagtgaaaatcctggacaccatggagcgctggaccaggaaccgggtaatccgtttttgcaaggtccagtggagcaaccacgctgaagaagaagctacctgggagcgtgaagacgagctgaaggcagcccatcccgatctcttcgccaacgctgcagcttcggaggatacgctcttcgtggaagttgaagccgacgtttgggaaagtgagcaaggcaatcttgctcaatttttcccaagcccagaagaggagctccttgaagatgaaggctttggtgtctagctcgtgcctgccgtcaagcgcctgtggtcgtcgccctagtcttccgctgtttctcgtttgtctttgtgtgtgctgggccttgcctcctgggacaaggattaatgcacgcacgtaaggaatgcccgttgggttatttccggtcgtgacaagttctgcccgcctccttgggcaacgtgc

SEQ ID NO: 23117 - DNA, 5334 bp, Oryza sativa; identical to SEQ ID NO: 14253
  Clone ID: TF_OsC359_7369

SEQ ID NO: 23118 - DNA, 5490 bp, Oryza sativa
  Clone ID: TF_OsC359_7370
atggaggtggatgaagtcgggggtcgatggacattctccagggcaaatgaaggctacacgagctgcggcccggtagtcgagatgtcatggcacagggccggtgtcctgctgctaggggctcagtcctgcctgcctgtcccgggggttccggccgtaggtgggattgggtcggtactcttgtctatggctaggatgggttggaaactatgtcacgtcttccgtctgtataccgtggtgatggccggcagcgtcacccgtcgtggtttggacatgactggcttcgtcttggagctgcgaggcatgtgcgtggtcttggggtatccacatggagtggattaccaggccaggccactcccggagcaggagggtgaggatgcagagccccacgctggttgggaggtcactgcagtgatcctctccggctctcccgagcggacctcgctggcagtcaccgcgggtggagattccttccccgccgcttgtcagaacgccgctctcctcgccatcggcactcttcaccagcactacccggacgagttgcagcactcgccctaccgctaccaccctcgtcgcggaggagcccgcgactacgccaccttccgggatgctagctcggaggatgacgctaccatcgtgcacctggcgcgcatggtggaggcgtacgacgcggctcgtatcgatttccatcagatggtgcgccgcgggatggtcgagaacaacatgaagatcctggagctgcgtcaggagaacctgcagctcaagaaggacctagatgcggtggaggcgcagctgcatcagctcaagatcgctcagggagaggactgccgtcccaagcgtctgccgcagccagaagatcaccgcccgcaagagcacctccaggcccgagcttgttcgtcagtccctggcgtggacctgcttcgtcgagacccctcgtgccgagcctgcgcccgtggttccccaggagggggaaacctccggcgttggagaaatgttaacaccggtgatggcaatcaacctgaaggcagcaaccccaaccaccagggcaacccaccttcaccttctgcttcgcctccaccaccaccaccagataccaatgccattctcacccaaatcctcgctcagcaggccaacatgatgactgctttcctccaccacctccaaaatccgccacaacagaatgctccaccaccacctccacaacactctaaactcgccgaattcctccgcatccgcccacctaccttctcgagctccaacaaccccgtggatgcgttggattggttgcatgccgtggggaaaaagctagacacggtgcagtgcagcgatgaggagaaagtcatcttcgccgcccaccagctgcaggggcccgcatctctatggtgggaccacttccaggctacgcagccagaggggcaacctatcacctgggctcgcttcaccgccgctttccggagaacccatgtgcccgccggagtcgtggccctcaagaagagggagttccgggagttgaagcaaggcaaccgctccgtgatggagtatttgcacgagttcaacaacctggcccgttacgctccggaggatgtgcgggaagatgaggagaagcaagagaagttcttggcgggaatggaccctgagctgtccgtccgtctagtctccggggactatccggatttccaacgtctggtggacaagagcatccgcttggaagccaagcacaaggaactggagtcgcacaagcgccgcttggcgaatttccgcaatcaacagggtgctaaccagcgggttcgctacaccaatccctacccagggggatcctcttcgcagcagcagcagcaacaacctcgctccgcgcctcgacctcaattcgtggtgcgcgtcccacagccgcagcagcagcagaatcaacaagggactcgtgtgccccgtcctcctacgccagccgtgcagcctggtcaaggccgcagggacgctcaaggtcagcagcgtctgtgcttcaactgcttcgagcccgggcattttgcggataaatgcccaaagccgaggcgtcagcaaggccaagcgcctcctcgctccaacaacggtgggaaggatgtcactcggggtcgtgtgaaccatgtgacggccgaggacgtgctgacaactccagacgtcatcgttggtacgttcctcatccattccgtccctgctaccactttgttcgactctggagcttcccactcgtttatatctgtgccattcgtggggagaaatcagttgggggtagaaaggcttagaaaccctctgctaatcaccacccctggaggggttatgacagcaaagtattatagccctgccgtccctatagaaattcaggggattccttttccctcggatctgattctgctagacaccaagaacttggatgtgatccttgggatgaattggttggctcaattccaaggagtagtggattgcgcgagacgcactgtcaccctgtaccgagggccggaacaaccggttgtcttctttgcacccccaacctctgttagaagttcagaactgcatcagataggactgtcagaaatccccatagtcggagagttcggagacgtgtttccggaagaactacctggtatgccgcccaagcgagagattgagttccggatagatcttgctccaggaaccactcctctgtacaagcgaccctaccgcatggcagcaaatgaactggccgaaaagaaagacaagacgaagaggatgtgcgttgactacagagctctcaatgaagtcaccatcaagaacaaatatcctcttccccggatcgatgatctgttcgatcaacttaaaggtgccactgtattctccaagatcgatcttcgttccggatatcaccaattacgtattcgggaagaagatattccgaagaccgcattcaccacgcgatacgggctgtatgaattcacggtgatgtcattcggtctaaccaatgcacctgccttcttcatgaacttaatgaacaaagtgttcatggaatacttggacaagtttgttgtggttttcattgatgacattctgatatactcacaatctgaggaagaccatcagcaccatctccgtctggtgttgggaaagttgcgggaacatcaattgtatgccaagcttagcaagtgtgagttctggttgtccgaagtcaaattcttagggcatgtgatatctgctgaaggagttgctgtggaccccgaaacagtgaccgccgtcaccgattggaagcaacccaagacagtcactcaaattcgcagtttcttaggtttggcaggatactaccggagattcatcgagaatttctccaaaatcgctcggcccatgacacaattgttgaagaaagaagagaaatttgtgtggagcccgcaatgcgagaaggcattccaaactctcaaagaaaagctggtttcctcgccagtgttaatcttgccggatactcgcaaggatttcatggtgtactgtgatgcttcgcgccaaggattggggtgcgtgctcatgcaggatggtcatgtggtggcctatgcctcacgccagctacggccccatgaaggcaactaccctacccatgatttggagttagcagcggtggttcatgctctaaaaatctggcggcactatctcattgggaatcgctgtgaaatatatactgatcataagagtttgaaatacatcttcacccagtcagatctgaatcttcggcaaaggagatggttagaactcatcaaggattatgatgtgggaattcactatcatcctggtaaggccaacgtggttgccgacgctctaagccggaaaagccattgcaacactcttaacgcccgaggcattccacccgaacttaatcaacagatggaagccctgaacctaagcatagtgggtcgtggattcttagctgcgttggaagccaagcccaccttgctcgatcaaatccgcgaggctcagaagaatgatccggacatgcatggactcctcaagaatatgaaacagggtaaagctgctggtttcacagaagatgaacacggaaccttatggaacggaaatcggcgtgtcaaggcagagcaccaacgaccggccggacttctccaacctctccaagtaccagaatggaaatgggatgaaattgggatggatttcatcaccggacttccaaaaacccaaggtggatatgattctatatgggtagttgtggatcgattaaccaaggtagctcgatttattcctgtgaagaccacctatggagggaacaaactagccgagctctacttcgctaggatcagtcaaactgcaggcatggagttgggaacccggctgaatttcagcaccgcgtatcacccgcagacagatggacagaccgagcgtctaaatcagatcctcgaagatatgcttcgcgcatgtgtcctagatttcgggaagacttgggataagagtctcccctatgccgagttctcctacaataacagctatcaagccagcatacaaatggcaccctatgaagcgttgtacgggcgcaaatgccggacaccgctattgtgggaccaagttggggaaagtcaagtgttcgggactgatatcctgagagaagctgaagctaaagtcagaatcattcgggataatctaaaggtggcacagtcccggcagaaaagttatgcggataaccgtcgccgtgacctggaattcgcagtgggtgattttgtatatcttcgggtcacgccattgcgaggtgtacataggtttcagacaaaggggaagctcgcacctcggtatgtgggtcctttccgcatcattgctcggcgtggagaagtcgcttaccagctggagctgcccgcctccttgggcaacgtgcatgatgtgtttcatgtgtctcaactcaagaaatgtcttcgagtgccatccgagcaggccgactcagagcaaattgaagttcgcgaagatttgacctacgtggagaggccaatgaaaatcctggacaccatggagcgcaggaccaggaaccgggtaatccgtttttgcaaggtccagtggagcaatcacgccgaagaagaagctacttgggagcgcgaagacgagcgtcgtcatcgtcttcccgaaccgcgccgccgccttcttccgcttcggccgccattctcgtcgtcgtcgttgtcccggggtgagccgaagaccgccgttcgccttccccctttcctcctctttctcgggtgccactccgccgcgccgttggtcgccggcggcgaccatcggggcgcgggtgcgcgccgttcccgtcggccgcgccggcgaggccgccctcgggcgcgccctcgcggctaccaagtgggcccggcagtcagccgcccgcgcccgcgggttcggctgacgcgcgggacccacggcgccgaccgccgccagccgcgtgcgcccggtccaccgtggaccgagcggcttgttcaccctagaataaacaaaaccccaactagtggacactctattcat

SEQ ID NO: 23119 - DNA, 5865 bp, Oryza sativa
  Clone ID: TF_OsC359_7388
atggacatctctaggacaaatgaaggctacacgagctgcggcccggtagtcgagatgtcatggcacagggccggtgtcctgctgctaggggttcagtcctgcctacctgtcccggaggttccggccgtaggtggggttgggtcggtactcttgtctatggctaggatgggttggaaactatgtcacgtcttccgtctgtataccgtggtgatggctggcagcatcaaccgtcgtggtctggacctgactggcttcgttttggagctgcggggcatgtgcattgtcctggggtatccgcatggagtagactaccagggcaagcagctcccggagcaggagggtgacgatgcagagccccacgctgcttgggaggttactgcagtgatcctcactggctcacccgagaggacttcgttggcagtcaccgcgggtggagattccttctccgccgcttgccagaacgccgcactcctcgccatcggcactcttcaccagcgctacccggacgagttgcagcactcgccctaccgctaccaccctcgccgcggaggagcccgcgactacgccaccttccgggatgctagctcggaggatgacgctaccatcatgcacctggcgcgcatggtggaggtgtacgacgcggcccgtatcgacttccatcagatggtgcgtcgcgggttggtcgagaacaacatgaagatcctggagctgcgtcaggagaatctgcagctggagaaggacctagacgcagtggaggcgcagctgcgtcagctcaagatcgcccagggagaggtctgtcgcctcaagcgccgtcgcgtctaccgcagcctgaagatcaccgcccgcaagagtacctccaggcccgagcttgttcgtcagtccctggcgtggacctgcttcgtcgagacccctcgtgccgagcccgcgcccgtggttcctcaggaggatggagcctccggcgttggcagcacgaaggatgcgctgttgctcaccttccgccctggcccgtcggagcaagtcgtatggggcatggttatgccgatggtgacgaccaggagacgtgctaataccggtgatggcaatcaacccgaaggtagcaaccacaacaaccatggcagcccacctccacctcctcctccgcctccaccaccaccaccagacaccaacgccatcctcacccaaatcctcgcccagcaggccaacatgatgcctgctttcctccaccacatccaaaatccgccacaacataatgctccaccaccgcccccacaacactctaaactcgtcgagttcctccgcatccgtccgcctaccttctctagctccaataaccccgtggatgcattggattggttgcatgccgtggggaaaaagttagacaccgtgcagtgcagcgatgaggagaaagtcatcttcgccgcccaccaattgcaggggcccgcatctctatggtgggaccatttccaggctacgcagccagaagggcagccttttacttgggcccgcttcaccgccgctttccggagaacccatgtgcccgctgaagtcatggcccttaagaaaagggaattccgagagttgaaacaaggcaaccgctctgtgatggagtatttgcatgagtttaacaacctggcccgatacgccccggaggatgttcgtgaagataaggagaagcaagagaagttcttggcaggaatggaccctgagctgtccatgcgtctggtctccggggactatccggatttccagcgtttggttgacaagagcatccgcttggaagccaagcacaagaaactggagtcgcacaagcgttgcttggcgaatttccgcaatcaacagggggctaaccaaagggtccgctacaccaatccctatctagggggatcgtcctcgcagcagcaacagcagcagcaacctcgctccgcgccccgacctcatttcgtggtgcgcgtcccacagccgcagcaacagcagagtcagcaagggactcgtgcgccccgtcctcctacgccagccgtgcagcctggtcaaggccgcagggacgttcaaggtcagcagcgtctgtgcttcaactgcttcgagcctgggcactttgcggataaatgcccaaagccgaggcgccagcaaggccaaccgcctccccgccccaacaacgatggtaaggatgtcatttggggtcgggtgaaccacgtgacggccgaggatgtgctgacaactccaaacgtcatcgttggtacgttcctcattcattccatccctactaccattttgttcgactctggagcttcccactcgtttatatctgtgccattcgtggggagaaatcagttgggggtagaaaggcttaggaactctctgctcatcaccacccctagaggggttatgacagcaaagtattatagccctgccgttcctatagaaattcagggaattccttttccctcggatctgattcttctagacaccaagaacttggatgtgatccttgggatgaattggttggctcaattccaaggagtagtggattgtgcaagacgcactgtcactctgtaccgagggccggaacaaccggttgttttctttgctcccccaacctctgtcggtagttccgaacttcatcagataggactgtcagaaatccccatcgtcagagagttcggagacgtgtttccggaagaactacccggtatgccgccgaagcgagagattgagttccggatagatcttgctccaggaaccactcccctgtacaagcgaccctaccgtatggcatcaaatgaactggccgaacttaaaggtgccactgtattctccaagattgatcttcgttccggatatcaccaattgcgtattcgtgaagaagatatccctaagaccgcattcaccacgcgatacggactgtatgaattcacggtgatgtcgttcggtttaaccaatgctcctaccttcttcatgaacttaatgaacaaagtgttcatggaatatttggataagtttgttgtggttttcattgacgacattctggtgtactcacaatcagaggaagaccatcagcaccatctccgtctggtgttgggaaagttgcgggaacatcaattgtatgccaagcttagcaagtgtgagttctggttgtccgaagtcaaattcttagggcacgtgatatctgctaaaggagttgctgtggaccccgaaacagtgaccgccgtcactggttggaagcaatccaagacagtcactcaaattcgcagcttcttgggtttggcaggatactatcggaggttcatcgagaacttctccaaaatcgctcgacccatgacacagttgttgaagaaagaagagaaatttgtgtggagcccgcaatgcgagaaggcgttccaaactctcaaggaaaagctggtttcctcgccagttttaatcttaccggatactcgcaaggacttcatggtgtattgtgacgctttgcgccaaggattggggtgcgtgctcatgcaggaaggtcatgtggtagcctatgcctcacgccagctacggccccatgaaggcaactaccctacccatgatttggagttagccgctgtggttcatgctctaaagatctggcggcactatctcattgggaatcgctgtgaaatatatactgatcataagagtttgaaatacatcttcactcagtcggatctgaatcttcggcagaggagatggttagaactcatcaaggattatgatgtgggaattcactatcatcctggtaaggccaacgtggtcgctaacgctctaagtcgaaaaagccattgcaacactcttgacgtccgtggcattccacccgaacttaatcaacagatggaagccctgaacctaagcatagttggtcgtggattcttggctacgctggaagccaagcctaccttgctcgatcaaatccgcgaggctcagaagaatgatccggatatgcgtggactcctcaagaatatgaaacagggtaaagccgctggtttcacagaggatgaacacggaaccctatggaacggaaatcgggtatgcgttccagacgacagagaacttaaacagttgaaacttcaggaagctcacgaaagcccttattccatccaccctggcagtacgaagatgtacttagacttgaaagagaaatactggtgggttagtatgcagcgggaaattgcagagttcgtggccctttgtgatgtgtgccagcgtgtcaaggcagagcaccaacgaccggccggacttctccaacctctccaagtaccagaatggaaatgggatgaaattgggatggatttcatcaccggacttccaaaaacccaaggcggatataattctatatgggtagttgtggaccgactaaccaaggtagctcggtttattcctgtgaagaccacctatggagggaacaaactagccgagctctacttcgctaggatcgtgagtctccatggcgttcctaagaaaattgtatctgataggggaagccaattcacctctcacttttggaagaagctccaagaagagctgcgtacccgattaaatttcagcaccgcgtatcacccgcagacagatggacagaccgagcgtctaaatcagatcctagaagatatgcttcgcgcatgtgtcctagattttgggaagacctgggataagagtctcccctatgccgagttctcctacaataacagctatcaagccagcatacaaatggcaccctatgaagcgttgtatggacgcaaatgccggacaccactattgtgggaccaagttggggaaagccaagtgttcgggactgatatcctgagagaagctgaagctaaagtcagaaccattcgggataatctaaaggtggcacagtcccggcagaagagttatgcagataaccgacgctgtaatctggaattcgcagtggacgattttgtgtaccttcgggtcacgccattgcgaggtgtacacaggtttcagacgaaagggaagctcgcacctcggtttgtgggtcctttccgtatcattgctcgacgcggggaagtcgcttaccagttggagctgcccgcctccttgggcaacgtgcatgatgtgttccatgtgtcgcaactcaagaaatgtcttcgagtgccatccgagcaggccgattcagagcaaattgaagttcgcgaagacttgacctacgtggagaggccagtgaaaatcctggacaccatggagcgcaggaccaggaaccgggtaatccgtttttgcaaggtccaatggagcaaccacgctgaggaagaagctacttgggagcgtgaagacgagccccgcgaacttcgacggcgcatcaatggagcccgagatcgccgcgccgatttccttcccttcgggccgccctttctcactcccaaccttcggcttcgccgtgttctcgtcgacctcgtccactcctccgtttcgcccgccgaccgccggaacgccgctgtcctcgtcgacccgagccgcgccgccgccttcctccgcttcggccgccgtttccgttgtcaccgtcgacccggggtgagccgaggaccgccgtttcacttcccccttctctcctctctctcgggcgccgctccgcgcgccggtggtcgccggcgtcgaccatcggggcgcgggtgcgccgcctcccgtcggccgtgccggcgaggccgccttcgggcgcgcctcgcggctgccaggtggggcccggccgtcagccgcccacgcctcgggggcggctgacgcgtgggacccacggcgccggccagcgtcagccgcgtgcacccggtccaccgtggaccgtgaggctcggccatataaggaccggtcttcgggcctctgttgcaaagcactactgtacttccacat

SEQ ID NO: 23120 - DNA, 5262 bp, Oryza sativa; identical to SEQ ID NO: 14177
  Clone ID: TF_OsC359_7411

SEQ ID NO: 23121 - DNA, 6052 bp, Oryza sativa
  Clone ID: TF_OsC359_7419
atggcggccggatcttccgcgaccgattccccctcatccggccgctctctcctcctcccaacactacataaacactccccgtgcctccctccttcgtttccgccactcgccgctctctctccccgtcggaatcgagctcgcgccgtcgtcctctctctccgccgtcgccgccgagctccggtccgccgccgtcgtcgccccgggcctcctcccgtttcggcgtcgccttcttcgggttcgccgcgtcctcgccgatctcgtccaccccttcgtttcgcccgccgaccgccggaacgccgccgtcctcgtcgacccgagccgcgccgccgccttcctccgcttcggtcgccgttcccgtcgtcgccgtcgacccggggtgagccatggaccgcccatttcgtttcccccttccctctcctctctcgggcgccgctccgtcgcgccggaggtcgccgccggcgaccatcggggcgcgggtgcgccgcctcccgtcggctgtgccggcgaggccgccttcgggcgcgccccgcggctgccatgtggggcccggccgtcagccgcccgtgtcctcgggtgcggctgacgcgtgggacccacggcgccgggccggcgtaagccgcgtgcacccggtccaccgtggacccacctcggccatataaggaccggtcttcgggcctctgttgcaaagcactaccgtacttccacatgtctagtggggcaaatgaaggctacacgagctgcggcccggtagtcgagatgtcatggcacagggccggtgtcctgctgctaggggctcagtcctgcctgcctgtcccgggtgttccggccgtaggtgggattgggtcgatgtacacctctgatcagagtaaaatctattcgaatagccgcgccctcggttatgggcaagccgagcaatgtacccaaatggccggcagcgtcagccgtcgtggtttggacatgactggcttcgtcttggagctgcggggcatgtgcgtggtcctggggtatccacatggagtggactaccaggccaggccgcttccggagcaggagggtgacgatgcggagccccacgctgcttgggaggtcactgcagtgatcctcgctggctctcccgagcggatttcgctgacagtcaccgcgggtggggattccttccccgccgcttgccagagcgccgctctcctcgccatcggcactcttcaccagcgctacccggacgagttgcagcactcgccctaccgctaccaccctcgtcgcggaggagcccgcgactacgccaccttccgggacgctagctcggaggatgacgctaccatcgtgcacctggcgcgcatggtgaaggcgtacgacgcggctcgtatcgacttccatcagatggtgcgtcgtgggatggtcgagaacaacatgaagatcctggagctgcgtcaggagaacctgcagctcaaaaaggacctagacgcggtggaggcgcagctgcatcaactcaagatcgcccagggagaggtctgccgccccaagcgtcgccgcgtctgccgcagccagaagatcaccgcccgcaagagcacctccaggcccgagcttgttcgtcagtccctggcgtggacttgcttcgtggagacccctcgtgccgagcccacgcccgtggttccccagaagggggaagcctccggcgttggtagcacggaggatgcgctgttgctcaccttccatggtgatgaccaggagaaatgctgccaccagtgatggcaaccaacccgaaggcagcaaccacaacaaccatggcagcccacctccacctcctcctccacctccaccaccaccaccagataccaacgccattcttacccaaatcctcgcccagcaggccaacatgatgactgcttttctccaccacctccaaaatccgccacaacataatgctccaccaccacctccccaacactctaaactcgccgagttcctccgcatccgtccacctaccttctctagctccaacaaccccgtggatgcgttggattggttgcatgccgtggggaaaaagatagacactgtgcagtgcagcgatgaggagaaagtcatcttcgccgcccatcagctgcaggggcccgcatctctatggtgggaccatttccaggctacgcagccagagggacagcctattacttgggcccgtttcaccgccgctttccggagaacccatgtgcccgctggagtcgtggcccttaagaaaagggaattccgagagttgaagcaaggcaaccgctccgtgatggagtatttgcatgagttcaacaacctggcccgttacgccccggaggatgtgcgggaagatgaggagaagcaaaagaagttcttggcaggaatggaccctgagctgtccgtccgtctagtctccggcgactatccggatttccaacgtctggtggacaagagcatccgcttggaagtcaagcacaaggaactggagtcgcacaagcgccgcttggcgaatttccgcaatcaacagggagctaaccaaagggtccgctacaccaatccctatccagggggatcctcctcgcagcagcgacaacagcagcaacaacctcgctccgcgccccgccctcaattcgtggtgcgcgtcccacagccgcagcaacagcagagtcagcaagggacccgtgcgcctcgtcctcctacgccaactgtgcagcctggccaaggccgcagggacgcttcaggtccgcagcgtctgtgcttcaactgcttcgagcccgggcactttgcggataaatgcccgaagccaaggcgacagcaaggccaagcgcctccccgctccaacaacggtggtaaggacgtcattcggggtcgtgtgaaccacgtgacggccgaggacgtgctgacaactccagacgtcatcgttggtacgttcctcattcattccatccctgctaccattttgttcgactctggagcttcccactcgtttatatctgtgccattcgtggggagaaatcagttgggggtagaaaggcttagaaaccctctgctcatcaccacccctggaggggttatgacagcaaagtattatagccctgcggttcctatagaaattcaggggattccttttccctcggatctgattctgctagacaccaagaacttggatgtggtccttgggatgaattggttggctcaattccaaggagtagtggattgtgcgagacgcaccgtcactctgtaccgagggccgggacaaccggttgttttctttgcacccccaacctctgtcagtagttcagaactgcatcagatagggctgtcagaaatccccatagtcagagagttcggagacgtgtttccggaagaactacctggtatgccgcccaagcgagagattgagttccggatagatcttgctctaggaaccactcctctgtgcaagcgaccctaccgtatggcagcaaatgaactggccgaagtcaagaaacagctggaagagttgaaagaaaaggggtacatacgtccgagcacttccccctggggtgctcctgtgatttttgtggagaagaaagacaagacgaagaggatgtgcgttgactacagagctctcaatgaagtcaccatcaaaaacaagtaccctcttccccggatcgatgatctgttcgatcagcttaaaggtgccactgtattctccaagatcgatcttcgttccggatatcaccaattgcgtattcgggaagaagattttccgaagaccgcattcaccacgcgatacggactgtatgaattcacggtgatgtcattcggtttaaccaatgcacctgccttcttcatgaacttaatgaacaaagtgttcatggaatacttggataagtttgttgtggttttcattgatgacattctgatatactcacaatccgaggaagaccatcagcaccatctcctcctggtgttgggaaagttgcgggaacatcaattgtatgccaaacttagcaagtgtgagttctggttgtccgaagtcaaattcttagggcacgtgatatctgctaaaggagttgctgtggaccccgaaacagtgaccgccgtcactgattggaagcaacccaagacagtcactcaagtccgcagtttcttaggtttggcaggatactaccggaggttcatcgagaacttctccaaaatcgctcgacccatgacacagttgttgaagaaagaagagaaatttgtgtggagcccgcaatgtgagaaggcgttcagaactctcaaagaaaagctggttgcctcgccagtgttaatcttgccggatactcgcaaggacttcatagtgtattgtgacgcttcgcgccaaggattggggtgcgtgctcatgcaggacggtcatgtggtggcctatgcctcacgccagcttcgacctcatgaaggcaactaccctacccatgacttggaattagccgcggtggttcatgctctaaaaatctggcggcactatctcattgggaatcgctgtgaaatatatactgatcataggagtttgaaatacatcttcacccagtcggatctgaatcttcggcaaaggagatggttagaactcatcaaggattatgatgtgggaattcactatcatcctggtaaggccaacgtggtcgccgacgctctaagtcgaaagagccattgcaacactcttaacgtccgtggcattccaccggaacttaatcaacagatggaagccctgaacctaagcatagttagtcgtggattcttggctacgctggaagccaagcctaccttgctcgatcaaattcgcgaggctcagaagaatgacccggatatgcatgggctcctcaagaatatgaaacagggtaaagccgctggtttcacagaggatgaacacggaaccctatggaacggaaatcggcgtgtcaaggcagagcaccaacgaccggccggacttctccaacctctccaagtcccagaatggaaatgggatgaaattgggatggattttatcaccggacttccaaaaacccaaggcggatatgattctatatgggtagtcgtggatcgactaaccaaggtagcacggttcattcccgtaaagaccacctatggagggaacaaactagctgaactctacttcgctaggattgtaagtctgcatggcgtccccaagaaaattgtatctgataggggaagccagttcacctctcacttttggaagaagctccaagaagagctgggtacccgattaaatttcagcaccgcgtatcacccgcagatagatggacagaccgagcgtctaaatcagatcctagaggatatgcttcgcgcatgtgtcctagatttcgggaagacctgggataagagtctcccctatgccgagttctcctacaataacagttatcaagccagcatacaaatggcaccttatgaagcgttgtatgggcgcaaataccggacaccgctattgtgggaccaagttggagaaagccaagtgttcgggactgatatcctgagagaagctgaagctaaagtcagaaccattcgggataatctaaaggtggcacagtcccggcagaaaagttatgcagataaccgtcgccgtgatctggaattcgcagtggatgactttgtgtatcttcgggtcacgccattgcgaggtgtacacaggtttcggacaaaggggaagctcgcacctcggtatgtgggtcctttccgtatcactgctcggcgcggagaagtcgcctaccagttggagctgcccgcctccttgggcaacgtgcatgatgtgttccatgtgtcacaactcaagaaatgtctccgagtgccatccgagcaggccgactcagagcaaattgtagttcgcgaagacttgacctacgtggagaggccagtaaaaatcctggacaccatggagcgcaggaccaggaaccgggtaatccgtttttgcaaggtcgagtggagcaaccacgccgaagaagaagctacctgggagcgcgaagacgagctgaaggcagcccatcccgatctcttcgccagttcttccgaatctcggggtcgagattccgtt

SEQ ID NO: 23122 - DNA, 5418 bp, Oryza sativa; identical to SEQ ID NO: 14190
  Clone ID: TF_OsC359_7446

SEQ ID NO: 23123 - DNA, 5418 bp, Oryza sativa
  Clone ID: TF_OsC359_7451
atgtcatggcacagggccggtgtcctgctgctaggggctcagtcctgcctgcctgtcccgggggttacggccgtaggtgggattgggtcggtactcttgtctatagctagaatgggttggaaactatgtcacgtcttccgtctgtataccgtggtgatggccggcagcgtcagccgtcgtggtttggacatgactggcttcgtcttggagctgcggggcatgtgcgttgtcctggggtatccgcatggagtggactaccaggccaggccgcttccggagcaggagggtgacgatgcagagccccacgctgcttgggaggttactgcagtgatcctcactggctctcccgagcggacttcgttggcagtcaccgcgggtggagattccttccccgccgcttgccagagcgccgctctcctcgccatcggcactcttcaccagcgctacccggacgagttgcagcactcgccctaccgctaccaccctcgtcgcggaggagcccgcgactacgccaccttccgggatgctagctcggaggatgacgctaccatcgtgcacctagcgtgcatggtggaggcgtacgacgcggctcgtatcgacttccatcagatggtgcgccgtgggatggtcgagaacaacatgaagatcctggagctgcgtcaggagaatctgcagctgaagaaggacctagacgcggtggaggcgcagctgcatcagctcaagatcgcccagggagaggtctgtcgccccaagcgccgccgcgtctgccgcagccagaagatcaccgcccgcaagagcacctccaggcccgagcttgttcgtcagtccctggcgtggacctgcttcatggagacccctcgtgccgagcccgcgcccatggttccccaggagggggaagcctccggcgttggtagcacggaggatgcgctgttgctcaccttccgccctggcccgtcgcagcggagaagtgttaataccggtgatggcaaccaacccgagggcagcaaccacaacaaccatggcagcccacctccacctcctcctccgcctccaccaccaccaccagataccaacgccattctcacccaaatcctcgcccagcaggccaacatgatgactgctttcctccaccacctccaaaatccgctacaacagaatgctccaccaccacccccacaacactctaagctcgccgagttcctccgcatccgtccacccaccttctctagctccaacaaccccgtggatgcgttggattggttgcatgccgtggggaaaaagctagacactgtgcagtgcagcgatgaggagaaagtcatcttcgccgcccaccagctgcaggggcccgcatctctatggtggtaccatttccaggctacgcagccagaggggcagcctattacttgggctcgcttcaccgccgctttccggagaacccatgtgcccgctggagtcgtggcccttaagaaaagggaattccgagagttgaagcaaggcaacctctccgtgatggagatgtgcgggaagatgaggagaagcaagagaagttcaggaatggaccctgagctgtccgtccgtctagtctccggggactatccggatttccaacgtctggtggacaagagcatccgcttggaagccaagcacaaggaactggagtcgcacaagcgccgcttggcgaatttccgcaatcaacagggtgctaaccaaagggtccgctacaccaatccctatccagggggatcgtcctcgcagcagcaacagcagcaacaacctcgctccgcgccccgacctcaattcgtggtgcgcgtcccacagccccagcaacagcagagtcagcaagggactcgtgcgccccgtccttctacgccaactgtgcagcctggtcaaggccgcagggacgctcaaggcccgcagcgtctgtgcttcaactgcttcgagcccgggcactttgcggataaatgcccgaagccgaggcgccagcaaggccaagcgcctccccgctccaacaacggtggtaaggatgtcattcggggtcgtgtgaaccacgtgacggccgaggacgtgctgacaactccagacgtcatcgttggtacgttcctcattcattccatccctgctaccattttgttcgactctggagcttcccactcgtttatatctgtgccattcgtggggagaaatcagttgggggtagaacggcttaggaaccctctcctcatcaccacccctggaggggttatgacagcaaagtattatagtcctgccgtccctatagaaattcaggggattccttttccctcggatctgattctgctagacaccaagaacttggatgtgatccttgggatgaattggttggctcaattccaaggagtagtggattgcgcgagacgcactgtcactctgtaccgagggccggaacaaccggttgtattctttgcacccccaacctctgtcagtagttcagaacttcatcagataggactgtcagaaatccccatcgtcagggagttcggagacgtgtttccggaagaactacccggtatgccacccaaacgagagattgagttccggatagatcttgctccaggaaccactcctctgtacaagcgaccctaccgtatggcagcaaatgaactcgctgaagtcaagaaacagttggaagagttgaaagaaaaggggtatatacgtccgagtacttccccctggggtgctcctgtgatttttgtggagaagaaagacaagacgaagaggatgtgcgttgactacagagctctcaatgaagtcaccatcaaaaacaagtaccctcttcctcggatcgatgatctgtttgatcagcttaaaggtgccacggtattctccaagattgatcttcgttccggatatcaccagttacgtatccgcgaagaagatattccgaagaccgcattcaccacgcgatacggactgtatgaattcacggtgatgtcgttcggtttaaccaatgcacctgccttcttcatgaacttaatgaacaaagtgttcatggaatacttggataagtttgttgtggttttcattgatgacattctggtatactcacaaacagaggaagaccatcagcaccatctccgtctggtgttgggaaagttgcgggaacatcaattgtatgccaaacttagcaagtgtgagttctggttgtccgaagtcaaattcttagggcacgtgatatctgctaaaggagttgctgtggaccccgaaacagtgaccgccgtcactgattggaggcaacccaagaccgtcactcaaattcgcagtttcttaggtttggcaggatactaccggaggttcatcgagaacttctccaaaatcgctcgacccatgacacagttgttgaagaaagaagagaaatttgtgtggagcccgcaatgcgagaaggcgttccaaactctcaaagaaaagctggtttcctcgccagtgttaatcttgccagatactcgcaaggattttatggtgtattgtgatgctgcgcgccaaggattggggtgcgtgctcatgcaggacggtcatgtggtggcctatgcctcacgccagctacggcctcatgaaggcaattaccctacccatgatttggagttagccgctgtggttcatgctctaaaaatctggcggcactatctcattgggaattgctgtgaaatatatactgatcataagagtttgaaatacatcttcacccagtcggatctgaatcttcggcaaaggagatggttagaactcatcaaggattatgatgtgggaattcactatcatcctggtaaggccaacgtggtcgccgacgctctaagtcgaaagagccattgcaacactcttaacgtccgtggcattccactcgaacttaaccaacagatggaagccctgaatctaagcatagtgggtcgtggattcttggctgcgttggaagccaagcctaccttgctcgatcaaatccgcgaggctcagaagaatgatccggacatgcgtggactcctcaagaatatgaaacagggtaaagccactggtttcacagaggatgaacacggaaccctatggaacggaaatcgggtatgcgttccagataacagagaacttaaacagctgatacttcaggaagctcacgaaagtccttattccatccaccctggcagtacgaagatgtacttagacttgaagaagaaatactggtgggttagtatgaagcgggaaattgcagagttcgtggccctgtgtgatgtgtgccagcgtgtcaaggcagaacaccaacggccggccggacttctccaacctctccaagtaccagaatggaaatgggatgaaattgggatggatttcatcaccggacttccaaaaacccaaggtggatatgattctatatgggtagttgtggatcgattaaccaaggtggctcgatttattcctgtgaagaccacctatggagggaacaaactagccgagctctacttcgctaggatcgtgagtctccatggcgttcccaagaaaatcgtatctgataggggaagccaattcacctctcacttttggaagaagctccaagaagagctgggtacccgattaaatttcagcaccgcgtatcacccgcagacagatggacagaccgagcgtctaaatcagatcctagaagatatgcttcgcgcatgcgtcctagatttcgggaagacctgggataagagtctcccctatgccgagttctcctacaataacagctatcaagccagcatacaaatggcaccctatgaagcgttgtttcagacaaaagggaagctcgcacctcggttcgtgggtcctttccgtatcattgctcgacgcggagaagtcgcttaccagttggagctgcccgcctccttgggcaacgtgcatgatgtgttccatgtgtcgcaactcaagaaatgtcttcgagtgccatccgagcaggccgactcagagcaaattgaagttcgcgaagacttgacctacgtggagaggccagtgaaaatcctggacaccatggagcgcaggaccaggaaccgggtaatccgtttttgcaaggtccaatggagcaaccacgccgaagaagaagctacctgggagcgtgaagacgagcgccgagctccggtccgccgccgtcgtcgccccggaccttctcccgcttcggcgtcgcctccttcggcttcgccgcatccccgccgacctcgtccacctctccgtttcggtcgccgaccaccggaacgccgccgtccccgtcgacccgtgccgcaccgccgcctttctccgctccggtcgccgttcccgtcgtcgccgtcgacccggggtgagccgtggaccgccgtttcgtttcccccttccctcccctctctcggccgccgctccgccgtgcctatggccgccgccggcgaccat

SEQ ID NO: 23124 - DNA, 4966 bp, Oryza sativa
  Clone ID: TF_OsC359_7468
atggccggcagcgtcacccgtcgtggtttggacatgactggcttcgttttggagctgcggggcatgtgcgtggtcttgggatatccacatggagtggattaccaggccaggccgctcccggagcaggagggtgaggatgcagagccgcacgctggttgggaggtcactgcagtgatcctctccggctctcccgagcggacctcgctggcagtcaccgcgggtggagattccttccccgccgcttgccagaacgccgctctcctcgccatcggcacccttcaccagcgctacccggacgagttgcagcactcgccctaccgctaccaccctcgtcgcggaggagcccgcgactacgccaccttccgagatgctagctcggaggatgacgctaccgtcgtgcatctggcacgcatggtggaggcatacgacgcggctcgtatcgacttccatcagatggtgcgtcgtgggatggtcgagaacaacatgaagatcctggagctgcgtcaggagaacctgcagctcaaaaaggacctagatgcggtggaggcgcagctgcatcaactcaagatcgcccagggagaggtctgccgccccaagcgtcgccgcgtctgccgcagccagaagatcaccgcccgcaagagcacctccaggcccgagcttgttcgtcagtccctggcgtggacttgcttcgtggagacccctcgtgccgagcccacgcccgtggttccccagaagggggaagcctccggcgttgatggtgagaccaggagaaatgctgccaccagtgatggcaaccaacccgaaggcagcaaccacaacaaccatggcagcccacctccacctcctcctccgcctccaccaccaccaccagataccaacgccattctcacccaaatcctcgcccagcaggccaacatgatgactgcttttctccaccacctccaaaatccgccacaacataatgctccaccaccacctccccaacactctaaactcgccgagttcctccgcatctgtccacctaccttctctagctccaacaaccccgtggatgcgttggattggttgcatgccgtggggaaaaagctagacactgtgcagtgcagcgatgaggagaaagtcatcttcgccgcccatcagctgcagggacccgcatctctatggtgggaccatttccaggctacgcagccagagggacagcctattacatgggcccgcttcaccgccgctttccggagaacccatgtgcccgccggagtcgtggcccttaagaaaagggaattccgagagttgaagcaaggcaaccgctccgtgatggagtatttgcacgagttcaacaacctggcccgttacgctccggaggatgtgcgggaagatgaggagaagcaagagaagttcctggcaggaatggaccctgagctgtccgtctgtctagtctccggggattatccggatttccaacgtctggtggacaagagcatccgcttggaagccaagcacaaggaactggagtcgcacaagcgccgcttggcgaatttccacaaccaacagggtgctaaccaaagggtccgctacaccaatccctatccagggggatcctcctcgcagcagcaacagcagcagcagcaacctcgctccgcgcctcgacctcaattcgtggtgcgcgtcccacagccgcagcagcagacgaatcaacaagggactcgtgcgccccgtcctcctccaccgactgtgcagcctggtcaaggccgcagggacgctcaaggtccgcagcgtctgtgcttcaactgcttcgagcccgggcactttgcggataaatgcccgaagccaaggcatcagcaaggccaagcgcctccccgccccaacaacggtggtaaggacgtcattcggggtcgtgtgaaccatgtgacggccgaggacgtgctgacaactccagacgtcatcgttggtacgttcctcattcattccatccctgctaccattttgttcgactctggagcttcccactcgtttatatctgtgccattcgtggggagaaatcagttgggggtagaaaggcttaggaaccctctgctcatcaccacccctggaggggttatgacagcaaagtattatagccctgccgtccctatagaaattcaggggattccttttccctcggatctgattctgctagacaccaagaacttggatataggactgtcagaaattcccatcgtcagagagttcggagacgtgtttccggaagaactacctggtatgccgcctaagcgagaggttgagttccggatagatcttgctccaggaaccgctcctctgtacaagcgaccctaccgtatggcagcaaatgaactggccgaagtcaaggaacagttggaagagctgaaagaaaaggggtatatccgtccgagtacttccccctggggtgctcctgtgatttttgtggagaagaaagacaagacgaaaaggatgtgcgttgactacagagctctcaatgaagtcaccatcaaaaacaagtatcctcttccccgaatcgatgatctgttcgatcagcttaaaggtgccactgtattctccaagattgatcttcgttccggatatcaccaattgcgcattcgtgaagaagatattccgaagaccgcattcaccacgcgatacagactgtatgaattcacggtgaagtcattcggtttaaccaatgcacctgccttcttcatgaacttaatgaacaaagtgttcatggaatacttggataagtttgtggtggtttttattgatgacatcctgatatactcacaatcagaggaagaccatcagcaccatctccgtctggtgttgggaaagttgcgggaacatcaattgtatgccaaacttagcaagtgtgagttctggttgtccgaagtcaaattcttagggcacgtgatatctgctaaaggagttgctgtggaccccgaaacagtgaccgccgtcactgattggaagcaacccaagacagtcactcaagtccgcagtttcttaggtttggcaggatactaccggagattcatcgagaacttctccaaaatcgctcgacccatgacacagttgttgaagaaagaagagaaatttgtgtggagcccgcaatgcgagaagacgttcaaaactctcaaagaaaagctggtttcctcgccagtgttaatcttgccggatactcgcaaggatttcatggtgtattgtgacgcttcgcgccaaggattggggtgcgtgcttatgcaggacggtcatgtggtggcctatgcctcacgccagctacggcctcatgaaggcaattaccctacccatgatttggagttagccgcggtggttcatgctctaaaaatctggcggcactatctcattgggaatcgctgtgaaatatatactgatcataagagtttgaaatacatcttcactcagtcggacctgaatcttcggcaaaggagatggttagaactcatcaaggattatgatgtgggaattcactatcatcctggtaaggccaacgtggttgccgacgctctaagtcgaaaaagccattgcaacactcttaacgtccgtggcgttccacccgaacttaatcaacagatggaagccctgaacctaagcatagttagtcgcggattcttggctgcgctggaagccaagcccaccttgctcgatcaaatccgcgaggctcagaagaatgatccagacatgcatggactcctcaagaatatgaaacagggtaaagccgctggtttcacagaggatgaacacggaaccctatggaacggaaatcgagtatgcgttccagttaacagagaacttaaacagctgatacttcaggaagctcacgaaagtccttattccatccaccctggcagcacgaagatgtacttagacttgaaggagaaatactggtggattagtatgaagcgggaaattgcagagttcgtggccctttgtgatgtgtgccagtgtgtcaaggcagagcaccaacgaccggccggacttctccaacctctccaagtacctgaatggaaatgggatgaaattgggatggatttcatcaccggacttccaaaaacccaaggtggatatgattctatatgggtagttgtggatcgattaaccaaggtagctcgattcattcctgtgaagaccacctatggagggaacaaactagccgaactctacttcgctaggatcacagatgggcagaccgagcgtctaaatcagatcctagaagatatgctccgcgcatgtgttctagatttcgggaagacctgggataagagtctcccctatgccgagttctcctacaacaacagctatcaagccagcatacaaatggcaccttatgaagcgttgtatgggcgcaaatgccggacaccgctaatgtgggatcaagttggggaaagccaagtgttcgggactgatatcctgagagaagctgaagctaaagtcagaaccattcgggataatctaaaggtggcacagtcccggcagaaaagttatgcagataaccgtcgccgtgatctggaattcgcagtggacgattttgtatatcttcgggtcacgccattgcgaggtgtacacaggtttcggacaaaagggaagctcgcacctcggtatgtgggtcctttccgtatcgttgctcgacgcggagaagtcgcttaccaattggagctgcccgcctccttgggcaacgtgcatgatgtgttccatgtgtcgcaactcaagaaatgccttcgagtgccatccgagcaggccgactcagagcaaattgaagttcgcgaagacttgacctacgtggagaggccagtgaagatcctggacaccatggagcgcaggaccaggaaccgggtaatccgtttttgcaaggtccagtggagcaaccacgccgaagaagaagctacttgggagcgtgaagacgagctgaaggcagcccatcctgatctcttcgcca

SEQ ID NO: 23125 - DNA, 4149 bp, Oryza sativa
  Clone ID: TF_OsC359_7471
atgtcatggcacagggccggtgtcctgctgctaggggctcagtcctgcctgcctgtcccgagggttccagccgtaggtgggattgggtcggtactcttgtctatggctaggatgggttggaaactatgtcacgtcttccgtccgtataccgtggtgatggccggcagcatcagccgtcgtggtctggacctgactggtttcgtcttggagctgcggggcatgtgcgttgtcctggggtatccacatggagtggactaccagggcaggccgcttccggagcaggagggtgacgatgcagagccccacgctgcttgggaggttactgcagtgatcctcactggctctcccgagcggacttcgttggcagtcaccgcgggtggagattctttccccgccgcttgccagaacgccgctctcctcgccatcggcactcttcaccagcgctacccggacgagttgcagcactcgccctaccgctaccaccctcgccgcggaggagcccgcgacttcgccaccttccgggatgctagctcggaggatgacgctaccatcatgcacctggcgcgcatggtggaggcgtacgacgcggctcgtatcgacttccatcagatggtgcgccgtgggatggtcgagaacaacatgaagatcctggagctgcgtcaagagaatctgcagctgaagaaggaactagacgcagtggaggcgcagctgcatcagctcaagatcgcccagggagaggtctgtcgccccaagcgtcgccgcgtctgccgcagccagaagatcaccgcccgcaagagcacctccaggcccgagcttgttcgtcagtccctggcgtggacttgcttcgtcgagacccctcgtgccgagcccgcgcccgtggttcctcaggagggggaagcctccggcgttggtagcacggaggatgcgctgttgctcaccttccgtcctggcccgtcgcagcggagaagtgctaataccggtgatggcaaccaacccgaaggcagcaaccacaacaaccatggcagtccacctccacctcctcctccgcctccaccaccaccaccagacaccaacgctattctcacccaaatcctcgcccagcaggccaacatgatgactgctttcctccaccacctccaaaatccgccacaacagaatgctcctccaccacccccacaacactgtaaactcgccgagttcctccgcatccgtccaccaaccttctctagctccaataaccccgtggatgcgttggattggttgcatgccgtggggaaaaagctagacactgtgcagtgcagcgatgaggagaaagtcatcttcgccgcccaccagctgcaggggcccgcatctctatggtgggaccatttccaggctacgcagccagaggggcagcctattacttgggctcgcttcaccgccgctttccggagaacccatgtgcccgccggagtcgtggcccttaagaaaagggaattccgagagttgaagcaaggcaaccgctccgtgatggagtatttgcatgagttcaacaacctggcccgttacgccctggaggatgtgcgggaagatgaggaaaagcaggagaagttcttggcaggaatggaccctgagctgtccgtccgtctagtctccggtgactatccggatttccaacgtctggtggacaagagcatccgcttggaagccaagcacaaggaactggagtcgcacaagcgccgcttggcgaatgtccgcaatcaacagggtgctaaccaaagggtccgctacaccaatccctatccagggggatcgtcctcgcagcagcaacagcagcaacaacctcgctccgcgccccgacctcaattcgtggtgcgcgtcccacagccgcagcaacagcagagccagcaagggacccgtgtgccccgtcctcctacgccagctgcgcagtctggtcaaggccgcagggacgcttcaggtccgcagcgtctgtgcttcaactgcttcgagcccgggcactttgcggataaatgcccgaagccgaggcgccagcaaggccaagcgcctccccgctccaacaacggtggtaaggatgtcattcggggtcgtgtgaaccacgtgacggccgaggacgtgctgacaactccagacgtcatcgttggtacgttcctcattcattccatccctgctaccattttgttcgactctggagcttcccactcgtttatatctgtgccattcgtggggagaaatcagttgggggtagaaaggcttaggaaccctctgctcatcaccacccctggaggggttatgacagcaaagtattatagtcctgccgtccctatagaaattcaggggattccttttccctcggatctgattctgctagacaccaagaacttggatgtgatccttgggatgaattggatggctcaattccaaggagtagtggattgcgcgagacgcactgtcactctgtaccgagggccggaacaatcggttgttttctttgcacccccaacctctgtcagtagttcagaacttcatcagataggactgtcagaaatccccatcgtcagggagttcggagatgtgtttccggaagaactacccggtatgccgcccaagcgagagattgagttccggatagatcttgctccaggaaccactcctctgtacaaacgaccctaccgtatggcagcaaatgaattggccgaagtcaagaaacagttggaagagttgaaagaaaagggagctctcaatgaagtcaccatcaaaaacaagtaccctcttccccggatcgatgatctgttcgatcagcttaaaggtgccactgtattctccaagattgatcttcgttccggatatcaccaattacgtattcgtgaagaagatattcctaagaccgcattcaccacgcgatacggactgtatgaattcacggtgatgtcgttcggtttaaccaatgcacctgccttcttcatgaacttaatgaacaaagtgttcatggaatacttggataagtttgttgtggtgttcattgatgacattctggtgtactcacaatcagaggaagaccatcagcaccatctccgtctggtgttgggaaagttgcgggaacatcaattgtatgccaaacttagcaagtgtgagttctggttgtccgaagtcaaattcttagggcacgtgatatctgctaaaggagttgctgtggaccccgaaacagtgaccgccgtcaccgattggaagcaacccaagacagtcactcaagtccgcagtttcttaggttttgcaggatactaccggaggttcatcgagaacttctccaaaatcgctcgacccatgacacagttgttgaagaaagaagagaaatttgtgtggagcccgcaatgcgagaaggcgtttcaaactctcaaagaaaagctggtttcctcgccggtgttaaccttgccagatactcgcaaggatttcatggtgtattgtgatgcttcgcgccaaggattggggtgcgtgcttatgcaggatggtcatgtggtggcctatgcctcacgccagctacggcctcatgaaggcaactaccctacccatgatttggagttagccgcggtggttcatgctctaaaaatctggcggcactatctcattgggaatcgcagtgaaatatatactgatcataagagtttgaaatacatcttcacccagtcggatctgaatcttcggcagaggagatggttagaactcatcaaggattatgatgtgggaattcactaccatcctggtaaggccaacgtggtcgccgacgctctaagtcgaaagagccattgcaacactcttaacgtccgtggcattccacccgaacttaaccaacagatggaagccctgaatctaagcatagtgggtcgtggattcttggttgcgttggaagccaagcccaccttgctcgatcaaatccgcgaggctcagtgtcgcgaccgggaaaattgccttttcccgaacgccagtgtattaatccccgtcccaggaaaagccgggacgggcacaacggagacgaacggcgaggggacggcttcggcggcgatccttggacaaaggcgagacgcggccggcacgaggcttgacgacgcggagccgaggacggaggcgaggacggggctgcagcggctcgcttga

SEQ ID NO: 23126 - DNA, 5376 bp, Oryza sativa; identical to SEQ ID NO: 14231
  Clone ID: TF_OsC359_7495

SEQ ID NO: 23127 - DNA, 5094 bp, Oryza sativa
  Clone ID: TF_OsC359_7522
atggccggcagcgtcacccgtcgtggcttggacatgactggcttcatcttggagctgcggggcatgtgcgtggtcctggggtatccacatggagtggactaccaggccaggccgctcccggagcaggagggtgacgatgcagagccccacgctgcttgggaggttactgcagtgatcctctctggctctcccgagcggacttcgctggcagtcaccgcgggtggagattctttccccgccgcttgccagaacgccgctctcctcgccatcggcacccttcaccagcgctacccggacgagttgcagcactcgccctaccgctaccaccctcgtcgcggaggagcccgcgactacgccaccttccgggatgctagctcggaggatgacgctaccatcgtgcacctggcgcgcatggtggaggcgtacgacgcggctcgtatcgacttccatcagatggtgcgccgtgggatggtcgagaacaacttgaagatcctggagctgcgtcaggagaacctgcagctcaagaaggacctagacgcggtggaggcgcagctgcatcagctcaagatcgcccagggagaggtctgctgccccaagcgtcgccgcgtctgccgcagccagaagatcaccgcccgcaagagcacctccaggcccgagcttgttcgtcagtccctggcgtggacctgcttcgtcgagacccctcgtgccgagcccgcgcccgtggttccccaggagggggaagcctccggcgttggtagcacggaggatgcgctgttgctcaccttccgtcctggcccgtcgcagcggagaaatgctgccaccggtgatggcaaccaacctgaaggcagcaaccacaaccaccagggcaacccacctccacctcctcctccgcctccaccaccaccacccgataccaacgccattctcacccaaatcctcgcccagcaggccaacatgatgacggctttcctccaccacctccaaaatccgccacaacagaatgctccaccaccacccccacaacactctaaactcgccgagttcctccgcatccgcccacctaccttctctagctccaacaaccccgtggatgcgttggattggttgcatgccgtggggaaaaagctagacactgtgcagtgcagcgatgaggagaaagtcatcttcgccgcccaccagctgcaggggcccgcatctctatggtgggaccatttccaggctacgcagccagaggggcagcctattacttgggcccggttcaccgccgctttccggaggacccatgtgcccgccggagtcgtagcccttaagaaaagagaattccgagagttgaagcaaggcaaccgctccgtgatggagtatttgcatgagttcaacaacctggcccgttacgctccggaggatgtgcgggaagatgaggagaagcaagaaaagttcttggcgggaatggaccctgagctgtccgtccgtctagtctccggggactatccggatttccaacgtctggtggacaagagcatccgcttggaagccaagcacaaggaactggagtcgcacaagcgccgcttggcaaatttccgcaatcaacagggtgctaaccaaagggtccgctacaccaacccctatccagggggatcctcctcgcaacagcaacaacagcagcagcaacctcgctccgcgccgcgacctcaattcgtggtgcgcgtcccacagccgcagcagcagcagaatcagcaagggactcgtgcgccccgtcctcctacgccaaccgtgcagtctggtcaaggccgcagggacgctcaaggtcagcagcgtctgtgcttcaactgcttcgagcccgggcactttgcggataaatgcccgaagccaaggcgtcagcaaggccaagcgcctccccactccaacaacggtgggaaggatgtcattcggggtcgtgtgaatcacgtgacggccgaggacgtgctgacaactccagacgtcatcgttggtacgttcctcgttcattccatccctgctaccattttgttcgactctggagcttcccactggtttatatctgtgccattcgtggggagaaatcagttgggggtagaaaggcttaggaaccctctgctcatcaccacccctggaggggttatgacagcaaagtattatagccctgccgtccctatagaaattcaggggattccttttccctcggatctgattctgctagacaccaagaacttggatgtgatccttgggatgaattggttggctcaattccaaggagtagtggattgcgcgaggcgcactgtcactctgtaccgagggccggaacaaccggttgttttctttgcacccccaacctctgtcagtagttcagaactgcatcagataggactgtcagaaatccccatcgtcagggagttcggagatgtgtttccggaagaactacccggtatgccgcccaagcgagagattgagttccggatagatcttgctccaggaaccactcctctgcacaagcgaccctaccgtatggcagcaaatgaactggccgaagtaaagaaacagttggaagagttgaaagaaaaggggtatatacgtccgagtacttccccctggggtgctcctgtgatttttgtggagaagaaagacaagactaagaggatgtgcgttgactacagagctctcaatgaagtcaccatcaaaaacaagtaccctcttccccggatcgatgatctgttcgatcagcttaaaggtgccactgtattctccaagattgatcttcgttccggatatcaccaattacgtattcgtgaagaagatattccgaagaccgcattcaccacgcgatacgggctgtatgaattcacggtgatgtcattcggcctaaccaatgcacctgccttcttcatgaacttaatgaacaaagtgttcatggaatacttggataagtttgttgtggttttcattgatgacattctggtatactcacaatcagaggaagaccatcagcaccatctccgtctggtgttgggaaagctgcgggaacatcaattgtatgccaaacttagcaagtgtgagttctggctgtccgaagtcaaattcttaggacacgtgatatctgctaaaggagtttctgtggaccccgaaacagtgaccaccgtcaccgattggaagcaacccaagacagttactcaagtccgcagtttcttaggtttggcaggatactaccggagattcatcgagaacttctccaaaatcgctcgacccatgacacagttgttgaagaaagaagagaaatttgtgtggagcccgcaatgcgagaaggcgttccagactctcaaagaaaagctggtttcctcgccggtgttaatcttgccggatactcgcaaggatttcatggtgtactgtgatgcttcgcgccaaggattcgggtgcgtgctcatgcaggatggtcatgtggtggcctatgcctcacgccagctacggcctcatgaaggcaactatcctacccatgatttggagttagccgcggtggtgcatgctctaaaaatctggcggcactatctcattgggaatcgctgtgaaatatatactgatcataagagtttgaaatacatcttcactcagtcggacctgaatcttcggcaaaggagatggttagaactcatcaaggattatgatgtgggaattcactatcatcctgatatgagacagggtaaagccgctggtttcacggaggatgaacacggaaccctatggaacggaaagcgggtatgcgttccagatagcagagaacttaaacagttgatacttcaggaagctcacgaaagtccttattccattcacccgggcagtacgaagatgtacctagacttgaaggagaaatactggtgggttagcatgaagcgggaaattgcagagttcgtggctctatgtgatgtgtgccagcgtgtcaaggcagaacaccaacgaccggccggacttctccaacctctccaagtaccagaatggaaatgggatgaaattgggatggatttcatcaccggacttccaaaaacccaaggtggatatgattctatatgggtaattgtggatcgactaacaaaggtagctcgatttattcctgtgaagaccacctatggagggaacaaactagcggaactctacttcgctaggatcgtgagtctccatggtatccccaagaaaatcgtatctgataggggaagccaattcacctctcacttttggaagaagctccaagaagagctgggtacccgtttaaatttcagcaccgcctatcacccgcagacagatggacagaccgagcgtctaaatcagatcctagaagatatgcttcgcgcgtgtgtcctagattttgggaagacttgggataagagtctcccctatgccgagttctcctacaacaacagctatcaagccagcatacaaatggcaccttatgaagcgttgtacgggcgcaaatgccggacaccgctattgtgggaccaagtcggagaaagccaagtgttcggaactgatatcctgagggaagctgaagctaaagtcagaatcattcgggataatctaaaggtggcacagtcccggcagaaaagttatgcagataaccgacgccgtgacctggaattcgcagtggacgattttgtgtaccttcgggtcacgccattgcgaggggtacacaggtttcagacaaaagggaagctcgcacctcggtatgtgggtcccttccgtatcatcgctcgacgcggagaagtcgcttatcagctagagttgcccgcctccttgggtaacgtgcacgatgtgttccatgtgtcgcaactcaagagatgtcttcgagtgccatccgagcaggccgactcagagcaaattgaagttcgcgaagatttgacctacgtggagaggccagtgaaaatcctggacaccagggagcgcaggaccaggaaccgggtaatccgtttttgcaaggtccagtggagcaaccatgccgaagaagaagctacttgggagcgtgaagacgagctgaaggcagcccatcccgacctcttcgccagttcttccgaatctcggggtcgagattccgtttaa

SEQ ID NO: 23128 - DNA, 3374 bp, Oryza sativa
  Clone ID: TF_OsC359_7570
atggatgaagtcgggggtcgatggacattctccagggcaaatgaaggctacacgagctgcggcccggtagtcgagatgtcatggcacagggccggtgtcctgctgttaggagctcagtcctgcctgcctgtcccgggggttccggccgtaggtgggattgggtcgatgtacacctctgatcagagtataatctattcgaatagccgcgccctcggttatgggcaagccgagcaatgtacccaaatggccggcagcgtcacccgtcgtggtttgcacatgactggcttcgtcttggagctgcgaggcatgtgcgtggtcttggggtatccacatggagtggactaccaggccaggccgcttccggagcaggagggtgacgatgcagagccccacgctggttgggaggtcactgcagtgatcctctctggctctcccgagcggacttcgctggcagtcaccgcgggtggagattccttccccgccgcttgccagaacgtcgctctcctcgccatcggcactcttcaccagcgctacccggacgagttgcagcactcgccctaccgctaccaccctcgtcgcggaggagcccgcgactacgccaccttccgggatgctagctcggaggatgacgctaccatcgtgcacctggcgcgcatggtggaggcgtacgacgcggctcgcatcgacttccaccagatggtaccccgtgggatggtcgagaacaacatgaagatcctggagctgcgtcaggagaacctgcagctcaagaaggacctagacgcggtggaggcgcagctgcatcagctcaagatcgcccagggagaggtctgccgccccaagcgtcgccgcgtctgccgcagccagaagatcaccgcccgcaagagcacctccaggcccgagcttgttcgtcagtccctggcgtggacttgcttcgtcgagacccctcgtgccgagcccgcgcccgtggttccccaggagggggaagcctccggcgttggtagcacggaggatgcgctgttgctcaccttccgtcctggcccgtcgcagcggtagacgagcagttagtaggcttgcgcatggtgacgaccaggagaaatgctgccaccggtgatggcaaccaacctgaaggcagcaaccacaaccaccagggcaacccacctccaccttctccttcgccttctccaccaccaccagataccaatgccattctcacccaaatcctcgcccagcaggccaacatgatgactgctttcctccaccacctccaaaatccaccacaacagaatgctccaccaccacccccacaacactctaaactcgccgagttcctccgcatccgtccacccaccttctctagctccaacaaccccgtggatgcgttggattggttgcatgccgtggggaaaaagctagacacggcgcagtgcagcgatgaggagaaagtcatcttcgccgcccaccagctgcaggggcccgcatctctatggtgggaccatttccaagctacgcagccagaggggcaacctattacttgggcccgcttcaccgccgctttccggagaacccatgtgccagctggagtcgtggctcttaagaaaagggaattccgagagttgaagcaaggcaaccgctccgtgatggagtatttgcatgagttcaacaatctggcccgttacgccccggaggatgtgcgggaagatgaggagaagcaagagaagttcttggcaggaatggacctcgagctgtccgtccgtctagtctctggggactatccggatttccaacgtctggtggacaagagcatccgcttggaggccaagcacaaggaactggagtcgcacaagcgccgcttggcgaatttccgcaatcaacagtgtgctaaccaaagggtccgctacaccaatccctatccagggggatcctcttcgcagcagcaacaacagcagcagcaacctcgctccgcgcctcgacctcaattcgtggtgcgcgtcccacagccgcagcagcagcagaatcagcaagggactcgtgcgccccgtcctcctacgccaactgtgcagcccggtcaaggccgcagggacgctcaaggtcagcagcgtctgtgcttcaactgcttcgagcccgggcactttgcggataaatgcccgaagccaaggcgtcagcaaggtcaagcgcctccccgctccaacaacggtgggaaggatgtcattcggggtcgtgtgaatcacgtgacggccgaggacgtgctgacaactccagacgtcatcgttggtacgttcctcgttcatcccatccctgctaccattttgttcgactctggagcttcccactcgtttatatctgtgccattcgtggggagaaatcagttgggggtagaaaggcttaggaaccctctgctcatcaccacccctggaggggttatgacagcaaagtattatagccctgccgtccctatagaaattcaggggattccttttccctcggatctgattctgctagacaccaagaatttggatgtgattcttgggatgaattggttggctcaattccaaggagtagtggattgcgcgaggcgcactgtcactctgtaccgagggccggaacaaccggttgttttctttgcacccccaacctctgtcagtagttcagaactgcatcagataggactgtcagaaatccccatcgtcagggagttcggagatgtgtttccggaagaactacccggtatgccgcccaagcgagagattgagtttcggatagatcatgctccaggaaccactcctctgcacaagcgaccctaccgtatggcagcaaatgaactggccgaagtaaagaaacagttggaagagttgaaagaaaaggggtacatacgtccgagtacttccccctggggtgctcctgtgatttttgtggagaagaaagacaagactaagaggatgtgcgttgactacagagctctcaatgaagtcaccatcaaaaacaagtaccctcttccccggatcgatgatctgttcgatcagcttaaaggtgccactgtattctccaagattgatcttcgttccggatatcaccaattacgtattcgtgaagaagatattccgaagaccgcattcaccacgcgatacgggctgtatgaattcacggggatgtcgttcggtctaaccaatgcacctgccttcttcatgaacttaatgaacaaagtgttcatggaatacttggacaagtttgttgtggttttcatcgatgacattctgatatactcacaatcagagggagaccatcagcaccatctccgtctggtgttgggaaagctgcgggaacatcaattgtatacctgtttgtcgcgtcccaaaacgactctaaaatacatcctc

SEQ ID NO: 23129 - DNA, 5400 bp, Oryza sativa; identical to SEQ ID NO: 14193
  Clone ID: TF_OsC359_7601

SEQ ID NO: 23130 - DNA, 5770 bp, Oryza sativa
  Clone ID: TF_OsC359_7609
aatagccgcgccctcggttatgggcaagccgagcaataagaggagctccttggagatgaaggctttggtgtctagctcgtgcctgccgtcaagcgcctgtggtcgtcgccctagtcttccgttgtttcccatggccggcagcgtcacccgtcgtggtttggacatgactggtttcgtcttggagctgcgaggcatgtgcgtggccttggggtatccacatggagtggactaccaggccaggccgcttccggagcaggagggtgacgatgcagagccccacgctggttgggaggtcactgcagtgatcctcgctggctctcccgagcggacttcgctgacagtcaccgcgggtggagattccttccccgccgcttgccagagcgccgctctcctcgccatcggcactcttcaccagcgctacccagacgagttgcagcactcgccctaccgctaccaccctcgccacggaggagcccgcgactacgccaccttccgggatgctagctcggaggatgacgctaccatcgtgcacctggcgcgcatggtggaggcgtacgacgcggctcgtatcgacttccatcagatggtgcgtcgcgggatggttgagaacaacatgaagatcctggagctgcgtcaggagaacctgcagctcaagaaggacctagatgcggtggaggcgcagctgcatcagcttaagatcgcccagggagaggtctgccgccccaagcgtcgccgcgtctgccgcagccagaagatcaccgcccgcaagagcacctccaggcccgagcttgttcgtcagtccctggcgtggacctgcttcgtggagacccctcgtgccgagcccgcgcccgtggttccccaggagggggaagcctccggcgttggtagcacggaggctctttctctgtttgctggttctgtgtggggttttcagatggtgacgaccaggagaaatgctaacaccggtgatggcaaccaacccgaaagcagcaaccacaaccaccagggcaacccacctccacctcctcctccgcctccgccaccaccaccagacaccaacgccattctcacccaaatcctcgcccagcaagccaacatgatgactgctttcctccaccacctccaaaatccgccacaacataatgctccaccaccacccccacaacactctaaactcgccgagttcctccgcatccgcccacctaccttctcaagctccaacaaccccgtggatgcgttggattggttgcatgccgtggggaaaaagctagacacggtgcagtgcagcgatgaggagaaagtcatcttcgccgcccaccaactgcaggggcccgcatctctctggtgggaccacttccaggctacgcagccagagggacagccgattacttgggcccgcttcaccgccgctttccgaagaacccatgtgcccgccggagtcgtggcccttaagaaaagggaattccgagagttgaagcaaggcaaccgctccgtgatggagtatttgcatgagttcaacaacctggcccgttacgctccggaggatgtgcgggaagatgaggagaagcaagagaagttcttggcaggaatggaccctgagctgtccgtccgtctagtctctggggactatccggattttcaacgattggtggacaagagcatccgcttggaagccaagcacaaggagctggagtcgcacaagcgccgcttggcgaatttccgcaatcaacagggtgctaaccaaagggtccgctacaccaatccctatccagggggatcctcctcgcagcagcaacaacagcagcagcaacctcgctccgcgcctcgacctcaattcgtggtgcgcgtcccacagccgcagcaacagcagaatcagcaggggactcgtgcaccccatcctcctacgccaactgtgcagtctggtcaaggccgcagggacgctcaaggtcagcagcgtctgtgcttcaactgcttcgagcccgggcactttgcggataaatgcccgaaaccaaggcgtcagcaaggccaagcgcctccccgctccaagaacggcgggaaggatgtcattcggggtcgtgtgaatcacgtgacggccgaggacgtgctgacaactccagacgtcatcgttggtacgttcctcgttcattccatccctgctacaattttgttcgactctggagcttcccactcgtttatatttgtgccattcgtggggagaaatcagttgggggtagaaaggcttaggaaccctctgctcatcaccacccctggaggggttatgacagcaaagtattatagccctgccgtccctatagaaattcaggggattccttttccctcggatctgattttgctagacaccaagaatttggatgtgatccttgggatgaattggttggctcaattccaaggagtagtggattgcgcgagacgcactgttactctgtaccgagggccggcacaaccagttgttttctttgcaccctcaacctctatcagaagttcagaacttcatcagataggactgtcagaaatccccatcgtcagggagttcggagatgtgtttccggaagaactacccggtatgccgcccaaacgagagattgagttccggatagatcttgctccaggaaccactcctctgcacaagcgaccctaccgtatggcagcaaatgaactggccgaagtaaagaaacagttggaagagttgaaagaaaagggatacatacgtccgagtacttccccatggggtgctcctgtgatttttgtagagaagaaagacaagacgaagaggatgtgcgtcgactacagagctctcaatgaagtcaccatcaaaaacaagtaccctcttccccggatcgatgatctgttcgatcagcttaaaggtgccactgtattctccaagattgatcttcgttccggatatcaccaattacgtattcgtgaagaagatattccgaagaccgcattcaccacgcgatacgggctgtatgaattcacggtgatgtcattcggtctaaccaatgcacctgccttcttcatgaacttaatgaacaaagtgttcatggaatacttggataagtttgttgtggttttcattgatgacattctgatatactcacactcagaggaagaccatcagcaccatctccgtctggtgttgggaaagttgcgggaacatcaattgtatgccaagcttagcaagtgtgagttctggttgtccgaagtcaaattcttggggcacgtgatatctgctaaaggagttgctgtggaccccgaaacagtgaccgccgtcaccgattggaagcaacccaagacagttactcaagtccgcagtttcttaggtttggcaggatactaccggagattcatcgagaacttctccaaaatcgctcgacccatgacacagttgttgaagaaagaagagaaatttgtgtggagcccgcaatgcgagaaggcgtttcaaactctcaaggaaaagctggtttcctcgccggtgttaatcttgccggatactcgcaaggacttcatggtgtattgtgacgcttcgcgccaaggattggggtgcgtgctcatgcaggacggtcatgtagtagcctatgcctcacgtcagctacgacctcatgaaggcaactaccctacacatgacttggagttagccgcggtggttcatgctctaaaaatctggcggcactatctcattggaaatcgctgtgaaatatataccgaccataagagtttgaaatacatcttcacccagtcggatctgaatcttcggcaaaggagatggttagaacttatcaaagactatgatgtgggaattcactatcatcctggtaaggccaacgtggttgccgacgctctaagtcgaaagagccattgcaacactcttaacgtccgtggcattccacccgaacttagtcaacagatggaagccctgaatctaagcatagttagtcgtggattcttggctgcgttggaagccaagcctaccttgctcgatcaaatccgcgaggctcagaagaatgatccggacatgcatggactcctcaagaatatgaaacagggtaaagccgctggtttcacagaggatgaacacggaaccctatggaacggaaagcgggtatgcgttccagataacagagaacttaaacagttgatacttcaggaagctcacgagagcccttattccattcacccgggcagtacaaagatgtacttagacttgaaggagaaatactggtgggttagcatgaagcgggaaattgcagagtttgtggccctatgtgatgtgtgccaacgtgtcaaggcagagcaccaacgaccggccggacttctccaacctctccaagtaccagaatggaaatgggatgaaattgggatggatttcatcaccggacttccaaaaacccaaggtggatatgattctatatgggtagttgtggatcgattaaccaaggtagctcgatttattcctgtgaagaccacctatggagggaacaagctagccgagctctacttcgctaggatcgtgagtctccatggcgttcccaagaaattcgtatctgataggggaagccaattcacctctcacttttggaagaagctccaagaagacctgggtactcgattgaatttcagcaccgcctatcacccgcagacagatggacagaccgagtgtctaaatcagatcctagaagatatgctccgcgcatgtgtactagatttcgggaagacctgggataagagtctcccctatgccgagttctcctacaataacagctatcaagccagcatacaaatggcaccttatgaagcgttgtacgggcgcaaatgccggacaccgctattgtgggaccaagttggagaaagccaagtgttcgggactgatatcctgagagaagctgaagctaaagtcagaaccattcgggataacctaaaggtggcacagtcccggcagaaaagttatgcagataaccgtcgctgtgacctggaattcgcagtggatgattttgtgtaccttcgggtcacgccattgcgaggtgtacacaggtttcagacaaaagggaagctcgcacctcggtatgtgggtcctttccgtatcgttgctcgacgcggagaagtcgcttaccagttggagctgcccgcctccttgggcaacgtgcatgatgtgttccatgtgtcgcaactcaagaaatgccttcgagtgccatccgagcaggccgactcagagcagattgaagttcgcgaagatttgacctacgtggagaggccagtgaaaatcctggacaccatggagcgcaggaccaggaaccgggtaatccgtttttgcaaggtccagtggagcaaccatgccgaagaagaagctacctgggagcgtgaagacgagctcctccgtccgtttccgcctctcgccgcccttcctcctcgccggattcgagctcgcgacgtcgctctctctctccgccgtcgccgccgagctccggtccgccgctgtcgtcgccccggaccacctcccacctcggcgccgcctcattcgggttcgccgcatcctcgccaacctcgtccacctctccgtgtcggtcgccgaccgccggaacgccgtcgaccccgtcgacccgagccgcgccgctgcctccctccgctccggccgcctcctccgtcgccgccgtcgccccggggtgagccgtggaccgtcgcctcctttcccccttccctcccctctctcggccacctttccgccgcgccagtggttgccggcggcgaccat

SEQ ID NO: 23131 - DNA, 6302 bp, Oryza sativa
  Clone ID: TF_OsC359_7625
atggcggccggatcttccgcgcccgtttccccctcatccggccgccctctctcactcccaaccctatataaacactccccgtgcctccctccaccgtttccgccactcgccgctccctctctccgccggaatcgagctcgcgccgtcgctctctctctccgccgtcaccgccgagctccggtctgccgccgtcgtcgccccggaccttcttccgcttcggcgccgcctccttcggtttcaccgcaacctcgccgacctcgtccacccctccgtttcgcccgccgacagccggaacgccgccgtccccgtctacccgagccgcgccgccgccttcctccgctccggtcgccgttcccgtcgtcgccgtcgacccggggtgagctgtggaccgccgattcgtttcccccttccctcccctctctcgggcgccgctctaccgcgccggtggtcaccggcggcgaccatcgggggcgcgggtgcgccgcctcccgtcggctgtgccggcgtggccgccttcgggcgcgccccgcggctgccatgtggggcccggccgtcagccgcccgcgccctcgggtgcggctgacgcgtgggacccacggcgccggccggtgtgagccgggtgcacccggtccaccatggacccacctcggccatataaggaccggtcttcgggcctctgttgcaaagcactaccgtacttccacatgtctagtggggcaaatgaaggctacacgagctgcggcccggtagtcgagatgtcatggcacagggccggtgtcctgctgctaggggctcagtcctgcctacctgtcccgggggttccgggcgtaggtgggattgggtcgatgtacacctctgatcagagtataatctattcgaatagccgcgccctcggttatgggcaagccgagcaatgtacccaaatggccggcagcgtcagccgtcgtggtctggacctgactggtttcgtcttggagctgcggggcatgtgcgttgtcctggggtatccgcatggagtggactaccagggcaggccgctcccggagcaggagggtgacgatgcagagccccacgctgcttgggaggttactgcagtgatcctcactggctcacccgagaggacttcgttggcagtcaccgcaggtggagattctttctccgccgcttgccagagcgccgctctcctcgccatcagcactcttcaccagcgctacccggacgagctgcagcactcgccctaccgctaccaccctcgtcgcggaggagcccgcgactacgccaccttccgggatgctagctcggaggatgacgctaccatcatgcacctggcgcgcatggtggaggcgtacgacgcggctcgtatcgacttccatcagatggtgcgccatgggatggtcgagaacaacctgaagatcctgaagctgcgtcaggagaatctgcagctgaagaaggacctagacgcagtggaggcgcagctgcatcagctcaagatcgcccagagagaggtctgtcgcccccagcgtcgccgcgtctgccgcagccagaagatcaccgcccgcaagagcacctccaggcccgagcttgttcgtcagtccctggcgtggacttgcttcgtggagacccctcgtgccgagcccgcgcccgtggttcctcaggagggggaagcctccggcgtcggtagcatggaggatgcgctgttgctcaccttccatggtgacgaccaggagaaatgctgccaccagtgatagcaaccaacctgaaggcagcaaccacaacaaccatggcagcccacctccacctcctccaccgcctccaccaccaccaccagacaccaacgccattctcacccaaatcctcgcccagcaggccaacatgatggctgctttcctccaccacatccaaaatccgccacaacataatgctccaccaccacccccacaacactctaaactcgccgagttcctacgcatccgtccacctaccttctctagctccaacaaccccgtggatgcgttggattggttgcatgccgtggggaaaaagttagacaccgtgcagtgcagcgatgaggagaaagtcatcttcgccgcccaccaactgcaggggcccgcatctctatggtgggaccatttccaggctacgcaactagaggggcaacctattacttgggcccgcttcaccgccgccttccggaggacccatgtgcccgccggagtcatggcccttaagaaaagggagttccgagagttgaagcaaggcaaccgctccgtgatggagtatttgcatgagttcaacaacctggcccggtacgccccggaggatgtacgggaagatgaggaaaagcaggagaagttcttggcaggaatggatcctgagctgtccgtccgtctagtctccggggactatccggatttccaacgtctggtggacaagagcatccgcttggaagccaagcacaaggaactggagtcgcacaagcgtcgcttggcgaattttcgcaaccaacagggtgctaaccaaaggatccgctacaccaatccctatccagggggatcttcctcgcagcagcagcaacctcgctccgcgcctcgacctcaattcgtggtgcgcgtcccacagccgcagcaacagcagagccagcaagggacccgtgcgccccgtcctcctacgccagccgcgcagtctggacaaggccgcagggacgttcaaggtccgcagcgtctgtgcttcaactgcttcgagcccgggcactttgcggataaatgcccgaagccgaggcgccagcaaggccaagcgcctccccactccaacaacggtggtaaggatgtcatttggggtcgtgtgaaccacgtgacggccgaggacgtgctgacaactccagacgtcatcgttggtacgttcctcatccattccatccctgctaccattttgttcgactctggagcttcccactcgtttatatctgtgccattcgtggggagaaatcagttgggggtagaaaggcttaggaaccctctactcatcaccacccctggaggggttatgacagcaaagtattatagtcctgccgtccctatagaaattcaggggattccttttccctcggatctgattcttctagacaccaagaacttggatgtgatccttgggatgaattggttggctcaattccaaggagtagtggattgtgcaagacgcactgtcactctgtaccgagggccggaataaccggttgttttctttgcacccccaacctctgtcagtagttcagaacttcatcagataggactgtcagaaatccccattgtcagagagttcggagacgtgtttccggaagaactacccggtatgccgcccaagcgagagattgagttccggatagatcttgctccaggaaccactcctctgtacaagcgaccctaccgtatggcagcaaatgaactggccgaagttaagaaacagttggaagagttgaaagaaaaggggtatatacgtctgagtacttccccctggggtgctcctgtgatttttgtggagaagaaagacaagacaaagaggatgtgcgttgactacagagctctcaatgaagtcaccatcaaaaacaagtaccctcttccccggatcgatgatctgttcgatcagcttaaaggtgccacggtattctccaagattgatcttcgttctggatatcaccagttgcgcatccgtgaagaagatattccgaagaccgcattcaccattcgatacggactgtatgaattcacggtgatgtcgttcggtttaaccaatgctcctgccttcttcatgaacttaatgaacaaagtgttcatggaatacttggataagtttgttgtggttttcattgatgacattctggtatactcacaatcagaggaagaccatcagcaccatctccgtctggtgttgggaaagttgcgggaacatcaattgtatgccaaacttagcaagtgtgagttctggttgtccgaagtcaccgattggaagcaacccaagacagtcactcaaattcgcagtttcttaggtttggcaggatactaccggaggttcatcgagaacttctccaaaatcactcgacccatgacacagttgttgaagaaagaggagaaatttgtgtggagcccgcaatgcgagaaggcgttcaaaactctcaaagaaaagctggtttcctcgccagtgttaatcttgctggatactcgcaaggacttcatggtgtattgtgacgcttcgcgccaaggattgggcgcgtgctcatgcaggacggtcatgtggtggcctatgcctcacgccagctacggcctcatgaaggcaactaccctacccatgatttggagttagccgcggtggttcatgctctaaaaatctggcggcactatctcattgggaatcgctgtgaaatatatactgatcataagagtttgaaatacatcttcacccagtcggatctgaatcttcggcagaggagatggttagaactcatcaaggattatgatgtgggaattcactatcatcctggtaaggccaacgtggtcgccgacgctctaagtcgaaaaagccattgcaacactcttaacgtccgtggcattccacccgaacttaatcaacagatggaagccctgaatctaagcatagtgggtcgcggattcttggctgcgttggaagccaagcccaccttgctcgatcaaatccgcgaggctcagaagaacgatccggacatgcatggactcctcaagaatatgaaacagggtaaagccactggtttcacagaggatgaacacggaaccctatggaacggaaatcggcgtgtcaaggcagagcaccaacgactggccggacatctccaacctctccaagtaccagaatggaaatgggatgaaattgggatggatttcatcaccggacttccaaaaacccaaggtggatatgattctatatgggtagttgtggatcgattaaccaaggtagctcgatttattcttgtgaaggccacctatggagggaacaaactagccgagctctacttcgctaggatcgtgagtctccatggcgttcctaagaaaattgtatccgataggggaagccaattcacctctcacttttggaagaagctccaagaagagctgggtacccgattaaatttcagcaccgcgtatcacccgcagacagatggacagaccgagcgtctaaatcagatcctagaagatatgcttcgcgcatgtgtcctagatttcgggaagacctgggataagagtctcccctatgccgagttctcctacaataacagctaccaagccagcatacaaatggcaccttatgaagcattgtatgggcgcaaatgtcggacaccgctattgtgggaccaagttggggaaagccaagtgttcgggaccgatatcctgagagaagctgaagctaaagtcagaaccattcgggataatctaaaggttgcccagtctcggcagaagagttatgtagacaaccgacgccgtgacctagaattcgcagtggatgactttgtgtatcttcgggtcacgcccttgcgaggtgtacacaggtttcagacaaaggggaagctcgcacctcggtttgtgggtcctttccgtatcattgcacggcgcggagaagtcgcttaccagttggagctgcctgcctccttgggcaacgtgcatgatgtgttccatgtgtcgcaactcaagaaatgtcttcgagtgccatccgagaaggccgactcagagtaaattgaagttcgcgaagacttgacctacgtggagaggccagtgaaaatcctggacaccatggagcgaaggaccaggaaccgggtaatccgttttttcaaggtccactggagcaaccacgccgaggaagaagctacttgggagcgtgaagacgagcctccccgtgcctccctccaccgtttccgccactcgccgctctctctccccgccggaatcgagctcgcaccgtcgccctctctctccgtcgttgccgccgagctccggtccgccgccgttgtcgccccggaccacctctcccctcggcgccacctccttcggcttcgccgcatccccggcgacctcgtccacccctccgtttcgctcgccgaccgccggagcaccgtcgaccccgtccacccgagccgcgccgccgccttcctccgctccggtcgccgtttccgtcttcgccgtcgacccggggtgagccgtggaccgccgcttcttttcccccttcccttcccctccctcggccgccgctccgccgtgcctatggacgccgccggcgaccat

SEQ ID NO: 23132 - DNA, 5265 bp, Oryza sativa
  Clone ID: TF_OsC359_7654
atggacatctctaggacaaatgaaggctacacgagctgtggcccggtagtcgagatgtcatggcacagtgctggtgtcctgctgctaggggctcagtcctgcctacctatcctggaggttccggccgtaggtggggttgggtcggtactcttgtctatggctaggatgggttggaaattatgtcatgtcttccgtccatatgctgtggtgatggccggcagcgtcaaccgtcatggcctggacctgtgtggctttgtgttggagctgcggggcatgtgcattgtcctgggatacccgcatggagtggactaccagggcaagaagctcccagagcaggatggtgacgatgcagagccccacgctgcttgggaggtcactgcagtgatcctcactggctctcccgagaggacttcgttggcagtcaccgcgggtggagattccttctccgccgcatgccagaacgccgcactccttgccatcggcactcttcaccagcgctacccggacgagttgcagcactcgccctaccgctaccaccctcgtcgcggaggagcccgcgactacgccaccttttgggatgctagctcggaggatgacgctaccatcatgcacctggcgtgcatggtggaggcgtacgacgcggcccgtatcgacttccatcatatggtgcgccgtgggttggtcgagaacaacatgaagatcctggagctgcgtcaagagaatctgcagctgaagaaggaccttgacgcggtggaggcgcagctgtttcagctcaagatcgcccagggagaagtctgccatcccaagcgccgccgcgtctgccgcagcctgaagatcaccgcccgcaagagcaccttcaggcctgagcttgttcgtcagtccttggcgtggacctgcttcgtggagaccccttgcgccgagcccgcgcccgtggttcctcaggaggaggaagcctctggcgttggcagcacggaggatatggtgacaaccaggagaagtgctgttgccggcgatggcaaccaacccgaaggcagcaaccccaacacccaaggcggcccacctccacctcctcccccgccaccaccaccaccacctgacaccaaccccatcctcacccaaattctcgcccagcaggccaacatgatggctgctttcctccaccacatccagaatccgccgcaacataatgctccacctccaccacccccgcagcactctaagctcgccgagttcctccgcatccgcccacctaccttctctagctccaataaccccgtggatgccttggattggttgcatgccgtggggaaaaagttggacaccgtgcagtgcaacaatgaggagaaaatcatctttgccacccaccagctgcaagggcccgcatctctatggtgggaccacttccaggctacgcagcctgagggacatcctattacctgggcccgcttcaccgccgcttttcggaggacccatgtgcccgccggagtcatggcccttaagaagagggaatttcgggagttgaagcaaggcaaccgctctgtgatgaagtatttgcacgagtttaacaacttggcccggtacgccccagaggatgttcgggaagatgaggaaaagcaggagaagttcctggtaggaatggaccctgagctgtctgtgcgtctggtctccggggattatcctgatttccagcgtctgcagcagcagcagccgcaacctcgcttcgcgccccgacctcaattcgtggtgcgcgtcccacagccgcagcaacagcagagccagcaagggacccgtgcgcttcgccctcctgcaccagctgtgcagcttggtcaaggccgcatggacgctcaaggtcagcaacgtctgtgcttcaactgcttcgagcccgggcactttgcggacaaatgcccgaagccgcgacgccagcaaggccaagcgcctccctgccccaacaacggtggtaatgacgtcgctcggggtcgtgtgaaccacgtgaccgccgaggatgtgctgacgactccggacgtcatcgttggtacgttcctcattcattccattcctgctactattttgttcgactctggagcttcctactcgtttatatctgtgcctttcgtgggaagaaatcagctgggggtagaacggcctaggaaccctctgctcatcaccacccctggcggggatatgacagcaaagtattatagcccgacagttcctatagaaatccagggaatcccttttccctttgatttgattcttctggacaccaataacttggatgtgatcctcgggatgaattggttggctcaattccaaggagtagtggattgcgcaaggcgcactgtcattctgtaccaggggccaaaacaaccggttgttttctttgcacccccaacttctgtcggcagttcagaacttcatcagataggactgtcagaaatccccatcgtcagtgaattcggtgacgtgtttccggaagaactacccggtatgccgcccaagcgggagattgagttccggatagatcttgctccagggacaactcctctatacaagcggccctaccgtatggcagcaaataaactggccgaagtcaagaagcagttggaagagttgaagaaaaagggagctctcaatgaagtcactatcaaaaacaagtaccctcttccccggatcaatgatcttttcgaccagcttaaaggtgccattgtcttttctaaaattgatcttcgctccggatatcaccaattgcgtattcgtgaagaagatatcccaaagaccgcgttcaccacacgttatggactgtttgaattcacggtgatgtcattcggtctaaccaatgctcctgccttcttcatgaacttaatgaacaaagtgttcatggaatacttggataagtttgttgtggtcttcattgacgacattctgctcagcaagtgtgagttctggttgtccgaagtcaccgattggaagcaacccaagacagtcactcaaattcgcagtttcttaggtttggcaggatactaccggaggttcatcgagaacttctccaaaatcactcgacccatgacacagttgttgaagaaagaggagaaatttgtgtggagcccgcaatgcgagaaggcgttcaaaactctcaaagaaaagctggtttcctcgccagtgttaatcttgctggatactcgcaaggacttcatggacggtcatgtggtggcctatgcctcacgccagctacggcctcatgaaggcaactaccctacccatgatttggagttagccgcggtggttcatgctctaaaaatctggcggcactatctcattgggaatcgctgtgaaatatatactgatcataagagtttgaaatacatcttcacccagtcggatctgaatcttcggcagaggagatggttagaactcatcaaggattatgatgtgggaattcactatcatcctggtaaggccaacgtggtcgccgacgctctaagtcgaaaaagccattgcaacactcttaacgtccgtggcattccacccgaacttaatcaacagatggaagccctgaatctaagcatagtgggtcgcggattcttggctgcgttggaagccaagcccaccttgctcgatcaaatccgcgaggctcagaagaacgatccggacatgcatggactcctcaagaatatgaaacagggtaaagccactggtttcacagaggatgaacacggaaccctatggaacggaaatcgggtatgcgttccagataacagagaacttaaacagctgatacttcaggaagctcacgaaagcccttattccatccaccctggcagtacgaagatgtacttagacttgaaggagaaatactggtgggttagtatgaagcgggaaattgtagagttcgtggccctttatgatgtgtgccagcgtgtcaaggcagagcaccaacgaccggccggacttctccaacctctccaagtaccagaatggaaatgggatgaaattgggatggatttcatcaccggacttccaaaaacccaaggtggatatgattctatatgggtagttgtggatcgattaaccaaggtagctcgatttattcctgtgaaggccacctatggagggaacaaactagctgagctctactttgctaggatcgtgagtctccatggcgttcctaagaaaattgtatccgataggggaagccaattcacctctcacttttggaagaagctccaagaagagctgggcacccgattaaatttcagcaccgcgtatcacccgcagacagatggacagaccgagcgtctaaatcagatcctagaagatatgcttcgcgcatgtgtcctagatttcgggaagacctgggataagagtctcccctatgccgagttctcctacaataacagctaccaagccagcatacaaatggcaccttatgaagcattgtatgggcgcaaatgtcggacaccactattgtgggaccaagttggggaaagccaagtgttcgggaccgatatcctgagagaagctaaagctaaagtcagaaccattcgggataatctaaaggtggcccagtctcggcagaagagttatgcagacaaccgacgccgtgacctagaattcgcagtggatgactttgtgtatcttcgggtcacgcccctgcgaggtgtacacaggtttcagacaaaggggaagctcgcacctcggttcgtgggtcctttccgtatcattgctcggcgcggagaagtcgcttaccagttggagctgcccgcctccttgggcaacgtgcatgatgtgttccatgtgtcgcaactcaagaaatgtcttcgagtgccatccgagcaggccgactcagagcaaattgaagttcgcgaagacttgacctacgtggagaggccagtgaaaatcctggacaccatggagcgcaggaccaggaaccgggtaatccgtttttgcaaggtccagtggagcaaccacgccgaggaagaagctacttgggagcgtgaagacgagctcctcccgcttcggcatcgcctccttcggcttcgccacgtcctcgccgacctcgtccactcctccgtttcgcccgccgaccgccggaacaccgccgtcctcgtcaacccgagccgcgccgccgccttcctccgctccggtcgtcgtttccgccgtcctcgtcgacccggggtgagccgtggaccgaccctttcgcttcccccttccctcccctctctcgggcgccgctccgccgcgtcggtggtcgccggcggcgaccat

SEQ ID NO: 23133 - DNA, 5595 bp, Oryza sativa
  Clone ID: TF_OsC359_7656
atggatgaagtcgggggtcgatggacattctccagggcaaatgaaggctacacgagctgcggcccgatggccggcagcgtcacccgtcgtggtttggacatgactggcttcgtcctggagctgcggggcatgtgcgtggtcttggggtatccacatggagtggattaccaggccaggccgctcccggagcaggagggtgaggatgcagagcctcacgctgggtgggaggtcactgcagtgatcctctctggctctcccgagcggacttcgctggcagtcaccgcgggtggggattcttctcccgccgcttgccagaacgccgctctcctcgccatcggcaccctccaccagcgctacccggacgagttgcagcactcgccctatcgctaccaccctcgtcgcggaggagcccgcgacttcgccaccttccgagatgctagcttggaggatgacgctaccgtcgtgcatctggcacgcatggtggaggcatacgacgcggctcgtatcgacttccatcagatggtgcgtcgcgggatggttgagaacaacctgaagatcctggagctgcgtcaggagaacctgcagctcaagaaggacctcgacgcattggaggcgcagctgcaccagctcaagatcgcccagggagaggacagccgccccaagcgtcgccgcgtctgccgcagccagaagatcaccgcccggaagagcacctccaggcccgagcttgttcgtcagtccctggcgtggacttgcttcgtcgagacccctcgtgccgagcctgcgcccgtggttccccaggagggggaagcctccggcgttggtagcacggaggatgcgctgttgctcaccttccgccctggcccgtcgcagcggagaaatgttagcaccggtgaaggcaaccaacccgaaggcagcaaccccaacccccaaggcaatccacctccaccaccaccaccagacaccaacgccattctcacccaaatcctcgcccagcaagccaacatgatgaccgctttcctccaccacctccaaaatccgccacaacagaatgctccaccaccacctccacaacactctaagctcgccgagttcctccgcatccgcccacccaccttctctagctccaacaatcccgtggatgcgttggattggttgcatgccgtggggaagaagctggacactgtgcagtgcagtgatgaagagaaagtcatcttcgccgcccatcagctgcaggggcccgcatctctatggtgggaccatttccaggctacgcagccagaggggcaaccgattacttgggcccgcttcaccgccgctttccggagaacccatgtgcccgccggagtcgtggctcttaagaagagggagttccgggagttgaagcaaggcaaccgctccgtgatggagtatttgcacgagttcaacagtctggcccggtacgctccggaggatgtgcgggaagatgaggagaagcaagagaagttcttggcgggaatggaccctgagctgtccgttcgcctagtctctggggactatccggacttccaacgtctggtggacaagagcatccgcttggaggccaagcacaaggagctggagacgcacaagcgccgcttggcgaacttccgcaatcagcagggcgctaaccagagggtccgctacaccaatccctatccagggggatcctcctcgcagcagcaacaacagcagcagcaacctcgctccgcgcctcgacctcaattcgtggtgcgcgtcccacagccgcagcagcagcagagtcagcaagggactcgtgtagcccgtcctcctacgccagttgtgcagcccgttcaaggccgcagggacgctcaaggtcagcagcgtttgtgcttcaactgcttcgagcccgggcactttgcggataaatgcccaaagccaaggcgtcagcaaggccaagcgcctccccgctccaacaacggtggcaaggacgtcattcggggtcgtgtgaaccacgtgacggccgaggacgtgctgacaactccagacgtcatcgttggtacgttcctcgttcattccatcccagctactattttgttcgactctggagcttcccactcgtttatatctgtgccattcgtggggaaaaatcagttgggggtagaaaggcttaggaaccctctactcatcaccacccctggaggggttatgacagcaaagtactatagccctgccgttcctatagaaattcaagggattccttttccctcggatctgattctgctagacaccaagaatttggatgtgattcttgggatgaattggttggctcaattccagggagtagtggattgcgcgagacgcactgtcactctgtaccgaggaccggaacaaccggttgttttctttgcacccccaacctctgtcagaagttcaaaactgcatcaaatagaactatcagaaatccccattgtcagagagttcggagatgtgtttccggaagaactacctggtatgccgcctaagcgagagattgagttccggatagatcttgctcctggaaccactcctctgcacaagcgaccctaccgtatggcagcaaatgaactggccgaagttaagaaacagttggaagagttgaaagaaaaggggtacatacgtccgagtacttccccttggggtgctcctgtgatctttgtggagaagaaagacaagacgaagaggatgtgcgttgactaccgagctctcaatgaggtcaccatcaaaaacaagtaccctcttccccggatcgatgatctgttcgaccagcttaaaggtgccactgtattctccaagattgaccttcgttccggatatcaccaattacgtattcgtgaagaagatattccgaagaccgcattcaccacgcgatatgggctgtatgaattcacggtgatgtcgttcggtctaaccaatgcacctgcattcttcatgaacttgatgaacaaagtgttcatggaatacttggacaagtttgttgtggttttcattgatgacatcctgatatactcacagtcagaagaagaccatcagcaccatctccgtctggtgttgggaaagctgcgggaacatcaattatatgccaagcttagcaagtgtgagttctggttgtccgaagtaaaattcttggggcacgtgatatctgctaaaggagttgccgtggaccccgaaacagtgaccgccgtcactgaatggaagcaacccaagacagtcactcaaattcgcagtttcctgggtttggcaggatattaccggagattcatcgagaacttctccaaaatcgctcgacccatgacacagttgttgaagaaagaagagaaatttgtgtggagcccgcaatgcgagaaggcattccaaactctcaaagaaaagctggtctcctcgccagtgttaatcctgccagatactcgcaaggatttcatggtgtactgtgatgcttcgcgccaaggattggggtgcgtactcatgcaggacggtcatgtggtagcctatgcctcacgccagctacgacctcatgaaggcaactaccctacacatgacttggaattagcagcggtggttcatgctctaaaaatctggcggcactatctcattgggaatcgctgtgaaatatatacagatcataagagtctgaaatacatcttcacccagtcggatctgaaccttcggcaaaggagatggttagaactcatcaaggattacgatgtgggaattcactatcatcctggtaaggccaacgtggtcgccgacgctctaagtcgaaaaagccattgcaacactctcaacgtccgtggcattccacccgagcttaaccaacagatggaagccctgaacctaagcatagttggtcgtgggttcttggccgcgttggaagccaagcctaccttgctcgaccaaatccgcgaggctcagaagaatgatccggacatgcatggactcctcaagaatatgagacagggtaaagccgctggtttcacggaggatgaacacggaaccctatggaacggaaagcgggtatgcgttccagatagcagagaacttaaacagttgatacttcaggaagctcacgaaagtccttattccattcacccgggcagtacgaagatgtacctagacttgaaggagaaatactggtgggttagcatgaagcgggaaattgcagagttcgtggctctatgtgatgtgtgccagcgtgtcaaggcagaacaccaacgaccggccggacttctccaacctctccaagtaccagaatggaaatgggatgaaattgggatggatttcatcaccggacttccaaaaacccaaggtggatatgattctatatgggtaattgtggatcgactaacaaaggtagctcgatttattcctgtgaagaccacctatggagggaacaaactagcggaactctacttcgctaggatcgtgagtctccatggtatccccaagaaaatcgtatctgataggggaagccaattcacctctcacttttggaagaagctccaagaagagctgggtacccgtttaaatttcagcaccgcctatcacccgcagacagatggacagaccgagcgtctaaatcagatcctagaagatatgcttcgcgcgtgtgtcctagattttgggaagacttgggataagagtctcccctatgccgagttctcctacaacaacagctatcaagccagcatacaaatggcaccttatgaagcgttgtacgggcgcaaatgccggacaccgctattgtgggaccaagtcggagaaagccaagtgttcggaactgatatcctgagggaagctgaagctaaagtcagaatcattcgggataatctaaaggtggcacagtcccggcagaaaagttatgcagataaccgacgccgtgacctggaattcgcagtggacgattttgtgtaccttcgggtcacgccattgcgaggggtacacaggtttcagacaaaagggaagctcgcacctcggtatgtgggtcccttccgtatcatcgctcgacgcggagaagtcgcttatcagctagagttgcccgcctccttgggtaacgtgcacgatgtgttccatgtgtcgcaactcaagagatgtcttcgagtgccatccgagcaggccgactcagagcaaattgaagttcgcgaagatttgacctacgtggagaggccagtgaaaatcctggacaccagggagcgcaggaccaggaaccgggtaatccgtttttgcaaggtccagtggagcaaccatgccgaagaagaagctacttgggagcgtgaagacgagctgaaggcagcccatcccgacctcttcgccagttcttccgaatctcggggtcgagattccgtttaaggggggtaggtttgtcgcgtcccaaaacgacccgctcgctctcgccgtcggattcgtgctcgcgccgtgctccgccctctccgccatcgccgccgagttccgttccgccgccgtcgccactccgggcttcctcccggctcggcgccacctccctcggcatcgccgcatccccgtcgaccccgtccgccgctccgcttcgcccgccgaccgtcggagcgtcgtcgtcatcgtcat

SEQ ID NO: 23134 - DNA, 6442 bp, Oryza sativa
  Clone ID: TF_OsC359_7699
aagtggttttataaaaagaaaaatccctaaaagtcctttttcccccttcctctattgggccggctcggcccagctccctccctctctctcctctcccctgaggcccatcggccttcccccgcgcgcgcgtcgctgactagcgggcccgcccgccaccctcgctgacgggtggggcccacccgtcatcccctacctcgtgccgcgcccgccgcctcgcccgtgccctagcgccgccgccgccgcggattccgccgcatcccgccggccccgcgcgcaataaagaggggggaaatcactccccgtgattccctgcctctttccccccacttttccctctctctctctcggattcgtttggaaatcctcccgcaaacttcgccggcgtcattgatggagccgagatcgccgcgccggtttccttcccctccggccgccctctctcactcccaacactatttaagcactccccgtgcctccctcctccgtttccgacccttgccgctttctctccccgtcggaatcgagctcgcgccgtcgtcctctctctccgccgttgccgccgagcttcggttcgccgccgtcgtcgccccggacctcctcccgcttcggcatcgcctccttcggcttcgccgcgtcctcgtcgacctcgtccaccccttcgtttcgcccgccgaccgccggaacgccgccgtcctcgtcgacccgagccgcgccgccgcctctctccgcttcggtcgccgttcccgtcatcgccgtcgacccggggtgagccgaggactgccatctcgcttcccccttccctcccctctctcgggcgccgctccgtcgcgccggaggtcgccgccggtgaccatcggggcgcgggcgcgccgcctcccgtcggccgtgccggcgaggccgccatcgggcgcgccccgcggctgccatgtggggcccggctgtcagccgcccgcgccctcgggtgcggctgacgcgtgggacccacggcgccggccggcgcaagccgtgtgcacccggtccaccgtggacccacctcggccatataaggaccggtgttcgggcctctgttgcaaagcactaccgtacttccacatgtctagtggggcaaatgaaggctacacgagctgcggcccggtagtcgagatgtcatggcacagggccggtgtcctgctgctaggggctcagtcctgcctgcctgtcccgggggttccggccgtagatgggattgggtcgatgtacacctctgatcagagtaaaatctattcgaatagccgcgccctcggttatgggcaagccgagcaatgtacccaaatggccggcagcgtcagccgtcgtggtttggacatgactggcttcgtcttggagctgcggggcatgtgcgtggtcctggggtatccacatggagtggactaccaggccaggccatttccggagcaggagggtgacgatgcagagccccacgctgcttgggaggtcactgcagtgatcctcgctggctctcccgagcggacttcgctgacagtcaccgcgggtggggactccttccccgccgcttgccagagcgccgctctcctcgccatcggcactcttcaccagcgctacccggacgagttgcagcactcgccctaccgctaccaccctcgtcgcggaggagcccgcgactacgccaccttccgggacgctagctcggaggatgacgctaccatcgtgcacctggcgcgcatggtggaggcgtacgacgcggctcgtatcgacttccatcagatggtgcgccgtgggatggtcgagaacaacatgaagatcctggagctgcgtcaggagaacctgcagctcaagaaggacctagatgcggtggaggcgcagctgcatcagctcaagatcgcccagggagagatctgccgccccaagcatcgccgcgtctaccgcagccagaagatcaccgcccgcaagagcacctccaggcccgagcttgttcgtcagtccctggcgtggacttgcttcgtggagacccctcgtgccgagcccgcgcccgtggttccccaggagggggaagcctccggcgttggtagcacggaggatgcgctgttgctcaccttccatggtgatgaccaggagaaatgctgccaccagtgatggcaaccaacccgaagacagcaaccacaacaaccatggcagcccacctccacctcctcctccgcctccaccaccaccaccagataccaacgccattctcacccaaatcctcgcccagcaggccaacatgatgactgcttttctccaccacctccaaaatccgccacaacataatgctccaccaccacctccccaacactctaaactcgccgagttcctccgcatctgtccacctaccttctctagctccaacaaccccgtggatgcgttggattggttgcatgccgtggggaaaaagctagacactgtgcagtgcagcgatgaggagaaagtcatcttcgccgcccaccagctgcagggacccgcatctctatggtgggaccatttccaggctacgcagccagagggacagcctattacatgggctcgcttcaccgccgctttccgaagaacccatgtgcccgccggagtcgtggcccttaagaaaagggaattccgagagttgaagcaaggcaaccgctccgtgatggagtatttgcacgagttcaacaacctggcccgttacgctccggaggatgtgcgggaagatgaggagaagcaagagaagttcctggcaggaatggaccctgagctgtccgtctgtctagtctccggggattatccggatttccaacgtctggtggacaagagcatccgcttggaagccaagcacaaggaactggagtcgcacaagcgccgcttggcgaatttccacaaccaacagggtgctaaccaaagggtccgctacaccaatccctatccagggggatcctcctcgcagcagcaacagcagcagcagcaacctcgctccgcgcctcgacctcaattcgtggtgcgcgtcccacagccgcagcaggagcagaatcaacaagggactcgtgcgccccgtcctcctccaccgactgtgcagcctggtcaaggccgcagggacgctcaaggtccgcagcgtctgtgcttcaactgcttcgagcccgggcactttgcggataaatgcccgaagccaaggcgtcagcaaggccaagcgcctccccgccccaacaacggtggtaaggacgtcattcggggtcgtgtgaaccatgtgacggccgaggacgtgctgacaactccagacgtcatcgttggtacgttcctcattcattccatccctgctaccattttgttcgactctggagcttcccactcatttatatctgtgccattcgtggggagaaatcagttgggggtagaaaggcttagaaaccctctgctcatcaccacccctggaggggttatgacagcaaagtattatagccctgccgtccctatagaaattcaggggattccttttccctcggatctgattctgctaggcaccaagaacttggatgtgatccttgggatgaattggttggctcaattccaaggagtagtggattgcgcgagacgcactgtcactctgtaccgagggccggaacaaccggttgttttctttgcacccccaacctcagtcagaagttcagaacttcatcagatagaactgtcagaaattcccatcgtcagagagttcggagacgtgtttccggaagaactacctggtatgccgcctaagcgagagattgagttccggatagatcttgctccaggaaccgctcctctgtacaagcgaccctaccgtatggcagcaaatgaattggccgaagttaagaaacagttggaagagctgaaagaaaaggggtatatacgtccaagtacttccccctggggtgctcctgtgatttttgtggagaagaaagacaagacgaagaggatgtgcgttgactacagagctctcaatgaagtcaccatcaaaaacaagtaccctcttccccggatcgatgatctgttcaatcagcttaaaggtgccactgtattctccaagattgatcttcgttccggatatcaccaattacgtattcgcgaagaagatattccgaagaccgcattcaccacgcgatacggactgtatgaattcacggtgatgtcgttcggtttaaccaatgctcctgccttcttcatgaacttaatgaacaaagtgttcatggaatacttggataagtttgtggtggttttcattgatgacattctgatatactcacaatcagaggaagaccatcagcaccatctccgtctggtattgggaaagctgcgggaacatcaattgtatgccaaacttagcaagtgtgagttctggttgtccgaagtcaaattcttagggcacgtgatatctgctaaaggagttgctgtggaccccgaaacagtgatcgccgtcaccgattggaagcaacccaagacagtcactcaagttcgcagtttcttaggtttggcaggatactaccgaaggttcatcgagaacttctccaaaatcgctcgacccatgacacagttgttgaagaaagaagagaaatttgtgtggagcccgcaatgcgagaaggcgtttcaaactctcaaagaaaagctggtttcctcgccggtgttaatcttgccagatactcacaaggacttcatggtgtattgtgacgcttcgcgccaaggataggggtgcgtgctcatgcaggatggttatgtggtggcctatgcctcacgccagcttcggcctcatgaaggcaactaccctactcatgatttggagttagccgcggtggttcatgccctaaaaatctggtggcactatctcattgggaatcgctgtgaaatatatactgatcataagagtttgaaatacatcttcactcagtcggatctgaatcttcggcaaaggagatggttagaactcatcaaggattatgatgtgggaattcactatcatcctggtaaggccaacgtggttgccgacgctctaagtcgaaaaggccattgcaacactcttaacgtccgtggcattccacccgaacttaatcaacagatggaagccctgaacctaagcatagttagtcgcggattcttggctgcgctggaagccaagcccaccttgctcgatcaaatccgcgaggctcagaagaatgctccagacatgcatggactcctcaagaatatgaaacagggtaaagccgctggtttcacagaggatgaacacggaaccctatggaacggaaatcgacgtgtcaaggcagagcaccaacgaccggccggacttctccaacctctccaagtacctgaatggaaatgggatgaaattgggatggatttcatcaccggacttccaaaaacccaaggtggatatgattctatatgggtagttgtggatcgattaaccaaggtagctcgattcattcctgtgaagaccacctatagagggaacaaactagccgaactctacttcgctaggatcgtaagtctccatggcgttcctaagaaaatcgtatctgataggggaagccaattcacctctcacttttggaagaagctccaagaagagctgggtacccgattaaacttcagcacagcgtatcacctgcagacagatgggcagaccgagcgtctaaatcagatcctagaagatatgcttcgcgcatgtgtcctggatttcgagaagacctgggataagagtctcccctatgccgagttctcctacaacaacagctatcaagccagcatacaaatggcaccttatgaagcgttgtatgggcgcaaatgccggacaccgctaatgtgggatcaagttggggaaagccaagtgttcgggactgatatcctgagagaagctgaagctaaagtcagaaccattcgggataatctaaaggtggcacggtcccggcagaaaagttatgcagataaccgtcgccgtgacctggaattcgcagtggacgattttgtatatcttcgggtcacgccattgcgaggtgtacacaggtttcggacaaaagggaagctcgcacctcggtatgtgggtcctttccgtatcgttgctcgacgcggagaagtcgcttaccaattggagctgcccgcctccttgggcaacgtgcataatgtgttccatgtgtcgcaactcaagaaatgccttcgagtgccatccgagcaggccgactcagagcaaattgaagttcgcgaagacttgacctacgtggagaggccagtgaagatcctggacaccatggagcgcaggaccaggaaccgggtaatccgtttttgcaaggaccagtggagcaaccacgccgaagaagaagctacctgggagcgcgaagacgagctgaaggcagcccatccagatctcttcgccagttcttccgaatctcggggtcgagattccgtttaa

SEQ ID NO: 23135 - DNA, 6058 bp, Oryza sativa
  Clone ID: TF_OsC359_7713
atggcggccgagatctccgcgccggtttccatctcctccggccgctttccctctctcccgacgctatttaaacgtctcccgtgctctcctcctccgtttccgccgctcgccgctcgctctccccgtcggaatcgtgctcgcgccgtcttcctctctctccgccgtcgccgacaagctccggttcgccgccgccgtcgctccggacttcctcccctctcggcgtcgtctccatcggcttcgccgcgttcccgtcgacctcgtccgcgcctccgtttcgctcgccgaccgccggagcaccgtcgccctcgccgtcccgaaccgcgccgccgccttcctccgtttcggctgccgttcccgtcgtcgccgtcgaccggggtgagccgaagaccgctccattcgcttcccccttccctcctctctctcgggtgccgctccgccgcgccggtggtcgccggcggtgaccatcggggcgcgggcgcgtccccctcccgtcggccgtgccggcgaggccgccttcgggcgcgccccgcggctgccaggtggggcccggccgtcagccgcccgcgcccgcgggtgcggctgacgcgtgggacccacggcgccggccgccgccagccgcgtgctcccggtccaccgtggacccacctcggccatataaggaccggtcttcgggcctctgttgcaaagcactaccgtacttccacatgtctagtggggcaaatgaaggctacacgagctgcggcccggtagtcgagatgtcatggcagagggttggtgccctgctgctagggggctcagtcctgcctgcctgtcccgggtgtcccggccgtagggggattgggtcggatgtacacctctgatcagagtaaaacctattcgaatagccgcgccctcggttatgggcaagccgagcaatgtacccaaatggccggcagcgtcacccgtcgtggtttggacatgactggcttcgtcttggagctgcgaggcatgtgcgtggtcctggggtatccacatggagtggactaccaggccaggccgcttccggatcaggagggtgatgatgcggagccccccgctgcttgggaggtcactgcagtgatcctctctggctctcccgagcggacttcgctggcagtcaccgcgggtggagattccttccccgccgcttgccagaacgccgccctcctcgccatcggcactcttcaccagcgctacccggacgagttgcagcactcgccctaccgctaccaccctcgtcgcggaggagcccgcgactacgccaccttccgggatgctagctcggaggatgacgctaccatcgtgcacctggcgcgcatggtggaggcgtacgacgcggctcgtatcgacttccaccagatggtacgccgcggcatggtcgagaacaacctgaagatcctggagctgcgtcaggagaacctgcagctcaagaaggacctggacgcagtggagacgcagctgcaccagctcaagatcgcccagggagagatctgccgccccaagcgtcgccgtgtctgccgcagccagaagatcaccgcccgcaagagcacctccaggcccgagcttgttcgtcagtccctggcgtggacttgtttcgtcgagacccctcgtgccgagcctgcgcccgtggttccccaggagggggaagcctccggcgttggaagcacggaggatgcgctgttgctcaccttccatggtgatgaccaggagaaatgctgctaccggtgatggcaaccaacccgaaggcagtaaccacaaccaccagggcaacccacctccacctcctcctccgcctccaccaccaccaccagacaccaacgccattctcacccaaatcctcgcccagcaagccaacatgatgactgctttcctccaccacctccaaaatccgccacaacttaatgctccaccaccacccccacaacactctaaactcgccgagttcctccgcatccgtccacccaccttctttagctccaacaaccccgtggatgcgttggattggttgcatgccgtggggaaaaagttagacactgtgcagtgcagcgatgaggagaaagtcatcttcgccgcccaccagctgcagggacccgcatctctatggtgggaccatttccaggctacgcagccagaggggcaacctatcacttgggctcgcttcaccgccgcttttcggagaacccatgtgcccgccggagtcgtggcccttaagaaaagggaattccgagagttgaagcaaggcaaccgctccgtgatggagtatttgcatgagttcaacaatctggcccgttatgccccggaggatgtgcgggaagatgaggagaagcaagagaaattcctggcaggaatggacccagagctgtccgtccgtctagtctctggggactatccggatttccaacgtctggtggacaagagcatccgcttggaagccaagcacaaggaactggagtcgcacaagcgccgcttggcgaatttccgcaatcaacagggtgctaaccaaagggtccgctacaccaatccctatccagggggatcctcctcgcagcagcagccgcagcagcagcagcaacctcgctccgcgcctcgacctcaattcgtggtgcgcatcccacagccgcagcagcagcagaatcaacaagggactcgtgcgccccgtcctcctacgccaactgtgcagcctggtcaaggccgcagggacgctcaaggtcagcagcgtctgtgcttcaactgcttcgagcccgggcactttgcggataaatgcccaaagccaaggcgtcagcaaggccaagcgcctccccgctccaacaacggcgggaaggatgtcattcggggtcgtgtgaaccacgtgacggccgaggacgtgctgacaactccagacgtcatcgttggtacgttcctcgttcattccatccctgctacaattttgttcgactctggagcttcccactcgtttatatctgtgccattcgtggggagaaatcagttgggggtagaaaggcttaggaaccctctgctcatcaccacccctggaggggttatgacagcaaagtactatagccctgccgtccctatagaaattcaggggattccttttccctcggatctgattctgctagacaccaagaacttggatgtgatccttgggatgaattggttggctcaattccaaggagtagtggattgcgcgagacgcactgtcactctgtaccgagggccagaacaaccggttgttttctttgcacccccaacctctgtcagaagttcagaactgcatcagataggactgtcagaaatccccatcgtcagggagttcggagatgtgtttccggaagaactacctggtatgccgcccaagcgagagattgagttccggatagatcttgctccaggaaccactcctctgcataagcgaccctaccgtatggcagcaaatgaactggccgaagtaaagaaacagttggaagagttgaaagaaaaggggtacatacgtccgagtacttccccatggggtgctcctgtgatttttgtagagaagaaagacaagacgaagaggatgtgcgtcgactacagagctctcaatgaagtcaccatcaaaaacaagtaccctcttccccggatcgatgatctgttcgatcaacttaaaggtgccactgtattctccaagattgatcttcgttccggatatcaccaattacgtattcgtgaagaagatattccgaagaccgcattcaccacgcgatacgggctgtatgaattcacggtgatgtcgttcggtttaaccaatgcacctgccttcttcatgaacttaatgaacaaagtgttcatggaatacttggataagtttgttgtggttttcattgatgacattctgatatactcacaatcagaggaagaccatcagcaccatctccgtctggtgttgggaaagttgcgggaacatcaattgtatgccaagcttagcaagtgtgagttctggttgtccgaagtcaaattcttagggcacgtgatatcagctaaaggagttgctgtggaccccgaaacagtgaccgccgtcaccgattggaaacaacccaagacagttactcaagtccgcagtttcttaggtttggcaggatactaccggagattcatcgagaacttctccaagatcgctcgacccatgacacagttgttgaagaaagaagagaaatttgtgtggagcccgcaatgcgagaaggcgtttcaaactctcaaggaaaagctggtttcctcgccggtgttaatcttgccggatactcgcaaggacttcatggtgtattgtgacgcttcgcgccaaggattggggtgcgtcctcatgcaggacggtcatgtggtagcctatgcctcacgtcagctacgacctcatgaaggcaactaccctacccatgatttggaggtagcagcggtggttcatgctctaaaaatctggcggcactatctcattgggaatcgctgtgaaatatatactgatcataagagtttgaaatacatcttcacccagtcggatctgaatcttcggcaaaggagatggttagaactcatcaaagactatgatgtgggaattcactatcatcctggtaaggccaacgtggttgccgacgctctaagtcgaaagagccattgcaacactcttaacgtccgtggcattccacccgagcttaaccaacagatggaagccctgaacctaagcatagttagtcgtggattcttggccgcgttggaagccaagcccaccttgctcgatcaaatccgcgaggctcagaagaacgacccggacatgcatggactcctcaagaatatgaaacagggtaaagccgctggtttcacagaggatgaacacggaaccctatggaacggaaagcggcgtgtcaaggcagagcaccagcgaccggccggacttctccaacctctccaagtaccagaatggaaatgggatgaaattgggatggatttcatcaccggactcccaaaaacccaaggcggatatgattctatatgggtagttgtggatcgattaaccaaggtagctcgatttattcctgtgaagaccacctatggagggaacaagctagcggagctctacttcgctaggatcgtgagtctccatggcgttcccaagaagatcgtatctgataggggaagccaattcacctctcacttttggaagaagctccaagaagagctgggtactcgattgaatttcagcaccgcctatcacccgcagacagatggacagaccgagcgtctaaatcagatcctagaagatatgctccgcgcatgtgtcctatattttgggaagacctgggataagagtctcccctatgccgagttctcctacaataacagttatcaagccagcatacaaatggcaccttatgaagcgttgtacgggcgcaaatgccggacaccactattgtgggaccaagttggagaaagccaagtgttcgggactgatatcctgagagaagctgaagctaaagtcagaatcattcgggataatctaaaggtggcacagtcccggcagaagagttatgcagataaccgtcgccgtgacctggaattcgcagtggatgattttgtgtaccttcgggtcacgccattgcgaggtatacacaggtttcagacgaaagggaagctcgcacctcggtatgtgggtcctttccgtatcattgctcggcgcggagaagtcgcttatcagttggagctgcccgcctccttgggcaacgtgcatgatgtgttccatgtgtcgcaactcaagaaatgtctccgagtgccatccgagcaggccgactcagggcaaattgaagttcgcgaagatttgacctacgtggagaggccagtgaaaatcctggacaccatggagcgcaggaccaggaaccgagtaatccgtttttgcaaggtccaatggagcaaccatgccgaagaagaagctacctgggagcgtgaagacgagctgaaggcagcccatcccgatctcttcgccagttcttccgaatctcggggtcgagattccgtttaa

SEQ ID NO: 23136 - DNA, 5989 bp, Oryza sativa
  Clone ID: TF_OsC359_7732
tcagagcaaattgacgttcgcgaagacttgacctatgtagagagaccagtaaaaatcctggacaccatggagcgcaggaccaagaaccgggtaatccgtttttgcaaggtctaatggagcaaccacgctgaggaagaaggtacttgggaacgtgaagacgagcgcctcccacctcggcgccgcctcctttggcttcaccgcatcctcgccgacctcgtccacctctccgtttcggtcgccaaccgccggagcgccgtcgtccccgtcgacccgatccgcgccaccgcctccctccgctccggccgcctcccccgtcgccgccgtcgccccgggatgagctgtggaccgtcgcctcctttccccttcccttccctctctcggccgccgctccgccgcgccggtggtcgccggctccgaccatcggagcgtgggcgcgccgcctcccgccgaccgcgcaagcatggccgccctcgggcgtgccgagtggctaccgcgtggggcctggctgtcagccgcccgcgcccttgggtgcggctgacgtgtggggcccacagcgccgaccggtgtgagccccggggtgcatggttttgatggtagcacctcggccatatatggaccggtcttcgggcctctgttgcaaagcactaccgtacttccacatgtctagtggggcaaatgaaggctacacgagctgcggcccggtagtcgagatgtcatggcacagggccggtgtcctgctgctaggggctcagtcctgcctgcctgtcccgggggttccggccgtaggtgggattgggtcgatgtacacctctgatcagagtataatttattcgaatagccgcgccctcggttatgggcaagccgagcaatgtacccaaatggccggcagcgtcagccgtcgtggtctggacatgactggtttcgtcttggagctgcggggcatgtgcgttgtcctggggtatccgcatggagtggactaccagggcaggccgcttccggagcaggagggtgacgatgcagagccccacgctgcttgggaggttactgcagtgatcctcactggctctcccgagcggacttcgctggcagtcaccgcgggtggagattctttctccgccgcttgccagagcgccgctctcctcgccatctgcactcttcaccagcgctacccggacgagttgcagcactcgccctaccgctaccaccctcgccgcggaggagcccgcgactacgccaccttccgggatgctagctcggaggatgacgctaccatcatgcacctggcgcgcatggtggaggcgtacgacgcggctcgtatcgacttccatcagatggtgcgccgtgggatggtcgagaacaatctgaagatcctggagctgcgtcaagagaacctgcagctcaagaaagacctagacgcagtggaggcgcagctgcatcagctcaagatcgcccagggagaggtctgccgccccaagcgtcgccgcgtctgccgcagccagaagatcaccgcccgcaagagcacctccaggcccgagcttgttcgtcagtccctggcatggacttgcttcgtcgagaaccctcgtgccgagcccgcgcccgtggttccccaggagggggaagcctccggcgttggcagcacggaagatgcgctgttgctcaccttccatggtgatgaccaggagaagtgctagtaccggtgatggcaaccaacctgaaggcagcaaccacaaccaccagggcagcccacctccacctcctcctccgcctccaccaccaccaccagataccaacgccattctcacccaaatcctcgcccagcaggccaacatgatgattgctttcctccaccacctccaaaatccgccacaacataatgctccaccaccacccccacaacactctaaactcgccgagttcctccgcatccgtccacccaccttctttagctccaacaaccccgtggatgcgttggattggttgcatgccgtggggaaaaagctagacactgtgcagtgcagcgatgaggagaaagtcatcttcgccgcccaccagctgcaggggcccgcatctctatggtgggaccatttccaggctacgcagccagaggggcagcctattacttgggctcgcttcactgccgctttccggagaacccatgtgcccgccggagtcgtggcccttaagaaaagggaattccgagagttgaagcaaggcaaccgctccgtgatggagtatttgcatgagttcaacaacctggcccgttacgccccggaggatgtgcggagatgaggagaagcaagagaagttcttggcaggaatggaccctgagctgtccgtccgtctagtttccggggactatccggatttccaacgtctggtggacaagagcatccgcttggaagccaagcacaaggaactggagtcgcacaagcgccgcttggcgaatttccgcaatcaacagggtgctaaccaaagggtccgctacaccaatccctatccagggggatcgtcctcgcagcagcaacctcgctccgcgccccgacctcaattcgtggtgcgcgtcccacagccgcagcaacagcagagtcagcaagggactcgtgcgccccgtcctcctacaccaactgtgcagcctggtcaaggccgcagggacgctcaaggtccgcagcgtctgtgcttcaactgcttcgagcctgggcactttgcggataaatgcccgaagccgaggcgccagcaaggccaagcgcctccccgctccaacaacggtggtaaggatgtcattcggggtcgtgtgaaccacgtgacggccgaggacgtgctgacaactccagacgtcatcgttggtacgttcctcattcattccatccctgctaccattttgttcgactctggagcatcccactcgttcatatctgtgccattcgtggggagaaatcagttgggggtagaaaggcttaggaaccctctgctcatcaccacccctggaggggttatgacagcaaagtattatagtcctgccgtccctatagaaattcaggggattccttttccctcggatctgattcttctagacaccaagaacttggatgtgatccttgggatgaattggttggctcaattccaaggagtagtggattgcgcgagacgcactgttactctgtaccgagggccggaacaaccggttgttttctttgcacccccaacctctgtcagaagttcagaacttcatcagatagtactgtcagaaatccccatcgtcagggagttcggagatgtgtttccggaagaactacccggtatgccgcccaagcgagagattgagttccggatagatcttgctccaggaaccactcctctgtacaagcgaccctaccgtatggcagcaaatgaactggccgaatttaagaaacagttggaagagttaaaagaaaaggggtatatacgtccgagtacttccccctggggtgctcctgtgatttttgtggagaagaaagacaagacgaagaggatgtgcgttgactacagagctctcaatgaagtcaccatcaaaaacaagtaccctcttccccggatcgatgatctgttcgattagcttaaaagtgccacggtattctccaagatcgatcttcgttccggaaatcaccagttgcgcattagggaagaagatattccgaagaccgcattcaccacgcgatacggactgtatgaattcacggtgatgtcattcggtctaaccaatgctcctgccttcttcatgaacttaatgaacaaagtgttcatggaatacttggataagtttgttgtggtgttcattgatgacattctgatatactcacaatcagaggaagaccatcagcaccatctccgtctggtgttgggaaagttgcgggaacatcaattgtatgccaaacttagcaagtgtgagttctggttgtccgaagtcaaattcttagggcacgtgatatctgctaaaggagttgctatggaccccgaaacagtgaccgccgtcactgattggaagcaacccaagacagtcactcaagtccgcagtttcttaggtttggcgggatactaccggaggttcatcgagaacttctccaaaatcgctcgacccatgacacagttgttgaagaaagaagagaaatttgtgtggagcccgcaatgcgagaaggcgtttcaaactctcaaagaaaagctggtttcctcgctagtgttagtcttgccagatactcgcaaggatttcatggtgtattgtgacgcttcgcgccaaggattggggtgcgtgctcatgcaggacggtcatgtggtggcctatgcctcacgccagctacggcctcatgaaggcaactaccctacccatgatttggagttagccgcggtggttcatgctctaaaaatctggcggcactatctcattgggaatcgctgtgaaatatatactgatcataagagtttgaaatacatcttcacccagtcggatctgaatcttcggcaaaggagatggttagaactcatcaaggattatgatgtgggaattcactatcatcctggtaaggccaacgtggtcgccgacgctctaagtcgaaagagccattgcaacactcttaacgtccgtggcattccacccgaacttaaccaacagatggaagccctgaatctgagcatagtgggtcgtggattcttggctacgctggaagccaagcccaccttgctcgatcaaatccgcgaggctcagaagaacgacccggacatgcgtggactcctcaaaaatatgaaacagggtaaagccgcgggtttcacagaggatgaacacggagccctatggaacggaaatcggcgtgtcaaggcagagcaccaacgaccggccggacttctccaacctctccaagtaccagaatggaaatgggatgaaattgggatggacttcatcaccggacttccaaaaacccaaggtggatatgattctatatgggtagttgtggaccggttaaccaaggtagctcgatttattcctgtgaagaccacctatggagggaacaaactagccgagctctacttcgctaggatcgtgagtctccatggcgttcccaagaaaatcgtatctgataggggaagccaattcacctctcacttttggaagaagctccaagaagagctgggtacccgattaaatttcagcaccgcgtatcacccgcagacagatggacagaccgagcgtctaaatcagatcctagaagatatgcttcgcgcatgtgtcctagatttcgggaagacctgggataagagtctcccctatgccgagttctcctacaataacagctaccaagccagcatacaaatggcaccttatgaagcgttgtatgggcgcaaatgccggacaccgctcttgtgggaccaagttggggaaagtcaagtgttcgggactgatatcctgagagaagctgaagcgaaggtcagaaccattcgggataatttaaaggtggcacagccacggcagaaaagttatgcagataaccgtcgccgtaacctggaattcgcggtggacgattttgtgtaccttcgaatcacgccattgcggggtgtacacaggtttcggacaaaagggaagctcgcacctcggttcgtgggtcctttccgtatcattgctcggcgcggagaagtcgcttaccagttggagctgcccgcctccttgggcaacgtgcatgatgtgttccatgtgtcgcaactcaagaaatgtctccgagtgccatccgagcaggccgactcagagcaaattgaagttcgcgaagacttgacctacgtggagaggccagtgaaaatcctggacaccatggagcgcaggaccaggaaccgggtaatccgtttttgcaaggtccagtggagcaaccacgccgaagaagaagctacctgggagcgtgaagacgagctgaaggcagcccatcccgatctcttcgccagttcttccgaatctcggggtcgagattccgtt

SEQ ID NO: 23137 - DNA, 1669 bp, Oryza sativa
  unsure (1)..(1669): unsure at all n locations
  Clone ID: TF_OsC359_7733
atgcaagaggagtcagatcttaggaagcacgtggacgtcttcaatcagttggttgtggatctaagtaagttagatgtgaaactggatgatgaagacaaggccataattcttctgtgctcgcttccaccgtcgtatgaacatgtggtgactaccctgatgcacggcaaggatactatcaaaactgaggagataatttcgtcgttgcttgcacgagacttgagaagatcaaagaaaaacgaggcaatggaggcttctcaggctgagagtttgctggtcaaggcaaagcatgatcatgaagcgggggtgttgaagagcaaggagaagggggcacggtgctataagtgtcatgagtttggacatataaggaggaattgtccgttactgaagaagaggaaagatggcattgcaagtttagcagctcgtggtgatgattcagatagcagtagtcatgagattcttacagtgtctaacgagaagtctggagaagcgtggatgttggactcagctagttcctatcacgtggattctgataggaagaccatgaatatcatgaaggacggcaagactgttatgattggtgagaggacaagctcatgtttgtacaagttacaagggagtgctgttgcaggtggagtcatggaagatgggtatgctggtgttgctgtgcacgatcctgaaggcggcgagcctggccatagcgagagggagcggctgccggcggcgaccggccgtaagtngttgtaantttgatacgctgtaatatgctggatcgggaggagcgcccataatcagtgccccggagatgtaggcttnggctgaactccgttatcaaatatcgtgcctcggtgttgtaatcatgtttggatntcctatggcgttttttccgcgtttggtttccgatgtcgatttcggggctggttttataacaagtggtatcagagcctacgggagatccatggtagaggaagtcgtggaggcgtacatgaagcttggagatggtcagggccgcggcgtagcggatgcggactcggagtccggtcacagcgcgtgcggcacaattgtagaagacgaagccaagtcgaacacgagaagaggcggcgatgcggactctgatttgaagaaatcggaagcaattggcctcatgaagtcagcaaaggagttccatgggattgctttgcaatcgaacaaatcaccaaggcaaaaggagatcggattgggacctcttggcggcggtgatttgggacgacgagcgtcgagtgccgagtcagtgtctgtgatggatgccgaggccgtggaaaagcaacaacacctagacattagcacttcggggagcccttcgatcaattgtggccaagctatcagtgcaaaaggtgcagctcgggaattcagtctacggatgcgaaaaagtgtggatgttggatttattagctcggttcataagatgataaggaagaaagggttttctccatgtctgctaggaagaattcaattcgcttggcaagatgactgtggtgatatgagagaaggtggagcattgttgcgggtggagtcagaaggaagaaattacagggatactggagtatcttgttacgatgagcctggtggaggcttgtcagggcggctcggtgtgagcggcgaaaaaggatcaactcaagtcctggtacactga

SEQ ID NO: 23138 - DNA, 3783 bp, Oryza sativa
  Clone ID: TF_OsC359_7737
ttaaacggaatctcgaccccgagattcggaagaactggcgaagagatcgggatgggctgccttcagctcgtcttcacgctcccaagtagcttcttcttctgcgtggttgctccactggaccttgcaaaaacggattacccggttcctggtcctgcgttccatggtgtccaggattttcactggcctctccacgtaggtcaaatcttcgcgaacttcaatctgctctgagtcggcctgctcggatggcactcgaagacatttcttgagttgcgacacatgaaacacatcatgcacgttgcccaaggaggcgggcagctccaactggtaagcgacttctccgcgccgagcattgatacggaaaggacccacataccgaggtgcaagcttccctttcgtctgaaacctgtgtacacctcgcaatggcgtgacccgaaggtatacaaaatcgcccactgcgaattccaggtcacggcgacggttatctgcataacttttctgccgggactgtgccacctttagattatcccgaatgattctgactttagcttcagcttctctcaggatatcagtcccgaacacttggctttctccaacttggtcccacaagagcggtgtccggcatttgcgcccgtacaacgcttcataaggtgccatttgtatgctggcttgatagctgttattgtaggagaactcggcataggggagactcttatcccaggtcttcccgaaatctaggacacatgcgcggagcatatcttctaggatctgatttagacgctcggtctgtccatctgtctgcgggtgataggcggtgctgaaattcaatcgagtacccagctcttcttggagcttcttccaaaagtgagaggtgaattggcttcccctatcagatacgattttcttgggaacgccatggagactcacgatcctagcgaagtagagctccgctagcttgttccctccataggtggtcttcacaggaatgaatcgagccaccttggttaatcgatccacaactacccatatagaatcatatccgccttgggtttttggaagtccggtgatgaaatccatcccaatttcatcccatttccattctggcacttggagaggttggaggagtccggccggtcgttggtgttctgccttgacacgctggcacacatcacacagagccacgaactctgcaatttcccgcttcatgctaacccaccagtatttctccttcaagtctaagtacatcttcgtactgccagggtggattgaataaggactttcgtgagcttccagtagtatcaactgtttaagttctctgctatctggaacgcatacccgatttccgttccatagggttccgtgttcatcctccgtgaaaccagcggctttaccctgtttcatattcttgaggagtccatgcatgtccggatcattcttctgagcctcgcggatttgatcgagcaagataggcttggcttctaacgcagccacgaatccacgaccaactatgcttaggttcagggcttccatctgttgattaagttcgggtggaatgccacggacgttaagagtgttgcaatggctctttcgacttagagcgtcggcaaccacgttggccttaccaggatgatagtgaattcccacatcatagtctttgatgagttctaaccatctcctttgccgaagattcagatccgactgggtgaagatgtatttcaaactcttatgatcggtatatatttcacagcgattcccaatgagatagtgccgccagatttttagagcatgaaccaccgcggctaactccaagtcatgtgtagggtagttgccttcatgaggtcgtagctgacgtgaggcataggcccaatccttggcgtgaagcgtcacaatacaccatgaagtcttgcgagtatccggcaagattaacactggcgaggaaaccagcttttccttgagagtttgaaacgcattctcgcattgcgggctccacacaaatttctcttctttcttcaacaactgtgtcatgggtcgagcgattttggagaagttctcgatgaatctccgatagtatccttccaaacctaagaaactgcggacttgagtgactgtcttgggtggcttccaatcagtgacggcggtcaccgtttcggggtccacagcaactcctttagcagatatcacgtgccctaagaatttgacttcggacaaccagaactcacacttgctaagtttggcatacaattgatgttcccgcaactttcccaacaccagacggagatggtgctgatggtcttcctctgattgggagtatatcagaatgtcatcaatgaaaaccacaacaaacttatccaagtattccatgaacactttgttcattaagttcatgaagaaggcaggtgcattggttaaaccgaacgacatcaccgtgaattcatacagtccgtatcgcgtggtgaatgcggtcttcggaatatcttcttcacgaatacgtaattggtgatatccggaacgaagatcgatcttggagaatacagtggcacctttaagctgatcgaacagatcatcgatccggggaagagggtacttgtttttgatggtaacttcattgagagctctgtagtcgacgcacatcctcttcgtcttgtctttcttctctacaaaaatcacaggagcaccccatggggaagtactcggacgtatataccctttttctttcaactcttccaactgtttcttgacttcggccagttcattggctgccatacggtagggtcgcttgtgcagaggagtggttcctggagcaagatctattcggaactcaatctctcgcttgggcggcataccgggtagttcttccggaaacacctctccgaactcccaattcatcccaagaatcacatccaagttcttggtgtctagtagaatcagatccgagggaaaaggaatcccctgaatttctataggaacggcagggctataatactttgctatcataacccctccaggggtggtgatgagcagagggtttctaagcctttctacccccaactgatttttccccacgaatggcacagatataaacgagtgggaagctccagagtcgaacaaaatagtagcagggatggaatgaatgaggaacgtaccaacgatgacgtccggagttgtcagcacgtcctcggccgtcacgtggttcacacgaccccgaatgacatccttcccgccgttgttggggcggggaggcgcttgaccttgctgacgccttggcttcgggcatttatccgcaaagtgcccgggctcgaagcagttgaagcacagacgctgctgaccttgagcgtccctgcggccttgaccaggctgcacagttggcgtaggaggacggggcgcacgagtcccttgctgattctgctgctgctgcgcctgtggtcgtcgccctagtcttccgctgtttctcgtttgtctctgtgtgtgctgggccttgcctcctgggacaaggattaatgcacgcacgtcaggaacgcccgttgggttatttccggtcgtgacaatcttcctcacgtgtaaccacgtgtcgcataccaccacggtatatggacggaagacgtgacatagtttccaacccatcctagccatagacaagagtaccgacccaaccccacctacggccggaacctccgggacaggtaggcaggactgaggccctagcagcaggacaccggccctgtgccatgacatctcgactactgggccgcagcttgtgtagccttcatttgtcctagagatgtccat

SEQ ID NO: 23139 - DNA, 5516 bp, Oryza sativa
  unsure (1)..(5516): unsure at all n locations
  Clone ID: TF_OsC359_7743
atgccctccctaggccaaataaggcttacacancttcggcccggtattcaagttgtcatggcacaagggcgggtgtcttgtgctaggggctcagtcctgcctgcctgtccggggggttccggccgtaggtggaattgagtcggtactcttgtctatggctaggatgggttggaaactatgtcacgtcttccgtctgtacaccgtggtgatggccggcagcgtcagccgtcgtggtctggacatgactggtttcgtcttggagctgcggggcatgtgcgttgtcctggggtatccacatggagtggactaccagggcaggccgcttccggagcaggagggtgacgatgcagagccccacgctgcttgggaggttactgcagtgatcctcactggctctcccgagcggacttcgttggcagtcaccgcgggtggagattctttccccgccgcttgccagaacgccgctctcctcgccatcggcactcttcaccagcgctacccggacgagttgcagcactcgccctaccgctaccaccctcgccgcggaggagcccgcgactacgccatcttccgggatgctagctcggaggatgacgctaccatcatgcacctggcgcgcatggtggaggcgtacgacgcggctcgtatcgacttccatcagatggtgcgccgtgggatggtcgggaacaacatgaagatcctggagctgcgtcaggagaatctgcagctgaagaaggacctagacgcagtagaggcgcagctgcatcagctcaagatcgcccagggagagatggtgaagaccaggagaaatgctgccaccggtgatggcaaccaacccgaaggcagcaaccacaaccaccagggcagcccacctccacctccttctccgcctccaccaccaccaccagacaccaacgccattctcacccaaatcctcgcccagcaggccaacatgatgactgctttcctccaccacctccaaaatccgccacaacagaatgcaccaccaccacccccacaacactctaaactcgccgagttcctccgcatccgtccacctaccttctctagctccaacaaccccgtggatgcgttggattggttgcatgccgtggggaaaaagctagacactgtgcagtgcagcgatgaggagaaagtcatcttcgccgcccaccagctgcaggggcccgcatctttatggacccatgtgcccgccggagtcgtggcccttaagaaaagggaattccgagagttgaagcaaggcaaccgctctgtgatggagtatttgcatgagttgaacaacctggcccggtacgccccggaggatgtacgggaagatgaggaaaagcaggagaagttcttggcaggaatggaccctgagctgtccgtgcgcctagtctccggggactatccggatttccaacgtctgatggacaagagcatccgcttggaagccaagcacaaggaactggagtcgcacaagcgccgcttggcgaatttccgcaatcaacagggtgctaaccaaagggtccgctacaccaatccctatccagggggatcctcctcgcagcagcaacaacagcagcagcaacctcgctccgcgccccgacctcaattcgtgcctggtcaaggccgcagggacgctcaaggtccgcagcgtctgtgcttcaactgcttcgagcccgggcactttgcggataaatgcccaaagccgaggcgccagcaaggccaagcgcctccccgctccaacaacggtggtaaggatgtcattcggggtcgtgtgaaccacgtgacggccgaggacgtgctgacaactccagacgtcatcgttggtacgttcctcattcattccatccctgctaccattttgttcgactctggagcttcccactcgtttatatttgtgccattcgtggggagaaaacagttgggggtagaaaggcttaggaaccctctgctcatcaccacccctggaggggttatgacagcaaagtattatagccatgccgtccctatagaaattcaggggattccttttccctcggatctgattcttctagacaccaagaacttggatgtgatccttaggatgaattggttggctcaattccaaggagtagtggattgcgcgagacgcactgtcactctgtaccgagggccggaacaaccggttgttttctttgcacccccaacctctgtcagtagttcagaacttcatcagataggactgtcagaaatccccatcgtcagagagttcggagacgtgtttccggaagaactacccggtatgccgcccaagcgagagattgagttccggatagatcttgctccaggaaccactcctttgtacaagcgaccctaccgtatggcagcaaatgaactggccgaaaagaaagacaagatgaagaggatgtgcgttgactacagagctctcaatgaagtcaccatcaaaaacaagtaccctcttccccgtatcgatgatatgttcgatcagcttaaaggtgccactgtattctccaagattgatcttcgttccggatatcaccaattacgtattcgtgaagaagacattcctaagaccgcattcaccacgcgatacggactgtatgaattcacagtgatgtcgttcggtttaaccaatgcacctgccttcttcatgaacttaatgaacaaagtgttcatggaatacttggataagtttgtggtggttttcattgatgacattctgatatactcacaatccgaggaagaccatcagcaccatctccgtctggtgttgggaaagttgcgggaacatcaattgtatgccaaacttagcaagtgtgagttctggttgtccgaagtcaaattcttaggacacgtgatatctgctaaaggagttgcggtggaccccgaaacagtgaccgccgtcactgattggaagcaacccaagacagtcactcaagttcgcagtttcttaggtttggcaggatactaccggaggtttatcgagaacttctccaaaatcgctcgacccatgacacagttgttgaagaaagaagagaaatttgtgtggagcccgcaatgcgagaaggcgttccaaactctcaaagaaaagctggtttcctcgccggtgttaatcttgccggatactcgcaaggacttcatggtgtattgtgacgcttcgcgccaaggattggggtgcgtgctcatgcaggacggtcatgtggtggcctatgcctcacgccagctacggcctcatgaaggcaactaccctacccatgatctggaattagccgcggtggttcatgctctaaaaatctggcggcactatctcattgggaatcgctgtgaaatatatactgatcataagagtttgaaatacatcttcacccagtcggatctgaatcttcggcagaggagatggttagaactcatcaaggattatgacgtgggaattcactatcatcctggtaaggccaacgtggttgccgacgctctaagtcgaaaaagccattgcaacactcttgacgtccgtggcattccacccgaacttaaccaacagatggaagccctgaacctaagcatagttggtcgtggattcttggctacgctggaagccaagcccaccttgctcgatcaaatccgcgaggctcagaagaacgacccggacatgcgtggactcctcaagaatatgaaacagggtaaagccgctggtttcacagaggatgaacacggaaccctatggaacggaaatcgggtatgcgttccagatgacagagaacttaaacagctgatacttcaggaagctcacgaaagtccttattccatccaccctggcagtacgaagatgtacttagacttgaaggagaaatactggtgggttagtatgaagcgggaaattgcagagttcgtggccctttgtgatgtgtgccagcgtgtcaaggcagagcaccaacgaccggccggacttctccaacctctccaagtaccagaatggaaatgggatgaaattgggatggatttcatcaccggacttccaaaaacccaaggtggatatgattctatatgggtagttgtggatcgattaaccaaggtagctcggtttattcctgtgaagaccacctatggagggaacaaactagccgagctttacttcgctaggatcgtgagtctccatggcgttcccaagaaaatcgtatctgataggggaagccaattcacctctcacttttggaagaagctccaagaagagttgggtacccgattaaatttcagcaccgcgtatcacccgcagacagatggacagaccgagcgtctaaatcagatcctagaagatatgcttcgcgcatgtgtcctagatttcgggaagacctgggataagagtctcccctatgccgagttctcctacaataacagctaccaacccagtatacaaatggcaccttatgaagcgttgtatgggcgcaaatgccggacaccgctattgtgggaccgagttggggaaagccaagtgttcgggactgatatcctgagagaagctgaagcgaaggtcagaaccattcgggataatctaaaggtggcacagtcccggcagaaaagttatgcagataaccgtcgccgtaacctggaattcgcagtggacgattttgtgtaccttcgggtcacgccattgcggggtgtgcacaggtttcagacaaaggggaagctcgcacctcggtatgtgggtcctttccgtatcattgctcggtgcggagaagtcgcttaccagttggagctgcccgcctccttgggcaacgtgcacgatgtgttccatgtgtcgcaactcaagaaatgtcttcgagtgccatccgagcaggccgactcagagcaaattgaagttcgcgaagacttgacctacgtggagaggccagtgaaaatcctggacacaatggaacgcaggaccaggaaccgggtaatccatttttgcaaggtccagtggagcaaccacgccgaggaagaagctacttgggagcgtgaagacgagcttctcccgtttcggcgtcgccttcttcgggttcgccgcgacctcgccgacctcgtccacctctccgtttcggtcgccgatcgccggaacactgccgtccccgtcggcggcgaccatcggggtgcgggtgcgccgcctcccgtcggctgtgccggcgtggccgccttcgggcgcgtcccgcggccggtccaccgtggaccgtggggctgccgcgtgggccccactcccgtggacccggtccgcgcgccctctcccctcggctcggccatataaggaccggtcttcgggcctctattgcaaagcactaccgtacttccacatgtctagtgggtaaggcttagtttgtggctcagtctggttatcacgctgacgtggccgcctccgggcgcgccgtgtggccgccgggtggggcccggccgtcagccgcccgtgccctcgggtgcagctgacgcgtggggcccacggcgccggaccctcggtcagaccggcctcggaggaatttttctgaaaa

SEQ ID NO: 23140 - DNA, 5142 bp, Oryza sativa; identical to SEQ ID NO: 14238
  Clone ID: TF_OsC359_7797

SEQ ID NO: 23141 - DNA, 5469 bp, Oryza sativa
  Clone ID: TF_OsC359_7801
atgtcatggcacagggccggtgtcctgctgctaggggctcagtcctgcctgcctgtcccggaggttccggccgtaggtgggattgggtcggtactcttgtctatggctaggatgggttggaaactatgtcacgtcttccgtctgtataccgtggtgatggccggcagcgtcacccgtcgtggtttggacatgactggcttcgtcttggagctgcggggcatgtgcgtggtcctggggtatccacatggagtggactaccaggccaggccgcttccggagcaggagggtgacgatgcagagccccacgctggttgggaggtcactgcagtgatcctctctggctctcccgagcggacttcgctggcagtcaccgcgggtggagattccttccccgccgcttgccagagcgccgctctcctcgccatcggcactcttcaccagcgctacccggacgagttgcagcactcgccctaccgctaccaccctcgccgcggaggagcccgcgactacgccaccttccgggatgctagctcagaggatgacgctaccatcgtgcacctggcgcgcatggtggaggcgtacgacgcggctcgtatcgacttccatcagatggtgcgccgtgggatggtcgagaacaacatgaagatcctggagctgcgtcaagagaacctgcagctcaagaaggacctagacgcggtggaggcgcagctgcatcagctcaagatcgcccagggagaggtctgccgccccaagcgccgccgtgtctgccgcagccagaagatcaccgcccgcaagagcacctccaggcccgagcttgttcgtcagtccctggcgtggacttgcttcgtcgagatccctcgtgccgagcccgcgcccgtggttccccaggagggggaagcctccggcgttggtagcacggaggatgcgctgttgctcaccttccgtcctggcccgtcgcagcggagaagtgctaacaccggtgatggcaaccaacctgaaggcagcaaccaccaccaccagggcagcccacctccacctcctcctccgcctccaccaccaccaccagacaccaacgccattctcacccaaatcctcgcccagcaggccaacatgatgactgctttcctccaccacctccaaaatccgccacaacataatgctccaccaccacccccacaacactctaaactcgccgagttcctccgcatccgcccacctaccttctctagctccaacaaccccgtggacgcgttggattggttgcatgccgtggggaaaaagctagacactgtgcagtgcagcgatgaggagaaagtcatcttcgccgcccaccagctgcagggacccgcatctctatggtgggaccatttccaggctacgcagccagaagggcaacctattacttgggcccgtttcaccgccgctttccggagaacccatgtgcccgccggagtcgtggcccttaagaaaagagaattccgagagttgaagcaaggcaaccgctccgtgatggagtatttgcatgagttcaacaacttggcccgttacgccccggaggatgtgcgggaagatgaggagaagcaagagaagttcttggcaggaatggaccctgagctgtccgtccgtctagtctccggggactatccggatttccaacgtctagtggacaagagcatccgcttggaagccaagcacaaggaactggagtcgcacaagcgccgcttggcgaatttccgcaatcaacagggtgctaaccaaagggtccgctacaccaatccctatccagggggatcctcctcgcaacagcaacaacagcagcagcaacctcgctccgcgcctcgacctcaattcgtggtgcgcgtcccacagccgcagcagcagcagaatcaacaagggactcgtgcgccccgtcctcctacgccaactgtgcagcctggtcaaggccgcagggacgctcaaggtccgcagcgtctgtgcttcaactgcttcgagcccgggcactttgcggataaatgcccaaagccgaggcgtcagcaaggccaagcgcctccccgctccaacaacggtgggaaggatgtcattcggggtcgggtgaaccacgtgacggccgaggacgtgctgacaactccagacgtcatcgttggtacgttcctcattcattccatccctgctaccattctgttcgactctggagcatcccactcgtttatatctgtgccattcgtggggagaaatcagttgggggtagaaaggcttaggaaccctctgctcatcaccacccctggaggggttatgacagcaaagtattatagtcctgccgtccctatagaaattcaggggattcctttttcctcggatctgattctgctagacaccaagaacttggatgtgatccttgggatgaattggttggctcaattccaaggagtagtggattgtgcgagacgcactgtcactctgtaccgagggccggaacaaccggttgttttctttgcacccccaacctctgtcagtagttcagaacttcatcagataggactgtcagaaatccccatcgtcagagagttcggagacgtgtttccggaagaactacccggtatgccgcccaaacgagagattgagttccggatagatcttgctccaggaaccactcctctgtacaagcgaccctaccgtatggcagcaaatgaactggccgaagtcaagaaacagttggaagagttgaaagaaaaggggtatatacgtccgagtacttccccctggggtgctcctgtgatttttgtggagaagaaagacaagacgaagaggatgtgcgttgactacagagctctcaatgaagtcaccatcaaaaacaagtaccctcttccccggatcgatgatctgttcgatcagcttaaaggtgccactgtattctccaagattgatcttcgttccggatatcaccaattacgtattcgtgaagaagatattccgaagaccgcattcaccacgcgatacggactgtatgaattcacagtgatgtcattcggtttaaccaacgcacctgccttcttcatgaacttaatgaacaaagtgttcatggaatacttggataagtttgttgtggttttcattgatgacattctgatatactcacaatccgaggaagaccatcagtaccatctccgtctggtgttgggaaagttgcgggaacatcaattgtatgccaaacttagcaagtgtgagttctggttgtccgaagtcaaattcttagggcacgtgatatctgctaaaggagttgctgtggaccccgaaacagtgaccgccgtcactgattggaagcaacccaagacagtcactcaagtccgcagtttcttaggtttggcaggatactaccggaggttcatcgagaacttctccaaaatcgctcgacccatgacacagttgttgaagaaagaagagaaatttgtgtggagcccgcaatgcgagaaggcgttcaaaactctcaaagaaaagctggtttcctcgccagtgttaatcttgccggatacttgcaaggatttcatggtgtattgtgatgcttcgcgccaaggattggggtgcgtgctcatgcaggatggtcatgtggtggcctatgcctcacgccagctacggcctcatgaaggcaactaccctacccatgatttggagttagatgcggtggttcatgctctaaaaatctggcggcactatctcattgggaatcgctgtgaaatatatactgatcataagagtttgaaatacatcttcactcagtccgacctgaatcttcggcaaaggagatggttagaactcatcaaggattatgatgtgggaattcactatcatcctggtaaggccaacgtggtcgccgacgctctaagtcgaaaaagccattgcaacactcttaacgtccgtggcattccactcgaacttagtcaacagatggaagccctgaacctaagcatagttggtcgcggattcttggctgcgttggaagccaagcctaccttgctcgatcaaatccgcgaggctcagaagaatgatccggacatgcatggactcctcaagaatatgaaacaaggtaaagccgctggtttcacagaggatgaacacggaaccctatggaacggaaatcgagtatgcgttccagataacagagaacttaaacagctgatactacaggaagctcacgaaagtccttattccatccaccctggcagtacgaagatgtacttagacttgaaggagaaatactggtgggttagtatgaagcgggaaattgcagagttcgtggccctttgtgatgtgtgccagcgtgtcaaggcagagcaccaacgaccggccggacttctccaacctctccaagtacctgaatggaaatgggatgaaattgggatggatttcatcaccggacttcgaaagacccaaggtggatatgattctatatgggtagttgtggatcgattaaccaaggtagctcgatttattcctgtgaagaccacctatggagggaacaaactagccgagctctacttcgctaggatcgtgagtctccatggcgttcccaagaaaatcgtatctgataggggaagccaattcacctctcacttttggaagaagcttcaagaagagctgggtacccggttaaacttcagcaccgcataccacccgcagacagatgggcagaccgagcgtctaaatcagatcctagaagatatgcttcgcgcgtgtgtcctggatttcgggaagacctgggataagagtctcccctatgccgagttctcctacaataacagctatcaagccagcatacaaatggcaccttatgaagcgttgtatgggcgcaaatgccggacaccgctcttgtgggatcaagttggggaaagccaagtgttcgggactgatatcctgagagaagctgaagctaaagtcagaaccattcgggataatctaaaggtggcacagtcccggcagaaaagttatgcagataaccgtcgccgtgacctggaattcgcagtggacgattttgtataccttcgggtcacgccattgcggggtgtacacaggtttcggacaaaagggaagctcgcacctcggtatgtgggtcctttccgtatcgttgcccgacgcggagaagtcgcttaccaattggagctgcccgcctccttgggcaacgtgcacgatgtgttccatgtgtcgcaactcaagaaatgccttcgagtgccatccgagcaggccgactcagagcaaattgaagttcgcgaagacttgacctacgtggagaggccagtgaaaatcctggacaccatggagcgcaggaccaggaaccgggtaatccgtttttgcaaggtccagtggagcaaccacgtcgaagaagaagctacctgggagcgtgaagacgagctgaaggcagcccatcccgatctcttcgccagttcttccgaatctcggggtcgagattccgtttaa

SEQ ID NO: 23142 - DNA, 7187 bp, Oryza sativa
  Clone ID: TF_OsC359_7868
cgaggatctggagttccagatacctcagggaaccgtcgccacgctcgacctggggggagggggggcttgcgctcacacctcccgccgaggcttcaagccataaggcgagagcttctagccaccgtcccaacccacgaagcggctcggaaggcgcactggtcggaggtgaagctcacctttgaccagagcgaccatttgacagtgctcgctcgaggtgggaagttggccctcgtggtctccccgaccattcacaacgttaggatgaagcgagtcctggttgacgggggggccagcttgagcatcatctccccagccgccttcaatgcgctcaaggccccggggatgaagctccagccgtcgctgccgatcatcggcgtgactccgggacacacgtggcccctcggccacgtcgagctcccgataaccttcggcgactccaccaacttccgtaccgagcggatcgacttcgatgtggcggacctcaatctgccctacaacgcggtcctgggcagacctgcgttggtgaagttcatggccgccacccactacgcctacctccagatgaagataccgggccctagtggtcccatcaccgtctttggcgatgtcaaagtcaccctcgcctgcgcggagcagcgcgccgacaacctggcagtggccacggagccacaggccccggaggcctccgcgtcccacgcctccaagaagcgcctcacctcggctgacgaggaaagcgcgctcgtctccttcctgcgggcaaactccgacgtcttcgaatggaagccgtcggacatgcccggggtccctagggaggtgatcgagcaccgcctcgccatgcggctggatgcgcgacccgtccggcaaaaagtgcggtgtcaagccccggagcggcaggccttcatccgagaggaagtggcgcggctcctggaggctgactttatccgcgaggttatccatccggagtggttggcgaacccggtggtcgtcccgaaggccaacggtaagctccggatgtgcattgactacacggacctcaacaaggcatgccctaaagatcccttccctttaccacgcatagatcagatagtcgactccactgcgggatttactctcccgaaatcttcgccggcgcatcaatggagcccgagatcgccgcgccgatttccttcccctccggccgccctctctcactcccaaccctatttaaacgctccccgtgcctccctcctccgtttccgccgtccgccgctcgctctccccgtcggattcgagctcgcgccgtcgtcctctctctccgccgtcgccgccgagctccggttcgccgccgtcgtcgccccggacctcctcccgcttcggcgtcgcctccttcggcttcgccgcgttctcgtcgacctcgtccactcctccgtttcgcccgccgaccgccggagcaccatcgtcctcgtcgacccgagccgcgccgccgcctctctccgcttcggtcgccgttcccgtcgtcgccgtcaacccggggtgagccgaggaccgccatttcgtttcccccttccctcccctctctcggccgccgctccgccgtgcctatggccgcctatttatttaaattcccgcgttatcactgttttatttagccatgcctatttacctttgttacgaccttattattgttattgttattattaccttgttcaccctagaaccaacaaaaccccaactagtgaacactctactcatggtactggttttaggctgggctcggggtgcatggttttgatagtagcacctcggccatataaggaccggtcttcgggcctctgttgcaaagcactaccgtacttccacatgtctagtggggcaaatgaaggatacacgagctgcggcccggtagtcgagatgtcatggcacagggccggtgtcctgctgctaggggctcagtcctgcctgcctgtcccgggtgttccggccgtaggtgggattgggtcgatgtacacctctgatcagagtataatctattcgaatagccgcgccctcggttatgggcaagccgagcaatgtacccaaatggccggcagcgtcacccgtcgtggtttggacatgactggtttcgtcttggagctgcggggcatgtgcgtggtcctggggtatccacatggagtggactaccaggccaggccgcttccggagcaggagggggacgatgcagagccccacgctgcttgggaggtcactgcagtgatcctcgctggctctcccgagcggacttcgctgacagtcaccgcgggtggagactctttccccgccgcctgccagagcgccgctctcctcgccatcggcactcttcaccagcgctacccggacgagttgcagcactcgccctaccgctaccaccctcgtcgcggaggagcccgcgaccacgccaccttccgggatgctagctcggaggatgacgctaccatcgtgcacttggcgcgcatggtggaggcgtacgacgcggctcgtatcgacttccatcagatggtgcgccgtgggatggtcgagaacaacttgaagatcctggagctgcgtcaggagaacctgcagctcaagaaggacctagacgcggtggaggcgcagctgcatcagctcaagatcgcccagggagagatctgccgccccaagcgtcgccgcgtctgccgcagccagaagatcaccgcccgcaagagcacctccaggcctgagcttgttcgttagtccctggcgtggacttgcttcgtcgagacccctcgtgccgagcccgcgcccgtggttccccaggagggggaagcctccggcgttggtagcacggaggatgcgctgttgctcaccttccatggtgatgaccaggagaaatgctaacaccggtgatggcaaccaacctgaaggcagcaaccacaaccatcagggcaacccacctccacctcctcccccgcctccacccccaccaccagataccaacgccattctcacccaaatcctcgcccagcaggccaacatgatgactgctttcctccaccacctccaaaatccgccacaacttaatcctccaccaccacccccacaacactctaaactcgccgagtttctccgtatccgcccacctaccttctctagctccaacaaccccgtggatgcgttggattggttgcatgccgtggggaaaaagctagacactgtgcagtgcagcgatgaggagaaagtcatcttcgccgcccaccagctgcatggacccgcatctctatggtgggaccatttccaggctatgcagccggagggacagcctgttacttgggcccgcttcaccgccgctttccggagaacccatgtgcccgccggagtcgtggcccttaagaaaagagaattccgagagttgaagcaaggcaaccgctccgtgatggagtatttgcacgagttcaacaacctggcccgttacactccggaggatgtgcggaaagatgaggagaagcaagaaaagttcctggcaggaatggaccctgagctgtccgtccgtctagtctctggggactatccggatttccaacgtctggtggacaagagcatccgcttggaagccaagcacaaggaactggagtcgcacaagcgccgcttggcgaatttccgcaaccaacagggtgctaaccaaagggtccgctacaccaatccctatccagggggatcctcctcgcagcagcaacaacagcagcagcaacctcgctccgcgcctcgacctcaattcgtggtgcgcgtcccacagccgcagcagcaacagaatcaacaagggactcgagcgccccgtcctcctacgccaactgtgcagcctggtcaaggccgcagggacgcttcaggtccgcagcgtctgtgcttcaactgcttcgagcccgggcactttgcggataaatgcccgaagccaaggcgtcagcaaggccaagcgcctccccgccccaacaacggtggtaaggacgtcagtcggggtcgtgtgaaccatgtgacggccgaggacgtgctgacaactccagacgtcatcgttggtacgttcctcattcattccatccctgctaccattttgttcgtctctggagcttcccactcgtttatatctgtgccattcgtggggagaaatcagttgggggtacaatgtcttagaaaccctctgctcatctaccacccgtggaggggttatgccagcaaagtattatagccctgccgtccctatagaaattcaggggattccttttccctcggatctgatcctgctagacaccaagattttggatgtgatccttgggatgaattggttggctcaattccaaggagtagtggattgcgcgagacgcactgtcactctgtaccgagggccggaacaaccggttgttttctttgcacccccaacctcagtcagaagttcagaacttcatcagataggactgtcagaaatccccatcgtcagagagttcggagacgtgtttccggaagaactacctggtatgccgcctaaacgagagattgagttccggatagatcttgctccaggaaccactcctctgtacaagcgaccctaccgtatggcagcaaatgaactggccggagttaagaaacagttggaagagctgaaagaaaaggggtatatacgtccgagtacttccccctggggtgctcctgtgatttttgtggagaagaaagacaagacgaagaggatgtgcgttgactacagagctctcaatgaagtcaccatcaaaaacaagtaccctcttccccggatcgacgatctgttcgatcagcttaaaggtgccactgtattctccaagattgatcttcgttccggatatcaccaattacgtattcgcgaagaagatattccgaagaccgcattcaccacgcgatacggactgtttgaattcacggtgatgtcgttcggtttaaccaatgcccctgccttcttcatgaacttaatgaacaaagtgttcatggaatacttggataagtttgtggtggttttcattgatgacattctgatatactcacaatcagaggaagaccatcagcaccatctccgtctggtattgggaaagttgcgggaacatcaattatatgccaaacttagcaagtgtgagttctggttgtccgaagtcaaattcttagggcacgtgatatctgctaaaggagttgctgtggaccccgaaacagtgaccgccgtcaccgattggaagcaacccaagacagtcactcaagttcgcagtttcttaggtttggcaggatactaccggaggttcatcgagaacttctccaaaatcgctcgacccatgacacagttgttgaagaaagaagagaaatttgtgtggagcccgcaatgcgagaaggcgtttcaaactctcaaagaaaagttggtttcctcgccagtgttaatcttgccggatactcgcaaggacttcatggtgtattgtgacgcttcgcgccaaggattggggtgcgtactcatgcaggatggtcatgtggtggcctatgcctcacgccagctacggcctcatgaaggcaactaccctacccatgatttggagttagcagcggtggttcatgctctaaaaatctggcggcattatctcattgggaatcgctgtgaaatatatactgatcataagagtttgaaatacatcttcacccagtcggatctgaatcttcggcaaaggagatggttagaactcatcaaagattatgatgtgggaattcactatcatcctggtaaggccaacgtggttgccgacgctctaagtcggaaaagccactgcaacactcttaacgtccgtggcattccactcgaacttaatcaacagatggaagccctgaacctaagcatagttggtcgcggattcttgactacgttggaagccaagcccaccttgctcgatcaaatccgcgaggctcagaagaatgatccagacatgcatggactcctcaagaatatgaaacagggtaaagccgctggtttcacagaggatgaacacggaaccctatggaacggaaatcgacgtgtcaaggcagagcaccaacgaccggccggacttctccaacctctccaagtacctgaatggaaatgggatgaaattgggatggatttcatcaccggacttccaaaaacccaaggtggatatgattctatatgggtagttgtggatcgattaaccaaggtagctcgattcattcctgtgaagaccacctatggagggaacaaactagccgagctctacttcgctaggatcgtaagtctccatggcgttcccaagaaaatcgtatctgataggggaagccaattcacctctcacttttggaagaagctccaagaagagctgggtacccgattaaacttcagcaccgcgtatcacccgcagacagatgggcagaccgagcgtctaaatcagatcctagaagatatgcttcgcgcatgtgtcctagatttcgggaagacctgggataagagtctcccctatgccgagttctcctacaataacagctaccaagccagcatacaaatggcgccttatgaagcgttgtatgggcgcaaatgccggacaccgctcctgtgggaccaagttggggaaagccaagtgttcgggactgatatcctgagagaagctgaagcgaaagtcagaaccattagggataatctaaaggtggcacagtcccagcagaaaagttatgcagataaccgtcgccgtgacctggaattcgcagtggatgattttgtgtaccttcgggtcacgccattgcggggtgtacacaggtttcagacaaaggggaagctcgcacctcggtatgtgggtcctttccgtatcgttgctcgacgcggagaagtcgcttaccagttggagctgcccgcctccttgggcaacgtgcatgatgtgttccatgtgtcgcaactcaagaaatgccttctagtgccatccgagcaggccgactcagagcaaattgaagttcgcgaagacttgacctacgtggagaggccagtgaagatcctggacaccatggagcgcaggaccaggaaccgggtaatccgtttttgcaaggtccagtggagcaaccacgccgaagaagaagctacctgggagcgcgaagacgagctgaaggcagcccatcccgacctcttcgacagttcttccgaatctcggggtcgagattccgtt

SEQ ID NO: 23143 - DNA, 5466 bp, Oryza sativa; identical to SEQ ID NO: 14199
  Clone ID: TF_OsC359_7872

SEQ ID NO: 23144 - DNA, 3631 bp, Oryza sativa
  Clone ID: TF_OsC359_7881
atggggaaaaagttagacaccgtgcagtgcaacgatgaggagaaagtcatctttgccgctcaccaactgcaggggcccgcatctctatggtgggaccactaccaggctacgcagccagaaggacagcctattacttgggcccgtttcaccgccgctttccggaggacccatgtgcccgccggagtcatggcccttaagaaaagggaattccgagagttgaagcaaggcaaccgctctgtgatggagtatttgcatgagtttaacaacctggccaggtacgccccggaggatgttcgtgaagatgaggagaagcaagagaagttcttggcaggaatggaccctgagctgtccgtgcgtctggtctccggggactatctggatttccagcgtttggtggacaagagcatccgcttggaagccaagcacaaggaactggagtcgcacaagcgtcgcctgacgaatttccgcaaccaacagggggctaaccaaaggatccgctacaccaatccctatccagggggatcctcctcgcagcagcagcaacagcagcagcaacctcgctccgtgccccaacctcaattcgtggatccccgagctctcctctacccgccacctccctcgccttcgtctctcgccgtcggaagcgccctagcgtcgtgtgacctagcgccgccgtcgtcgccgctccagctgtgcgccgccgccgttccggtcgtcgtcgtcgctcgggaagatcgccattgtgatcgccaagtcgccgccgtcctcgtccaccgcttcgccaccgccggagaccgccggagcaccgtcgccgccgtcgacccgatctccgccgccgcttcttcctcgtcgccggcgccgtccgttgcttttctgccgccgttttggtcaccggtaagttcgccgcaccgcgctctacgtcctggtgccctccgttctcgtcgtcgcgccgtcgttcgccggcgagcttgcgctcccgagctgccgccggtgctgacgtcatcgctgccgtcatcgctgacgtcatcgttgccgttccccagcaccagactgagaagtggcggagataagcccacgggggtcgctggggagtccatgcctctggtttttgaggggggtgattatgatccaggaatggtgcactgtggtggattagtcagcaagggacccgtgcgccccatcctcctacgccagccgtgcagcctggacaaggccgcagagacgttcaatgtcagcagcgtctgtgcttcaactgcttcgagcccgggcactttgcggataaatgcccaaagccgaggcgccagcaaggccaagcgcctccccgccccaacaacggtgataggactgtcggaaaccctcatcgtcagtgagttcggagatgtgtttccggaagaactacctggtatgccgcccaagcgagagattgagttccggatagatcttgctcgaggaaccactcctctgtacaagcgaccctaccgcatggcagcaaatgaactagtcgaagtcaagaaacagttggaagagttgaaagaaaagggagctctcaatgaagttactatcaaaaataagtaccctcttccccggatcgatgatctgttcgatcagcttaaaggtgccactgtcttttcaaaaatcgatcttcgctccggatatcaccagttgcgtattcgtgaagaagatatcccgaagaccgcgttcaccacgcgatacgggctgtatgaattcacggtgatgtcgttcggtctgactaatgctcctgccttcttcatgaacttaatgaacaaagtgttcatggaatacttggataagtttgttgtggtcttcatcgacgacatcctgttgtccgaagtcaagttcttagggcacgtgatctctgctaaaggagttgccgtggatcctgaaacagtgaccgccgtcactgattggaagcaacccaagacagtcactcaggttcgcagctttttgggtttggccgggtactaccgaagattcatcgagaatttctccaaaattgccagacccatgacgcagttgctgaagaaggaagaaaaaattgtgtggagcccgcaatgcgagaaggcgttccaaactctcaaagagaagctggaaggtcatgtggtagcctatgcctcccggcagcttcggcctcatgaaggcaactaccctaccaatgatttggtgttggccgctgtgagaagatggttagagctcatcaaggattatgatgtgggaatccactatcaccctggtaaggccaacgtggtcgccgacgctctaagtcgaaaaagccattgcaacactcttggcgtccgtgacattccatcggaacttaatcaacagatggaagccctgaacctaaacatcgttagccatggattcttggctacgctggaagccaagcctaccttgctcgatcaaatccgcgaggctcagaagaatgatccagatatgcatgggatcctcaagaatatgaaacaagagttcgtggccctttgtgatgtgtgccagcgtgtcaaggcggagcaccagcgaccggccggacttctccaacctctacaagtaccagaatggaaatgggatgaaattgggatggatttcatcaccggacttccaaaaacccaaggcggttatgactctatatgggtagtcgtggatcgactaaccaaggtagcacggtttattcctgtgaagaccacctatggagggagcaaactagccgaactctacttcgctaggatcgtgagtctccatggcgttcctaagaaaattgtatctgatagaggaagccaattcacctctcacttctggaagaagctccaagaagagttgggtacccgcttaaatttcagcaccgcgtatcacccacagacagatggacagaccgagcgtctaaatcagatcctagaagatatgctccgtgcctgtgttctagattttgggaagacctgggataagagtctcccctatgccgagttctcctacaataacagctaccaagccagcatacaaatggcaccctatgaagcgttgtatggacgcaaatgccggacaccgctattgtgggaccaagttggggaaagccaagtgttcgggaccgatatcttgagagaagctgaagcgaaagtcagaaccattcgggagaatctaaaggtggcccagtctcggcagaagagttatgcagataaccgacgccgtaacctggaattcgcagtggatgactttgtgtatctccgggtcacgccgctgcgaggcgtacgctggtttcagacgaaagggaagctcgcacctcggtttgtgggtcctttccgtatcattgctcgacgcggagaagtcgcttaccagttggagctgcccgcctccttgggcaacgtgcatgatgtgttccatgtgtcgcaactcaagaaatgccttcgagtgccgtccgagcaggccgactcagagcagattgaagttcgcgaagacttgacctacgtagagagactagtgaaaatcctggacaacatggagcgcaggaccaggaaccgggtaatccgtttttgcaaggtccaatggagcaaccacgccgaggaagaagctacttgggagcgtgaagacgagctgaaggcagcccatcccgatctcttcgcca

SEQ ID NO: 23145 - DNA, 5954 bp, Oryza sativa
  Clone ID: TF_OsC359_7928
atggcggccggatcccccgcgccggtttccttccccgccgaccgccctctctccctcccgaccctatttaaaccctccccgctccttcctcgtccgtttctgccacttgccgcaccgtttccccgccagaatcgagctcgcgccgtcgtcctctctctcctccgtcaccgacgacctccggctggccctctccgctcgccgggaccgcctcccgcctcggcgtcgtctcctcaagcttcgccgtgccgtcgctgaccctgtccaccacctcgccgagctcgccgaccgccgaagcgccatagtccccgtccacccgagccgcgccaccgccttcctccgctccggacgcctcctttgccgtcgccgtcgacccggggtgagacgtggaccaccgcctctttcccccttcccttcccctctcttggccgccgctccgctgtgcctatggccgccgccggcgaccataggggcgcaggcgccgcctcccgccggccgcgccgacgtggccgcctccgggcgcgccgtgtggccgtcgcgtggggcccggccgttagccgcccgtgccctcgggtgcggctgatgcgtggggcctacggcgccggccggtgtgagcccgggtgcgcccggtccaccgtggacccacctcggccacataaggaccggtctttgggcctctgttgcaaagcactaccgtacttccacatgtctagtgggaggtaggagaagggcccgacatgtgggccccacatgtcggtgacccgcgtgagaggaggggcggcggcggcttgggccgaatttatgcttccgcttgttaaactctatattgtatcaacttttggtgtaccttgcctcctgggacaaggaataatacacgcacgtaaggaacgcccgttgggttatttccggtcgtgacaatgtttgtagatggccggcaacatcaaccgtcatggcctggatctgactggctttgttttggagctgcggggcatgtttgttgtcctgggatatccgcatggagtggactaccagggcaagaagcttccggagcaggatggtgacgatgcagagccccgcgccgcttgggaggtcactgcggtgatcctcaccggctctcccgagaggacttcgttggcagtcaccgcgggtggagattctttccccgccgcttgccagaacgccgcgctcctcgtcatcggcactcttcaccagcgctatttggacgagttgcggcactcgccctacagctaccaccctcgttgaggagcctgcgactacgccaccttcagggatgctagctcggaggatgacgctaccatcatgcacctggcgcgcatggtggaggcgtacgatgcggcccgtatcgacttccatcatatagtgcgccgtgggttggtcgagaacaacatgaagatcctggagctgcgtcaggagaatttgcagctgaagaaggacttggacgcagtggaggcgcagctgtgtcagctcaagattgctaagggagaggtctgccgccccaagcgccgccgcgtttgccgcaacctgaagatcaccgcccgcaagagtacctccaggcctgagcttgttcgtcagtccctagcgtggacttgctttgtggagatcccttgcgccgagtccgcgcccttggttcctcaggaggagggagcctctggcgttggtagcacggaggatgtgctgttgctcaccttccatggtgacaaccaggagaagcgctgttactggcgaaggcagtcatcccgaaggcagcaaccccaacaaccatgacagcccacctccacctcctccccaccaccaccaccgccacctgacaccaaccccatcctcacccaaatcctcgcccagcaggccaacgtgatggctgctttcctccaccacatccagaatccgccgcaacacaatgctccgcccccaccaccacccctgcagcattctaagcttgccgagttcctccgcatccgcccgcctaccttctctagcttcaacaaccctgttgatgccttggattggttgcatgccgttgggaaaaagttagacaccgtccagtgcaatgatgaggagaaagtcatcttcgccacccaccaactgcaggggcccgcatctctatggtgggaccacttccaggctacgcagccggaaggatagcctatcacctgggcccgcttcaccgccgctttccggaggacccatgtgcccgccggagtcatggcccttaagaagagggaatttcgggagttgaagcaaggcaaccgctctgtgatggagtatttgcatgagttcaataacttggcccggtacgctccagaggatgttcgtgaagatgaggaaaagcaacagaaattcctggcaggaatggaccctgaactgtctgtgcatctggtctccagggactatcctgatttccagcgcctggtggacaagagcatccacctggaagccaagcacaaggaactggagtcgcacaagcgtcgcttggcgaatttttccaatcaacagggagctaaccaaagggtccgctacacaaatccctatcctggaggatcctcctcacagcagcagcagcagcagcaacctcgccccgcgccccgacctccatacgtggtgcgcgtcccacagccgcagcagcagcagaatcagcaagggacccgtgcaccccgccctcctgcaccggccgtgcagcctggtcaaggccgcagggacgctcaaggtcaacaacgtctgtgcttcaactgcttcgagcccggacactttgcggataaatgcccgaagccaaggcgccagcaaggccaagcgcctccccgccccaacaacggtggtaaggatgtcactgggggttgtgtgaaccacgtgactgccgaggatgtgctgacaactccagacgtcatcgttggtacgttcctcattcattccatccctgctaccattttgttcgactctggagcttcccactcgtttatatctgtgccattcgtggggagaaatcagctgggggtagaaaggcttaggaaccctctactcatcaccacccctggagtggttatgacaacgaagtattatagcccggccgttcctatagaaatccagggaattcctttccctcggatctgattcttctggacaccaagaacttggatgtgatccttgggatgaattggttggctcaattccaaggagtagtggattgcgcaaggcgcactgtcactctgtaccgggggcccgatcaaccagttgttttctttgcactccaactcccgccggcacttcagtacttcatcaactaggattatccgtaatctccatcgtcagtgagttcggtgatgtgtttccggaagagctacccggtatgccgcccaagcgggagattgagttccggatagatcttgctccaggagccactcctttatacaagcgaccctaccgtatggcagcaaatgaattggccgaagtcaagaaacagttggaagagttgaaagaaaatgggtatatacggccgagcacttccccctggagtgctcccgtgatttttgtggagaagaaagacaagacaaagaggatgtgcgttgactacagagctctcaacgaggtcactatcaaaaacatgtacccccttccccagatcgatgatctgttcgatcagcttaaaggtgccactgtcttttccaagattgatcttcgttccggatatcaccagttgcgtattcgtgaagaagatatcccgaagaccgcattaaccacgcggtacggactgtatgaattcacggtgatgttgttcggtctgaccaattctcctgccttcttcatgaatttaatgaacaaagtgttcatggaatacctggataagttcgttgtggtctttattgacgacatactggtgtactcggagtcagaggaagaccatcagcagcatctccgtttagtgttggggaagctgcgggaacactaactgtatgccaagctcagcaagtgtgagtttttgttgtccgaagttaagttcttagggcatgtgatttctgctaaaggagttgctgtggatcccaaaacggtgaccgccgtcactgattggaagcaacccaagacagtcactcaggtccgcagctttttgggtttggcaggatactaccgaagattcatcgagaatttctccaaaattgccaggcccatgacgcagttgctgaagaaggaagaaaaatttgtgtggagtccgcagtgtgagaaagcattccaaactctcaaagaaaagctggtttcctcgcccgtgttaatcttactggatactcgcaaggacttcttggtgtactgtgacgcttcgcgccaaggattggggtgtgtattaatgcaggaaggtcatgtggtagcctatgcctcacgccagctacggccccatgaaggcaactatcctactcatgatttggagttggccgctgtggttcatgatttgaaaatctggcggcattatctcattggaaatcgctgcgaaatatataccgatcataagagtttgaaatacatcttcactcagtcagatctgaatcttcagcagagaagatggttagagctcatcaaagattatgatgtgggaatccactatcaccctagtaaggccaacgtggtcgccgacgcgctaagtcgaaaaagccattgcagcactcttggcgtccgtggcattccaccagaacttaatcaacagttggaagccctgaacctaagcatcgttagctatggattcttggctatgctggaagccaagcctaccttgctcgatcaaatccgcgaggctcagaagaatgatccagatattcatgggatcctcaagaatatgaaacagggtaaagccgctggtttcacagaagatgaacacggaaccctatggaacggaaatcatcgtgtcaaggcagagcaccaacgaccggccagacttctccaacctctccaagtaccagaatggaaatgggatgaaattgggatggatttcatcaccggagttccaaaaacccaaggcggatatgattctatatgggtaatcgtggatcgactaaccaaggtagcttggttcattcctgtgaagaccacctatggagggaacaaattagctgaactctacttcgctaggatcgtgagtctccatggcgttcctaagaaaattgtatctgataggggaagccaattcacctatcacccgcagacagatggacagaccgatcatccgaatcaggtcctagaagacctgggataagagtctcccctatgccgagttctcctacaataatagctaccaagccagcatacaaatggcaccctatgaagcgttgtatggccgcaaatgccggacaccactattgtgggaccaagttggggaaagccaagtgttcgggactgatatcctgagagaagctgaagctaaagtcagaaccatttgagataatctaaaggtggcatagtctcggcagaagagttatgcagacaaccgacgccgtaacctggaattcgcagtggacgattttgtgtatcttcgggtcacgctattgcggggcgtacataggtttcagacaaaagggaagctcccacctaggtttgtggggcctttccgcatcattgctcgacgcggagaagttgcttaccagttagagctgcccgcatccttgggcaacgtgcacgatgtgttccatgtgtcgcaactcaagaaatgccttcgagtgccgtccgagcaggctgattcagagcaaattgaagttcgcgaagacttgacctacgtggagaagccagtgaagattctggacaccatagagcgcaggaccaggaatcgggtaatccgtttttgcaaggtccaatggagcaaccatgccgaggaagaagctacttgggaacgtgaagacgagctgaaggcagcccatcccgatctcttcgccagttcttccgaatctcggggtcgagattccgtt

SEQ ID NO: 23146 - DNA, 6610 bp, Oryza sativa
  Clone ID: TF_OsC359_7996
tataacctaaagaaccctgtgctttgtttttatgtattggtattgcttctttataggcttgtagctttgcttgtgtgcttcgcgtagcttctgtcgttccggaggttcccgaagcgtggttcgcggtcgtcgccgaaggatcggaagtccgttctctctctcttcctctttcaaaacccctaaaacctgttttcggtggggtttgggtgcatgccagttatgggaagtagcaccccggccactataaggattaagctcgggcctctgttgcaaagcactaccgtacttccacatgtctaatgggtaaggcttagtttgtggctcagtctagtcataaacaaaagtacacggattggagatggatgaagtcgggcgtcgatggacattctccagggcaaatgaaggctacacgagctgcggcccggtagtcgagatgtcatacggcggagggttggtgcccaatgctaggggctcagttctgcctgcctgtcccgggtatcccggccgtaggcaggattgggtcggtactcttgtttatggctaggatgggttggaaactatgtcacgtcttccgtctgtataccgtggtggtatgtggcgcgtggtaacacgtgaggaagatgtgtcttgtggcatttgtgggtgtgtcttgttgagtacggtggttgtactcagtcttgctcaatttttcccaagtccagaagaggagctccttgaagatgaaggctttggtgtctagctcgtgcctgccgtcaagtgcctgtggtcgtcgccctagtcttccgctgtttctcgtttgtctttgtgtgttctgggccttgcctcctgggacaaggattaatgcacgcacgtaaggaatgcccgttgggttatttccggtcgtgacaacttctccgcgccgagcagtgatacggaaaggacccacataccgaggtgcgagcttcccctttgtccgaaacctgtgtacacctcgcaatggcgtgacccgaacatacacaaagtcatccgctgcgaattccaggtcacggcgacggttatctgcataacttttctgccgggactgtgccatctttagattatcccgaatggttctgaccttcgcttcagcttctctcaggatatcagtcccgaacacttggctttctccaacttggtcccacaatagcggtgtccggcatttgcgcccatacaacgcttcataaggtgccatttgtatgctggcttgataactgttattgtaggagaactcggcataggggagactcttatcccaggtcttcccgaaatctaggacacatgcgcgaagcatatcctctaggatctgatttagacgctcggtctgtccatctgtctgcgggtgatacgcggtgctgaaatttaatcgggtacccagctcttcttggagcttcttccaaaagtgagaggtgaactggcttccccgatcagatacaattttcttggggacgccatgcagactgacgatcctagcgaagtagagttcagctagtttgttccctccataggtggtctttacgggaatgaaccgtgctaccttggttagtcgatccacgactacccatatagaatcatatccgccttgggtttttggaagtccggtgataaaatccatcccaatttcatcccatttccattctggtacttggagaggttggagaagtccggccggtcgttggtgctctgccttgacacgccgatttccgttccatagggttccatgttcatcctctgtgaaaccagcggctttaccctgtttcatattcttgaggagcccatgcatatccgggtcattcttctgagccttgcagatttgatcgagcaaggtaggcttggcttccagcgtagccaagaatccacgactaactatgcttaggttcagggcttccatctgttgattaagttccggtggaatgccacggacgttaagagtgttgcaatggctctttcgacttagagcgtcggcgaccacgttggccttaccaggatgatagtgaattcccacatcataatccttgatgagttctaaccatctcctttgccgaagattcagatccgactgagtgaagatgtatttcaaactcttatgatcagtatatatttcacagcgattcccaatgagatagtgccaccagatttttagggcatgaaccaccgcggctaactccaaatcatgagtagggtagttgccttcatgaggccgaagctggcgtgaggcataggccaccacataaccatcctgcatgagcacgcacccctatccttggcgcgaagcgtcacaatacaccatgaagtccttgtgagtatctggcaagattaacaccggcgaggaaaccagcttttctttgagagtttgaaacgccttctcgcattgcgggctccacacaaatttctcttctttcttcaacaactgtgtcatgggtcgagcgattttggagaagttctcgatgaaccttcggtagtatcctgccaaacctaagaaactgcgaacttgagtgactgtcttgggttgcttccaatcggtgacggcgatcactgtttcggggtccacagcaactcctttagcagatatcacgtgccctaagaatttgacttcggacaaccagaactcacacttgctaagtttggcatacaattgatgttcccgcagctttcccaataccagacggagatggtgctgatggtcttcctctgattgtgagtatatcagaatgtcatcaatgaaaaccaccacaaacttatccaagtattccatgaacactttgttcattaagttcatgaagaaggcaggagcattggttaaaccgaacgacatcaccgtgaattcatacagtccgtatcgcgtggtgaatgcggtcttcggaatatcttcttcgcgaatacgtaattggtgatatccggaacgaagatcaatcttggagaatacagtggcacctttaagctgattgaacagatcatcgatccggggaagagggtacttgtttttgatggtgacttcattgagagctctgtagtcaacgcacatcctcttcgtcttgtctttcttctccacaaaaatcacaggagcaccccagggggaagtacttggacgtatataccccttttctttcagctcttccaactgtttcttaacttcggccaattcatttgctgccatacggtagggtcgcttgtacagaggagcggttcctggagcaagatctatccggaactcaatctctcgcttaggcggcataccaggtagttcttccggaaacacgtctccgaactctctgacgatgggaatttctgacagttctatctgatgaagttctgaacttctgactgaggttgggggtgcaaagaaaacaaccggttgttccggccctcggtacagagtgacagtgcgtctcgcgcaatccactactccttggaattgagccaaccaattcatcccaaggatcacatccaagttcttggtgcctagcagaatcagatccgagggaaaaggaatcccctgaatttctatagggacggcagggctataatactttgctgtcataacccctccaggggtggtgatgagcagagggtttctaagcctttctacccccaactgatttctccccacgaatggcacagatataaatgagtgggaagctccagagtcgaacaaaatggtagcagggatggaatgaatgaggaacgtaccaacgatgacgtctggagttgtcagcacgtcctcggccgtcacatggttcacacgaccccgaatgacgtccttaccaccgttgttggggcggggaggcgcttggccttgctgacgccttggcttcgggcatttatccgcaaagtgcccgggctcgaagcagttgaagcacagacgctgcggaccttgagcgtccctgcggccttgaccaggctgcacagtcggtggaggaggacggggcgcacgagtcccttgttgattctgctcctgctgcggctgtgggacgcgcaccacgaattgaggtcgaggcgcggagcgaggttgctgctgctgctgttgctgctgcgaggaggatccccctggatagggattggtgtagcggaccctttggttagcaccctgttggttgtggaaattcgccaagcggcgcttgtgcgactccagttccttgtgcttggcttccaagcggatgctcttgtccaccagacgttggaaatccggataatccccggagactagacagacggacagctcagggtccattcctgccaggaacttctcttgcttctcctcatcttcccgcacatcctccggagcgtaacgggccaggttgttgaactcgtgcaaatactccatcacggagcggttgccttgcttcaactctcggaattcccttttcttaagggccacgactccggcgggcacatgggttcttcggaaagcggcggtgaagcgagcccatgtaataggctgtccctctggctgcgtagcctggaaatggtcccaccatagagatgcgggtccctgcagctggtgggcggcgaagatgactttctcctcatcgctgcactgcacagtgtctagctttttccccacggcatgcaaccaatccaacgcatccacggggttgttggagctagagaaggtaggtggacagatgcggaggaactcggcgagtttagagtgttggggaggtggtggtggagcattatgttgtggcggattttggaggtggtggagaaaagcagtcatcatgttggcctgctgggcgaggatttgggtgagaatggcgttggtatctggtggtggtggtggaggcggaggaggaggtggaggtgggctgccatggttgttgtggttgctgtcttcgggttggttgccatcactggtggcagcatttctcctggtcatcaccatggaaggtgagcaacagcgcatcctccgtgctaccaacgccggaggcttccccctcctggggaaccacgggcgcgggctcggcacgaggggtctccacgaagcaagtccacgccagggactgacgaacaagctcgggcctggaggtgctcttgcgggcggtgatcttctggctgcggtagacgcggcgatgcttggggcggcagatctctccctgggcgatcttgagctgatgcagctgcgcctccaccgcatctaggtccttcttgagctgcaggttctcctgacgcagctccaggatcttcatgttgttctcgaccatcccacgacgcaccatctgatggaagtcgatacgagccgcgtcgtacgcctccaccatgcgcgccaggtgcacgatggtagcgtcatcctccgagctagcatcccggaaggtggcgtagtcgcgggctcctccgcgacgagggtggtagcggtagggcgagtgctgcaactcgtccgggtagcgctggtgaagagtgccgatggcgaggagagcggcgctctggcaagcggcggggaaggaatccccacccgcggtgactgtcagcgaagtccgctcgggagagccagcgaggatcactgcagtgacctcccaagcagcgtggggctccgcatcgtcaccctcctgctccggaagcggcctggcctggtagtccactccatgtggatgccccaggaccacgcacatgccccgcagctccaagacgaagccagtcatgtccaaaccacgacggctgacgctgccggccatttgggtacattgctcggcttgcccataaccgagggcgcggctattcgaatagattttactctgatcagaggtgtacatcgacccaatcccacctacggccggaacccccgggacaggcaggcaggactgagcccctagcagcaggacaccggccctgtgccatgacatctcgactaccgggccgcagctcgtgtagccttcatttgccccactagacatgtggaagtacggtagtgctttgcaacagaggcccgaacaccggtccttatatggccgaggtgggtccacggtggaccgggtgcacgcggcttgcgccggccggcgccgtgggtcccacgcgtcagccgcacccgaggacgcgggcggctgacgaccgggccccacatggcagccgcggggcgcgcccgaaggcggcctcgccggcacagccgacgggaggcggcgcgcccgcgccccgatggtcgccggcggcgacctccggcgcgacggagcggcgcccgagagaggggagggaagggggaagcgaaatgggcggtccatggctcaccccgggtcgacggcgacgacgggaacggcgaccgaagcggagaaagggggcggcgcggctcgggtcgacgaggacggcggcgttccggcggtcggcgggcgaaacgaaggggtggacgagattggcgaggacgcggcgaacccgaagaaggcgatgccgaaacgggaggaggcccggtgcgacgacggcggcggaccggagctcggcggcgacggcggagagagaggacgacgttgcgagctcgattccgacggggagagagagcggcgagtggcggaaacgaaggagggaggcatggggagtgtttatgtagtgttgggaggaggagagagcggccggatgagggggaatcggtcgtggaagatccggccgccat

SEQ ID NO: 23147 - DNA, 5910 bp, Oryza sativa
  Clone ID: TF_OsC359_8144
agaagccaagaacccatttttgtgctttatttcggtttgttatatggagtttagtagagtaaaagccttttcttttccgttggtcgtgtagacgctgcagcttcggaagatctgctcttcgtggaagttgaagccggcgtttgggaaagcgagcaaggcaagtcacatcatcgctccttctattcaaaatccccaaaatggttttaggctgggctcggggtgcatggttttgatagtagcacctcggccatataaggaccggtcttcgggcctctgttgcaaagcactaccgtacttccacatgtctagtgggtaaggcttagtttgtggctcagtctggttataaacaaaagtacacggatggaggtggatgaagtcgggggtcgatggacattctccagggcaaatgaaggctacaygagctgcggcccggtagtcgagatgtcatggcacagggccggtgtcctgctgctaggggctcagtcctgtctgcctgtcccggggrttccgrccgtaggcgggattgggtcggtactcttgtctatggctaggatgggttggaaactatgtcacgtcttccgtctgtataccgtggtgatggccggcagcgtcacccgtcgtggtttggacatgactggcttcgtcttggagctgcgaggcatgtgcgtggtcttggggtatccacatggagtggactaccaggccaggccgcttccggatcaggagggtgatgacgcggagccccacgctggttgggaggtcactgcagtgatcctctctggctctcccgagcggacttcgctggcagtcaccgcgggtggagattccttccccgccgcttgccagaacgccgctctcctcgccatcggcactcttcaccagcgctacccggacgagttgcagcactcgccctaccgctaccaccctcgtcgcggaggagcctgcgaccacgccaccttccgggatgctagctcggaggatgacgctaccatcgtgcacctggcgcgcatggtggaggcgtacgacgcggctcgtatcgacttccaccagatggtgcgccgcgggatggttgagaacaacatgaagatcctggagctgcgtcaggagaacctgcagctcaagaaggacctagacacggtggaggcgcagctgcatcagcttaagatcgcccagggagaggtctgccgccccaagcgtcgccgcatctgccgcagccagaagatcaccgcccgcaagagcacctccaggcccgagcttgttcgtcagtccctggcgtggacctgcttcgtcgagacccctcgtgccgagcccgcgcccgtggttccccaggagggggaagcctccggcgttggtagcacggagggtgcgctgttgctcaccttccgccctggcccgtcgcagcggagaaatgctaacaccggtgatggcaaccaacctgaaggcagcaaccacaaccaccaaggcaacccacctccacctcctcctccgcctccgccaccaccaccagacaccaacgccattctcacccaaatcctcgcccagcaagccaacatgatgactgctttcctccaccacctccaaaatccgccacaacagaatgctccaccaccacctccccaacactctaaactcgccgagttcctccgcatccgtccacctaccttctctagctccaacaaccccgtggatgcgttggattggttgcatgccgtggggaaaaagctagacacggtgcagtgcagcgacgaggagaaagtcatcttcgccgcccaccaactgcaggggcccgcatctctctggtgggaccacttccaggctacgcagccagagggacagcctattacttgggcccgcttcaccgccgctttccggagaacccatgtgcccgccggagtcgtggccctcaagaaaagggaattccgagagttgaagcaaggcaaccgctccgtgatggagtatttgcatgagttcaacaatctggcccgttacgctccggaggatgtgcgggaagatgaggagaagcaagagaagttcctggcaggaatggaccccgagctgtccgtccgtctagtctcgggggactatccggattttcaacgactggtggacaagagcatccgcttggaagccaagcacaaggagctggagtcgcacaagcgccgcttggcgaatttccgcaatcaacagggtgctaaccaaagggtccgctacaccaatccctatccggggggatcctcctcgcagcagcaacaacagcagcagcaacctcgctccgcgcctcgacctcaattcgtggtgcgcgtcccacagccgcagcagcagcagaatcaacaagggactcgtgcgccccgtcctcccacgccaactgtgcagcctggtcaaggccgcagggacgctcaaggtcagcagcgtctgtgcttcaactgcttcgagcccgggcactttgcggataaatgcccgaagccaaggcgtcagcaaggccaagcgcctccccgctccaacaacggcgggaaggatgtcattcggggtcgtgtgaatcacgtgacggccgaggacgtgctgacaactccagacgtcatcgttggtacgttcctcgttcattccatccctgctaccattttgttcgactctggagcttcccactcgtttatatctgtgccattcgtggggagaaatcagttgggggtagaaaggcttaggaaccctctgctcatcaccacccctggaggggttatgacagcaaagtattatagtcctgccgtcccgatagaaattcaggggattccttttccctcggatctgattctgctagacaccaagaatttggatgtgattcttgggatgaattggttggctcaattccaaggagtagtggattgcgcgagacgcactgtcactctgtaccgagggccggaacaaccggttgttttctttgcacccccaacctctgtcagaagttcagaactgcatcagatagaactgtcagaaatccccatcgtcagggagttcggagatgtgtttccggaagaactacccggtatgccgcccaagcgagagattgagttccggatagatcttgctccaggaaccactcctctgcacaagcgaccctaccgtatggcagcaaatgaactggccgaagtaaagaaacagttggaagtgttgaaagaaaaggggtatatacgtccgagtacttccccatggggtgctcctgtgatttttgtagagaagaaagacaagacgaagaggatgtgcgtcgactacagagctctcaatgaagtcaccatcaaaaacaagtaccctcttccccggatcgatgatctgttcgatcagcttaaaggtgccactgtattctccaagattgatcttcgttccggatatcaccaattacgtattcgtaaagaagatattccgaagaccgcattcaccacgcgatacgggctgtatgaattcacggtgatgtcattcggtctaaccaatgcacctgctttcttcatgaacttaatgaacaaagtgttcatggaatacttggataagtttgttgtggttttcattgatgacattctgatatactcacaatcagaggaagaccatcagcaccatctccgtctggtgttgggaaagttgcgggaacatcaattgtatgccaagcttagcaagtgtgagttctggttgtccgaagtcaaattcttggggcacgtgatatctgctaaaggagttgctgtggaccccgaaacagtgaccgccgtcaccgattggaagcaacccaagacagttactcaagtccgtagtttcttaggtttggcaggatactaccggagattcatcgagaacttctccaaaatcgctcgacccatgacacagttgttgaagaaagaagagaaatttgtgtggagcccgcaatgcgagaaggcgtttcaaactctcaaggaaaagctggtttcctcgccagtgttaatcttgccggatactcgcaaggacttcatggtgtattgtgacgcgtcgcgccaaggactggggtgcgtgctcatgcaggacggtcatgtggtagcctatgcctcatgtcagctacgacctcatgaaggcaactaccctacccatgatttggagttagccgcggtggttcatgctctaaaaatctggcggcactatcacattgggaatcgctgtgaaatatataccgaccataagagtttgaagtacatcttcacccagtcggatctgaatcttcggcaaaggagatggttagaactcatcaaggactatgatgtgggaattcactatcatcctggtaaggccaacgtggttgctgacgctctaagtcgaaagagccattgcaacactcttaacgtccgtggcattccacctgaacttagtcaacagatggaagccctgaacctaagcatagttggtcgtgggttcttggctgcgttagaagccaagcctaccttgctcgatcaaatccgcgaggctcagaagaatgatccggacatgcatggactcctcaagaatatgaaacagggtaaagccactggtttcacagaggatgaacacggaaccctatggaacggaaagcgggtatgcgttccagataacagagaacttaaacagctgatacttcaggaagctcacgaaagtccttattccattcacccgggcagtacaaagatgtacttagacttgaaggagaaatactggtgggttagcatgaagcgggaaattgcagagtttgtggccctatgtgatgtgtgccagcgtgtcaaggcagagcaccaacgaccggccggacttctccaacctctccaagtaccagaatggaaatgggatgaaattgggatggatttcatcaccggacttccaaaaacccaaggcggatatgattctatatgggtagttgtggatcgattaaccaaggtagctcgatttattcctgtaaagaccacctatggagggaacaagctagccgagctctacttcgctaggatcgtgagtctccatggcgttcccaagaaaatcgtatctgataggggaagccaattcacctcgcacttttggaagaagctccaagaagagctgggtactcgattgaatttcagcaccgcctatcacccgcagacagatggacagaccgaacgtctaaatcagatcctagaagatatgctccgcgcatgtgtactagatttcgggaagacctgggataagagtctcccctatgccgagttctcctacaataacagttatcaagccagcatacaaatggcaccttatgaagcgttgtacgggcgcaaatgccggacaccgctcttgtgggaccaagttggagaaagccaagtgttcgggactgatatcctgagagaagctgaagctaaagtcagaatcattcgggataatctaaaggtggcacagtcccggcagaaaagttatgcagataaccgtcgccgtgacctggaattcgcagtgggtgattttgtataccttcgggtcacgctattgcgaggtgtacacaggtttcagacaaaagggaagctcgcacctcggtatgtgggtcctttccgtatcaatgctcggcgcggagaagtcgcttaccagttggagctgcccgcctccttgggcaacgtgcatgatgtgttccatgtgtcgcaactcaagaaatgccttcgagtgccatccgagcaggccgactcagagcagattgaagttcgcgaagatttgacctacgtggagaggccaatgaaaatcctggacaccatggagcgcaggaccaggaaccgggtaatccgtttttgcaaggtccagtggagcaaccacgcagaagaagaagctacttgggagcgtgaagacgagctgaaggcagcccatcccgatctcttcgccagttcttccgaatctcggggtcgagattccgtttaa

SEQ ID NO: 23148 - DNA, 5436 bp, Oryza sativa
  Clone ID: TF_OsC359_8156
gtgaagacgacgacggacaccggcggtgttcggtcggaggggaggcgaggccgaggacgacgtcgcggctgcgatgccgaagatggtagtggtgcagcaagccgacgagccggggaggaggaaggggcggccgaaaggacgctggcgacgaagaggatggagaggccggcgcggcgacggcgttccggcgaaaccgaggagcagccggggtggagggcgatgcggcgacgccgagggaggtggtggcgactgtcgcgaccgggaaaattgccttttcccgaacgctagtgtattaatccccgtcccaggaaaagccggggaatgtccatcaacccccgacttcatccatctccaatccgtgtacttttgtttataaccagactgagccacaaactaagccttacccactagacatgtggaagtacggtagtgctttgcaacagaggcccgagcttaatccttatagtggccggggtgctacttcccacaactggcatgcacccaaaccccaccgaaaaacatgttttaggggctttgaaagaggaagagagggagaacggccttccgaaccttcggcgacgaccgcgaaccacgcttcgagaacctccggaacgacgaagactacgcgaagcacacaagcaaagctacaagcctataaagaagcaataacaatacataaaaagaaaaccgggtacacagagacggtccacgggtcgacggaagcggaccccgtgtgtcaaccgaggcgagtggccgacaaacggactccactagacaccacacgggctgcacacgtggaaaccacgcggctaccgagcgggcacactaacacggtcaccacacgcacaagcgaacgactaccgacaccggtacacgggcgagacgcggccggcacgaggcttgatgacgcggagccgaggacgaagacgacgacgggggctgcagcgaccttgacgaagcgaggacgacgaacgagaacggcttgacggagggacgaacgccacgacgatcgggaacaacgagagggcgaggacgacgacgaccggggccggcgaggagacgacgagggcagccggcagcggctgcacggagacgaggacggcgtggaacacgccgctgcgatgacgatgacggtggcggcgcagcgagacgacgagccgggcgaccgatgggacgtcgatcggcgaggacgaacggtgacgaggaagcgacgatggcagccagcagcggctgcgcggaggaggggtggtggtgcagcggggcgacgagccgacgaggaggaatgggtggttggcgcggcggcggcgttccggcaaacttcgggcgacgccgcagccgggccggagaagaggatggcgctgcagcaccgacagaggtggtagcgacgtcggccggcgctcaggcgaggcggcagggatggctggagccggtggagtggtggcgacaccactaggcgacggcgggaacgcgcctccggcggtcaccgcgcgaaacggagggtaggccgtgggagaggaggcggctgcgatgctataggaggcgacggcgcgaccggacggcgctccggcgaggagggagaggcggctggaggcggccggcggcacgggagagagaggaggacggcggggagatgtccgaatgatttttaattcgggatgaatttatcacgacgtgacaggcaaccacgttagccttacccggatgataatgaattcccacatcataatccttgatgagttctaaccatctcctttgtcgaagattcaggtccgactgagtgaagatgtatttcaagctcttatgatcggtatatatttcacagcggttcccaatgagatagtgccgccagatttttagagcatgaaccaccgctgctaactccaagtcatgcgtagggtagttgccttcatgaggtcgtagttggcgtgaggcataggctaccacatgaccgtcctgcatgagcacgcaccccaatccttggcgcgaagcatcacagtacaccatgaaatccttgcgagtatccggcaagattaacactggcgaggaaaccagcttctccttgagagtttggaacgccttctcgcattgcgggctccacacaaatttctcttctttcttcaacaactgtgtcatgggtcgagcgattttggagaagttctcgatgaatctccggtaatatcctgccaaacccaagaaactgcggatttgggtgactgtcttgggttgcttccattcagtgacggcggtcactgtttcggggtccacagcaactcctttagcagatatcacgtgccccaagaatttgacttcggacaaccagaactcacacttgctaagcttggcatacaattgatgttcccgcaactttcccaacaccagacggagatggtgttgatggtcttcctctgattgtgagtatatcagaatgtcatcaatgaaaaccacaacaaacttatccaagtattccatgaacactttgttcattaagttcatgaagaaggcaggtgcattggttagaccgaatgacatcaccgtgaattcatacagcccgtatcgcgtggtgaatgcggtcttcggaatatcttcctcgcggatacgtaattggtggtacccggaacgaagatcaatcttggagaatacagtggcacctttaagctgatcgaacagatcatcgatccgaggaagagggtacttgtttttgatggtgacttcattgagagctctgtagtcaacgcacatcctcttcgtcttgtctttcttctctacaaaaatcacagaagcaccccagggggaagtactcggacgtatatacccctttcctttcaactcttccaactgtttctttacttcggccagttcatttgctgccatacggtagggtcgcttgtgcagaggagtggttcctggagcaagatctatccggaactcaatctctcgcttgggcggcataccaggtagttcttccggaaacacatctccgaactccctgacgatggggatttctgacagtcctatctgatgcagttctgaacttctgacagaggttgggggtgcaaagaagacaaccggttgttccggtcctcggtacagagtgaccgtgcgtctcgcgcaatccactactccttggaattgagccaaccaattcatcccaaggatcacatccaagttcttggtgtctagcagaatcagatccgagggaaaaggaatcccctgaatttctataggaacggcagggctataatactttgctgtcataaccccgccaggggtggtgatgagcagagggttcctaagcctttctacccccaactgatttctccccacgaatggcacagatataaacgagtgggaagctccagagtcgaacaaaatggtagcagggatggaatgaacgaggaacgtaccaacgatgacgtctggagttgtcagcacgtcctcggccgtcacgtgattcacacggccccgaatgacatccttccctccgttgttggagcggggaggcgcttggccttgctgacgccttggcttcgggcatttatccgcaaagtgcccgggctcgaagcagttgaagcatagacgctgctgaccttgagcgtccctgcggccttgaacgggctgcacagctggcgtaggaggacggggcgcacgagtcccttgttgattctgttgctgctgcggctgtgggacgcgcaccacgaattgaggtcgaggcgcggaacgaggttgctgctgctgttgttgctgctgcgaggaggatccccctggatagggattggtgtagcggaccctctggttagcaccctgctgattgcggaagttcgccaagcggcgcttgtgcgactccagctccttgtgcttggcctccaagcggatgctcttgtccaccagacgttggaaatccggatagtccccagagactagacggacggacagctcggggtccattcctgccaggaacttctcttgcttctcctcatcttcccgcacatcctccggagcgtaacgggccagattgttgaactcatgcaaatactccatcacggagcggttgccttgcttcaactctcggaattccctcttcttgagagccacgactccggcgggcacatgggttctccggaaagcggcggtgaagcgagcccaagtaatcggctgtccctctggctgcgtagcctggaagtggtcccaccatagagatgcgggtccctgcagctgatgggcggcgaagatgactttctcttcatcactgcactgcacagtgtccagcttcttccccacggcatgcaaccaatccaacgcatccacgggattgttggagctagagaaggtgggtgggcggatgcggaggaactcggcgagtttagagtgttggggaggtggtggtggagcattctgttgtggcggattttggaggtggtggaggaaagcggtcatcatgttggcctgctgagcgaggatttgggtgagaatggcattggtgtctggtggtggtggtggaggtggattgccttggtggttggggttgctgccttcgggttggttgccttcaccggtgttaacatttctcctggtcgtcaccatcctccgtgctaccaacgccggaggtttccccctcctgagtgtcacgtcccccgtgattccctctcccgtttccccctcttttccctctctctctccctcggattcgttcgaatcgcgcccgcaatcctcgccggcgtcatcaatggagcccgagaactccgcggccggtttccttcctccccggccgccctctctccctctcggcgctataaaatcgtcccccgtgcttcgctcttccgtttccgccgctcgccgctcgctctcgccgtcggattcgtgctcgcgtcgtgcacctctctctccgccgtcgccgccgagctccgtttcgccaccgtcgtcgctccggtcctcctcccgactcggcgtcacctccttccgcgtcgccgcgtcgccgtcgaccccgtccgccgctccgcttcgcccgccgaccgccggagcaccgtcgccctcggcatcccgaaccgcgccgccgcctttctccactccggccgtcgtttccgccgtcctcgttgtcccggggtgagccgtggaccgtccctctcgcttccctctcctctccgctctctcgggcgccgctccgccgcgccggtggtcgccggcggtgaccatcggggcgcgggcgcgccgctcccgtcggccgtgccggcgaggccgccttcgggcgcgccccgcggctgccaggtgggcccggccgtcagccgcccgcgcccgcgggtgcggctgacgcgtgggacccacggcgccgaccgccgccagccgcgtgctcccgacgctgcagcttcggaagatccgctcttcgtggaagttgaagccggcgtttgggaaagcgagcaaggcaagtcacatcatccttga

SEQ ID NO: 23149 - DNA, 6822 bp, Oryza sativa
  Clone ID: TF_OsC359_8161
atgactggcttcgtcttggagctgcggggcatgtgcgtggtcctggggtatccacacggagtggactaccaggccaggccgcttccggagcaggagggtgacgatgcagagccccacgctgcttgggaagtcactgcagtgatcctcgctggttctcccgagcggacctcgctgacagtcaccgcgggtggagactctttccccgccgcttgccagaacgccgctctcctcgccatcggcactcttcaccagcgctacccggacgagttgcagcactcgccctaccgctaccaccctcgtcgcggaggagcccgcgaccacgccaccttccgggatgctagttcggaggatgacgctaccatcgtgcacttggcgcgcatggtggaggcatacgacgcggctcgtatcgacttccatcagatggtgcgccgtgggatggtcgagaacaacatgaagatcctggagctgcgtcaggagaacctgcagctcaagaaggacctagacgcggtggaggcgcagctgcatcagctcaagatcgcccagggagaggtctgccgccccaagcgtcgccgcgtctgccgcagccagaagatcaccgcccgcaagagcacctccaggcccgagcttgttcgtcagtccctagcgtggacctgcttcgtcgagaccccccgtgccgagcccgcgcccgtggttccccaggagggggaagcctccggcattggtagcacggaggatgcgctgttgctcaccttccgtcctggcccgtcgcagcggagaaatgctgttaccggtgatggcaaccaacccgaaggcagcaaccacaaccaccaaggcaacccacctccacctcctcctcctcctccgccaccaccaccagacaccaacgccattctcacccaaatcctcgcccagcaagctaatatgatgactgctttcctccaccacctccaaaatccgccacaacttaatgctccaccaccacccccacaacactctagactcgccgagtttctccgcatctgcccacctaccttctctagctccaacaaccccgtggatgtgttggattggttgcatgccgtggggaaaaagctagacactgtgcagtgcagcgatgaggagaaagtcatcttcgccgcccaccagctgcagggacccgcatctctatggtgggaccatttccaggctacacagccagagggacagcctattacttgggcccgcttcaccgccgctttccggagaacccatgtgcccgccggagtcgtggcccttaagaaaagggaattccgagagttgaagcaaggcaaccgctccgtgatggagtatttgcacgagttcaacaatctagcccgttacgctccggaggatgtgcgggaagatgaggagaagcaagagaagttcctggcaggaatggaccctgagctgtccgtccgtctagtctccggggattatccggatttccaacgtctggtggacaagagcatccgcttggaagccaagcacaaggaactggagtcgcacaagcgccgcttggcgaatttccgcaaccaacagggtgctaaccaaagggtccgctacaccaatccctatccagggggatcctcctcgcagcagcagcaacctcgctccgcgcctcgacctcaattcgtggtgcgcgtcccacagccgcagcagcagcagaatcagcaagggactcgtgcaccccgtcctcctacgccagccgtgcagcccgttcaaggccgcagggacgctcaaggtcagcagcgtctgtgcttcaactgtttcgagcccgggcactttgcggataaatgcccgaagccaaggcgtcagcaaggccaagcgcctccccgctccaacaacggcgggaaggatgtcattcgaggtcgtgtgaatcacgtgacggccgaggacgtgctgacaactccagacgtcatcgttggtacgttcctcgtccaatccatccctgctactattttgttcgactctggagcttcccactcgttcatatctgtgccattcgtggggagaaatcagttgggggtagaaaggcttagaaaccctctgctcatcaccacccctggcggggttatgacagcaaagtattatagccctgccgttcctatagaaatccaggggattccttttccctcggatctgattctgctagacacaaagaacttggatgtgatccttgggatgaattggttggctcaattccaaggagtagtggactgcgcgagacgcactgttactctgtaccgaggaccagaacaaccggttgttttctttgcacccccaacctctgtcagaagttcagaactgcatcagatagaactgtcagaaatccccatagtcagagagttcggagacgtgtttccggaagaactacctggtatgccgcccaagcgagagattgagttccggatagatcttgctccaggaaccactcctctgtacaagcgaccctaccgtatggcagcaaatgaactggccgaagtaaagaaacagttggaagagttgaaagaaaaggggtacatacgtccgagtacttccccatggggtgctcctgtgatttttgtggagaagaaagacaagacgaaaaggatgtgcgtcgactacagagctctcaatgaagtcaccatcaaaaacaagtaccctcttccccggatcgatgatctgttcgatcagcttaaaggtgccaccgtattctccaagattgatctccgttccggatatcaccaattacgtattcgtgaagaagatattccgaagaccgcattcactacgcgatatggactgtatgaattcacggtgatgtcgttcggcttaaccaatgctcctgccttcttcatgaacttgatgaacaaagtgttcatggaatacttggataaattcgttgtggttttcatcgatgacattctgatatactcacaatcagaggaagaccatcagcaccatctccgtctggtgttgggaaagttgcgggaacatcaattgtatgccaagcttagcaagtgtgagttctggttgtccgaagtcaaattcttggggcacgtgatatctgctaaaggagttgctgtggaccccgaaacagtgaccgccgtcaccgattggaagcaacccaagacagtcactcagattcgcagtttcttaggtttggcaggatactatcggagattcatcgagaacttctccaaaatcgctcgacccatgacacagttgttgaagaaagaagagaagtttgtgtggagcccgcaatgcgagaaggcgttccaaactctcaaagaaaagctggacggtcatgtggtagcctatgcttcacgtcagctacgacctcatgagggcaactaccctacgcatgacttggaattagccgcagtggttcatgctctaaaaatctggcggcactatctcattgggaaccgctgtgaaatatatactgatcataaaagtttgaaatacatcttcactcagtcagatctgaatcttcggcaaaggagatggttagaactcatcaaggactatgatgtgggaattcactatcaccctggtaaggccaacgtggttgccgacgctctaagtcgaaagagccattgcaacactcttaacgtccgtggcattccacccgaacttagtcaacagatggaagccctgaacctaagcatagttggtcgcggattcttggctgcgttagaagccaagcccaccttgctcgatcaaatccgcgaggctcagaagaatgatccggacatgcatggactcctcaagaatatgaaacagggtaaggccgctggtttcacagaggatgaacacggaaccttatggaacggaaagcgggtatgcgttccagatagcagagaacttaaacagctgatacttcaggaagctcacgaaagtccttactccattcacccgggcagtaccaagatgtacttagacttgaaggagaaatactggtgggtcagcatgaagcgggaaattgcagagtttgtggccctatgtgatgtgtgccagcgtgtcaaggcagaacaccaacgaccggccggacttctccaacctctccaagtgccggaatggaaatgggatgaaattgggatggatttcatcaccggcctcccaaaaacccaaggtggatatgactctatatgggtaatagtggatcgattaaccaaggtagctcgattcattcctgtgaagaccacctatggagggaacaaactagcggagctctacttcgctaggatcgtgagtctccatggcgttcccaagaaaatcgtatctgataggggaagccaattcacctctcacttttggaagaagctccaagaagagcttggtacccgactaaatttcagcaccgcgtatcacccgcagacagatggacagaccgagcgtctaaatcagatcttagaagatatgctccgcgcatgtgtcctagatttcgggaagacttgggataagagtctcccctatgccgagttctcctacaataacagctaccaagccagcatacaaatggcaccctatgaagcgttgtacgggcgcaaatgccggacaccgctattgtgggaccaagttggagaaagccaagtgttcgggactgatatcctgagagaagctgaagctaaagtcagaatcattcgggataatctaaaggtggcacagtctcggcagaaaagttatgcagataaccgtcgccgtgatctggaattcgcagtggatgattttgtgtaccttcgggtcacgccattgcgaggtgtgcacaggtttcagacaaaagggaagctcgcacctcggtatgtgggtcccttccgtatcatcgctcgacgtggagaagttgcttaccagctggagttgcccgcctccttgggcaacgtgcatgatgtgttccatgtgtcgcaactcaagaaatgtcttcgagtgccatccgagcaggccgactcagagcaaattgaagttcgcgaagacctgacgtatgtggagaagccagtgaaaatcctggacaccatggagcgcaggaccaggaaccgtgtaatccgtttttgcaaggtccagtggagcaaccacgccgaagaagaagctacttgggagcgcgaagacgagctgaaggcagcccatcccgatctcttcgccaccgcccgggctgaggaagccgctaaggaggaggccgcccgggctcgccaggctgaggcaacagctgctgctggcgcgtcaactgggcccactccctcgggcaaccctcaggcgacagcctccggggaggcacgcgacgtggccgcgggcacatcgcctgggcccacctccccgggcgacgcccaggatcaaacgggtccgggggacatccctgagcccagcacgtcctccggggggccgagccgcatcgccttctctccaaggcggctcttctcctcatcttccgtcgccccgctgagcgccgagcccattctgcaggccttggccgccgcaaacaccgcggtgctggatgggtttagcgcccaagtggaggccctgcgcgcggaacgagcggagctcgaggccgcatgggcacgcgttgaggaggggcggcgctcggtggacgccatggtggaggtgggccgtaaggctcaccgccgccacatctcggagcttgaagcccgcaaggcggcgctggcggagatcgcccgagaggtggaggaggagcgagaggccgccctcatcaccaccaccgcgatgatcgaggcgcaagacaccctccgccttcagcacgcaagctgggaggcggagctgaagaaaaagctcgacgccgcccaaggggtccttgactccgccgctgcccgagagcggcgggtaacggagactgaagcggcgtctcggcggcgcgaggaggcccttgaggcccgtgccatggcgctggaagaacacgccggcgccgtggagaggggcttgacggaccgcgaggccgccgctgttctccgggaggcgacgctggcggcgcacgaggccgcctgcgccgaggaggagtgcgcgctccgcctccgcgaggacgcactcgctgagcgggagcgagctctcgaggaggctgaggccacgaccaaacggctggcggacagcctgtcccttcgcgaggcggcgcaggaggagcaggcgcgccgcaatcttgaatgcgtccgcgccgagagagccgcactggagcagcgggctgccgacctcgaggcgcgggaaaaagagctggacgcaagggcgcgcgtcggtggggcggctgcgggcgaaagcgacttagccgctcgcctcgcggctgccgaacacaccgtcgctgacatgcagcgcgcactagattcctccatcggggaggccgaggccctccgcttggcgggcgagatggggcccgacatgctttgggactcggtctcccgcatggatcgcgccggtcggcaagcgggcctctggaaaggccagacgaggatgcgccccgccaacctggaaggcctcgctccgcacctcaacaggatggcctgggtcctcgaacaactccccgaggagctcgagaagaccatcaagtcatcctcgagggacctcgcccggggggcggtcgaactcgtgctagcgagttaccaggcccgggaccccaacttctccccatggatggcgctggaggagttccctcccgggaccgaggacgatgcgcgcgcgcgcgtccgggatgccgccgaccacatcgtcaacggcttcgagggctcggcccctcggctcgcgttcgcccccagctccgacgaggagggcgatgccagcggtgaggacgacggtggcgacgaggccggcgacccgggcgcgtcagaatga

SEQ ID NO: 23150 - DNA, 4674 bp, Oryza sativa
  Clone ID: TF_OsC359_8190
attcttcgcatgattttgaggatgtattttagaggcgatttgggacgcgacagtttattagagtagaagcctttcttttccgttggtcgtgtagacgctgcagcttcggaagatccgctcttcgtggaagttgaagccgacgtttgggaaagcgagcaaggcaagtcacatcatctccccctctattcaaaatcctcaaaatggttttaggctgggctcggggtgcatggttttgatagtagcacctcggccatataaggaccggtcttcgggcctctgttgcaaagcactaccgtacttccacatgtctagtgggtaaggcttagtttgtgactcagtctagttataaacaaaagtacacggatggagatggaagaagtcgggggtcgatggacatctgtcccgggggttccggccgtaggtgggattgggtcggtactcttgtctatggctaggatggattggaaactatgtcacgtcttccgtctgtataccgtggtgatggccggcagcgtcacccgtcgtggtttggacatgactggcttcgtcttggagctgcggggcatgtgcgtggtcttggggtatccacatggagtggactaccaggcccggccgcttccggagcaggagggtgacgatgcagagccccacgctggttgggaggtcactgcagtgatcctctctggctctcccgagcggacttcgctggcagtcaccgcgggtggagattctttccccgccgcttgccagaacgccgctctcctcgccatcggcactcttcaccagcgctacccggacgagttgcagcactcgccctaccgctaccaccctcgtcgcggaggagcccgcgactacgccaccttccgggatgctagctcggaggatgacgctaccatcgtgcacctggcgcgcatggtggaggcatacgacgcggctcgtatcgacttccatcagatggtgcgccgtgggatggtcgagaacaacttgaagatcctggagctgcgtcaggagaacctgcagctcaagaaggacctagacgcggtggaggcgcagctgcatcagctcaagatcgcccagggagaggactgccgccccaagcgtcgctgcgtctgccgcagccagaagatcaccgcccgcaagagcacctccaggcccgagcttgttcgtcagtccctggcgtggacctgcttcgtggagacccctcgtgccgagcccgcgcccgtggttccccaggagggggaagcctccggcgttggtagcacggaggatgcgctgttgctcaccttccgccctggcccgtcgcagcggagaaatgctaataccggtgatggcaaccaacctgaaggcagcaaccacaaccaccaaggcaacccacctccacctcctcctccgcctccacctccaccaccagataccaacgccattctcacccaaatcctcgcccagcaagccaacatgatgactgctttcctccaccacctccaaaatccgccacaacataatgctcccccaccacctccccaacactctaaactcgccgagttcctccgcatccgtccacccaccttctctagctccaacaaccctgtggatgcgttggattggttgcatgccgtggggaagaagctagacacggtgcggtgcagtgatgaggagaaagtcgtcttcgccgcccaccagctgcagggacccgcatctctatggtgggaccacttccaggctacgcagcccgaggggcaaccgattacttgggcccgcttcaccgccgctttccggagaacccatgtgcccgctggagtcgtggctcttaagaaaagagaattccgagagttgaagcaaggcaaccgctccgtgatggagtatttgcacgagttcaacaacttggcccgttatgctccggaggatgtgcgggaagatgaggagaagcaagagaagttcttggcaggaatggaccccgaactgtctgttcgtctagtctctggggactatcctgatttccaacgtctggtggacaagagcatccgcttggaggccaagcacaaggagctggagtcgcacaagcgccgcttggcgaacttccgcaatcagcagggtgctaaccagagggtccgctacaccaatccctacccagggggaacctcctcgcagcagcagcagcagcagcaacctcgcccagcgccccgacctcaattcgtggtgcgcgtcccacagccgcagcagcagcagaatcagcaagggactcgtgcgccccgtcctcctacgccaactgtgcagcccgttcaaggccgcagggacgctcaaggtccgcagcggctgtgcttcaactgcttcgagcccggacactttgcggataaatgtccaaagccaaggcgtcagcaaggccaagcgcctccccgctccaacaacggcgggaaggatgtcattcggggtcgtgtgaatcacgtgacggccgaggacgtgctgacaactccagacgtcatcgttggtacgttcctcgttcattccatccccgctacaattttgttcgactctggagcttcccactcgtttatatctgtgccattcgtggggagaaatcagttgggggtagaaaggcttagaaaccctctgctcatcaccacccctggaggggttatgacagcaaagtattatagccctgccgtccctatagaaattcaggggattccttttccctcggatctgattctgctagacaccaagaacttggatgtgattcttgggatgaattggttggctcaattccaaggagtagtggattgcgcgcggcgcactgtcactctgtaccgagggccagaacaaccggttgttttctttgcacctccaacctctgtcagaagttcagaactgcatcagataggtctgtcagaaatccccatagtcagagagttcggagacgtgtttccggaagaactacccggaatgccgcccaagcgagagattgagttccggatagatcttgctccaggaaccactcctctgtacaagcgaccctaccgtatggcagcaaatgaactggccgaagttaagaaacagttggaagagttgaaagaaaaggggtatatacgtccgagtacttccccctggggtgctcctgtgatttttgtggagaagaaagacaagacgaagaggatgtgcgttgactacagagctctcaatgaagtcaccatcaaaaacaagtatcctcttccccggatcgatgacctgttcgatcagcttaaaggtgccactgtattctccaagatcgatcttcgttccggatatcaccaattacgtattcgtgaagaagatattccgaagaccgcattcaccacgcgatacggactgtatgaattcacggtgatgtcgttcggtttaaccaatgcacctgccttcttcatgaacttaatgaacaaagtgttcatggaatacttggacaagtttgttgtgccgcgccgcgccgccgttgcagccgccgtcgtcagtcgccgtcgccaccatcgggttcgcaaggtcgccgccgtccccgtccaccgcttcgccgccgccgaagaccgccggagcaccgtcgccgccgtcgacccgatcttctccgccgccttttcctcgacgccgccgccgtccgttggtcttccgccgacgttttggtcatcggtgagttcgccgcgccgtgatctacgtcttggtgccctccgtttgtgccgtagagccgccgttcgccggcgagcatgcgccgtccgagccgtccgagccgccgagccgccgccggtgctgacgtcgtcgctgaccccctttccgaggtaccgtggtggtactgaggcacatggtgacatgatgtggggctgtgtcttgtgggtacagtggtacacctctggccagagatactaccggaggttcatcgagaacttctccaaaatcgctcgacccatgacacagttgttgaagaaagaagagaaatttgtgtggagcccgcaatgcgagaaggcgttccagactctcaaagaaaagctggtttcctcgccggtgttaatcttgccggatactcgcaaggatttcatggtgtactgtgatgcttcgcgccaaggattgggcctctcggtccacggcggaccgggagcacgcggctggcggcggccggcgccgtgggtcccacgcgtcagccgcacccgcgggcgcgggcggctgacggccgggccccacctggcagccgcggggcgcgcccgaaggcggcctcgccggcacggccgacgggagaacggcgcacccgcgccccgatggtcgccgccggcgaccaacggcgcggcggagtggcacccgagagagaggagggaagggggaagcgaacggagcggtccacggctcaccccggtcgacggcgacgacgggaacggcggccgaaaacggagaaaggcggcggcgcggttcgggacgacgaggacgacggcgttccggcggtcggcgagcgaagcggaggggcggacgaggtcgacgacgacgcggcgaagccgaaggagacgacgccgagaggggaggaagtccggagcgacggcggcggcgaaccggagctcggcggcgacggcggagagaaggtgcgacggcgcgagcacgattccgacggggagagcgagcggcgagcggcggaaacggaggaggagagcacgggggacgtttaaatag

SEQ ID NO: 23151 - DNA, 6446 bp, Oryza sativa
  Clone ID: TF_OsC359_8241
accgccaccccacccagcgcgccacccccgccgcaccacagcgcccccaacccccccccccacccgaaaccccaccccggcctcgcccccgcccgccccgcccgcccccccaacccggccccgcccccccctcgccccgacccccgccacacgcccgcccacccccctcccgccgccccccctcaccccccccccccccaccggccccgccgcgccccgccccccccaccccccgcgccgccccccatcccgcccgccccgccccccgccgccccgcccggaccccaccccccgacgcgcacaaccccactccccccccccgccccccccccggccccccccccgccccccccccgccgaacgccccgcaccccaagaggccagcccccgttaagccatccgtgcccccgggcgtcggcgacagggcggggcaacaccagaccgggctgacggcgaaccaggcgggaaaagcaccgcccggcgccctcagatgcagatgacgggtgggaacccacggcgccggccggtgtgagcccgggtgcgcccgggtccaccgtggacccacctcggccatataaggaccggtcttcgggcctctgttgcaaagcactaccgtacttccacatgtctagtggggcaaatgaaggctacacgagctgcggcccggtagtcgagatgtcatggcacagggccggtgtcctgctgctaggggctcagtcctgcctacctgtcccgggggttccggccgtaggtgggattgggtcgatgtacacctctgatcagagtataatctattcgaatagccgcgccctcggttatgggcaagccgagcaatgtacccaaatggccggcagcatcagccgtcgtggtctggacctgactggtttcgtcttggagctgcggggcatgtgcgttgtcctggggtatccgcatggagtggactaccagggcaggccgctcccggagcaggagggtgacgatgcagagccccacgctgcttgggaggttactgcagtgatcctcaccggctcacccgagaggacttcgttggcagtcaccgcgggtggagattctttctccgtcacttgccagaacgccgctctcctcgccatcggcactcttcaccagcgctacccggacgagttgcagcactcgccctaccgctaccaccctcgtcgcggaggagcccgcgactacgccaccttccgggatgctagctcggaggatgacgctaccatcatgcacctggcgcgcatggtggaggcgtacgacgcggctcgtatcgacttccatcagatggtgcgccgtgggatggtcgggaacaacatgaagatcctggagctgcgtcaggagaatctgcagctgaaaaaggacctagacgcagtggaggcgcagctgcatcagctcaagatcgcccagggagaggtctgtcgccccaagcgccgccgcgtctgccgcagccagaagatcaccgcccgcaagagcacctccaggcccgagcttgttagtcagtccctggcgtggacttgcttcgttgagatcccccgtggttcctcaggagggggaagcctccggcgttggtagcacggaggatgcgctgttgctcaccttccatggtgacgaccaggagaagtgctgtcaccggtgatggcaaccaacccgaaggcagcaaccacaacaaccatggcagcccacctccacctcctcctccgcctccaccaccaccaccagacaccaacgccattctcacccaaatcctcgcccagcaggccaacatgatggctgctttcctccaccacatccaaaatccgccacaacataatgctccaccaccacccccacaacactctaaactcgccgagttcctccgcatccgtccacctaccttctctagctccaacaaccccgtggatgcgttggattggttgcatgccgtggggaaaaagctagacaccgtgcagtgcagcgatgaggagaaagtcgtcttcgccgcccaccaattgcaggggcccgcatctctatggtgggaccatttccaggctacgcagccagaggggcagcctattacttgggcccgcttcaccgccgccttccggaggacccatgtgcccgccggagtcatggcccttaagaaaagggaattccgagagttgaagcaaggcaaccgctccgtgatggagtatttgcatgagttcaacaacctggcccggtacgccccggaggatgtacgggaaaatgaggaaaagcaggagaagttcttggcaggaatggaccctgagctgtccgtgcgtctagtctccggggactatccggatttccaacgtctggtggacaagagcatccgcttggaagccaagcacaaggaactggagtcgcacaagcgtcgcttggcgaatttccgcaatcaacagggagctaaccaaaggatccgctacaccaatccctatccagggggatcctcctcgcagcagcaacaacagcagcagcaaccatgctccgcgccccgacctcaattcgtggtgcgcgtcccacagccgcagcagcagcagagtcagcaagggacccgtgcgccccgtcctcctacgcccgccgtgcagtctggtcaaggccgcagggacgttcaaggtccgcagcgtctgtgcttcaactgcttcgagcccgggcactttgcggacaaatgcccaaaaccgcggcgccagcaaggccaagcgcctccccgctccaacaacggtggtaaggatgtcattcggggtcaggtgaaccacgtgacggccgaggacgtgctgacaactccagacgtcatcgttggtacgttcctcattcattccatccctgctaccattttgttcgactctggagcttcccactcgtttatatctgtgccattcgtggggagaaatcagttgggggtagaaaggcttaggaaccctctcctcatcaccacccctggaggggttatgacagcaaagtattatagtcctgccgtccctatagaaattcaggggattccttttccctcggatctgattcttttagacaccaagaacttggatgtgatccttgggatgaattggttggctcaattccaaggagtagtggattgtgcaagacgcactgtcactctgtaccgagggccggaacaaccggttgttttctttgcacccccaacctctgtcagtagttcagaacttcatcagataggactgtcagaaatccccatcgtcagagagttcggagacgtgtttccggaagaactacccggtatgccgcccaagcgagagattgagttccggatagatcttgctccaggaaccactcctctgtacaagcgaccctaccgtatggcagcaaatgaactggctgaagttaagaaacagttggaagagttgaaagaaaaggggtatatacgtccgagtacttccccctggggttctcctgtgatttttgtggagaagaaagacaagacgaagaggatgtgcgttgactacagagctctcaatgaagtcaccatcaaaaacaagtaccctcttccctggatcgatgatctgttcgatcagcttaaaggtgccacggtattctccaagattgatcttcgttccagatatcactagttgcgcatccgtgaagaagatattccgaagaccgcattcaccacgtgatacggactgtatgaattcacggtgatgtcattcggtttaaccaatgctcctgccttcttcatgaacttaatgaacaaagtgttcatggaatacttggataagtttgttgtggttttcattgatgacattctggtatactcacaatcagaggaagaccatcagcaccatctccgtctggtgttggggaagttgcgggaacatcaattgtatgccaaacttagcaagtgtgagttctggttgtccgaagtcaaattcttagggcacgtgatatctgctaaaggagttgctgtggaccccgaaacagtgaccgccgtcactgattggaagcaacccaagacagtcactcaaattcgcagtttcttaggtttggcaggatactaccggaggttcatcgagaacttctccaaaatcgctcgacccatgacacagttgttgaagaaagaagagaaatttgtgtggagcccgcaatgcgagaaggcgttccaaactctcaaagaaaagctggtttcctcgccagtgttaatcttgccggatactcgcaaggacttcatggtgtattgtgacgcttcgcgccaaggattggggtgcgtgctcatgcaggacggtcatgtggtggcctatgcctcacgccagctacggcctcatgaaggcaactttccaacggagagaagcatcaaggcaacacaaatccccgccaagattaccgtttcagcctaactccagtgccaggacagaggaatcgaaatgagaaaagaaaatgccgagtccgggaagacatctgttgcttcaattgtcaaggaatgggtcatttcgccgacaagtgcccaaaaccgagaaacatagctgccggcacgtcagtccacgcaactccctgcaatcagaagcttgctcctcagcaaattgtcatccatgcatcccgaagcagtcctatagcccgcgttgcaacagctctaactccagcgagtgcattactgtcgcgaccgggaaaattgccttttcccgaacgcaccacggtatacagacggaagacgtgacatagtttccaacccatcctagccatagacaagagtaccgacctaatcccgcctacggccggaacccccgggacaggcaggcgagactgagcccctagcagcagggcaccaaccctctgccatgacatctcgactaccgggccgcagctcgtgtagccttcatttgccctggagaatgtccatcgacccccgacttcatccatctccaatccgtgtacttttgtttataaccagactgagccacaaactaagccttacccactagacatgtggaagtacggtagtgctttgcaacagaggcccgagcttaatccttatagtggccggggtgctacttcccacaactggcatgcacccaaaccccaccagaaaacaggttttaggggttttgaaagaggaagagagagagaacggccttccgaaccttcagcgacgaccgcgaaccacgcttcgggaacctccggaacgacgaaagctacgcgaagcacacaagcaaagctacaagcctataaagaagcaataacaacacataaaaagaaaaccgagtacacagagacggtccacgggtcgacggaagcggaccccgtgtgtcaaccgaggcgagtggccaacaaacggactccactagacaccacacgggctgcacacgtagaaaccacgcggctaccgagcgggcacactaacacggtcaccacacgcacaagcgaacgactaccgacaccggtacacggcggcggcgatccttggacaaggcttgacgacgcggagccgaggacgaagacgaggacggggctgccgcggcttgcttgacggacgcggacgacggacgagaacggctcgacggagggacgaacgccacgacgaccgggaacgacgagaggacgacgacgacgacgacgaccgggaccggcgagtaggcgacaaggacagccggcagcggctgcacggagacgaggacggtgtggaacacgccgcagcgatgatgatgacggaggcggtgccgcgagacgacgagccgggcgaccgacgggacgtcgatccagcggctgagcggaggaggggacggcgtggaacgcgctgctgcgatgttggagaaggtggtggtgcagcggggcgacgagccgacgaggaggaatgggtggttggcgcggcggcggcgttccggcgaacttcgggcgaggaggaggtgatgctggggaaggagacgatgccacggtgtcgaaggaggagacagcggcgtcgatcggcgcaccggcgacgaacagcagccggctggagggagtgggtggcggcaatgccaccggttgccggcggggacgcgcctccggtggtctccgcgcgaaacggaggcgacgccggtggaggggaagtgtcacgcccagaaattcccgaatagaattccaagcagaatgtgtattaaaacccccgtccaggaccagccggggtacacaaacgacaatgttgacatacagatccacgtcttacaaacattataaaggtcttacagaaatgcagcggaaaacaaaagataaccggagctaatccttgacttgaactgcagcgggaacaccactccacaggcatcctcgacggcacggacaaagcctactcctcggagaacccgccatcggacacatactcgagctctgggattggggaaaatagagcaaggctgagtactacccactgtactcagcaagtcataccggaacgggggtatgatgcagggattccacaagggatagctaagcag

SEQ ID NO: 23152 - DNA, 6573 bp, Oryza sativa
  Clone ID: TF_OsC359_8245
ttagtatggtgacatgccgatgggtgtgttataagcagtcctatattcccaaagtgcatcaggtagccttttcttccatgccttccccatctcattgacagtcttctgcagaatattcttgatttgtctgttgctcgtttctacctgtctacttgtctggggatgatatagagtggcaatattgtgttgagccccaagtttttgcaaaaagtttcggaaggtcttattgatgaaatgggaccctccgtcacttatcaccatccccagagttccaaaacgagggaagataatctcatggaacatctgacgggcgtgcttggcgtctgcggccctgcatggcattgcctctacccacttggacacatagtcaacggccaccagaatatactcgcagtcataggactttgggaaaggtcccatgaagtcgatgcagatctttgcgtatgtcctaaatgctccatagtgacctccatatggggcagcatgacacttctcaatgatcttcatgccttcatctaccggaacgcatctccgtagtagaccatctgaacaaactctgtacaagtaaggtgcatcccacaagtgcctgcggctctcgtagatcaacctcttcttattttctcccggtggtacatgcctcacaaggataaagttgacgatggctgcataccacgggtcaaagtctgtgactttcaacagcatgtcgtctcgcagatagtcatttatcagtagctctcctctctctccgccgtcgccgccgagctccgttccgccgccgccgccgctccggacttcctcccgactcggcgacacctccgtccgcttcgccgtgttgccgtcgaccccgtccgccgctccgcttcgcccgtcgactgccggagcgccgtcgccatcgtcatcccgagccgcgccgccgtcttcctccgctccgtccgccgtttccaccgccttcgccgtcttggggtgagccgaagaccgccgttcgccttccccctttcctcctctctctcgggtgccactccgccgcgccattggtcgccggcggcgaccatcggggcgcgggtgcgcgccactcccgtcggccgcgccggcgaggccgccctcgggtgcgccctcgcggctgccaagtggggcccggccgtcagccgcccgcgcccgggggggtgcggctgacgcgcgggacccacggcgccgaccgccgccagccgcgtgcgccccggtccaccgtggaccgagcggctgacgcgtgggccccacttcccgtggacccgggcaaatgaaggctacacgagctgcggcccggtagtcgagatgtcatggcacagggccggtgtcctgctgctaggggctcagtcctgcctacctgtcccgggggtttcggccgtaggtggggttgggtcggtactcttgtctatggctaggatgggttggaaactatgtcacgtcttccgtccgtataccgtggtgatggccggcagcatcaaccgtcgtggtctggacctgactggcttcgctttggagctgcggggcatgtgcgttgtcctggggtatccgcatggggtggactaccagggcaagcagctcccggagcaggagggtgacgatgcagagccccacgctacttgggaggttactgtagtgatcctcactggctcacccgagaggacttcgttggcagtcaccgcggatggtgcgtcgtgggttggtcgagaacaacaagcagatcctggagctgcattaggagaatctgcagctgaagaaggacctagacgcagtggaggcgcagctgcgtcagctcaagatcgcccagggagaggtctgtcgccccaagcgtcgccgcgtctgccgcagcctgaagatcaccgcccgcaagagtacctccaggcccgagcttgttcgtcagtccctggcgtggacctgcttcgtcgagacccctcgtgccgagcccgcgcccatggttcctcaggaggatggagcctccggcgttggcagcacggaggatgcgctgctgctcaccttccgccctggcccgtcgcagcagtagacgagcagttagtaggattgcgtatggtgacaaccaggagaagtgctgttaccggtgaaggcagtcaccccgaaggcagcaaccacaacaaccatggcagcccacatccacctcctcctccgcctccaccaccaccaccagacaccaacgccattctcactcaaatcctcgcccagcaggccaacatgatggctgctttcctccaccacatccaaaatctgccacaacataatgctccaccaccacccccacaacactctaaactcgccgagttcctccgcatccgtccacctaccttcgctagctccaataaccccgtggatgcgttggattggttgcatgccgtggggaaaaagttagacaccgtgcagtgcagcgatgaggagaaagtcatcttcgccgctcaccaactgcaggggcccgcatctctatggtgggaccatttccaggctacgcagccagaagggcagcctattacttgggcccgcttcaccgccgctttccggagaacccatgtgcctgccggagtcatggcccttaagaaaagggaattccgagagctgaagcaaggcaaccgctccgtgatggagtatttgcatgagtttaacaacctggcccggtatgccccggaggatgtacgggaagatgaggagaagcaagagaagtttttggcaggaatggaccctgagctgtccgtgcgcctggtcttcggggactattcggatttccaacgtctggtggacaagagcatccgcttggaagtcaagcacaaggaactggagtcgcacaagcgtcgcttggcgactttccgcaatcaacagggggctaaccaaagggtccgctacaccaatccctatccagggggatcgtccttgcagcagcaacctcgctccgcgccccgacctcaattcgtggtgcgcgtcccacagccgcagcaacagcagagtcagcaagggactcgtgcgccccgtcctcctacgccagccatgcagcctggtcaaggccgcggggacgttcaaggtcagcagcgtctgtgcttcaactgcttcgagcctgggcactttgcggataaatgcccaaagccgcggcgccagcaaggccaagcgcctccccgccccaacaacggtggtaaggatgtcattcggggtcgggtgaaccacgtgacggccgaggacgtgctgacaactccagacatcatcgttggtacgttcctcattcattccatccctgctaccattttgttcgactctggagcttcccactcgtttatatctgtgccattcgtggggagaaatcagttgggggtagaaaggcttaggaaccctctgctcatcaccacccctggaggggttatgacagcaaagtattatagccctgccgttcctatagaagttcagggaattccttttccctcggatctgattcttctagacaccaagaacttggatgtgatccttgggatgaattggttggctcaattccaaggagtagtggattgtgcaagacgcaccgtcactctgtaccgagggccggaacaaccagttgttttctttgcacccccaacctctgtcggtagttcagaacttcatcagataagactgtcgaaaatccccatcgtcagagagttcggagacgtgtttccggaagaactacctggtatgccgccgaagcgagagattgagttccggatagatcttgctccaggaaccactccccagtacaagcgaccctaccgtatggcatcaaatgaactggccgaagtcaagaaacagttggaagagttgaaagaaaaggggtatatacggccgagtacttccccctggggtgctcctgtgatttttgtggagaagaaagacaagacaaagaggatgtgcgttgactacagagctctcaatgaagttaccatcaaaaacaagtaccctcttccccggatcgatgatctgttcgatcagcttaaaggtgccactgtattctccaagattgatcttcattccggatatcaccaattacgtattcgtgaagaagatatccctaagaccgcattcaccacgcgatacggactgtatgaattcacggtgatgtcgttcggtttaaccaatgctcctgccttcttcatgaacttaatgaacaaagtgttcatggaatacttggataagtttgttgtggtttttattgacgacattctggtgtactcacaatcagaggaagaccatcagcaccatctccgtctggtgttgggaaagttgcgggaacatcaattgtatgacaaacttagcaagtgtgagttttggttgtccgaagtcaaattcttagggcacatgatatctgctaaaggagtcgctgtggaccccgaaacagtgaccgccgtcactgattggaagcaacccaagacagtcactcaaattcgcagcttcttgggtttggcaggatactaccggaggttcatcgagaacttctccaaaatcgctcgacccatgacacagttgttgaagaaagaagagaaatttgtgtggagcccgcaatgcgagaaagcgttccaaactctcaaagaaaagctggtttcctcgccagtgttaatcttaccggatactcgcaaggacttcattgtgtattgtgacgcttcgcgccaaggattggggtgcgtgctcatgcaggaaggtcaggtggtagcctatgcctcacgccaactacggccccatgaaggcaattaccctacccatgatttggagttagccgctgtggttcatgctctaaagatctggcagcactatctcattgggaatcgctgtgaaatatatactgatcataagagtttgaaatacatcttcactcagtcggatctgaatcttcggcagaggagatggttagaactcatcaaggattatgatgtgggaattcactatcatcctggtaaggccaacgtggtcgccgacgctctaattcgaaaaagccattacaacactcttgacgtccgtggcattccacccgaacttaatcaacagatggaagccctgaacctaagcatagttggtcgtggattcttggctacgctggaagccaagcttaccttgctcgatcaaatccgcgaggctcagaagaatgatccggatatgcgtggactcctcaagaatatgaaacagggtaaagccgctggtttcacagaggatgaacacggaaccctatggaacggaaatcgggtatgtgttccagacgacagagaacttaaacagctgatacttcaggaagctcacgaaagtccttattccatccaccctggcagtacgaagatgtacttagacttgaaagagaaatactggtgggttagtatgaagcgggaaattgcagagttcgtggccctttgtgatgtgtgccagcgtgtcaaggcagagcaccaacgaccggccggacttctccaacctctccaagtaccagaatggaaatgggatgaaattgggatggatttcatcaccggacttccaaaaacccaaggtggatatgattctatatgggtagttgttgaccgattaaccaaggtagctcggttgattcctgtgaagaccacctatggagggaacaaactagccgagctctacttcgctaggatcgtgagtctccatggcgttcctaagaaaattgtatctgataggggaagccaattcacctctcacttttggaagaagctccaagaagagctgggtacccgattaaatttcagcaccgcgtatcacccgcagacagatggacagaccgagcgtctaaatcagatcctagaagatatgcttcgtgcatgtgtcctagatttcgggaagacctgggataagagtctcccctatgccgagttctcttacaataacagctaccaagccagcatacaaatggcaccctatgaagcgttgtatggacgcaaatgccggacaccgctattgtgggaccaagttggggaaagccaagtgttcaggactgatatcctgagagaagctgaagctaaagtcagaaccattcgggataatctaaaggtggcacagttccggcagaagagttatgcagataaccgacgccgtaatctgaaatttgcagtggacgattttgtgtaccttcgggtcacgccattgcgaggtgtacacaggtttcagacgaaagggaagctcacacctcggtttgtaggtcctttccgtatcattgctcgacgcggggaagtcgcttaccagttggagctgcccacctccttgggcaacgtgcatgatgtgttccatgtgtcgcaactcaagaaatgtcttcgagtgccatccgagcaggccgattcagagcaaattgaagttcgcgaagacttgacctacgtggagaggccagtgaaaatcctggacaccatggaacgcaggaccaggaaccgggtaatccctttttgcaaggtccaatggagcaaccacgctgaggaagaagctacttgggagcgtgaagacgagatgaaagcagcccatcccgatcttttcgccagttcttccgaatctcggggtcgagattccgtttaa

SEQ ID NO: 23153 - DNA, 6849 bp, Oryza sativa
  Clone ID: TF_OsC359_8260
aatcctcttcctcctttgggccaagcccagcccaaagtctccctctcctccctctctttccctcctctcccgggcctctcctccccctcccggcccagctccctcccctcccctctctctcccgggcctcccctccctccactcctcctgggccggccgcccggcccaagccgcgcccaagccaggccgagccgagccagccgcgtgcgcacgcgcgacgcgcgtgcgctgaccgcgcgccctcccgcgctctcccgtggccgccccgcctctccccgccttctccttctctctctccggcgccggccggcctccagccgcacctcccgcctcgcccgtgcaccgtccggctgcaccgtcacctctcccggcgtcgcagctgcctcctcttccccagcttcgcctccgtttcatggggaaatcaccggagacgcgtcctcgccgacgactagtggtgtcgccaccactccaccgtctccagccatccctgccgcctcgcctgagcgccggccgacgtcgctgccacctctgtcggtgctgcagcgccatcctcttctccggcccggctgcggcgtcgcccgaagttcgccggaacgccgccgccgcgccaaccacccattcctcctcgtcggctcgtcgccccgctgcaccaccaccttcttcgtcaccgttcgtcctcgccgatcgacgtcccatcgttcgcccggctcgtcgtctcacggcgccgcctccgtcgtcggattcacagcagcgtgttccacgccgtcctcgcctctgtgcagctgctgccggctgccatcgtcgtctcctcatcggccccggtcatcgtcgtcgtcgtcgtcctctcgtcgttcccggtcgtcgtggcgttcgtccctccgtcgagccgttctcgtccgtcgtccgcgttcgtcaagtgtgccgctgcagcccccgtcctcgtcttcgtcctcggctccgcgtcgtcaagcctcgtgccggccgcgtctcgcccatgtaccggtgtcggtagtcgttcacgcgtgcgggtggtgaccgtgtagtgtccgtgttagtgtgcccgctcggtagccgcgtggtttccacgtgtgcaggccgtgtggtgtttagtggagtccgtttgtcggccactcgcctcggttgacacacggggtctgcttccgtcgacccggggaccgcctctgtgtactcggttttctttttatgtattgttattgcttctttataggcttgtagctttgcttgtgtgcttcgcgtagcttctgtcgttccggaggttcccgaagcgtggttcgtggtcgtcgccgaaggttcggaaggccgttctctctctcttcctctttcaaaacccctaaaacctgttttcggtggggtttgggtgcatgccagtcgtgggaagtagcaccccggccactataaggattaagctcgggcctctgttgcaaagcactaccgtacttccacatgtctagtggggcaaatgaaggctacacgagctgcggcccgatggccggcagcgttacccgtcgtggtttggacatgaccggcttcgtcttggagctgcgaggcatgtgcgtggtcttgggatatccacatggagtggattaccaggccaggccgctcccggagcaggagggtgaggatgcagagcctcacgctggatgggaggtcactgcagtgatcctctccggctctcccgagcggacttcgctggcagtcaccgcgggcggagactccttccccgccgcttgccagaacgccgctctcctcgccatcggcactcttcaccagcgctacccggacgagttgcagcactcgccctaccgctaccaccctcgtcgcggaggagcccgcgaccacgccaccttccgagacgccagctcggaggatgacgctaccgtcgtgcacctggcacgcatggtggaggcgtacgacgcggctcgtatcgacttccatcagatggtgcgtcgtggcatggtggagaacaacatgaagatcctggagctgcgtcaggagaatctgcagctcaagaaggacctcgatgcgttggaggcgcagctgcatcagctcaagatcgcccagggagagggcagccgccccaagcgtcgccgcgtctgccgcagccagaagatcaccgcccgcaagagcacctccaggcctgagcttgtccgtcagtccttggcgtggacttgcttcgtcgagacccctcgtgccgagcctgcgcccgtggttccccaggagggggaagcctccggcgttggtagctcggagggtgcgctgttgctcaccttccgtcctggcccgtcgcagcgctctccttctctgtttgctggttctgtgtggggttttcagatggtgacgaccaggagaaatgttaacaccggtgaaggcaaccaacccgagggcagcaaccccaacccccaaggcaacccacctccaccaccaccaccagacaccaacgccattctcacccaaatcctcgcccaacaagccaacatgatgaatgctttcctccaccacctccaaaacccgccacaacagaatgctccaccaccacctccccaacactctaaactcgccgagttcctccgcatccgcccacctaccttctctagctccaacaaccctgtggatgctttggattggttgcatgccgtggggaagaagttagacacggtgcagtgcagcgacgaagagaaagtcgtcttcgccgcccatcagctgcagggacccgcgtctctctggtgggaccacttccaagctacgcagcccgaggggcaaccgattacttggactcgcttcaccgccgctttccggagaacccatgtgcccgccggagtcgtggccctcaagaaaagagaattccgggagctgaagcaaggcaaccgctccgtgatggagtatttgcatgagttcaacaatctagcccgttacgccccagaggatgtgcgggaagatgaggagaagcaggagaagttcttggcaggaatggaccctgagctgtctgttcgtctagtctctggagactatccggatttccaacgactggtggacaagagcatccgcttggaggccaagcacaaggaactggaatcgcacaagcgccgcctggcgaatttccgcaatcaacagggtgctaaccagagggtccgctacaccaatccctacccagggggatcctcctcgcagcagcagcagcagcaacctcgcccagcgccccgacctcaattcgtggtgcgcgtcccacagcagcaacagcagcagaatcaacaagggactcgtgcaccccgtcctcctacgccagcggtgcagcccgttcaaggccgcagggacgcttcaggtccgcagcggctgtgcttcaactgcttcgagcccgggcactttgcggataaatgcccgaagccaaggcgtcagcaaggccaagcgcctccccgctccaacaacggcgggaaggatgtcattcggggtcgtgtgaatcacgtgacggccgaggacgtgctgacaactccagacgtcatcgttggtacgttcctcgttcattccatccctgctacaattttgttcgactctggagcttcccactcgtttatatctgtgccattcgtggggaaaaatcagttgggggtagaaaggcttagaaaccctctgctcatcaccacccctggcggggttatgacagcaaagtattatagccctgccgtccctatagaaattcaggggattccttttccttcggacctgattcttctagacacaaagaacttggatgtgattcttgggatgaattggttggcacaattccaaggagtagtggactgcgcgagacgcactgttactctgtaccgagggccagaacaaccagttgttttctttgcacctccaacctctgtcagaagttcagaactgcatcagataagtctgtcagaaatccccatagtcagagagttcggagacgtgtttccggaagaactacctggtatgccgcccaagcgagagattgagttccggatagatcttgctccaggaaccactcctctgcacaagcgaccctaccgtatggcagcaaatgaactggccgaagtaaagaaacagttggaagagttgaaagaaaaggggtatatacgtccgagtacttccccatggggtgctcctgtgatttttgtagaaaagaaagacaagacgaagaggatgtgcgtcgactacagagctctcaatgaggtcaccatcaaaaacaagtaccctcttccccggatcgatgatctgttcgatcagcttaaaggtgccactgtattctccaagattgatcttcgttccggatatcaccaattacgtattcgtgaagaagatattccgaagaccgcattcactacgcgatatggactgtatgaattcacggtgatgtcgttcggcttaaccaatgctcctgccttcttcatgaacttgatgaacaaagtgttcatggaatacttggataagttcgttgtggttttcattgatgacattctgatatactcacaaacagaggaagaccatcagcaccatctccgtctggtgttgggaaagttgcgggaacatcaattgtatgccaagcttagcaagtgtgagttctggttgtccgaagtcaaattcttggggcacgtgatatctgctaaaggagttgctgtggaccccgaaacagtgaccgccgtcaccgaatggaagcaacccaagacagttactcagattcgcagtttcttgggtttggcaggatactatcggagattcatcgagaacttctccaaaatcgctcgacccatgacacagttgttgaagaaagaagagaagtttgtgtggagcccgcaatgcgagaaggcgttccaaactctcaaagaaaagctggtttcctcgcccgtgttaatcttgccggatactcgcaaggatttcatggtgtactgtgatgcttcgcgccaaggattggggtgcgtgctcatgcaggacggtcatgtggtagcctatgcctcacgccagctacgtcctcatgaaggcaactaccctacacatgacttggagttagcagcggtggttcatgctctaaaaatctggcggcactatctcattgggaaccgctgtgaaatatatactgatcataagagtttgaaatacatcttcacccagtcggatctgaatcttcggcaaaggagatggttagaactcatcaaggattatgatgtgggaattcactatcaccctggtaaggccaatgtggttgccgacgctctaagtcgaaagagccactgcaacactctcaatgtccgaggcattccacccgagcttaatcaacagatggaagccctgaacctaagcatagttggtcgcggatttttggccgcgttggaagccaagcccaccttgctcgatcaaatccgcgaggctcagaagaatgatccggacatgcatggactcctcaagaatatgaaacagggtaaagccgctggtttcacagaggatgaacacggaaccttatggaacggaaagcgggtatgcgttccagaaagcagagagcttaaacagctgatacttcaggaagctcatgaaagtccttattccattcacccgggtagtacaaagatgtacttagacttgaaggagaaatactggtgggttagcatgaagcgggaaattgcagagtttgtggctctatgtgatgtgtgccagcgtgtcaaggcagagcaccagcgaccggctggacttctccagcctctccaagtgccggaatggaaatgggatgaaattgggatggatttcatcaccggccttccaaaaacccaaggtggatatgattctatatgggtagtcgtggatcgattaaccaaggtagctcgattcattcctgtgaagaccacttatggagggaacaaactagcggagctctacttcgctaggatcgtgagtctccatggtattcccaagaaaatcgtatctgataggggaagccaattcacctctcacttttggaagaagctccaagaagagctgggtactcgattgaattttagcaccgcctatcacccgcagacagatggacagaccgagcgtctaaatcagatcctagaagatctgctccgcgcatgtgtactagatttcgggaagacttgggataagagtctcccctatgccgagttctcctacaataacagctatcaagccagcatacaaatggcaccttatgaagcgttgtacgggcgcaaatgccgaacaccgctattgtgggaccaagttggagaaagccaagtgttcgggactgatatcctgagagaagctgaagctaaagtcagaatcattcgggataatctaaaggtggcacagtctcggcagaaaagttatgcagataaccgtcgccgtgatctggaattcgcagtggatgattttgtgtaccttcgggtcacgccattgcgaggtgtgcacaggtttcagacaaaagggaagctcgcacctcggtatgtgggtcccttccgtatcatcgctcgacgtggagaagttgcttaccagctggagctgcccgcctccttgggtaacgtgcatgatgtgttccatgtgtcgcaactcaagaaatgtcttcgagtgccatccgagcaggccgactcagagcaaattgaagttcgcgaagacttgacctacgtggagaggccagtgaaaatcctggacaccatggagcgcaggaccaggaaccgggtaatccgtttttgcaaggtccagtggagcaaccacgccgaagaagaagctacttgggagcgcgaagacgagctgaaggcagcccatcccgatctcttcgccagttcttccgaatctcggggtcgagattccgtttaa

SEQ ID NO: 23154 - DNA, 7443 bp, Oryza sativa
  unsure (1)..(7443): unsure at all n locations
  Clone ID: TF_OsC359_8276
atgactggcttcgtcttggagctgcgaggcatgtgcgtggtcttggggtatccacatggagtggactaccaggccaggccgctcccagagcaggagggtgaggacgcggagccccgcgctgggtgggaggtcaccgcagtgatcctctctggctcccccgagcggacttcgctggcagtcaccgcgggtggggactccttccccgccgcttgccagaacgccgctctcctcgccatcggcactcttcaccagcgctacccggacgagttgcagcactcgccctaccactaccaccctcgtcgcggaggagcccgcgacttcgccaccttccgggatgctagcccggaggatgacgctaccatcgtgcacctggcacgcatggtggaggcgtacgacgcggctcgtatcgacttccatcagatggagaacctgcagctcaagaaggacctcgacgcggtggaggcgcagctgcaccagctcaagattgcccagggagagatctgccgccccaagcgtcgccgcgtctgccgcagccagaagatcaccgcccgcaagagcacctccaggcctgagcttgtccgtcagtccctggcgtggacttgcttcgtcgagacccctcgtgccgagcctgcgcccgtggttccccaggagggggaagcctccggcgttggtagctcggaggctctctctctgtttgctggttctgtgtggggttttcagatggtgacgaccaggagaaatgctgtcaccggtgatggcaaccaacccgaaggcagcaaccacaaccaccagggcaacccacctccacctcctcctccgcctccaccaccaccaccagacaccaacgccattctcacccaaatcctcgcccagcaagccaacatgatgaccgctttcctccaccacctccaaaacccgccacaacagaatgctccaccaccacctccccaacactctaaactcgccgagttcctccgcatccgcccacctaccttctccagctccaacaaccccgtggatgctttggattggttgcatgccgtggggaaaaagctagacacggtgcagtgcagcgatgaggagaaagtcgtcttcgccgcccatcagctgcagggacccgcatctctatggtgggaccatttccaggctacgcagccagaggggcaacctattacttgggctcgctttaccgccgccttccgaagaacccatgtgcccgccggagtcgtggcccttaagaaaaaggaattccgagagttgaagcaaggcaaccgctccgtgatggagtatttgcatgagttcaacaacctggcccgttacgccccagaggatgtgcgggaagatgaggagaagcaggagaagttcctggcaggaatggaccccgagctgtccgtccgtctagtctctggggactatccggattttcaacgactggtggacaagagcatccgcttggaagccaagcacaacaacaacagcagcagcaacctcgcccagcgccccgacctcaattcgtggtgcgcgtcccacagccgcagcagcagcagaatcagcaagggactcgtgcgccccgtcctcctacgccagctgtgcagcccgttcaaggccgcagggacgctcaaggtcagcagcgtctgtgcttcaactgcttcgagcccgggcactttgcggataaatgcccaaagccaaggcgtcagcaaggccaagcgcctccccgctccaacaacggcgggaaggatgtcattcggggtcatagaactgtcagaaatccccatcgtcagagagttcggagacgtgtttccggaagaactgcccggtatgccacccaagcgagagattgagttccgaatagatcttgctccaggaaccactcctctgcacaagcgaccctaccgtatggcagcaaatgaactagccgaagtaaagaaacagttggaagagttgaaagaaaaggggtacatacgtccgagtacttccccatggggtgctccggtgatttttgtagagaagaaagacaagacgaagaggatgtgcgttgactacagagctctcaatgaagtcaccatcaaaaacaagtaccctcttccccggatagatgatctgttcgatcagcttaaaggtgccactgtattctccaagattgatcttcgttccggatatcaccaattacgtattcgtgaagaagatattccgaagaccgcattcaccacgcgatacgggctgtatgaattcacggtgatgtcgttcggtttgaccaatgcacctgccttcttcatgaacttgatgaacaaagtgttcatggaatacttggataagtttgttgtggttttcattgatgacattctgatatactcacaatccgaggaagaccatcagcaccatctccgtctggtgttgggaaagttgcgggaacatcaattgtatgccaagcttagcaagtgtgagttctggttgtccgaagtcaaattcttggggcacgtgatatctgctaaaggagttgctgtggaccccgaaacagtgaccgccgtcaccgattggaagcaacccaagacagtcactcaaattcgcagcttcttaggtttggcaaggtactaccggagattcatcgagaacttctccaaaatcgctcgtcccatgacacagttgttgaagaaagaagagaaatttgtgtggagcccgcaatgcgagaaggcgtttcaaactctcaaggaaaagctggtttcctcgccagtgttaatcctgccggatactcgcaaggacttcatggtgtattgtgatgcttcgcgccaaggattggggtgcgtgctcatgcaggacggtcatgtggtagcctatgcctcacgccagctacgtcctcatgaaggcaactaccctacacatgatttggagttagccgcagtggttcatgctctaaaaatctggcggcactatctcattgggaatcgctgtgaaatctatatcgaccataagagtctgaaatacatcttcactcagtcggacctgaatcttcggcaaagaagatggttagaactcatcaaggactatgatgtgggaattcactatcatcctggtaaggccaacgtggttgccgacgctctaagtcgaaagggccattgcaacactcttaacgtccgtggcattccacccgaacttaatcaacagatggaagccctgaacctaagcatagttggtcgtggatttttggccgcgttagaagccaagcccaccttgctcgatcaaatccgcgaggctcagaagaatgatccggacatgcatggactcctcaagaatatgaaacagggtaaagccgctggtttcacagaggatgaacacggaaccctatggagcggaaagcgggagaaatactggtgggtttgcatgaagcgggaaattgcagagtatgtggccctatgtgatgtgtgccagcgtgtcaaggcagaacaccaacgaccggccggacttctccaacctctccaagtacctgaatggaaatgggatgaaattgggatggatttcatcaccggacttccaaagacccaaggtggatatgattctatatgggtagttgtggatcgattaaccaaggtagctcgatttattcctgtgaagaccacctatggagggaacaaactagcggagctctacttcgctaggatcgtgagtctccatggcgttcccaagaaaatcgtatctgataggggaagccaattcacctctcacttttggaagaagctccaagaagagctgggtactcgattgaatttcagcaccgcctatcacccacagacagatagacagaccgagcgtctaaatcaaatcctagaagatatgctccgcgcatgtgtactagatttcgggaagacctgggataagagtctcccctatgctgagttctcttacaataacagctatcaagccagcatacaaatggcaccttatgaagcgttgtacgggcgcaaatgccggacaccgctcctgtgggaccaagttggagaaagccaagtgttcaggaccgatatcctgagagaagccgaagctaaagtcagaatcattcgggataatctaaaggtggcacagtcccggcagaaaagttatgcagataaccgtcgccgtgatctggaattcgcagtggatgactttgtgtatcttcgggtcacgccattgcgaggtgtacacaggtttcagacgaaagggaaactcgcacctcggtatgtgggtcctttccgtatcgttgctcgacgcggagaagtcgcttaccaattggagctgcccgcctccttgggcaacgtgcatgatgtgttccatgtgtcgcaactcaagaagtgtctccgagtgccatccgagcaggccgactcagagcaaattgaagttcgcgaagatttgacctacgtggagaggccagtgaaaatcctggacaccatggagcgcaggaccaggaaccggcacatcccgatctcttcgccagttcttccgaatctcggggtcgagattccgtttaaggaggcgggcccgcccgccactctcgctgacgggtggggcccacctgtcatcgccttcctcccgccgcagccgccgctcgcccgtgccctaacgccgccgccgccgcggattccgccgcatcccgccgtccccgcgcgccataatgaggggggaatcattccccgcgattccctctcccaattcccccactttcccctctctctctccctcggattcgtccgatttccatcccgcaaacctcgccggcgcaatcaatggcggccgagatctccgcgcccgtttcctccctttccgggcacgctctccttctcccggtgctatttaaacgtctcccgtgctctcctcctccgtttccgccgctcgccgctcgctctccccgtgggaatcgagcccgcaccgttgcaccttntctccgccgtcgccgccgtgctccggttcgccgccgccgtcgctccggacttccttcccactcggcgtgaccttcatcggcttcgccgcggtcccgtcgacctcgtccgcgccctcggtttgctcgccgaccggcggagcaccgtcgtcctcgccgtcccgaaccgcgccgccgccttcttccgcttcggccgccgttcccgtcgtcgccgtcgaccgggccgtgcgccgccgtcgtttcagccgtcgccgtcgctcgggaagaccaccgtcgtgctcgccaagtcgtcgccgtcctcgtccgacccttcgccgtcgccggagatcaccggagcagcttcgccgtcgtcgacccgaaggttcccgccgcttcctcctcgtcgccgtcgccgtctgttggtcttccgccgccgtttaggtcaccggaaccagcatcctcaccggcttggcaccgccggatatgccggtaaggaagaggaatggcagcgtgaggatgaagaagcggaggaatcgtgcacaccgctcgtgtttggcgatatcccacacccttgggctaggaactgggccagggccaggtaccagaagaatgatgatggcacaatcttcatgccaaatgcagaagatcaacgagtatacgaagctataaaggagttggttgccgagcaacaagcctcgcaagaggcctgctctcaaagacgcgaggacgacctcctcacgaaagcgttgggcaacaaggaacaccgtggacggacacggggcgttgggtcttctgttccctggaagaatggatttccagactacaagtggcagtacaagaagcggacttccaacaaggcggagaaagatgcacgccttggagccaaaatccgggcgtcgataagagctgagctgacatctgaattcgacgaaaagctcgagtcgatgagggccaagattaggcaagagatccgagaagagcaacagaacccccaggccgccgctgctgctgcgcacgaagagttaggaagtcccacccaaaaacgcagcagttgcgcatcaactgagttggcggaaaattcaacatcggtcgacagcgccgtcgaccacataacagtaaccgaaccaacgatttgcaccctcacagttagggtgatgccgaccttcacggttccagcagccgagggacttgcgtacaagtcaaccctagagacaagagtgcatggagcgcaactcagggccgactgtgcaaatgttcaagtcgactcggtgaagcccgaatacgagctgttccctctgaagtatccaccgaacgacgaggtcctctcactaggaaatgcccgtggtaccttcatccaatggcccaaggacctcattgagatcagggttacaacgaggccaaccactgcagcaggcggtcgtccaccaaagagacccgcctctactccttcagcccctcctgctcaagatcgtcatgcacaatcttacgatgtgcagttgcagtacgacacggattttggggaggaccgaatggaggccgacagcaaggcgattcatgaacccccaccgatgaagaagagcaggaaggcacactcttcccctcagagaattactctcgataaacccgaagcaaatgggagaggaaggggaggaaaggtgcaggcctcgcttctagctccaaggaagctagatctgggcaagggccaggaagagactaagggcaaagaggtcaagaagaaatacgttgctccacaggagttcaaactaggcatgccattggttggagatgacgtgcttgccacaatgggcaccgcttggaaggaccttcacttatactacatggagaaatctaacgccaggaagccgagtaaagctaccgatatccttggagagcacgatggaaagccattccttggtccaacaaattatgtcgtggtcgacttcaaggatcttttcgacctctacaggctccgaacggtggacacaagcctccttaagtgctactccttgttaagttggcaatggtgtcagaagcatgcaccggaagttgccttccttgatccacaagtggtcactgtcacaaatctccagaatgaccgtcaaggaatggtcaactacatctacgacaccttgtggtcctgccgagacaaggagtacattattgcccattggatccttctggtcataacacctaagctgagtacatgtcactacctgaactccagaattgataagaacgcatatgattggaccccaattcaactagcgatagatgaagtgtgggcccaatacgtgcaaagaggaggcctcaggaagacaggacatgacaccgtcatcctcaaaaaagacttcccggtgaagcaacaaatagaccccctgagggtttggcgccacgtgtgtggcatagcgcaggcttatccggtccgcgacaggtcgcagcactcgtccctagtcggagccggcgtgaggactcctggagttggcacgtcagctccggccagatacattccaagcttcatcgcaatcattgcaaggaagccattgtatgaagaagggtag

SEQ ID NO: 23155 - DNA, 6253 bp, Oryza sativa
  Clone ID: TF_OsC359_8285
cggctcggcccatctccctccccctccctctcttctccccgcagcccatccggcctcttcccgcgcgcgcgcctcatacgggcgggcccgcccgccaccctcgctgacgggtggggcccacccgtcatccccttcctcccgccgctcccgccgcctcgcccgcgccctagcgccgccgccgccgcgaatcccgctgcctcccgccgtctccgcgtgcaataaagagggggaaatcactccccgtgatcccctctccctttccccccatttttccctctctctctcgcgtttaaacgggcggatttgcccccgcaaatctcgccggcgccactgatggcagccggacctcccgcgccggtttccccccttccccggccaccctctctcgacccggctctatttaaaccctccccgcacctcctccatctgtttccgcctctcgccgcccttcctcctcgccggaatcgagctcgcgccgtcgctctctctctgccgtcgccgtcgagctccggtccacctcccacctcggcgccgcctccttcggcttcgccgcatcctcgccgacctcgtccacccctccgtttcgctcaccgaccgccggaacgccgtcgaccccgtcgacccgagccgcgccgccgccttcctccgctccggccgcctttttcgtcgtcgccgtcgacctagggtgagccgtggaccgccgcttcttttcccccttcccttcccctctctcggccgccgctccgccgtgcctatggccaccgccggcgaccataggggcgcgggcgccgcctcccgccggctgcgccggcttggccgccctcgggcgcgccgagtggctgccgcgtggggcccggctcggccatataaggaccggtcttcgggcctctgttgcaaagcactaccgtacttccacatgtctagtggggcaaatgaaggctacacgagctgcggcccgatggccggcagcgttacccgtcgtggtttggacatgtctggcttcgtcttggagctgcgaggcatgtgcgtggtcttggggtatccacatggagtggattaccaggccaggccgctcccggagcaggagggtgaggatgcagagcctcacgctggttgggaggtcactgcagtgatcctctccggctctcccaagcggacttcgctggcagtcaccgcgggcggagactccttccccgccgcttgccagaacgccgctctcctcgccatcggcaccctgcaccagcgctacccggacgagttgcagcactcgccctaccgctaccaccctcgtcgcggaggagcccgcgacttcgccaccttccgagacgccagctcggaggatgatgccaccgtcgtgcatctggcacgcatggtggaggcatacgacgcagctcgtattgacttccaccagatggtgcgtcgcggcatggtggagaacaacatgaagatcctggagctgcgtcaggagaacctgcagctcaagaaggacctcgacgcgttggaggcgcagctgcatcagctcaagatcgcccagggagaggacagccgtcccaagcgtcgccgcgtctgccgcagccagaagatcaccgcccgcaagagcacctccaggcccgagcttgttcgtcagtccctggcgtggacttgcttcgtcgagacccctcgtgccgagcctgcgcccgtggttccccaggagggggaagcctccggcgttggtagctcggagggcgcgctgttgctcaccttccgccctggcccgtcgcagcggagaaatgttaacaccggtgaaggcaaccaacccgagggcagcaaccccaacccccaaggcaatccacctccaccaccaccaccagacaccaacgccattctcacccagatcctcgcccaacaagccaacatgatgaatgctttcctccaccacctccaaaacccgccacaacagaatgctccaccaccacctccccaacactccaaactcaccgaattcctccgcatccgcccacccaccttctccagctccaacaatcccgtggatgcgttggattggttgcatgccgtggggaagaagctagacacggtgcagtgcagcgatgaggagaaagtcgtcttcgccgcccatcagctgcaggggcccgcatctctatggtgggaccacttccaggctacgcagcccgaggggcaaccgattacttgggctcgcttcaccgccgctttccggagaacccatgtgcccgccggagtcgtggctctcaagaagagggaattccgagagttgaagcaaggcaaccgctccgtgatggagtatttgcacgagttcaacaatctggcccgttacgctccggaggatgtgcgggaagatgaggagaagcaagagaagttcttggcaggaatggaccctgagctgtctgttcgtctagtctctggggactatccggattttcaacgattggtggacaagagcatccgcttggaagccaagcacaaggagctggagtcgcacaagcgccgcttggcgaacttccgcaatcaacagggtgctaaccagagggtccgctacaccaatccctacccagggggatcctcctcgcagcagcaacaacagcagcagcaacctcgcccagcgcctcgacctcaattcgtggtgcgcgtcccacagcagcaacagcagcagaatcagcaagggactcgtgcgccccgtcctcctacgccagctgggcagcccgttcaaggccgcagggacgcttcaggtccgcagcggctgtgcttcaactgcttcgagcccgggcactttgcggataaatgcccgaagccaaggcgtcagcaaggccaagcgcctccccgccccaacaacggtgggaaggacgtcatccgtggccgtgtgaatcacgtgacggccgaggacgtgctgacaactcccgacgtcatcgttggtacgttcctcgttcattccatccctgctacaattttgttcgactctggagcttcccactcgtttatatctgtgccattcgtggggaaaaatcagttgggggtagaaaggcttagaaaccctctgctcatcaccacccctggaggggttatgacagcaaagtattatagccctgccgtccctatagaaattcaggggattccttttccctcggacctgattcttctagacactaagaacttggatgtgatccttgggatgaattggctggcacaattccaaggagtagtggattgcgcgaggcgcactgtcactctataccgaggaccagaacaaccggttgttttctttgcacctccaacctctgtcagaagctcagaacttcatcagatagaactgtcggaaatccccatagtcagagagttcggagacgtgtttccggaagaactacctggtatgccgcccaagcgagagattgagttccggatagatcttgctccaggaaccactcctctgcacaagcgaccctaccgtatggcagcaaatgaactggccgaagttaagaaacagttggaagagttgaaagaaaaggggtatatacgtccgagtacttccccttggggtgctcctgtgatttttgtggagaagaaagacaaaacgaagaggatgtgcgttgactacagagctctcaatgaagtcaccatcaaaaacaagtaccctcttccccggatcgatgatctgttcgatcagcttaaaggtgccactgtattctccaagattgatcttcgttccggatatcaccaattacgtattcgggaagaagatattccgaagaccgcattcactacgcgatatggactgtatgaattcacggtgatgtcgttcggcttaaccaatgctcctgccttcttcatgaacttgatgaacaaagtgttcatggaatacttggataagttcgttgtggttttcatcgatgacattctgatatactcacaatcagaggaagaccatcagcaccatctccgtctggtattgggaaagttgcgggaacatcaattgtatgccaagcttagcaagtgtgagttctggttgtccgaagtcaaattcttggggcacgtgatatctgctaaaggagttgctgtggaccccgaaacagtgaccgccgtcaccgattggaagcaacccaagacagtcactcagattcgcagtttcttgggtttggcaggatactaccggaggttcatcgagaacttctccaaaatcgctcgacccatgacacagttgttgaagaaagaagagaagtttgtgtggagcccgcaatgcgagaaggcgttccaaactctcaaagaaaagctggtttcctcgccagtgttaatcttgccggatactcgcaaggatttcatggtgtactgtgatgcttcgcgccaaggattggggtgcgtgctcatgcaggacggtcatgtggtagcctatgcttcacgccagctacgacctcatgaaggcaactaccctacacatgacttggagttagcagcggtggttcatgctctaaaaatctggcggcactatctcattgggaaccgctgtgaaatatatactgatcataagagtttgaaatacatcttcacccagtcggatctgaatcttcggcaaaggagatggttagaactcatcaaggattatgatgtgggaatacactatcatcctggtaaggccaacgtggttgccgacgctctaagtcgaaagagccactgcaacactctcaacgtccgaggcattccacccgagcttaatcaacagatggaagcactgaacctaagcatggttggtcgcggattcttggctgcgttggaagctaagcccaccttgctcgatcaaatccgcgaggctcagaagaatgatccggacatgcatggactcctcaagaatatgaaacagggcaaagccgctggtttcacagaggatgaacacggaaccttatggaacggaaagcgggtatgcgttccagatagcagagaacttaaacagctgatacttcaggaagctcacgaaagtccttattccattcacccgggcagtaccaagatgtacttagacttgaaggagaaatactggtgggtcagcatgaagcgggaaattgcagagtttgtggcactatgtgatgtgtgccagcgtgtcaaggcagagcaccagcgaccggccggacttctccagcctctccaagtgccggaatggaaatgggatgaaattgggatggatttcatcaccggccttccaaaaacccaaggtggatatgattctatatgggtaattgtggatcgactaacaaaggtagctcgatttattcctgtgaagaccacttatggagggaacaaactagcggagctctacttcgctaggatcgtgagtctccatggtattcccaagaaaatcgtatctgataggggaagccaattcacctctcacttttggaagaagctccaagaagagctgggtactcgattgaatttcagcaccgcctatcacccgcagacagatggacagaccgagcgtctaaatcagatcctagaagatatgctccgcgcatgtgtcctagacttcgggaagacttgggataagagtctcccctatgccgagttctcctacaacaacagctatcaagccagcatacaaatggcaccctatgaagcgttgtacgggcgcaaatgccggacaccgctattgtgggaccaagttggagaaagccaagtgttcgggactgatatcctgagagaagctgaagctaaagtcagaatcattcgggataatctaaaggtggcacagtcccggcagaaaagttatgccgataaccgacgccgtgatctggaattcgcagtggatgattttgtgtaccttcgggtcacgccattgcgaggggtgcacaggtttcggacaaaagggaagctcgcacctcggtatgtgggacctttccgtatcgtcgctcgacgcggagaagtcgcttaccagctggagttgcccgcctccttgggcaatgtgcatgatgtgttccatgtgtcgcaactcaagaaatgtcttcgagtgccatccgagcaggccaactcagagcaaattgaagttcgcgaagacttgacgtatgtggagaagccagtgaaaatcctggacaccatggagcgcaggaccaggaaccgggtaatccgtttttgcaaggtccagtggagcaatcacgccgaagaagaagctacttgggagcgcgaagacgagctgaaggcagcccatcccgatctcttcgccagttcttccgaatctcggggtcgagattccgtttaa

SEQ ID NO: 23156 - DNA, 5577 bp, Oryza sativa; identical to SEQ ID NO: 14179
  Clone ID: TF_OsC359_8301

SEQ ID NO: 23157 - DNA, 3813 bp, Oryza sativa
  Clone ID: TF_OsC359_8310
ctatttaaacgtcccccgtgctctcctcctccgtttccgccgctcgccgctcgctctccccgtcggaatcgtgctcgcgccgtcgcaccttctctccgccgtcgccgccgagctccggttcgccgccgccgtcgctccggacttcctcccctctcggcgtcgtctccttcggcttcgccgcgtcgtcgtcgacctcgtccgcccctccgcttcgctcgccgaccgccggaacgccgtcgtcctcgtcgtcccgaacgcgccgccggcttcctccgtttcggccgccgttcccgtcgtcgcccgccacccgggggagccccagaagccatcacacagacatccaaccaccgccacacacccacccagtagtcctagaacgtcgaacaaagccagacgataatttatgaaagcggccataggcacatgagcactcctcaacctcaccgacctgagcgccccggcaaaaccaaccctgagccacgcgcccccgtcatcccacactccccccacccccccgcgtccccgccacccccccgacccgccggcaaccccggcgcgccccacaccactctcccatgatgggacattcagaccacccacacaatagccagacccccaaccggcgcccgcgacgcacacagtcagcggccccacgaaagggggagcaagccttaggggaggcccccacgcctcccagtagggggcgggacgtaacccgaccgcgcccgcgggtacggctgacgcgtgggacccacggcgccggccgccgccagccgcgtgctcccggtccgccgtggaccgagaggctgacgcgtgggccccactcccgtggacccggtccgcgcgccctctcccccggcggtcttcgggcctctgttgcaaagcactaccgtacttccacatgtctagtgggtaaggcttagtttgtggctcagtcttgcctcctgggacaaggattaatgcacgcacgtgaggaatgcccgttgggttatttccggtcgtgacagctgctaactccaaatcatgggtagggtagttgccttcatgaggccgtagctggcgtgaggcataggccaccacatgaccatcctgcatgagcacgcaccccaatccttggcgcgaagcatcacagtacaccatgaaatccttgcgagtatccggcaagattaacaccggcgaggaaaccagcttttctttgagagtctggaacgccttctcgcattgcgggctccacacaaatttctcttctttcttcaacaactgtgtcatgggtcgagcgattttggagaagttctcgatgaacctccggtagtatctctggccagaggtgtaccactgtacccacaagacacagccccacatcatgtcaccatgtgcctcagtaccaccacggtacctcggaaagggggtcagcgacgacgtcagcaccggcggcggctcggcggctcggacggctcggacggcgcatgctcgccggcgaacggcggctctacggcacaaacggagggcaccaagacgtagatcacggcgcggcgaactcaccgatgaccaaaacgtcggcggaagaccaacggacggcggcggcgtcgaggaaaaggcggcggagaagatcgggtcgacggcgtcgccggtgcgccggcggtcttcggcggcggcgaagcggtggacggggacggcggcgaccttgcgaacccgatggtggcgacggcgactgacgacggcggctgcaacggcggcgcggcgcggcacaacaaacttgtccaagtattccatgaacactttgttcattaagttcatgaagaaggcaggtgcattggttaaaccgaacgacatcaccgtgaattcatacagtccgtatcgcgtggtgaatgcggtcttcggaatatcttcttcacgaatacgtaattggtgatatccggaacgaagatcgatcttggagaatacagtggcacctttaagctgatcgaacaggtcatcgatccggggaagaggatacttgtttttgatggtgacttcattgagagctctgtagtcaacgcacatcctcttcgtcttgtctttcttctccacaaaaatcacaggagcaccccagggggaagtactcggacgtatataccccttttctttcaactcttccaactgtttcttaacttcggccagttcatttgctgccatacggtagggtcgcttgtacagaggagtggttcctggagcaagatctatccggaactcaatctctcgcttgggcggcattccgggtagttcttccggaaacacgtctccgaactctctgactatggggatttctgacagccctatcccttggaattgagccaaccaattcatcccaaggatcacatccaagttcttggtgtctagcagaatcagatccgagggaaaaggtatcccctgaatttctatagggacggcagggctataatactttgctgtcataacccctccaggggtggtgatgagcagagggttcctaagcctttctacccccaactgatttctccccacgaatggcacagatataaacgagtgggaagctccagagtcgaacaaaatggtagcagggatggagtgaatgaggaacgtaccaacgatgacgtctggagttgtcagcacgtcctcggccgtcacgtggttcacacgaccccgaatgacatccttcccaccgttgttggagcggggaggcgcttggccttgctggcgccttggcttcgggcatttatccgcaaagtgcccaggctcgaagcagttgaagcacagacgcttgtcgcgaccgggaaaattgccttgtgtgtccctgcggccttgaccaggctgcacagttggcgtaggaggacggggcgcacgagtcccttgttgattctgctgctgctgcggctgtgggacgcgcaccacgaattgaggtcgaggcgcggagcgaggttgctgctgctgttgttgctgctgcgaggaggatccccctggatagggattggtgtagcggaccctttggttagcaccctgttgattgcggaaattcgccaagcggcgcttgtgcgactccagctccttgtgcttggcttccaagcggatgctcttgtccaccagacgttggaagtccgggtagtccctggagactagacaaacggacagctcagggtccattcccgccaagaacttctcttgcttctcctcatcttcccgcacatcctccggggcgtaacgggcaaggttgttgaactcatgcaaatactccatcacggagcggttgccttgcttcaactctcggaactccctcttcttaagagccacgactccggcgggcacatgggttctccggaaagcggcggtgaagcgagcccaagtaataggttgccccgctggctgcgtagcctggaaatggtcccaccatagagatgcgggcccttgcagctggtgggcggcgaagatgactttctcctcatcgctgcactgcacagtgtctagctttttccccacggcatgcaaccaatccaacgcatccacggggttgttggagctagagaaggtgggtggacggatgcggaggaactcggcgagtttagagtgttggggaggtggtgggggagcattatgttgtggcggattttggaggtggtggaggaaagcagtcatcatgttggcttgctgggcgaggatttgggtgagaatggcgttggtatctggtggtggaggtggaggcggaggaggaggtggaggtgggttgccttggtggttgtggttgctgccttcaggttggttgccatcaccggtattagcatttctcctggtcgtcaccat

SEQ ID NO: 23158 - DNA, 5490 bp, Oryza sativa
  Clone ID: TF_OsC359_8331
atggcggccggatcttccgcgccgtttccccctcgtccggccgctctgtccccctcccgaccctatataaaccctccccgtgcctccctccaccgttttcgccactcgccgctctctctccccgccggaatcgagctcgcgccgtcgccctctctctccgtcgtcgccgccgagctccggtccgccgccgttgtcgccccggaccacctctcccctcggcgccgcctccttcggcttcgccgcatccccggcgaccttgtccacccctccgtttcgctcgccgaccgccggagcaccgtcgaccccatccacccgagccgcgccaccgccttcctccgcaccggtcgccgtttccgtcgttgccgtcgacccggggtgagtcgtggaccgccgcttcttttcccccttcccttcccctctctcggccgccgctccgccgtgcctatggccgccgccggcgaccataggggcgcgggcgtgccgcctcccgccgctgcgccggcgtggccgccttcgggcgcaccgtgcggctaccgcgtggggcccggctatcagccgcccgcgccctcggcacctcggccatataaggaccggtcttcgggcctctgttgcaaagcactaccgtacttccacatgtctagtgggacaaatgaaggctacacgagctgcggcccggtagtcgagatgtcatggcacagggctggtgtcctgctgctaggggctcaatcctgcctacctgtcccggaggttccggccgtaggtgggattgggtcgatggccggcagcgtcagtcgtcgtggtctggacatgactggtttcgtcttggagctgcggggtatgtgcgttgtcctggggtatccgcatggactggactaccagggcaggccgctcccggagcaggaggtcaccgcgggtggagattctttctccgccgcttgccagagcgccgctctcctcgccatcagcactcttcaccagcgctacccggacgagctgcagcactcgccctaccgctaccaccctcgtcgcggaggagcccgcgactacgccaccttccgggatgctagctcggaggatgacgctaccatcatgcacctggcgcgcatggtggaggcgtacgacgcggctcgtatcgacttccatcagatggtgcgccgtgggatggtcgagaacaacctgaagatcctagagctgcgtcaggagaatctgcagctgaagaaggacctagacgcagtggaggcacagctgcatcagctcaagatcgcccagggagaggtctgtcaccccaagcgtcgccgcgtctgccgcagccagaagatcaccgcccgaaagagcacctccaggcccgagcttgttcgtcagtccctggcgtggacttgcttcgtggagacccctcgtgccgagcccgcgcccgtggttcctcaggagggggaagcctccggcgtcggtagcacggaggatgcgctgttgctcaccttccgtcctggcccgtcgcagcgctccaacaaccccgtggatgtgttggattggttgcatgccgtggggaaaaagctagacactgtgcagtgcagcgatgaggagaaagtcgtcttcgccgcccaccaactgcagggacccgcatctctatggtgggatcatttccaggctacgcagccagaggggcagcctattacttgggcccgcttcaccgccgccttccggaggacccatgtgcccgccggagtcatggcccttaagaaaagggagttccgagagttgaagcaaggcaaccgctccgtgatggagtatttgcatgagtttaacaacttggcccggtacgccccggaggatgtgcgggaagatgaggagaagcaagagaagttcttggcaggaatggacccggagctgtctgtccgtctagtctccggtgactatccggatttccaacgtctggtggacaagagcatccgcttggaagccaagcacaaggaacttgagtcgcacaagcgtcgcttggcgaatttccgcaaccaacagggtgctaaccaaaggatccgctacaccaatccctatccagggggatcttcctcgcagcagcagcaacctcgctccgcgcctcgacctcaattcgtggtgcgcgtcccacagccgcagcaacagcagagccagcaagggacccatgcgccccgtcctcctacgccagccgcgcagtctggtcaaggccgcagggacgttcaaggtccgcagcgtctgtgcttcaactgcttcgagcccgggcactttgcggataaatgcccgaagtcgaggcgccagcaaggccaagcgcctccagacgtcatcgttggtacgttcctcatccattccatccctgctaccattttgttcgactctggagcttcccactcgtttatatctgtgccattcgtggggagaaatcagttgggggtagaaaggcttaggaaccctctactcatcaccacccctggaggggttatgacagcaaagtattatagtcctgccgtccctatagaaattcaggggattccttttccctcggatctgattcttctagacaccaagaacttggatataggactgtcagaaatccccattgtcagagagttcggagacgtgtttccggaagaactacccggtatgccgcccaagcgagagattgagttccggatagatcttgctccaggaaccactcctctgtacaagcgaccctaccgtatggcagcaaatgaactggccgaagttaagaaacagttggaagagttgaaagaaaaggggtatatacgtccgagtacttccccctggggtgctcctgtgatttttgtggagaagaaagacaagacgaagaggatgtgcgttgactacagagctctcaatgaagtcaccatcaaaaacaagtaccctcttccccggatcgatgatctgttcgatcagcttaaaggtgccacggtattctccaagattgatcttcgttctggatatcaccagttgcgcatccgtgaagaagatattccgaagaccgcattcaccacgcgatacggactgtatgaattcacggtgatgtcgttcggtttaaccaatgctcctgccttcttcatgaacttaatgaacaaagtgttcatgaaatacttggataagtttgttgtggttttcattgatgacattctggtatactcacaatcagaggaagaccatcagcaccatctccgtctggtgttgggaaagttgcggaaacatcaattgtatgccaaacttagcaagtatgagttctggttgtccgaagtcaaattcttagggcacgtgatatccgctaaaggagttgctgtggatcccgaaacagtgaccgccgtcaccgattggaagcaacccaagacagtcactcaaattcgcagtttcttaggtttggcaggatactaccggaggttcatcgagaacttctccaaaatcgctcgacccatgacacagttgttgaagaaagaggagaaatttgtgtggagtccgcaatgcgagaaggcgttcaaaactctcaaagaaaagctggtttcctcgccagtgttaatcttgccggatactcgcaaggacttcatggtgtattgtgacgcttcgcgccaaggattggggtgcgtgctcatgcaggacggtcatgtggtggcctatgcctcacgccagctacagcctcatgaaggcaactaccctacccatgatttggagttagccgcggtggttcatgctctaaaaatctggcggcactatctcattgggaatcgctgtgaaatatatactgatcataagagtttgaaatacatcttcacccagtcggatctgaatcttcggcagaggagatggttagaactcatcaaggattatgatgtgggaattcactatcatcctggtaaggccaacgtggtcgccgatgctcaaagtcgaaaaagccattgcaacactcttaacgtccgtggcattccacccgaacttaatcaacagatggaagccctgaatctaagcatagtgggtcgcggattcttggctgcgttggaagccaagcccaccttgctcgatcaaatccgcgaggctcagaagaacgatccggacatgcatggactcctcaagaatatgaaacaaggtaaagccgctggtttcacagaggatgaacacggaaccctatggaacggaaatcggagttcgtggccctttgtgatgtgtgccagcgtgtcaaggcagagcaccaacgaccggccggacttctccaacctctccaagtaccagaatggaaatgggatgaaattgggatggatttcatcaccggacttccaaaaacccaaggtggatatgattctatatggcaccgcgtatcacccgcagacagatggacagaccgagcgtctaaatcagatcctagaagatatgcttcgcgcatgtgtcctagatttcgggaagacctgggataagagtctcccctatgccgagttctcctacaataacagctaccaagccagcatacaaatggcaccttatgaagcgttgtatgggcgtaaatgccggacaccgctattgtgggaccaagttggggaaagccaagtgttcgggaccgatatcctgagagaagctgaagctaaagtcagaaccattcgggataatctaaaggtggcccagtctcggcagaagagttatgcagacaaccgacgccgtgacctggaattcgcagtggatgactttgtgtatcttcgggtcacgcccttgcgaggtgtacacaggtttcagacaaaggggaagctcgcacctcggtttgtgggtcctttccgtatgattgctcggcgcggagaagtcgcttaccagttggagctgcccgcctccttgggcaacgtgcatgatgtgttccatgtgtcgcaactcaagaaatgtcttcgagtgccatcccagcaggccgactcagagcaaattgaagttcgcgaagacttgacctacgtggagaggccagtgaaaatcctggacaccatggagcgaaggaccaggaaccggtccgccgccgtcgtcgccccggaccttctcccgcttcggcgccgcctcctttggtttcgccgcaaccttgccgacctcgtccacccctccgtttcgcccgccgaccgccggaacgccgccgtccccgtctacccgagccgcgccgccgccttcctccgctccggtcgccgttcccgtcgtcgccgtcgacccggggtgagctgtggaccgccgattcgtttcccccttccctcccctctctcgggcgccgctccgccgcgccggtggtcgccggcggcgaccatcggggcgcgggtgcgccgcctcccgtcggctgtgccggcgtggccgccttcgggcgcgccccgcggctgccatgtggggcccggccgtcagccgcccgcgccctcggacgctgcagcttcggaagatccgctcttcgtggaggttgaagccgacgtttgggaaagcgagcaaggcaagtcacatcatctttga

SEQ ID NO: 23159 - DNA, 8512 bp, Oryza sativa
  Clone ID: TF_OsC359_8385
ctagaatctctcaacgacgtcagcagctattttatcagcagctatttgtgcatcattgatgaggtcaagagcagcctctttgcttgtcccgtctgcaaagccatcaatggcattaatatcaatcttcgggtacaaggacttggtcatcgccaacgccaggcttgctcccatgcttccagcttccttgatattcttaaaatatgtatccggagcaattctcagcttgtcgaagatctcggcaatgtcaaatgaactcggaccattgttattgaagaacatggcttggacgagtggtgtagcggcgttggcgacttcatctctagctccttcaagcctcttgattttgttgaccaagacgtcgaattgagcattcacatcagcaagagggcatgaagataagagtgattttttgaagttccagctgcaagtaccttcgacatctttcaaggccgagtccctctgctttgtcaattcatccttatccttttccagagccttgatccgcttttccagatcggatatctttgcggcttgcacttttgatgagccgcttatcgagaaattggagtcttgaagcttggtgatacggtctctcagatcatgctcagtcttcctggcaagctccttggcttcgtgcagctggtctctggtggcttcaagggttccaaggtgtggaactaacttctcgagggttgctgtcttcgcttcattcctaagatggattctatttacaagacgagtagcttggcccagtgtctttttcagtagacatacttcctcatcttccctctgcttatttattacaattccttgtggccgcatttcatcatccctccacttgactaatattggtgggcgggaatcttcagccgattgtacccggaggacctcttcttcatcaccaatcattggccctgtgataatttccggtctgggacgagcaggtccttgcaccctaacaggagaactagttccagagtcagcaccagtgtccgtcttgggagggctgttagtttgagcttctacttccgggatgtcattattttgttgagagtcagactggttagtcgactttgaagtgtcaggttgatcaatagaccggattttcggccctccactggcttggcttgtcttccaacggggtgagcggcgttgagcaatcggagggtcagatttcatcaaagcaaattccggtgggggaggattgaaggcgttgtatggtatgactggcaacgtgtgtgaatagatcctctcctgcataattttgaactcaagagattctgggttctctcggttggggtcatgcttgccgtcaaattcaaaggctgttctagatctttccttgattggtgccaacaaggtcttgatgaagtgccgagtgatttgttccccttgtagaccctgttcgttcagcttcagcatgcgatcaaacaagtcgagcgcttgggcggcttcttctcccatcggcagtgagttccaggtatcgcgatagactgggggaagacaggagtatccgggaagcgctggcttggggttttgcacatagaaccagttcgcgtgccaacctttgttcgaggttttgaatggcatggagaagtatttttggctcaaggtccccctcagttgaaatccggctcccccaactacgcatggtttgcttttgtttgcctggggcttgaggaagaagatgcagcggaataaagcgaaatgtggcctaatccccagaaaagcttcgcaagcatggatgaaattggcgatatggactatggaattggggtttaggtggtgtaggctgattccatagaaatccaaaattcctctgaagaaacttgaggtcggaagagaaaatccgccgtagaagaaatgagaaaataccacgaccacatgtgtgtcaggagttgggaatgcttcgccgtatgctggacgccacccaatgatctcctttgccggaagaacaccgtgcgccaccatctccttcaggttctcctccgttacatcggagggcgcccactgactctcaaagctctctctctctctctcttccgccatggatgcgatctgaatgatgcgatttgctttggaaatggctgagaatggatggggaatcggagcggtggatgcggggagaaatttcgtgaagtttttgagggtggattggagcggattgatgaaccctaccgcctgtgccgcctcgaccgtgcgccggccggccgcgccgtcgcctcctccaacgtcgccgccacctcctccaccccggcctgccctccgtttcgcgcggtgaccgccggaggcgcgttcccgccgtcgcccttctctttcctccgcgccggccgcctccagccgcctctccctcctcgccggagcgccgtccggccgcgccgtcttctccctcggcctcgcagccacctcctctccctcggtcagccctccgtttcgcggggaaagcaccggagacgcgtcctcgccggcaaaacagtggcgttgccgccactgttccacctccggccgccactgtcgcgtttcccgtgcgccggccgacgtcgccaccacctccctcggctccgcgacgccgccctcatccccggcatcacctcctcctcgcccgaagctcgccggagtggcctcctcgtcggcgtccagtacctccccgcctccggccggctccttgttcaccctaggataaacaaaaccccaactagtgggtattctattcatggttccactctcttcctctttcaaaacccctaaaacctgttttcggtggggtttgggtgcatgccagttgtgggaagtagcaccccggccactataaggattaagctcgggcctctgttgcgaagcactaccgtacttccacatgtctagtgggtaaggcttagtttgtggctcagtctggttataaacaaaagtacacggatggagatggacgaagtcgggggtcgatggacatctctaggacaaatgaaggctacacgagctgcggcccggtagtcgagatgtcatggcacagggccggtgtcctgctgctaggggcttagttctgcctacctgtcccgggggttccggccgtaggtggagttgggtcgatgtacacctctgatcagagtataatctattcgaatagccgcgcccccggttatgggcaagccgagcaatgtacccaaatggccagcagcatcaaccgtcgtggtctggacctgactggcttcgttttggagctgcggggcatgtgcgttgtcctggggtatccgcatggagtggactaccaaggcaagcagctcctggagcaggagggtgacgatgcagagccccacgctgcttgggaggttactgcagtgatcctcactggctcacccgagaggacttcgttggcagtcaccgcgggtggagattccttctccgttgcttgccagaacgccgcactcctcgccatcggcactcttcaccagcgctacccggacgagttgcagcactcgccctaccgctaccaccctcgtcgcggaggagcccgtgactacgccaccttccgggatgctagcttggaggatgacgctaccatcgtgcacctggcgcgcatggtggaggcgtacgacgcggcccgtatcgacttccatcagatggtgcgtcgcgggttggtcgagaacaacatgaagatcctggagctgcgtcaggagaatctgcagctaaagatggacctagacacagtggatgcgcagctgcgtcagctcaagatcgcccagggagaggtctgtcgccccaagcgtcgccgcgtctgccgcagcctgaagatcaccgcccgcaagagtacctccaggcccgagcttgttcgtcagtccctggcgtggacctgcttcgtcgagacccctcgtgccgagtccgcccccgtggttcctcaggaggagggagcctccggcgttggcagcacggaggatgcgctgctgctcaccttccgtcctggctcgttgcagctgtagacgagcagttagtaggcttgcgtatggtgacaaccaggagaagtgctgctaccggtgaatgcagtcaccccgaaggcagcaaccacaacaaccatggcagcccacctccacctccttctccgcctccaccaccaccaccagacaccaacgccattctcacccaaatcctcgcctagcaggccaacatgatggctgctttcctccaccacatccaaaatccgccacaacataatgctccaccaccgcccccacaacactctaaactcgccgagttcctccgcatccgtccgcctaccttctctagctccaataaccccgtggatgcgttggattggttgcatgccgtggggaaaaagttagacaccgtgcagtgcagcgacgaggagaaagtcatcttcggcgcccaccaactgcaggggccagcatctctatggtgggaccatttccaggctacgcagccagaggggcagcctattacttgggcccgcttcaccgccgctttccggagaacccatgtgcctgccggagtcatggcccttaagaaaagggaattccgagagttgaagcaaggcaaccgctccgtgatggagtatttgcatgagtttaacaacctggcccggtacgccccggaggatgtacgggaagatgaggagaagcaagagaagttcttggcaggaatggaccctgagctgtccgtgcgtctggtctccggggactatccggatttccagcgtttggttgacaagagcatccgcttggaagccaagcacaaggaactggagtcgcacaagcgtcgcctggcgaatttccgcaatcaacagggggctaaccaaagggtccgctacaccaatccctatccagggtgatcgtcctcgcagcagcaacagcagcagcaacctcgctccgtgccccgacctcaattcgtggtgcgcgtcccacagccgcagcaacagcagagtcagcaagggactcgtgcgccccgtcctcctacgctagccgtgcagcctggtcaagtccgcagggacgttcaaggtcagcagcgtctgtgcttcaactgcttcgagcctgggcactttgcggataaatgcccaaagccgcggcgccagcaaggccaagcgcctccccgctccaacaacggtggtaaggatgtcattcggggtcgggtgaaccacgtgactgccgaggatgtgctgacgactccagacgtcatcgtgggtacgttcctcattcattccatccctgctaccattttgttcgactctggagcttcccactcgtttatatctatgccattcgtggggagaaatcagttgggggtagaaaggcttaggaaccctctgctcatcaccacccctggaggggttatgacagcaaagtaatatagccctgccgttcctatagaaattcagggaattccttttccctcggatctgattcttctagacaccaagaacttggatgtgatccttgggatgaattggttggctcaattccaaggagtagtggattgtgcaagacgcactgtcactctgtaccgagggccggaacaaccggttgttttctttgcacccccaacctctgtcggtagttcagaacttcatcagataggaatgtcagaaatccccatcgtcagagagttcggagacatgtttccggaagaactaccaggtatgccgccgaaacgagagattgagttccggatagatcttgctccaggaaccactccccagtacaagcgaccctaccgtatggcgtcaaatgaactggccgaagtcaagaaacagttgggagagttgaaagaaaaggggtatatacggccgagtacttccccctggggtgctcctgtgatttttgtggagaagaaagacatgacgaagaggatgtgcgttgacaacagagctctcaatgaagttactatcaaaaacaagtacccacttccccggatcgatgatctgttcgatcagcttaaaggtgccactgtattctccaagattgatcttcgttccggatatcaccaattgcgtattcgtgaagaagatatcccgaagaccgcattcaccacgcgatacggactgtatgaattcacggtgatgtcattcggtttaaccaatgctcctgccttcttcatgaacttaatgaacaaagtgttcatggaatacttggataagtttgttgtggttttcattgacgacattctggtgtactcacaatcagaggaagaccatcagcagcatctccgtctggtgttgggaaagttgcgggaacaccaattgtatgccaagctcagcaagtgtgagttctggttgtccgaagtcaagttcttagggcacatgatatctgctaaaggagttgctgtggatcccgaaacggtgaccgccgtcactgattggaagcaacccaagacagtcactcaggttcgcagctttttgggtttggcagaatactaccgaagattcatcaagaacttctccaaaatcgctcgacccatgacacagttgctgaagaaagaagaaaaatttgtgtggagcccgcaatgcgagaaggcattccaaactctcaaggaaaagctggtttcctcgccagtgttaatcttaccggatactcgcaaggacttcctggtgtactgtgacgcttcgcgccaaggattggggtgtgtgctcatgcaggaaggccacatggtagcctatgcctcccagcagcttcggccccatgaaggcaactaccctacccatgatttggagttggccgctgtggttcatgctctaaagatctggcgacactatctcattgggaatcgctgtgaaatatatactgatcataagagtttgaaatacatcttcactcagtcggatctgaatcttcggcagaggagatggttagaactcatcaaggattaggatgtgggaattcactatcatcctggtaagacaaacgtggtcgccgacgctctaagtcgaaaaagccgttgcaacactcttggcgtccgtggcattccaccaaaacttcatcaacagatggaagccctgaacctaagcatagttggtcgtggattcttggctacgctggaagccaagcctaccttgctcgatcaaatccgcgaggctcagaagaatgatccagatatgcatgggatcctcaagaatatgaaacagggtaaagccgctggtttcacagaggatgaacacggaaccctatggaacggaaatcgggtatgcgttccagacgacagggaacttaaacagttgatacttcaggaagctcacgaaagtccctattccatccatcctggcagcacgaagatgtacttggacttgaaagaaaaatattggtgggttagtatgaagcgggaaattgcagagttcgtggccctttatgatgtgtgccagcgtgtcaaggcagagcaccaacgaccggccggacttctccaacctctccaagtactagaatggaaatgggatgaaattgggatggatttcatcaccggacttccaaaaacccagggcggttatgattctatatgggtagtcgtggaccgactaaccaaggtagctcggttcattcccgtgaagaccacctatggagggaacaaactagctgaactttacttcgctaggatcgtgagtctccatggcgttcctaagaaaattgtatctgataggggaagccaattcacctctcacttctggaagaagctccaagaagagttgggtacccgattaaatttcagcaccgcgtatcacccgcagacagatggacagaccgagtgtctaaatcagatcctagaagatatgctccgtgcctgtattctagattttgggaagacctgggataagagtctcccctatgccgagttctcctacaataacagctaccaagccagcatacaaatggcaccctatgaagcgttgtatggccgcaaatgccggacaccgctattgtaggaccaagttggggaaagccaagtgttcgggactgatatcctgagagaagctgaagcgaaggtcagaaccattcgggataatctaaaggtggcacagtcccgacaggagagctatgcagataaccgacgccgtaacctggaatttgcagtggatgactttgtgtaccttagggtcacaccattgcggggtgtacacaggttccagacgaaagggaagctcgcatctcggtttgtgggtcctttccgtatcattgctcgacgcggagaagtcgcttaccagttggagctgcccgcctccttgggcaacgtgcatgatgtgttccatgtgtcgcaactcaagaaatgtcttcgagtgctatccgagcaggccgattcagagcaaattgaagttcgcgaaaacttgacctacatggagaggccagtgaaaatcctggacaccatggagcgcaggaccaggaaccgggtaatccgtttttgcaaggtccaatggagcaaccacgccgaggaagaagctacttgggagcgtgaaaacgagttgaaggcagcccatcccgatctcttcgccagttcttccgaatctcggggtcgagattccgtt

SEQ ID NO: 23160 - DNA, 6921 bp, Oryza sativa
  Clone ID: TF_OsC359_8402
aggtttcactgaaaggcagcaagccaaaggacctcatcgtccccagaagcatccccggcttttcctgggacggggattaatacactagcgttcgggaaaaggcaattttcccggtcgcgacaatatgggtagttgtggatcgattaaccaaggtagctcgatttattcctgtgaagaccacctatggagggaacaagctagctgaactctacttcgccaggatcgtgagtctccatggcgttcccaagaaaatcgtatctgatcggggaagccaattcacctctcacttttggaagaagctccaagaagagttgggtacccgattaaatttcagcaccgcctatcacccgcagacagatggacagaccgagcgtctaaatcagatcctagaagatatgcttcgcgcatgtgtactagatttcgggaagacctgggataagagtctcccctatgccgagttctcctacaataacagctatcaagccagcatacaaatggcaccatatgaagcgttgtatgggcgcaaatgtcggacaccgctattgtgggaccaagttggagaaagtcaagtgttcgggactgatatcctgagagaagctgaagctaaagtcagaatcattcgggataatctaaaggtggcacagtcccggcagaaaagttatgcagataaccgtcgccgtgacctggaattcgcagtggatgattttgtgtatcttcgagtcacgccattgcgaggtgtacacaggtttcagacgaaagggaagcttgcacctcggtatgtgggtcctttccgtatcgttgctcgacgcggagaagtcgcttaccagttggagctacccgcctccttgggcaacgtgcatgatgtgttccatgtgtcgcaactcaagaaatgccttcgagtgccatccgagcaggccgactcagagcaaattgaagttcgtgaagatttgacctacgtggagaggccagtgaaaatcctggacatcatggagcgcaggaccaggaaccgggtaatccgtttttgcaaggtccagtggagtaatcacgccgaagaagaagctacttgggagcgtgaagacgagcgtcggaatcgcgctcgcgccgctttcctctctctccgccgtcgccgacgagttccggttcgccgccgccgtcgctccggacttcctcccccctcggcgtcgcctccttcggcttcgccgcgtcgtcgtcgaccccgtccgctcctccgtttcgctcgccgaccgtcggagcgccgtcgtcctcgtcgtcccgaaccgcgccgccgccttcctccgcttcggccgccgttcccgtcgtcgccgtcgaccggggctgggctcggggtgcatggttttgatggtagcacctcggccatataaggaccggtcttcgggcctctgttgcaaagcactaccgtacttccacatgtctagtggggcaaatgaaggctacacgagctgcggcccgatggccggtagcgttacccgtcgtggtttggacatgactggcttcgtcttggagctgcgaggcatgtgcgtggtcttggggtatccacatggagtggattaccaggccaggccgctcccggagcaggagggtgaggatgcagagcctcacgctggttgggaggtcactgcagtgatcctctccggctctcccgagcggacttcgctggcagtcaccgcgggtggagattccttccccgccgcttgccagaacgccgctctcctcgccatcggcacccttcaccagcgctacccggacgagttgcagcactcgccctaccgctaccacgctcgtcgcggaggagcccgcgactacgccaccttccgagacgccagttcggaggatgacgctaccgtcgtgcatctggcacgcatggtggaggcgtacgacgcggctcgtatcgacttccatcagatggtgcgccgtggcatggtggagaacaacatgaagatcctggagctgcgccaagagaatctgcagctcaagaaggacctcgacgcagtggaggcgcagctgcatcagctcaagatcgcccagggagaggacagccgtcccaagcgtcgccgcgtctgccgcagccagaagatcaccgcccgcaagagcacctccaggcccgagcttgttcgtcagtccctggcgtggacctgcttcgtcgagacccctcgtgccgagcctgcgcccgtggttccccaggagggggaagcctccggcgttggtagctcggagggtgcgctgttgctcaccttccgtcctggcccgtcgcagcgctctccttctctgtttgctggttctgtgaggggttttcagatggtgacgaccaggagaaatgttaacaccggtgaaggtaaccaacccgaaggcagcaaccccaaccaccaaggcaatccacctccgccaccaccaccagacaccaacgccattctcacccagatcctcgcccaacaggccaacatgatgaatgctttcctccaccaccttcaaaacccgccacaacagaatgctcccccaccacctccccaacactctaaactcgccgagttcctccgcatccgcccacctaccttctctagctccaacaaccccgtggatgcgttggattggttgcatgccgtggggaagaagttagacactgtgcagtgcagtgatgaggagaaagtcatcttcgccgcccatcagctgcaggggcccgcatctctctggtgggaccacttccaggctacgcagccagagggacagccgatcacttgggcccgcttcaccgccgctttccggagaacccatgtgcccgctggagtcgtggctcttaagaaaagggaatttcgggagttgaagcaaggcaaccgctccgtgatggagtatttgcatgagttcaacaatctagcccgttatgccccggaggatgtgcgggaagatgaggagaagcaagagaagttcttggcaggaatggaccctgagctgtccgttcgtctagtctctggggactatcctgattctcaacgtctggtggacaagagcatccgcttggaagccaagcacaaggagctggagtcgcacaagcgccgcttggcgaatttccgcaatcaacagggtgctaaccagagggtccgctacaccaatccctacccagggggatcctcctcgcagcagcagcagcagcagcagcaacctcgctccgcgccccgacctcaattcgtggtgcgcgtcccacagcagcaacagcagcagaatcagcaggggactcgtgcgccccgtcctcctacgccaactgtgcagcctgttcaaggtcgcagggacgctcaaggtcagcagcgtctgtgcttcaactgcttcgagcccgggcactttgcggataaatgcccaaagccaaggcgtcagcaaggccaagcgcctccccgctccaacaacggcgggaaggatgtcattcggggtcgtgtgaatcacgtgacggccgaggacgtgctgacaactccagacgtcatcgttggtacgttcctcgttcattccatccctgctacaattttgttcgactctggagcttcccactcgtttatatctgtgccattcgtggggagaaatcagttgggggtagaaaggcttagaaaccctctgctcatcaccacccctggaggggttatgacagcaaagtactatagccctgccgtccctatagaaattcaggggattccttttccctcggatctgattctgctagacaccaagaacttggacgtgattcttgggatgaattggttggcccaattccaaggggtagtggattgcgcgaggcgcactgtcactctgtaccgagggccagaacagccggttgttttctttgcacctccaacctctgtcagaagttcagaactgcatcagataggtctgtcagaaatccccatagtcagagagttcggagacgtgtttccggaagaactacctggtatgccgcccaagcgagagattgagttccggatagatcttgctccaggaaccactcctctgcacaagcgaccctaccgtatggcagcaaatgaactagccgaagtaaagacacagttggaagaattgaaagaaaaggggtacatacgtccgagtacttccccatggggtgctcctgtgatctttgtagagaagaaagacaagacgaagaggatgtgcgttgactacagagctctcaatgaagtcaccatcaaaaacaagtaccctcttccccggatcgatgatctgttcgaccaactcaaaggtgccactgtattctccaagattgatcttcgttccggatatcaccaattacgtattcgtgaagaagatattccgaagaccgcattcactacgcgatacgggctgtatgaattcacggtgatgtcgttcggcttaaccaatgctcctgccttcttcatgaacttgatgaacaaagtgttcatggaatacttggataagttcgttgtggttttcatcgatgacattctgatatactcacaatcagaggaagaccatcagcaccatctccgtctggtattgggaaagctgcgggaacatcaattgtatgccaagctcagcaagtgtgagttctggttgtccgaagtcaaatttttggggcacgtgatatctgctaaaggagttgctgtggatcccgaaacagtgaccgccgtcaccgattggaagcaacccaagacagtcactcagattcgcagtttcttgggtttggcaggatactaccggaggttcatcgagaacttctccaaaatcgctcgacccatgacacagttgttgaagaaagaagagaagtttgtgtggagcccgcaatgcgagaaggcgttccaaactctcaaagaaaagctggtttcctcgccagtgttaatcttgccggatactcgcaaggatttcatggtgtactgtgatgcttcgcgccaaggattggggtgcgtgctcatgcaggacggtcatgtggtagcctatgcctcacgccagctacgacctcatgaaggcaactaccctacacatgacttggagttagcagcggtggttcatgctttaaaaatctggcggcactatctcattgggaaccgctgtgaaatatatactgatcataagagtttgaaatacatcttcacccagtcggatctgaatcttcggcaaaggagatggttagaactcatcaaggattatgatgtgggaattcactatcaccctggtaaggctaacgtggttgccgatgctctaagtcggaagagccattgcaatactctcaacgtccgaggcattccacccgagcttaatcaacagatggaagccctgaacctaaacatagttggtcgtggatttttggccgcgctagaagcccagcccaccttgctcgatcaaatccgcgaggctcagaagaatgatccggacatgcatggactcctcaagaatatgaaacagggtaaagccgctggtttcacagaggatgaacacggaaccttatggaacggaaagcgggtatgcgttccggatagcagagaacttaaacagctgatacttcaggaagctcacgaaagtccttattccattcacccgggcagtaccaagatgtacttagatttgaaggagaaatactggtgggttagcatgaagcgggaaattgcagagtttgtggctctatgtgatgtgtgccagcgtgtcaaggcagaacaccaacgaccggccggacttctccaacctctccaagtgccagaatggaaatgggatgaaattgggatggatttcatcaccggccttccaaaaacccaaggtgggtatgattctatatgggtaatagtggatcgattaaccaaggtagctcgattcattcctgtgaagaccacctatggagggaataaactagcggagctctacttcgctaggatcgtgagtctccatggcgttcccaagaaaatcgtatctgataggggaagccaattcacctctcacttttggaagaagctccaagaagagcttggtacccgactaaatttcagcaccgcatatcacccgcagacagatggacagaccgagcgtctaaatcagatcctagaagatatgctccgcgcatgtgtcctagatttcgggaagacttgggataagagtctcccctatgccgagttctcctacaataacagctaccaagccagcatacaaatggcaccatatgaagcgttgtacgggcgcaaatgccggacaccgctcctgtgggaccaagttggggaaagccaagtgttcgggactgatatcctgagagaagctgaagctaaagtcagaatcattcgggataatctaaaggtggcacagtctcggcagaaaagttatgcagataaccgtcgccgtgatctggaattcgcagtggatgactttgtgtatcttcgggtcacgccattgcgaggtgtgcacaggtttcagacaaaagggaagctcgcacctcggtatgtgggtcccttccgtatcactgctcgccgcggagaagtcgcctaccagctggagttgcccgcctccttgggcaacgtgcatgatgtgtttcatgtgtctcaactcaagaaatgtcttcgagtgccatccgagcaggccgactcagagcaaattgaagttcgcgaagacttgacctatgtggagaagccagtgaaaatcctggacgccatggagcgcaggaccaggaaccgagtaatccgtttttgcaaggtccagtggagcaaccacgccgaagaagaagctacttgggagcgtgaagacgagcttcgtcatcgtcatcccgaaccgcgccgccgcttccctccactccggccgccgttctcgtcgtcgtcgttgtcccggggtgagccgaagaccgccgttcgccttcccccttccctcctctctctcgggcgccgctccgccgcgccggtggtcgccggcggtgaccat

SEQ ID NO: 23161 - DNA, 4911 bp, Oryza sativa; identical to SEQ ID NO: 14310
  Clone ID: TF_OsC359_7886

SEQ ID NO: 23162 - DNA, 5029 bp, Oryza sativa
  Clone ID: TF_OsC359_5737
ttaaacggaatctcgaccccgagattcggaagaactggcgaagagatcgggatgggctgccttcagctcttcttcacgctcccaagtagcttcttcctcggcatggttgctccattggaccttgcaaaaacggattacccgattcctggtcctgcgctccatggtgtccaggattttcactggtctctccacgtaggtcaagtcttcgcgaacttcaatctgctctgagtcagcctgctcggacggcactcgaagacatttcttgagttgcgacacatggaacacatcatgcacgttgcccaaggaagcaggcagctccaattggtaagctacttctccgcgtcgagcagtgatgcggaaaggacccacgaatcgaggtgcgagcttcccttttgtctgaaacctgtgtacccctcgcaatggcgttacccggagatacacaaagtcatccactgcgaattccaggtcatggcgtcggttgtctgcataactcttctgccgagactgtgccacctttaggttttcccgaatggttctgaccgtagcttcggcttctctcaggatatcggtcccgaacacttggctttccccaacttggtcccacaatagcggtgtccgacatttgcgtccatacaacgcttcatagggtgccatttgtatgctggcttggtagctgttattgtaggagaactcggcataggggagactcttatcccaggttttcccgaaatctaggacacatgcgtgaagcatatcctcgaggatctggtttagacgctcggtttgaccatctgtctgcggatgatacgcggtgctgaaatttaatcgggtacccaactcttcttggagtttcttccaaaagtgagaggtgaactgacttccccgatcagatacgattttcttgggaacgccacgcagacttacgatcctggcgaaatagagttcagctagtttgtttcctccatatgtggtctttacaggaataaagcgagctactttggttagtcggtccacaactacccatatagaatcatatccaccttgggtttttggaagtccagtgataaaatccatcccaatttcatcccatttccattctggtatttggagaggttggagaagtccggccggtcgttgatgctctgctttgacacgctggcacacatcacaaagggccacgaactctgcaatttcccgcttcatactaacccaccagtatttctccttcaagtctaagtacatcctcgtactgccagggtggatggaataaggactttcgtgagcttcccgatttccgttccatagggtgccgtgttcatcctctgtgaaaccagcggctttaccatgtttcatattcttgaggagtccacgcatgtccggatcattcttctgagcctcgcggatttgatcgagcaaggtaggcttggcttccaacgcagccaagaatccgcgaccaactatgcttaggttcagggcttccatctgttgattaagttcgggtggaatgccacggacgttaagagtgttgcaatggctttttcgacttagagcgtcggcgaccacattggccttaccgggatgatagtggattcccacatcataatccttgatgagctctaaccatcttctcaccgcggctaactccaaatcatgggtagggtagttgccttcatgaggccgtaactggcgggaggcataggctaccacatgaccttcctgcatgagcacgcaccccagtccttggcgcgaagcgtcacaatacaccatgaagtctttgtgagtatccggcaagattaacactggcgaggaaaccagcttttctttgagtgttttgaacgccttctcgcattgcgggctccacacaaatttctcttctttcttcaacaactgtgtcataggtcgagcgattttggagaagttctcgatgaacctccggtagtatcctgccaaacctaagaaactgcgaatttgagtgactgtcttgggttgcttccaatcggtgacggcggtcactgtttcggggtccacagcgactcctttagcagatatcatgtgccctaagaatttgacttcggacaaccagaactcacacttgctaagcttggcatacaattgatgttcccgcaactttcccaacaccagacagagatgttgttgatggtcttcctctgattgcgagtacactagaatgtcgtcgatgaagaccacaacaaacttatctaagtactccatgaacactttgttcatcaagttcatgaagaaagcaggagcattagtcagaccgaacgacatcaccgtgaattcatacagcccgtatcgcatggtgaatgcagtcttcgggatatcttcttcacggatgcgcaactggtgatatccggagcgaagatcaattttggagaataccgtggcacctttaagctgatcgaacagatcatcgatccggggaagagggtacttgtttttgatagtaacttcattgagagctctgtagtcgacacacatcctctttgtcttgtctttcttctccacaaaaattacgggagcaccccagggggaagtgctcggacgtatatacccctttcctttcaactcttccaactgtttcttaacttcggccagttcatttgctgccatacggtagggtcgcttgtacagaggagtggttcctggagcaagatctatccggaactcaatctctcgcttgggcggcataccgggtagttcttccggaaacacgtctccgaactctctgacgatggggatttctgacagtcctatctgatgaagttctgaactactgacagaggttgggggtgcaaagaaaacaaccggttgttctggccctcggtacagagtgacagtgcgtcttgcacaatccactactccttggaattgagccaaccaattcatcccaaggatcacatccaagttcttggtgtctagaagaatcagatccgagggaaacggaattccctgaatttctatgggaatggcagggctataatacttcgctgtcataacccctccaggggtggtgatgagcatagggttcctaagcctttctacacccaactgatttctccccacgaatgtcacagatataaacgagtgggaagctccagagtcgaacaaaatggtagcagggatggaatggatgaggagcgtaccaacgatgacgtctggagttgtcagcacatcctcggcagtcacgtggttcacatgaccccgagcgacgtccttaccaccgttgttggggcggggaggcgcttggccttgctggcgtcgtggcttcgggcatttttccgcaaagtgcccgggttcgaagcagttgaagcacagacgctgctgaccttgtacgtctctgtggccttgaccaggctgcacagctggcgcaggaggacggggtgcacggggcccttgctggccctgaggttgctgcggctggggaacgcgcaccacaaattgaggtcggggcgcggagcgaggttgctgctgttgctgctgcgaggaggatccccctagatagggattggtgtagcggaccctttggttagccccctgttgattgcggaaattcgccaagcgacgcttgtgcgactccaattctttgtgcttggcctccaagaggatgctcttgtccactagacgttggaaatccggatagtccccggacaccagacgtacggacagctcagagtccattcccgccaagaacttctcttgcttttcctcatcttcccgaacgtcctccggggcgtaccgggccaggttgttaaactcatgcaaatactccatcacggagcggttgccttgcttcaactcccggaattcccttttcttaagggccatgactccggcaggcacatgggttctccggaaagcggcggtgaaacgggcccaggtgataggctgcccctcgggctgcgtagcctggaagtggtcccaccatagagatgcgggcccctgcagctggtgggtggcaaagatgactttctcctcatcgttgcactgcacagtgtctaacttcttccccactgcatgcaaccaatccaaggcatccacggggttattggagctggagaaggtaggcgggcgaatgcgaaggaactcggcgagcttagagtgttgcgggggtggtggtggaggtggagcattatgctgtggtggattttggatgtggtggaggaaagcagccgtcatgttggcttgctgggcgaggatttgggtgaggatggcgttggtgtctggtggtggtggtggaggcggaggaggaggtggaggcaacacccacgggggaaatcaaggccgacaacaccatcaaattcattaaagggatattttgcagatatgaattgcctcaccgcatcataacagataacggttcccagttcatcagcgccgatttccaggattactgcactggactgggactcaagatctgcttcgcctcggtttctcaccctcagagcaacggacaagtcgagagagcaaacggcatagtactacacgggatcaagacccgtgtctacgacaagctcatgtcacatgacaagaagtgggtcgaagaactcccctcggtactctgggccgtgcgcaccacaccgataacgtccaacaaggagacacccttctttcttgtgtacggctcagaagccatgctccctaccgagctacaacaccagagtacacgagtacagaagtactccggcgaggatcagaaggaacagcaaaacgacgacgtgaacctactcgaggaacctcgagaacgagttgccgtcagggcagctagttaccaacaagcccttcgccggtatcacgagaagcgcatccgagcacgcatactttcgatcggcgactacgtcctccggcgagttcaaagccaagcagggcgaaacaactctcacccaaatgggaaggaccgtacacgatcacacaagtcttgtggccaggcgcattcaagattgcagacggtgatggtcgcgagttagaaaattcttggaacattgaccaattgcgtaaattctatgta

SEQ ID NO: 23163 - DNA, 4497 bp, Oryza sativa
  Clone ID: TF_OsC1528_1659
atggctgctcttactgatgatgccaatggtgagggagcgagtcagcctcgcactggcccatattcttctggacgtgccgggggtagtcgccgtgctgccactgcagaacagcatgatgatgaaccatctcttgctcaactcctggctaatcagaaccgactttttgaaaggatggtagcgaactctgaaaacatgggggctgccatggcacagcaggccaatcaagcaccctccaagctagcagatgttcaacgaacacatccacctcatttctcctctgcggctgatccactcgcagcagatgattggcttcgtgatattgaaatcaagctgaacctttgccggtgtgatcctgtagagaaggctacctttgctgcttactacctgcaaggtgcagcagctgcttggtgggagacatacaagactctcattcctcctgacgagccaatcacttggactgttttccgtgagggattcaggtctgctcacatccctgctggtctcatggaaatcaaaaagaaagaatttcttaacttgaagcaaggaaacatgcccttcatggagttcatggaacgcttcaattatctgggtagatatgccgcttctgacttgaacactgaaacaaagaaggttgagctatgcagagatcgtcttgcacctgaactcaagcatgctcttgctgctcatgaaatcaccagcatgaagacactggttgcccttcgtgttgaatcaagtgaaaaggaagtggttgaagaccgtaagcgtaagtgggctgcaaagaaatttgctggcagcagcagttccactcggcctcgtcttgctccatctcctgcggttcgtcctatggcacctcagccacctcggcagatgtatgtgcctccacgtccgcaaactcagttagttcgtcaagttcctcgcgcagttcaagctgcgggagatgcatctcgtaatgccaatgtcacctgctacaattgcggcaagaaggggcattattctcctagctgtccttatccgaagactggaacatccggaccgtactcgcagggagcaccgcagcagcctcgtggtcctcctcaagttcagcctggacagcgtggagctcctgctgttcccaagccagctccaacttttggaaggggccggctcaaccatgtcactgcagaagaagcaaccgacgcacctggtgtcgtacttggtacatttcttgtgcactccattcccttaacagttctttttgattccggtgcaactcattcattcatgtcaaccttgaaagcaaaacaacttgacttgaaaacagaatttcttagcgatgctatgcgcatccaatctcctggatccaccatggtcaccaaacttctatgcaaaggtgtagaacttataatagacggggtaaagtttaaagctaacctcatattattagacaccttgggcctagatgtcattcttgggatggattggttaactaaacatgagggaaccattgattgtgctcatagaactgtaactcttcgtagcaccgatggtcaatttgttaggtttacctttgaacaaacctccacttcaaatcaaccctctatacaatctctctctataccggagttaaaatcagtacccatcgtgaatgaatattccgatgtgtttcctgacgaattaccagggatgcctccagatcgtgacattgaatttgtgatagatttaatccctgggacagcacctatagccaaaaggccatatcgaatgacttctgaaaatttgatggaattaaagaagaaactcaatgagcaattggctaaaggtttcattcgtcctagttcatctccttggggctgtccagtgttgtttgtaccaaagaaagatggaaccatgcgaatgtgcgtggattatcgacctctgaatgaagtcaccatcaaaaataaatatcctcttcctaggatcgatgatttatttgatcagttaaccggagctcgtgtcttctcaaaaattgatcttagattgggatattttcagcttaaaatcagaccggaggacattcctaaaaccgcattcacaactcgctacggtttatttgaatacaccgtagtctcttttggattaaccaatgctcctgcttctttcatgaatatgatgaataaaatcttcatggaatatcttgataaatttgtggtggtattcattgatgatatactcatctactccaagagtgaagaggaacatgcgcaacatttacgtatggtactcgataaactccgtgagcatcaactttatgccaaattctcaaaatgtgaattttggttaaaagaagttgaatttcttggtcatgtactttctgaaggtggtattgctgtgaatccaagaaatgtacagaacgtacttaattggaagcaaccacaaaatgttcctgaaattagaagttttcttggactagctggttactaccgtcgtttcattgaaaatttctccaaaattgctagacccttgactcaacttcttaaaaaagaaaataaattcatatggtctgaggcatgtgaaacaagttttcatgaacttaaaagaaggctcacaacagccccagtgctagtgatgcctgatgttcttaaaccttttcatgtttactgcgatgcctcacatcatggtctcggttgtgtactgatgcaagaaggaaaagtagtggcttatgcttctcgtcagttacgaccacacgagatcaattatccaactcatgacttacagctagcagctgtggtgcatgctctaaagatttggcgccattatttggtcagtaatcggtgcgaaatctttaccgatcataagagtttgaaatatttctttacccaaccagatctgaacctaaggcaaagaagatggttagaactcattaaagattatgatctcggtattcattatcatcccggtaaagcaaatgtagtagctgatactttaagccggaagctacatcaccttgccgttattgagacaataaatcagccatcgttgtcctctgaatttcagaaattgaatttgggattggtagaggatggttatgttgctgcactagcattacaacctactctctattctcaaattaaagctgctcagtccattgatgaggaagtagctgaaattatgaaagaaatcaattcaaagccacaatctatatacactcttaattctgatggtatggttatgcttggcaaacgaatctttgttcccaataatcaacaccttcgagaaaccattcttgatgaagcacatcaaacacctttgtctatccatccgggttgcactaagatgtaccaggatattcgcactcaatattggtggcctagcctgaggcgtgacatagcagcatatgttgcaatttgcgacgtgtgccaacgtgtcaaagctgaacatcaacgacccgctgggctactccaacctttgcaagtacctgaatggaaatttgatgaagttggaatggattttattaccggtcttcctaaaacacccaatggacatgattctatatgggttattatggatcgactgactaaagtggctcacttcattccggtgcatgtgacttatggtggagccaagctagcagagttatatttgactcatattgtaaggcttcatggcgtaccaaaagtcatagtatccgatcgaggaacacaatttacatccagattttggaaaaatttacatgaacttctcggaaccaaattgttcctcagcaccgcctttcatccacaaacaggaggtcaagtggaaagaacaaaccaaatacttgaagacatgctccgagcttgtgtgcttgaacataacactaactgggagaaatgtctatcttttgctgaattctcctacaacaatagctttcaatcaagtatccaaatgtcaccatttgaagctctttatgggagaaaatgtaggactcctctttattggtccgaagtaggagaaagacaattctttggacctgctatcattaatgaagctgaaaagaatgtcactcttattcgggaccgattaaaagaagctcaaactcgtcaaaagagctactctgatcgtcgtcgacgagagctaagttttgatgttggtgaccatgtctatcttaaagtatcacccatgagaggtactcaacgattccaaattcatggcaagcttgctccacgatatattgggccataccaaataatatctaagcgtggacaagtagcctatcaattggaattgccatttcagttgtctaatatacatgatgtattccatgtttctcaacttaagaaatgtcttcgaactccgattgagcacacctcacttgaagacattaatctaaagccaaatctctcctatcaagaatacccaattcgtattctcgaagaaagtgaacggcgtacccgcaaaagctccatcaagatacttcgagtacaatggagcaatcatactgcggatgaagccacatgggaacgagaggaccgacttaaggccgaattccctagtttcttctag

SEQ ID NO: 23164 - DNA, 4485 bp, Oryza sativa; identical to SEQ ID NO: 14320
  Clone ID: TF_OsC359_6268

SEQ ID NO: 23165 - DNA, 3749 bp, Oryza sativa
  Clone ID: TF_OsC65158_1
atataattaagagatataagaaggtagtaatgaagaaaaaagtagaaatggaaacctctaatatggcggccccccttaatcaggggccaagtttttttttttttttttttttttttttttttttttttttttagagggaaaaccacaattccattataaataagaaaagaatacaagattttgacatatatccaccaaaactgaaatttaacctagaacattattatcttaaaaatacaaaacttgttaaacatattcccaaccttagggggctaaaataatgagtgccacaaatgaaaaacggcagtcagccaccagtatctgatgaactgacaattctattgtacaacacatgcctcttagaacctttgatgctataacagcttgtcgatcacgagactatgcaaattgctctatatatatctctaagctgaggttctctgttttactaggctgaggttctctattttagtacgcaggttttctaacaacaaaaccacaggtacaacaaacagaggttgggcttagtgtcgcccatgacctggtggaggtctcctgttagaattcctatctaaggtattgtaacggttctgcgactgctgtggtcgtgaattaggccttgcaggaggtgccccacccccataaggccctgacccagcataggagccataaggttgttgctgctgctgctgccactgctgaccacctccatacggtgcaggctggtagctcctaccataccccccagcatatggtgggggttgcgcataccgtccaggacctgctgatggagcagaatgtgattgatacgagtttccaccgctctgatggtatggtggaacccttcctcttgaatcatggtggttgtctcttgcatatgggtaccttccatggttatctcgtccatactgagaaggcccagacctatcgttctgataatgacctgatgatgatgcataagctggtggtacctgaccatttggtagatcaccaggaacatgccagccaggagcaggctgctccatccttggtggaatcccatttggataaggcatgccattcattatggtttgatatggcatcgatggggtattgtattgtccgccactccgagcattcaagctgttcaccacaagtcggtgggcagcttccccaagttggcggccagatattgctccagctgggttttgcctgttgctgttttcataaggcctcctgttgttattatcatgaggcctcctaccactgtcttcatgccatagcacaggtggtggtttcaggtcagtagcttcaacagtcttcttgggtatgattacaccaacaggtggacgagcgatgtgcttatgagaatccggaagcttgtagattgtacatatcacttgattgtccatgatatcctccaacccatcaacaggagacctgaagacaggagggcacggatccccactacaaagtgagatgtaaccattcattcctccactgcacaaaacaaggcagctagaagaaggatcaatcttttctttaatttcatttcgctctctgtcaggtaggtgtccaaatttgctgttgagggagtagatataaggcgaaagtggatgggagccattcacaaaaagcatattgaacatgatactgtttctccttgcttcttcaggcgtcaaagtatgctcaacttttttaatttcagctagcaaccgggcttcatcaatgaagggcagttttgctatcccctgccatgaatacctcttcccattcatatctacttcaaaatcagttggataaaaatcaattattggtgaatttgcatctgtcatcaattgccgatactgtacagggagtgcatgggagctcgcagctgggaaaactcccataagttgatcaaacggtttgaatggtgacccaagttcaaaagttatattgagttgacctagaccactcaaatccgaagcaaaaggagcataatggtaagggtaaaaccattgccacgagcagacaccttcataatagtagtgcattacccaacacaaaccttcagtatatttcagaacgacatctctgcgtatttcttcaatctgcccgggtgttcttgctccaaacttctcttcatagtacctttccctccatcctggttctccaagttttatcttgtcctcctctggattttcagaattaaaaacatcagatttctcacgaagtgcatctttaagcattgtcttcaaatcttccttgttttcgcgttcctgtgcttcaaggtcattttcagcttcaacaatagcagccgcaatgcttgaacctgacgatgatacccgtgcagctttccgagcacgactattttttcccccattgtttttgtcagatccattttgttcatatggtgaaggcacaggtccagatgcaaggcgagacccttggaagcgtgcaacaggtacaataagatcatccctgacatggggatccaggtcatcccctcgttttgcttgggccttttctcgttttatcctttcagcttgacgctgatgcaaacgagctcttttctgaaatattttatcctcgtaggagccaactgcttgaataaagtgttcaactttattcagatccggcgtgcaagcatcagttagatagccacccatggaaggaaattccttcttgtatacagccattagcaagttaatagctccctcacgaatctctaatgttggcatatgtggaagaaaatcattgccaacaaaaaaacacatgaagatgaaatcatcaacgatgcgttcaaagtcaatcgggaaaggtggattctgcattctgaactcatattctaagtactcccggagggtccatatattcaagaactggtaaggtttctttggaacaatagcttcacctttttcatcaaactccccagcttttctcttaacctttccttcacagtttgctgctagatgtccaacctgaccacacaagaagcatttgtcctgctgtccaggtgtataaactacctctctcagtatagagaaatgtacttcgtgtgttgcaagagctaacatgatcaggtctgcatccaggccatacaaacaatggcgagtatttgggttaaatccagggagattccgttgaccgcgaatgtaggacataattttatgttccccttcaccaggaacattggcatcagaaagaataactttaacttgtttccatccaggatcataattcaacctgagatggatgtagtactgcaaagcaatcgataaaacagccataaactctgttcctggagtaataacgttagaatcacatgtttgagattgctgttttggtggaagttttctgccttccctctcaaactcttcacgcaacctctcttcttctgcggccgcatcagcagcatcttttgcagctctgaatcgtctagagcgttgctggttcatcttggcacgaggagcaacaccatcaatggccatatacataagcttccgagggcgaaccatgacaaatagcctatcgatataatcaaacatgcactggaaaacctcagcgaatgttgtcggagagggcctatcctcggggtggaagcaggggtgaatgatcccgttcatgtcgaggtagaggttgtcgaactcgaggccgttggggttgggcttggaggtgtcgacgggcaccttgacgccctcgatctccaccgcctcctcctccaccacgtccaccaccaccatcgggtacttctccgccagccaccggtagaacgccggcacacccat

SEQ ID NO: 23166 - DNA, 5376 bp, Oryza sativa; identical to SEQ ID NO: 14325
  Clone ID: TF_OsC359_6599

SEQ ID NO: 23167 - DNA, 1766 bp, Oryza sativa
  Clone ID: TF_OsC1528_2334
tcaccgcaagccgcccgacgagtctgcgccagacccgccgccaccaaaagcaattgctatcccagcaaccgcttcctcctggactacacctgcaacagtgcaccctcgcagcttgtaaagatgcgactccaccttctctccagtcatcatagtcatcttgcccttcatgatctcaatggtcttcctattccgattaccgcggaatattaacccttcttcatgcaaggttccaagcgaaatcagattcctctttagccctggtacatgcctgactccttgaagaacatgttcacctccatcttctagcttgattttgacttcacctactcccacggccggataacttgtgtcatcgcctaagtagacaaaaccaaactcaccagacttatatgaagagaaccactccttccttggcgtcacatgaaacgagctagctgaatccaatatccacgcttctgcatccttagactgtgcacttgacatcgtgagaagatcacaaccatcgctatccgagtcatttgaagaagtcgctacattagccttagcttttcccttcagtgttggacactcccttcttatatgcccccactcatcacatctgaagcacttcaccatcttcttctttttgttcttctttaccttatgcccagcatgatcttctttgactagcaaaccctctgcttgagatgtttcaccctctttgttctttctcatcacatgctcatacgattcaggtaatgaacacaaaagaactatggccttgtcttcatcgtcaacttccacatccatcttcacaagatcagtgactagttgattgaaaacgttcacatgtgctgtcagatccgccccttcctgcatctttagcccatacaacttctgcttcagataccgtttattggtcagagtcttggacataaactgagcttccaacttttcccaaattatctttggtgaggtctcctccatcacatggtacatgatctgatctgaaagacatcgccttattgtcgcagccgcctgcaactgcatctcctcacaatcgtcatcctccatcttggccggtttgacacccttcaaagcctttgaaacttcttgttgagctaacaaatctttgaccctagtttgccacaagccaaaatttccgaagccgtcaaacttcaccaaatcaaatttcatacatgtcggcgccaacttgccaacccgcgacctgactggtctatcgccaccagaatactcgcctttctcagtaccgtctgtattcgtcttcacaatctcgtcttgtgatccgatcgtgtcagcctggcttggtccacccgcacccgtgcgccttcttcccaagaactcgtgcaatttgcgtcgtcgccatacgcgctgtccgtacaccgtacgcaccgcagtcgcaaccctcgtgttcaccgtccacgacctcatcgtcatcggccctccacgtccgccgcgccgtgccaggctcgctggcttcgcccttccgtcagtagcctccctgccgccgcggatccacattcaccgcgtgcgtcgggtgcgccgtccatggcgctacccctccaatctctccggtcgccttcggccacgcccggccccgtcttccggtcacgttccgccatcgccggtctgatcgcgagcgaggtcgccgcctccgcaacatcctcgttgtcgccatcgatctcatcgccacggctgacgatctcctgtcgatgcgcgatccccacctcgtgtttcctcctccacatgtcttcttgatccaatgc

SEQ ID NO: 23168 - DNA, 1389 bp, Oryza sativa; identical to SEQ ID NO: 14333
  Clone ID: TF_OsC359_5686

SEQ ID NO: 23169 - DNA, 6339 bp, Oryza sativa; identical to SEQ ID NO: 14334
  Clone ID: TF_OsC91_1942

SEQ ID NO: 23170 - DNA, 672 bp, Oryza sativa
  Clone ID: TF_OsC547_335
gcttgcagaaggtaatccagtgagcccacatgagatcaaaatgattggttacaccgagagtctggataagcttggctttccccttagccgagagttggctactgatttgattctccagtcgctccctcctagctttgagccgttcataatgaatttcaacatgaacaacctgaacagaaccttggctgaagtgcatgggatgctaaagactgccgaggaaagcattaagaaaaactccaaccatgtgatggttatgcataagcgcaaacccaacaacaagaagagtggtcaaaagagaaagctaaactctgatgagatcacgagtactggcaactctaagaccaaggttcaaaagacagggcccgctaaggatacagagtgcttcttttgcaaggagacaggtcactggaagaggaactgtaggaaatacctagagcacctcaagcagatgcagcaggatggaaagagttccaccttaggtattaatgttatagaaattaatcttgctacttcctctactgattcttgggtatttgatagcagtttttcaatgaaggacttaggggaagcagtatatattctgggcataaggatctatagagatagatcaaataggctaattggattaagccagagtacatacattgacaaggtgttgaagaggctcaacat

SEQ ID NO: 23171 - DNA, 1382 bp, Oryza sativa
  Clone ID: TF_OsC93807_1
atgctgctgcgtcttccgtgcgcgcgcggccccgcgccggcggccgccgcccggtggagacccccggggcgggcggcgcggacggcaccacgtctcggccgagggcacgccgccgcttcgtccgccgacggcagcggcgctccgagctctccgctttttgttctctgccattcccaagctctgaccctggcgttgccgccgcagtccctccactacgactacgatcctttggccgacctccttggaccagacgtcgacccgacctcatcccaaagatctttcaatgccggcgtcatcttggtgacttggctaatttggaaagagcacaatgagtctttgaggggcgtgcagtctctccggaatactgctccagttgcagagaaggggaagctgaggtcctgggttggtccaaatgggcaatactatcgtgagctgccttgccctagctgtcgaggtagaggatacactccttgcaaacagtgtgggatagacagatccagtttggactgccctatgtgcaatggcaagggcattagggagtgtgtgcaatgtgctggagagtgtgttatatggcaagaatctattgatgagcaaccatgggagaaagttcgttccagttctcccttgaaagtaaaagaggatgatgaagtcgacaaactggagataaagattaacacatcaaaaagatcaaggcgtacttacccatctccatcccctgaagttgccctgaagattagcagatctttaagaagtctgaatgctaaaacaggactgtttactaagcatatgaagattatacaccaagaccccaaattgcatgcacaaagggttgctgcaatcaaaaaaacaaaaggtactgctgctgcaagaaagcatgcatctgaaactcaaaaggcattcttcagcaatcccgagaatcggcttaagagaagcattgccatgaaaggggtgaaattcttctgcagcaaatgtgggcaagaaggtcataggagcttctattgcccaacagtgagagaaatttcaggcagagcgcatttcagatgccgattatgtgggggaaagggtcataatagccgaacatgtggaaagccaaagtcagagaatgagtgtcaacgacaacctcggcactgcagccaatgtggtgaaagggggcacaaccgtcgtaactgtcccagatccaccaccgttgaggttgaggatgtcaagatttactcagagtaaaaacaagataatgttcatagttcagggatttattcatgtagtttctgctcggcaaaggggcacaataggcgtacatgcccgaaaagaaaggctagcatagggcagcagaaagattgaaatatacatgttaatccacatagcaatcttatggtgtttgctgg

SEQ ID NO: 23172 - DNA, 456 bp, Oryza sativa
  Clone ID: TF_jC-osroLIB3475021f01a1
aagttaccatataagtaagtatatattgatacatctttataggcgacataaataccatacatgatccataaacagaaggttccaattacgacctaacttaatcctggggttacttcatgtaagaagtgattaacaaagcagatgatggacaaacaccgtaggagcccacctcttgctgccacagacaccacaagtagtatcaggtgcccaatactatagcatattgcataaaccctaaaccctaaacctatttacatggcagccatgggagagtcaatcattaagcagaagtaggccattactcattaagcctagcttctgatggtcctgtcacattgccaaaatgataccgatcatatgcttcttaacacccctcttgtgtcatcaagttccagggcaattacctctccagtgcccaagcttgccgcagttgtagcaaggagagttaagtgggct

SEQ ID NO: 23173 - DNA, 5112 bp, Oryza sativa
  Clone ID: TF_OsC359_7398
atggtgaagacaaggaatgatccccgtgactccagcgacgccaggggcagcgaagagcagaccgatggagctcatgtcagtggtgcatctgacagcagttcatctccaccgctcgggaacccaacggtcactcaaatgatgacaatgatgatgcaacagatgcagcaacatcaccatcaggtgttgcaacaggtgcagcagaaccagcggtttgctcctccaccatcacacctgtccaaactgttagactttcttcgtatccagccacccactttctcaagcaccaccaacccaatggaggccaacgactggctccgtgttgttgagaagaagctgaaccttttgcaatgcaacgaccgagagaaggttgcttttgctacacatcaattgcaaggtcctgcttctgcctggtgggataactacgtggtgacccgtccagatgcaacgaaggttacttgggtagagttttgtcaaaactttaggaaggcacagattcctgaagggattatggcacaacagaagagggagttccgtgcattgcaacaaggaaccagaacggttacagagtacctgcacgagttcaaccgcctcgcgcactacgctcctgaggacgtgcgcaccgatgctgagaagcaggagaagtttttgtttgggctcgacgatgaattgaccaaccagctaatctccggagtctatgaggactttgagaagcttgtggacaaggctatccaccaggaagagcaacgcaacaaaatggaccgaaaaagaaaggcagctcagatcagctttcctcaggggaacaatcagaagcctcgcttcatgacgggacagctaggtgggccttccaccctgatcgtctgtcagcaccgtccctatcacccgagtaacttcaacaacgattacaacggtggcagtcacaacaacagtaagcagcacaaccacaactcgactccacccccactaatggcaccagctcagtcagatccgccagctgtgtcagctcagtcagaacaacccaagaagggggctgtaggaaagccaggaccctgcttcaactgtggcaagcacggccactttgctagcaagtgttcgaagctgaatcgcactagacccaggttcatccaggcccgcgccaatcatgtgtctgcagaggaagcacaggcagcatcagatgtcgtgctgggcacgtttccagtgaactcatatccagcaacagttctttttgattcgggtgcctcgcattctttcatttccaagagatttgctgggacacatggattatcggtaatggaacttaaaataccgatgcaggttcatacctctggaaatgacatgaagacatcacactattgcccctcagtgactatagagatcaagaggtcacaatttctatccaacctcatccttctcgaatccaaagacctggatgtcattctcggaatggattggttgaccagacacaagggggtgattgactgcgcaggccgcaccatcaccctaaccaacgacaaaggggagaagatcaccttccgttctccagtgtcacagaagtccgtagcgagtctgaatcaggctgctattgagggtcagacagaaacagtggagaaaagtcccaggaagttggaggatattcctatagtacaagaatatcctgaggtatttcctgaagacctcactacaatgccaccgaagagagaaatcgagttccgaattgatctggcacccggaactgctccaatttacaagaggccgtacagaatggcagctaatgagctagcagaggtcaaaaagcaagttgatgaacagctgcagaaagggtacattcgaccgagtacttcaccttggggtgctccggttatctttgtggagaagaaagacaagactaagaggatgtgcgttgattatcgggcccttaatgaggtcacaatcaagaacaaatatccgttgccaagaattgatgacctgtttgatcagctaaaaggagctaaggtgttttccaagatagacctgcgattaggctatcatcagttgagaattcgggaagaggatattcccaagacagccttcatcactcggtatgggttgtttgagtgcacggttatgtcatttggactcaccaatgcaccggctttcttcatgaacttgatgaacaaagtgtttatggagtttcttgacaagtttgtcgtggtattcattgacgacatacttgtgtattcaaaatcagaagaggaacatgagcatcatcttcgtctggtactcgagaaattgaaggagcaccagttatatgccaagtttagcaagtgtgacttctggttatcggaggtcaaatttctgggtcacgtcatttctgctcaaggcgtggcagtggatccatcaaatgtggaatcagttacaaagtggaccccaccaaagacagtttctcaaatccggagttttcttggacttgcgggctattaccgtcggttcatcgaaaatttctccaagattgccaggcccatgacacagttgctaaagaaagatgaaaaattcaagtggtcagctgagtgcaaccaaagttttgaagaactcaagaagaggttagtctctgcaccagttctaattttgccagatcagacaaaagacttccaagtctactgtgatgcatctcgccaagggttgggatgtgtgttgatgcaagaaggcagagtggtcgcatacgcttcgcgacagttgcgtccacaagagaccaattaccccactcatgaccttgagttggcagcagtggttcatgctctgaaaatctggcggcactatcttattggcaaccgctgtgaagtatacactgatcacaagagtctgaagtacatcttcactcagcctgacttgaatctccgacagcgaagatggctggagttaattaaagattatgacatggggatacattatcatccaggcaaagcaaatgtggtagcagatgctttgagcaggaaaagctattgcaatgccttatgcactgaagacatgtgtggcaaattgcagcaagatcttgagcacctaaatttgggcatcgtggaacacgggtacgtagctgccctagaggcacggcctacgctcgtggatcaagtcagagcagctcaagtaaatgatcctgaaatagctgagctgaaaaagaatatgagggttggaaaagctcgagatttccatgaggatgagcatggcacaatctggttgggagaaagattgtgtgtgcctgacgacaaagaactgaaggatctcatactcacagaagctcatcaaactcagtattcaattcatcccggcagtactaaaatgtaccaggacctcaaagagaaattctggtgggtcagcatgagaagagagatagccgaattcgtcgcactttgcgatgtttgtcagcgagtcaaagcagaacatcagaggcccgcaggactgctacaaccccttcagatcccggaatggaaatgggaagaaatcggaatggatttcataacaggtttgcccaggacatcgtcggggcacgattcaatctgggtggtcgtggatcgactcaccaaagttgctcatttcattccagtacacactacctatactggaaaaaggttggcagagctttatctttcaagaatcatgtgtttgcatggggtacctaagaagattgtatctgatcgaggaagtcaattcacttcaaagttctggcagaaactgcaagaagaattggggactcgtttgaatttcagcacggcttatcatccgcaaacagatggtcagaccgagcgagtaaatcaaatcttggaagatatgttgagagcttgtgcacttgactttggtggagcctgggataaaagtctaccgtatgcggaattctcttacaacaacagctatcagtccagtttgcaaatggcaccgtttgaagcattgtacggacgaaagtgctgcacaccacttttctgggatcaaacaggtgagcgccaactgtttgggacagaagtgttaaccgaagcagaggagaaagtcaggaccgtcagggaaagactgcgaatcgcccagtctcggcagaagagttatgctgataaccgccgaagagagcttactttcgaagcaggggattatgtgtaccttcgtgtcactccgctccggggagtacaccggttccagacgaaaggcaaattggcaccacgctttgtgggaccatacaggattttggaacgcagaggtgaagtcgcttaccagctagagcttccatctaatatggttggtatccacgatgtgtttcatgtatctcaattgaagaagtgtttgagggtacctaaggaacaagctagctcagagcacattgacatccaggaagatctgacttatgtggagaagccgattcgtatcctcgagaccagtgagagaaggaccagaaacaaggtgatcaggttttgcaaagttcagtggagccaccactcggaagaagaggccacctgggaaagagccgctcatccgcacctctttgccaactcttccgaatctcggggtcgagattccgtttaaggggggtaggtttgtctcgccctgaagttcccctcccttgctctcccctccccgaagtccatcccacctcccctctcctcccgggtgccgacaggtggggcccacctgtcggtcgtccctaacctccggcagccgccaccatccgccgccgaaaccgccgcccacgccgccgcttcctccgcatccgcgccctactccgcgcccacacgtccccacgtcgccgccccacgccctgccctctcccgtccgcgcgcgcgtccgcacggacgggattcgatttgaatcctctccccctctctctcctcctccacctctccacgtcgtcgccgcggaaccgccgctcccggccacgtccggcctccccacctctatataaccgaccaccgcgcctctctccacctttttccctctttcgccgtccgcccccgagctccctatcgcccccgccatcggcgccgccgcgtccgccatcccgaggtccacctcgtccgccgttctcccgtccaattccatcgccggagctcgcatctcctcgcactccggtgagcttccaccatagctgccgccgtcggccat

SEQ ID NO: 23174 - DNA, 4428 bp, Oryza sativa
  Clone ID: TF_OsC1713_4193
tcactcttgtggaggagaaggaggacgcaccaaagtggaaggataaggagcatcatgactacgatgatacacaaatgcttgggagctctccaacatttggactcgagaatctaatgtacccactctagtgtgcaatctccccacggaagcattcaagtctccaacatcggtgcgcaagccacgaacatcctcatgcaaagcttcatgcccggtagacaagcgttgaatgctttcacttagggtattaatagctccaagtaccgggttgaagtactcgttgggttgcattccaaaataagcatactgtggatggaagaaagtatttggatcatacccaggaggaggaggaggaagaggtgctgagcttgagctagctccaggatgagaggagggcgccgccctaggagcacagggagctccaagctgaaggcggggcttgtactgcttgtgcttcttcaaattttgcccagcagccccaagcttgtcttgaatcaacctcatgatgtaaggggcataatagattccctgagtgaaggtccccttggagatggcaatctcttgcatcatgagagacacaatgtcgaactgacggccctgaatgattgcatcgatgacgtgccaagccacccccctaatgtcatcattgttgccaaggcgagggaggatggtagctctcacaatcctgttaaccacactggggatagtcctcaagccggcaaccttcccatgtgtgtaccgcactccatcttcataaaactgagagagatagtctatggagagcagattatgggtgtgcttctcatgcaagtcatctccaaagtccaagcgaatattgaggagccgccggaattgcctcctagagatagaacagtggagggtgtcggacatccacttcatctcactatagtccccagccacccacactgtaacataaaactgccggatcaaatcttcattgtagtcttgcttgagggtcacaatccagtcaatgccaacagtcttgaagagatcctgctcatacacagacttctggaaagcggtgtgaaaacggggatccggggtgtcccgaggcctcaaaaactgatcatggtgcctcaagatggtatactgcgatggattcctcatgttcacaacaaactggatggagggatcaatgtgcatattatcacttccttcatcctcatcctctccacttccactgttatcatctccactagcctcctcactagccccctcaacatttgcctcaacctcttcatcactttgagcataatcatctccgctcgattcctcaggctcactcacggcatccggagtgggtgcacgacgaccatggcaagtgcggggaggcatcactccctcattaaggtcgagatgcccgttggttgccataggtgtcttgatgggcttcgcatcctccaagccagacctcttgagtagatccttgatgtacttggtttggctcacgaacgtcccatccttgagttgcttgatttgaagtccaaggaagaagctcaactctccaatcgtggacatctcaaattccctagatatcatatcaccaaattccttgcaaaatacctcattagtagaaccgaatatgatgtcatcaacataaatttgacacacaaagaaatcatcaccaatgatttttgtgaaaagggtggtgtcaacttttccaattttgaaatcctttgacaaaagaaaatctctcaatctttcataccaagcccaaggagcttgttttaaaccataaagagcttttgagagtttataaacatggttaggatttttaggatcttcaaaaccgggaggttgttcaacaaagacaagttcggcaattttaccatttagaaaagcacttttcacatccatttgaaatagttttatatcaaagcatgatgcaaatgcaagaaggatgcgaataacctcaagtcttgccacgggggcaaaagtttcaccaaagtccaaaccttcaacttgtgtaaaaccttgtgccaccaatcttgccttgtttctcaccaccaacccgttctcatcttgtttgttcctaaagacccactttgtccctatgacattgtggtttctaggtctttcaaccaaagtccacaccttgtttcttgcaaaattgttgagctcttcatgcatagcattcatccaatccggatcacaaagagcttcatctatatgttttggctcaagacaagaaacaaacgagtaatgttcacaaatcgaagcgacacgagatcgagtttgaacacccttactaatgtcgcccaacacttggtcaattgggtgatccttggaaagagcggtgtgtatcctcggtggcataggtggatcttgtgccttctcctcctccacttcaacttgagcttgacttggcgtagcggaagtagatggctcatcttgagtggaggtggatggcttgtcttccacttcaataggcttgacatctccaattgacatgttcttcatagctctcatcaagccttcatcacctttgttcttgttgtagacccggtatgccttgctatttgaagcataacctataagaaacccttcatcacaccgactttcaaatttggttaatctaacaccctttcctttactattgtctccaaatgtcactttttcttgttctttccctccttcttcaaatgtggtgaacatagctctatcaccggtcatgtgttgagtgcatccactatcaagcacccaatggcttccaccagtgcggtagttcaccactgagtataggggaacccacatatctagcaacaatgctaccattatgagccgtcccttgaagcacctctccaaactcttgttgagcttggccacttgctccttaagctcattgttctcaacaacaagtgaggcatcataaatagaaatacaagagctagagctagagctaggcatatccacaggatcatcacaagaggtagaaatgctagatgatgcaacatgagcaatatggcaagtagcactatcatcaagcaaatcacaagatatgccaacatcaatgagagctccatgttgagtagtgaaaaggaggttttcatgagctttcttaagcttctcatgagaaatggtgagtctctcatgagaggtctttagctcctcatacaagatctctaaagaagcatgatccttctttagggccttgaagttgacaatctccttttcactataagcatggaactcctcaaacatactcacaagctcatcataggaaacatcatcacaatcatcatcactctcactatcactaagagatgttaccttagaggagccctttgccatgagacaaattggagcgaacaatgatggagcctccttgatggcaacaacggccatcttcttcttcttggagcttgcatcatcaccaccttcttcctcggacccggatgaagcggagctctcctcatttgagtcccattccccgatgaatgcctcaatcttcttgccttccttcttgagcttcttcatgagcttgtagcctccactctttttcttggatgacttgtctccatcatcatccttggaagagcacttggaagcaaagtgtcccttctcaccacactcaaagcacttcaagttggagagagtcttgttgggtcttttatttcttctcctatttgagttggagccccttcctctctcctttctccttcccaagagatcattgaaccttctatcaagaagggctatctcttcctccaagtcctcattgacttcattcaccttgcccttgcccttatcttcaacttcggcttggagagcaatgcacttcttggaaggtgaggcttcctccatctccttcttcttcaacttgtacatgtcattggtgttgatcttccccaagaggcttgcgggtgtcatccttgacatgtcggagttgatgagcatggtgacaagggtctcatacttctccggtagagccctaagcatcttttgggcaacctcaagatcagtgtagtttgccccaagccccttgagatcattcacaatgacattgagcctcccatacatgtcattcacactctcatgaggcaacatggagaatgtctcatattggatcttgaggaaatgaagcttggcatccttgtactcgcttgtgccctcatggatctccgccaacttgttccaaatctcatatgcggtctcaaggttgctcactctatcgaactcctcttgactcaaagagttgaacaaagcattcatggcttgggcattgagttggaggttgcggtgatcaatctccgtcaagggcgtgccggtgatagcaaagtctacatccacaatactccaaatatggaagctcatagctttgaggtgagtagacattttaattttccaagtagagtagtttgtgccattaaacatgggagccttccctacatggttcacctcgttcgacat

SEQ ID NO: 23175 - DNA, 3601 bp, Oryza sativa
  Clone ID: TF_OsC359_6606
agcgtgccccgccgaagccgtccgttccgccgagccgccgccgccgcggtgacgtcatcgctgacgtcatcggggtcgtccgccgtgagccggtcgtggacccgatcgatctcggccgtccatcttggatcgattccgtcgtttccggagagtccgttttcgccggagaagagtttgaagagttccaaggccagcaaggcaactcctggtttggaatggtatattcctggtttggagatagaactgtgcagccgggatggttgttcagaatggttgggcctatgcaacaggatgccgcgctacaagcctgagtacttgtttggtgttgagggttttgtccaggagttgcgtacaatgtcctttgtcattggatttgggactgcccctttttatgctcagattcctcatgatcgtcatgaagagaggtgccgagtcaaagtcaccttgaacagtaatagtgaagacattctatcagtgatgttcgaagctggaggaagaaactacatccatgcatgtcaggaagtggcaaggatcgccataggagagctccgcgatcgctacagtgatcaattggccgacactgagtatcgttaccatcctcgtcaaccacagggaagtgaccgtggcagttaccttgagactgaaggaattgagaatgatgctaccacaagacatttggttgagatgctatgggctatggatgaaagtcatgcagagactgtgttagcagcccaagatcgtgaagattggaatcgtggtaagatttgcaagctagaagacaaggtggatcgtttggagaaggaactagctgcgttgaagggagaagcaccgccgcagaaggccaggattcgtcttaccgcaaggaagagagctctatttgtccctcgttatcaattggcgccaaagatggtgaacactcgcagcaacgggaatggtcccaacctcaacaaccccaacaacaacaataacaatgaagggaacccaacccttgctcaagttcttgctcaacagactcagctaatgcacatgatgatgcaacaacttcagaatcagcagaaccaaggaaataaccatgcacctcctcagaataagttagcagaatttcttcgtgtgaggccgcctattttctctagtaccactaaccctgttgaagctggtgattggctgcatgccatagagaagaagttggatttgcttcagtgcactgatcaggagaaggtctcatttgcatcacaccagttgcttggccctgcctctgaatggtgggatcacttccgcctgaataggactactgctgaacctatcacttggcttgaattgaccgctgctttccggaagacgcatataccatcgggagtggtgtctctcaagaagaaggagttcaggtcgctcacccagggatctcgctctgttacggagtatctacacgagttcaatcgtctagctcgttatgctccagaagatgtgcgcaatgatgaagagcgtcaggagaagttcttggaaggacttaatgatgagctttcttacccactcatgactggagattattctaatttccagaaattagtggataaggctattcgtcaggaggacaagtataatcgcatggagcagaagaaacgccggattgctcaattcaagatacaacaggggaataatcagaagccgcgtcttacttttgtaccccagtccatgccacatggaggttcttcatctgttgttcgtccgcagcgtcagttcttcaacaacaatgctggcaacaacatccgtaatcaagctccacgtcctgttgcagctccaacacaacaaccgcctgccaagagggagcaaggcagcaagcccgtggtgtgtttcaactatggagacccaggacattatgctgacaagtgtccaaagccccgacgcgtgaaggttgtccctgcctagagcaactctactataccagcatcaaaggcccgtgtcaatcatgttgcagctgcagaagctcaagacgctccagatgtgattttgggtacgttccctgttaactcagttcatgcaacagtgcttttcgattctggtgctacacattcatttctatctatgagttttgcgggaaatcatgggatggaagtagaagatcttagacgtcctttgatggttagtaccccaagtaatcaagcactctctttgcaacgtagcccctctgtcagaatagaaattaagggagtaccatttctggccaatcttatcttgttagaatccaaagaccttgatgtcatcctagggatggactggttaaccagacataaaggtgttatagactgtgctaacagaaaagtaactctcaccagtagtgatggtcgagttgtaactgttcatgcattatcttctgagtctttaaggtcaagactgaaccagataactttggaagagattcctatagtccgggagtatcccgatgtgttcccagatgatttacctggtatgccgcccaaaagggatatagagttcagaatagatttggtacctggaacaactccgattcataagaggccttatagaatggcagccaatgagttggcagaagtcaagaggcaagtggatgatttgcttcagaagggatacatcagaccgagttcatctccatggggagctccggttatttttgtggaaaagaaagatcatacccagaggatgtgtgtggactatcgtgcattaaatgatgtgactatcaagaataagtatccactacccagaattgatgatttgtttgatcagcttaaaggtgccactgttttctctaagatcgatcttcgatcagggtatcaccagttgagaatcaaagaggaagatatacctaagacagcttttaccactaggtatggattgttcgaatgtactgttatgtcttttggacttaccaatgcccctgctttcttcatgaacttgatgaataaggtgtttatggaatacctagataagtttgtggtggtctttattgatgacattcttatctactctcgaacaagagaagagcatgaagaacatcttcgccttgcactagagaagctacgagaacatcaactgtatgctaagtttagcaagtgtgaattttggttgtctgaagtgaagttccttggtcacgtcatctcagcaggaggagttgccgttgatcccagtaatgtggaatccgtaaccaactgcaaacaactaaagacagtttcagagattcgcagtttcttaggcctcgcaggatattaccggaggtttatagagaatttttccaagattactaagcccatgacacgactgctacagaaagatgtgaagtataagtggtcggaagaatgtgagcagagttttcaagagttgaagaatcgcttaatatcagctcctatcttgattttacctgatccaaaaaagggtttccaggtgtattgtgatgcatccaaacttgggttaggttgtgttctgatgcaagatgggaaggtggttacctatgcatctcgtcagttacgtccgcatgagaagaactaccctactcatgatattgagttagctgcagtagttcatgcgttgaaaatttggcgtcattattatttagacactcggtctgtcc

SEQ ID NO: 23176 - DNA, 7836 bp, Oryza sativa
  Clone ID: TF_OsC359_7671
atggagtataaggcgggcccgcccgccaccctcgctgacgggtggggcccacctgtcatcgcctacctcgcgccgcgcccgccgcccgcccgtgccctagggccgccgccgccgccgccgaatccgccgcatcccgccgtccccgcgcgccataaagagggggaaatcactccccgtgattccctctcccttttcccccgtttttccctctctctctccctcggattcgtttggaatctctcccgcaatcctcgccggcgcaatcaatggcggccggatcctccgcgccggtttccatctcctccggccgccctctctcactcccgacgctatataatcgctcctcgtgcttcgctcctccgtttccgccactcgccgcacactctccccgtcggattcgtgcccgcgccgtcttcctctctctccgccgtcgccgccgagctccggttcgccgccgtcgtcgctccggacctcctcccgactcggcgtcacctccttcggcttcgccgcgttcccgtcgacctcgtccaccccttcgtttcgcccgccgactgtcggagcgccgccgtcctcgtcgatccgaaccgcgccgccgccttcctccgctccggttgtcgtttccgccgtcctcgtcgtcccggggtgagccatggaccgcctccttcgcttcccccttccctcccctctctcggccgccgctccgccgcgccgttggtcgccggcggcgaccatcggggcgcgggtgcgccgcctcccgtcggccgtgccggcgaggccgccttcgggcgcgccccgcggctgccaggtgggcccggccgtcagccgcccgcgcccgcgggtgcggctgacgcgtgggacccacggcgccggtcggcgtcagccgcgtgcacccggtccaccgtggaccgagaggctgacgcgtgggccccactcccgtggacccggctgggctcggggtgcatggttttgatggtagcacctcggccatataaggaccggtcttcgggcctctgttgcaaagcactaccgtacttccacatgtctagtggggcaaatgaaggctacacgagctgcggcccggtagtcgagatgtcatggcacagggccggtgtcctgctgctaggggctcagtcctgcctgcctgtcccgggtgttccggccgtaggcgggattgggtcgatggccggcagcgtcacccgtcgtggtttgggcatgactggcttcgtcttggagttgcggggcatgtgcgtggccctggggtatccacacggagtggactaccaggccaggccgcttccggagcaggagggtgacgatgcggagccccgcgctgcttgggaggtcactgcagtgatcctcgctggctcttctgagcggacttcgctgacagtcaccgcgggtggcgattccttccccgccgcttgccagagcgccgctctcctcgccatcggcactctccaccagcgctacccggacgagttgcagcactcgccctaccgctaccacccccgccgcggaggagcccgcgactacgccaccttccgggatgctagctcggaggatgacgctaccatcgtgcacctggcgcgcatggtggaggcgtacgacgcggctcgtatcgacttccatcagatggtgcgccgtgggatggtcgagaacaacatgaagatcctggagctgcgtcaggagaacctgcagctcaagaaggacctggacgcggtggaggcgcagctgcatcagctcaagatcgcccagggagaggtctgccgccccaagcgtcgccgcgtctgccgcagccagaagatcaccgcccgcaagagcacctccaggcccgagcttgttcgtcagtccctggcgtggacttgcttcgtcgagacccctcgtgccgagcccgcgcccgtggttccccaggagggggaagcctccggcgttggtagcacggaggctctctctgttgctggttctgtgtggggttttcagatggtgacgaccaggagaaatgctgttaccggtgatggcaaccaacccgaaggcagcaaccacaaccaccagggcaacccacctccacctccacctccgcctccaccaccaccaccagacaccaacgccattctcacccaaatcctcgcccagcaagccaacatgatgactgctttcctccaccacctccaaaatccgccacaacataatgctccaccaccacccccacaacactctaaactcgctgagttcctccgcatccgcccacctaccttctctagctccaacaaccccgtggatgcgttggattggttgcatgccgtgggaaaaaagttagacactgtgcagtgcagcgatgaggagaaagtcatcttcgccgcccaccaactgcagggacccgcatctctctggtgggaccacttccaggctacgcagccagaggggcaacctatcacttgggcccgcttcaccgccgcttttcggagaacccatgtgcccgccggagtcgtggcccttaagaaaagggaattccgagagttgaagcaaggcaaccgctccgtgatggagtatttgcatgagttcaacaatctggcccgttacgccccggaggatgtgcgggaagatgaggagaagcaagaaaagttcttggcaggaatggaccccgagttgtccgtccgtctagtctctggggactatccggattttcaacgactggtggacaagagcatccgcttggaagctaagcacaaggagctggagtcgcacaagcgccgcttggcgaatttccgcaatcaacagggtgctaaccaaagggtccgctacaccaatccctatccagggggatcctcctcgcagcagcaacaacagcagcagcaacctcgctccgcgcctcgacctcaattcgtggtgcgcgtcccacagccgcagcagcagcagggtcagcaggggactcgtgcgccccgtcctcctacgccaactgtgcagcctggtcaaggccgcagggacgctcaaggtcagcagcgtctgtgcttcaactgcttcgagcccgggcactatgcggataaatgcccgaagccaaggcgtcagcaaggccaagcgcctccccgctccaacaacggtgggaaggatgtcattcggggtcgtgtgaatcacgtgacggccaaggacgtgctgacaactccggacgtcatcgttggtacgttcctcgttcattccatccctgctaccattttgttcgactctggagcttcccactcgtttatatctgtgccattcgtggggagaaatcagttgggggtagaaaggcttagaaaccctctgctcatcaccacccctggaggggttatgacagcaaagtactatagccctgccgtccctatagaaattcaggggattccttttccctcggatctgattctgctagacaccaagaatttggatataggactgtcagaaatccccatcgtcagggagttcggagatgtgtttccggaagaactacccgagaagaaagacaagacgaagaggatgtgcgtcgactacagagctctcaatgaagtcaccataaaaaacaagtaccctcttccccggatcgatgatctgttcgatcagcttaaaggtgccactgtattctctaagatcgatctccattccggatatcaccaattacgtattcgtgaagaagatattccaaagaccgcattcaccacgcgatacgggctgtatgaattcacggtgatgtcgttcggtttgaccaatgcacctgccttcttcatgaacttaatgaacaaagtgttcatggaatacttggataagtttgttgtggttttcattgatgacattctaatatactcacaatcagaggaagaccatcagcaccatctccgtctggtgttgggaaagttgcgggaacatcaattgtatgccaaacttagcaagcgtgagttctggttgtccgaagtcaaattcttagggcacgtgatatctgctaaaggtgttgctgtggaccccgaaacagtgaccgccgtcaccgattggaagcaacccaagacagttactcaagtccgcagtttcttaggtttggcaggatactaccggagattcatcgagaacttctccaaaatcgctcgacccatgacacagttgttgaagaaagaagagaaatttgtgtggagcccgcaatgcgagaaggcgtttcaaactctcaaggaaaagctggtttcctcgccggtgttaatcttgccggatactcgcaaggacttcatggtgtattgtgacgcttcgcgccaaggattggggtgcgtgctcatgcaggacggtcatgtggtagcctatgcctcccgtcagctacgacctcatgaaggcaactaccctacccatgatttggagttagcagcggtgattcatgatctaaaaatctggcggcactatctcattgggaatcgctgtgaaatatatactgatcataagagtttgaaatacatcttcacccagtcagatctgaatcttcggcaaaggagatggttagaactcatcaaggattatgatgtgggaattcactatcatcctggtaaggccaacgtggttgccgacgctttaagtcgaaagagccattgcaacactcttaacgtccgtggcatcccacccgaacttaatcaacagatggaagccctgaacctaagcatagttagtcgtggatttttggccgcgttagaagccaagcccaccttgctcgatcaaatccgcgaggctcagaagaacgacccggacatgcatggactcctcaagaatatgaaacagggtaaagccgctggtttcacagaagaggaacacggaaccctatggaacggaaaccgggagaaatactggtgggttagtatgaagcgggaaattgcagagttcgtggccctttgtgatgtgtgccagcgtgtcaaggcagagcaccaacgaccggccggacttctccaacctctccaagtaccagaatggaaatgggatgaaattgggatggatttcatcaccggacttccaaaaacccaaggcggatatgattctatatgggtagttgtggatcgattaaccaaggtagctcgatttattcctgtgaagaccacctatggagggaacaagctagccgagctctacttcgctaggatcgtgagtctccatggcgttcccaagaaaatcgtatctgataggggaagccaattcacctctcacttttggaagaaactccaagaagagctgggtacccgattaaacttcagcaccgcctatcacccgcagacagatggacagaccgagcgtctaaatcagatcctagaagatatgctccgcgcatgtgtcctagatttcgggaagacctgggataagagtctcccctatgccgagttctcctacaataacagctatcaagccagcatacaaatggcaccttatgaagcgttgtatgggcgcaaatgccggacaccactattgtgggaccaagttggagaaagccaagtgttcgggactgatatcctgagagaagctgaagctaaagtcagaatcattcgggaaaatctaaaggtggcacagtcccggcagaaaagttatgcagataaccgtcgccgcgacctggaattcgcagtggatgactttgtgtatcttcgggtcacgccattgcgaggtgtacacaggtttcagacaaaagggaagctcgcacctcggtatgtgggtcctttccgtatcattgctcggcgcggagaagtcgcttaccagttggagctgcccgcctccttgggcaacgtgcatgatgtgtttcatgtgtcgcaactcaagaaatgtcttcgagtgccatccgagcaggccgactcagagcaaattgaagttcgcgaagatttgacctacgtggagaggccagtgaaaatcctggacaccatggagcgcaggaccaggaaccgggcgggcccgcccgccaccctcgctgacgggtggggcccacctgtcatcgcctacctcgcgccgcgcccgccgcccgcccgtgccctagcgccgccgccgccgccgccgaatccgccgcatcccgccgtccccgtgcgccataaagagggggaaatcactccccgtgattccctctcccttttcccccgtttttccctctctctctccctcggattcgtttggaatctctcccgcaatcctcgccggcgcaatcaatggcggccggatcctccgcgccggtttccatctcctccggccgccctctctcactcccgacgctatataatcgctcctcgtgcttcgctcctccgtttccgccactcgccgcacactctccccgtcggattcgtgcccgcgccgtcttcctctctctccgccgtcgccgccgagctccggttcgccgccgtcgtcgctccggacctcctcccgactcggcgtcacctccttcggcttcgccgcgttcccgtcgacctcgtccaccccttcgtttcgcccgccgactgtcggagcgccgccgtcctcgtcgatccgaaccgcgccgccgccttcctccgctccggttgtcgtttccgccgtcctcgtcgtcccggggtgagccatggaccgcctccttcgcttcccccttccctcccctctctcggccgccgctccgccgcgccgttggtcgccggcggcgaccatcggggcgcgggtgcgccgcctcccgtcggccgtgccggcgaggccgccttcgggcgcgccccgcggctgccaggtgggcccggccgtcagccgcccgcgcccgcgggtgcggctgacgcgtgggacccacggcgccggtcggcgtcagccgcgtgcacccggtccaccgtggaccgagaggctgacgcgtgggccccactcccgtggacccggctgggctcggggtgcatggttttgatggtagcacctcggccatataaggaccggtcttcgggcctctgttgcaaagcactaccgtacttccacatgtctagtggggcaaatgaaggctacacgagctgcggcccggtagtcgagatgtcatggcacagggccggtgtcctgctgctaggggctcagtcctgcctgcctgtcccgggtgttccggccgtaggcgggattggtcttgctcaatttttcccaagcccataagaggagctccttgaagatgaaggctttggtgtctagctcgtgcctgccgtcaagcgcctgtggtcgtcgccctagtcttccgctgtttctcatggccggcagcgtcacccgtcgtggtttgcacatgactggcttcgtcttggagctgcgaggcatgtgcgtggtcttggggtatccacatggagtggactaccaggccaggccgcttccggagcaggagggtgacgatgcagagccccacgctggttgggaggtcactgcagtgatcctctctggctctcccgagcggacttcgctggcagtcaccgcgggtggagattccttccccgccgcttgccagaacgtcgctctcctcgccatcggcactcttcaccagcgctacccggacgagttgcagcactcgccctaccgctaccaccctcgtcgcggaggagcccgcgactacgccacctttcgggatgctagctcggaggatgacgctaccatcgtgcacctggcgcgcatggtggaggcgtacgacgcggctcgcatcgacttccaccagatggtacgccgtgggatggtcgagaacaacatgaagatcctggagctgcgtcaggagaacctgcagctcaagaaggacctagacgcggtggaggcgcagctgcatcagctcaagatcgcccaaggagaggtcttgccgcccaagcgtcggcgcgtctgccgcagccagaagatcaccgc

SEQ ID NO: 23177 - DNA, 4956 bp, Oryza sativa
  Clone ID: TF_OsC359_7991
atgccgcgctacaagcctgagtacctgtttggtgttgagggttttgtccaggagttgcgtacgatgtcctttgtcataggatttgggactgcccctttttatgctcagattcctcatgatcgtcatgaagagaagtgccgagtcaaagtcaccttgaatagtaatagtgaagatgtcccctcagtgatgttcgaagctggaggaagaaactacatccatgcatgtcaggaagtggcaaggatcgccataggagagctccgtgatcgctacagtgatcggttggctgacactgagtatcgctaccatcctcgtcaaccacagggaagtgaccgtggcagctaccttgagactgaaggaattgagaatgatgctaccacaaggcatttagttgagatgctgtgggctatggatgaaagccgtgcagagactgtgttagcggctcaagatcgtgaagattggaatcgtggtaagatttgcaagttagaagacaaggtggatcgtttggagaaggaactagccgcgttgaagggagaagcaccaccgcagaaggccaggattcgtcttaccgcaaggaagagagctctatttgtccctcgctatcaattggcgccaaaagttcgtgtggtggagaaagaagttgccccagcagatcctccggtcatcatcataagtgatgatgaagaagaagaatccaagcgcacccattccaagattgagtgggtagcaactcaagatgatgaagacgagccgaacgagcctacaatcgacctccgatgctcggaagaactagacaacgggaatggccccaacagcaacaataacaacaacaatggagagaacccaacacttgctcaagttcttgctcaacagactcagttaatgaacatgatgatgcagcaacttcagaatcagcaaaaccaaggaaataaccatgcacctccccagaacaagttagcagaatttcttcgtgtgaggccgcctattttctctagtaccactaatcctgttgaagctggtgattggttgcatgccatagagaagaagatggatttgcttcagtgcactgatcaggagaaggtctcatttgcatcacatcagttgcttggccctgcctctgaatggtgggatcacttccgcctgaataggattactgctgaacctattacttggcttgaattcaccgctgctttccggaagacgcatataccatcgggagtggtgtctctcaagaagaaggagttcaggtcgctcacccagggatctcgctctgttacggagtatctgcacgagttcaatcgtcttgctcgttatgctccggaagatctgcgcaatgatgaagagcgccaggagaagtttttgggaggacttaatgatgagctttcttacccactcatggttggagattatcctgatttccagaaattagtggataaggctatacgtcaggaggacaagtacaatcgcatggagcagaagaaacgccggattgctcacttcaaggcacaacaggggagtaatcagaagccgcgtcttactttaggaccccagtctgtgccacagggaggttcttcgtccattgttcgtccgcagcgtcagttcttcaacaacaatgctggcaacaacatccgtaatcaagtcccacgtcctgttgctgcctcgacacagcaacaacctgccaagaggaagcaaggcagcaagcccgtggtgtgtttcaactatggagacccaggacattatgctgacaagtgtccgaagccccgacgcgtgaaggttgtccctgcccagaataactctgctgtaccagcatcaaaggcccgtgtcaatcatgttgctgctgcagaagctcaagatgctccagatgtgattttgggtacgttccctgttaactcagttcctgcaactgtgcttttcgattctagtgctacacattcattcttatctatgagttttgcgggaaatcatgggatggaagtagaagatcttagacgtcctttgatggttagtaccccaagtaatcaagcactctctctgcaacgtagcccctctgtcagaatagaaattcaaggggtaccatttctagccaatcttatcttgttagaatctaaagaccttgacgtcattctagggatggactggttagccaaacataaaggtgtgatagactgtgccaacagaaaagtaactctcatcagcaatgatggtcgagttgtaactgttcatgcattgtcatctgagtttttaaggtcaagactgaaccagataactttgggagagattcctatagttcgggagtatcccgatgtgttcccagatgatttacctggtatgccgcctaaaagggatatagagttcagaatagatttggtacctggaacaactccgatccataagagaccttatagaatggcagccaatgagttggcagaagtcaaaaggcaagtagatgatttgcttcagaagggatacatcagaccgagttcatcaccatggggagctccagttatttttgtggaaaaaaaagaccatacccagaggatgtgtgtggactatcgtgcactaaatgatgtgactatcaagaataagtatccgctacccagaattgatgatttgtttaatcagcttaaaggtgccactgttttctccaagatagatcttcgatcagggtatcaccagttgagaatcaaagagtatgggttgttcgaatgtacggttatgtcttttggacttaccaatgctcctgctttcttcatgaacttgatgaataaagtatttatggaatacctagacaagttcgtggtggtctttattgatgacattcttatctactcccgaaccaaagaagagcatgaagaacatcttcgccttgcattggagaagctacgagagcatcaactgtatgctaagtttagcaagtgtgaattttggttgtctgaagtgaaattccttggtcacgtcatctcagccggaggagttgccgtcgatcctagtaacgtggaatccgtaaccaattggaagcaaccaaagacagtttcagagattcacagttttctaggcctcgcaggatattatcgaaggtttatagagaatttttccaagattgctaagcccatgacacgcctgcttcagaaatatgtgaagtacaagtggtcggaagaatgtgagcagagttttcaagagttgaaaagtcgtttaatatcagctcctattttgattttgcctgatccaaagaagggtttccaagtgtattgcgatgcatctaaacttgggttaggttgtgttctgatgcaagatgggaaggtggttgcctatgcatctcgtcagttacgtccgcatgaaaagaactaccctactcatgatcttgaattggccgcagtagttcatgcgttgaaaatttggcatcattatcttttcggtactcgtacagaggaatttgaaagattaaatttgggaattgtcagtagaggttttgttgcagccttagaagcgaagcccacactaattgatcaagttagagaagctcaaattagtgatcctgatattcaagagatcaagaagaatatgagaagaggaaaagctatcggtttcttggaggatgagcaaggaactgtatggttgggcgagagaatttgtgtccctgacaacaaagatttaaaggatgcaattctgaaagaagctcatgatactttatactccattcaccctggtagtactaagatgtaccaggatctcaaggaaagattttggtgggcaagtatgaagcgtgaaatcgcagaatacgtagcggtatgtgatatttgccagcgagtcaaggcagaacatcagaaacctgccggtttgttgcagcctttgaagattcctgaatggaaatgggaagaaatcggtatggattttatcactggtttacccagaacgtcatcaggccatgactctatttgggtaatagtcgacagacttaccaaagtggcacatttcatcccggtaaagacaacttattccggaagtcggttggcagaattatatatggcaaggattgtgtgtttgcatggtgtccctaagaaaatagtgtctgatcgaggcagtcagtttacttcaaatttctggaagaaacttcaggaagaaatgggttctaagctgaactttagtactgcttatcatccacagacagacggacaaaccgaaagggtgaatcagattttggaagacatgttgagagcttgtgctttagatttcggtggaagttgggataagaatctaccttatgcagaattctcgtataacaacagttatcaagctagtcttcagatggctccttacgaagcactgtatggtcggaagtgtcgcactccgcttttgtgggatcaaacgggagaacgtcaggttttcgggacggatatcttaagagaagcagaagaaaaggtaaagatcattcaagaaagattgcgtgtggctcagtctcgtcataagagttatgccgacaatcgccgtagagatttgagttttgaagaaggagattatgtgtatcttcgtgtcacgcctcttcgaggagttcatcgttttcacaccaaaggaaaattggcaccgcgttttgtgggaccttataagattgtcagtagaagaggagaggttgcttatcagttagaattacctcaatctttggcaggagtctataatgtgttccatgtgtcacaattgaaaaagtgtttaagggtacctaccgaagaagctaatattgagcagatagaagtccaagaggatttgacctatgttgagaaaccaatccgtatcttggaaacaaatgagagaagaaccaggaatcgagttatccgtttttgcaaagtccagtggagtaatcactcggaagaagaatcaacttgggaacgagaagatgaattgaagtcagctcatccgcatctgttcgccagttcttccgaatctcgaggacgagattctgtttaa

SEQ ID NO: 23178 - DNA, 5317 bp, Oryza sativa
  Clone ID: TF_OsC1713_4447
ggggccttgaccgcgccctgatcgggggcgcccagcccaatggctggtgggcccccgtcacactgcgccatataaaagaggggtggaggccggcacggcacaagccagtgacgggaagcgccaccgccgcgccacacctcatcgccgggacatctacgaccgtcactcccgcagccgtcatcgtcgtcgacctcaccggcgccgcatccacgacaaccgagcgccaacgacgacgatggccggcacttcttcatcctccaacacctcaaccggtggctactccttgatgggttgcattaaagatattccgaccctaaaaggagataactacgcagaatggaaaagaaaactcgaccttgcttttatcttgggagaggtggactgggtgttgactaccccatgtcctatagaacctactgaacttgtcagaggtgaaaatgagtcagatgctgactggcaaaagagacagagggacaatgctcctctcgtcatgtcgtatgacattgaacaaaagaaatggtccttagccaacaagaaatgtttggctgtggtaaagaatacgattgagcctaccatattgggctcgatcccagagtgtgacgctgtctcagagtaccttgaaagaataaagagtcagtttactggctcttcaaagacttatgctacacagctgatcaagcagcttgtgacagaaaggtaccatggaggtggtgttagagaccacatacttagaatgagcaacatggcttccaaattgaagccaatggatttgggcataacagatgactttctggtccatctggttatggcctcattgccaaagcagtttgacaattttattgtcaactacaacataagtccagagaaatggaactttgagaagctcattgctaattgtgtgcaagaggaggagagaatcaaagaatcaaatggtggttcaataaactatgttaaagataagaaaaagaaccacaagtctcccacctcaaaaggtaaacagtctcagcatctgcctcaacaacaacagttcgctgttgagaaagatcaatgtctccactgcaagaagacaggacactacaagagagattgtcctgactttttgaaaatgatcatggcaaagaaaggtgagaacattattacatttgtaaatgaatctcattatgttggttactctagatccacatggtggattgattctggagcaactattcatgcttgtaattgtttaaaggcattccgttcgacgaggactacgcaaagaagagaaagcaccattagagttgccaatggagttgaagaaaaagttgaagctgttggagattttcctctagagctcgcgaatggcttcatacttttacttcgagatgtcttttatgttccttctttgcaaagaaacttaataagtgtatcaaagttggattttgatggatatgattgccgctttggaagtggcaaatgtgaactatggcataataatgcatgtattggtcttgctgtgttgcgagacgagctttatttgttatctctttctgagaatgtgaatgttgtgtcctcgttgacaaaagaaaacaagaaaagaaaggggagaattgagagactagttaagaatgaaattcttcctccattggagttctcagacttagaacaatgcatagaatgcattaaaggaaaatttgtaaagagcatcaaaaagggtgcaaaacgaagcgcaggaattttagagatcattcatacagatatttgtggtccatttcctgtgaaaagtgtggatggctatgactcgttcataacattcacagatgattactcccgctatggttatatttatccaattaaagagcgatcagaagcattggataaatttaagatattcaaagctgaagttgaaaatcagcatgatataaagattaaagtagtaagatctgaccgtgggggggagtactatggtcgacatacgccttatgggcaagtccctggaccttttgcaaggttcttgctagagaatggaatagtagcccagtattcaacaccgggcgaacctcaacagaatggggtagctgaaaggcgcaaccgtaccctcatggatatggcgttaaaaaccgccattcatattctcaacagagttccaagcaaatcggtgcccaaaacaccgtatgagctatggacaggaagagtaccctcgctaactcacctccgtgtgtgggggagtcctgcagaggccaaagtatttaacccaaatattgggaagttggaccccaaaacagtcagctgccattttattggctatcctgaaagatcaaaaggctatcgtttctactgtccaaacagttatacaaagtttgtagaaacgagacacgccgtcttcttggaagacgaaatgattagggggagctcggtagttcgagaaattgatcttgaggagaggcgggtgtctgtacccgctccgtcgactcaggaacctttcttctctctacctgctgatgttgtgcctgcaatgcctgtcattgaggtaccagcacctgttgttacccttcctgtggcaacaatgaatgagagtgaggaacctgttatacaggattcaacagaaatggttgccacaccagaggaggagctacaacagtctcaaatagataatgtgccagtacaggagactcatcaagagcctcaggtacaggatgtgccaaatgtgcaggcccctagaaggtctgaaagagtcagaagatcggctatccgtgatgactataaagtttataatatagaagagtcgcatatggaggatgatcccacctcatatgaagaggccatgagaagcgctcgctcatctgaatggttggaatccatgaaagatgaaatggaatcaatgaaactaaacgatgtttgggatttagaagaaattcctaaaggagccaaaacagtaggctgtaaatgggtctacaaaaccaaatatgactccagagggaatatagaaaagtttaaagcgcgacttgtggcaaaaggcttcacacaacgagaagggattgattacaatgagacattttctccagtctcttgtaaagattccttcaggattataatggcactagtggcacattatgatttggaattacatcagatggatgtaaaaacggcatttctaaatggagatttggaggaaaaagtatacatggcgcaaccgaaaggttttgtcatgaaaggaaacgaaaatatgggatgtcgtctaaagagatccatttatggattaaagcaagcttcgagacagtggtacttgaagtttgatgggacaataaagaaatttgggtttcaagagaatgtcgaggacaactgtatttattcaaagtttaaaaatgggagatttattttcctaattctgtatgtggatgacattctactggctagtagtgatgtcagtctactgcaggaaacaaagaaattcttgtcctcaaactttgacatgaaagacctcggtgaggcttcatatgttttgggcatagagattcaccgagatagaacaaagtatgcattgggactttctcaaaagacatatatagaaaaggtgttgaagaaattcaacatgtacagatgcagtgctacacctgctcctataatgaaaggcgaaaagtatggggcatcgcaatgtcccagaaatcagtatgagctcaatgaaatgaaaacaaagccatatgcgtcagctgtaggaagcctacagtacgcgcaagtgtgcacacgacctgacttggcatttgttaccgggttacttggcagatttcagagtaatccaggcctagagcactggaaattggtaaagaaagtcttgcgttatttgcaaggaacaaaaggcctcatgctgtcttacagaagatcagaatcactccagatagtggggtactcagattctgactttgcaaaagataatacaaagtcaacatcgggatatgtgtttaccctggcaggaggagctatttcatggaaaagctcaaaacagactatcactgcagggtctactatgtatgccgagtttatagcatgctatgaggcaacggggcaggtgaactggctaaagaagttcatacccggtttaaaggtggttgacagtattgagaaaccactaaagttatactgcgacaacgaacccgcagtaatcatcgtgctggagaagaagacgttcttggtggagcggttcgacaagtacgtcaagacgctcggatccgggatccacgtgctcgcccccctcgtcgaccacatcgcgtacgtccactcactcaaggaggaggccatccccatccccgaccagtccgccatcaccaaggacaacatctccatccagatcgacggtgtcctctacgtcaagaatttttggggaaacttcaaattgcatgttctagatgaagcacttcttgctttcaagaaggcagttacaacttctgatgggatattcctcaactggcgtgaacaagatgtggatccttgcaattggaaggatgttagatgtgacagtcacaccaagagactcaaggcaaggagaggcagtgtctcatgggaatcaggggtaaggtgcttctcgattggcccatcagaactggtagcacgtggttcgaaggtatggctatccacgcgcgcaggggggcacctggaagcaggcggcgtcgacgatgccgaaggcggcgacggcgacccaggcggcccagccggaaggctgcctcttgccgcgcgaggcggcgaaggcgacgagcagtgtgccggcggggaggaggcgaagctcggcgacgaagaaggggcccgtcttggctatgacccccttcatggccaccatggccgtgccccagaagaagaagggcgacaccagcgacgcccactcccaccactccctccccacgaatgccgccgaggccgagacgccatcctcctcctcggagacccgcgcgaggccttcgacgaagcactcgacgtccgtgcccgtgccgacgcagtcaaccgcgtccggcggggagggcggcatcgcctcgcggcggaagggttccgcacctgggcggtcgtcgacgtagcactcaacgtcggcggcccgtgccgacgcagtcaaccgcgtcaccgggttaggcggcgtgtggcggggcgcggccgccgccgcgagccgccgcgagatgtcgcacgccacggccaccgcgcgggacggagtagacagtggagggcgggaggatggagtacggcggggcggggcaagacggagtacggcggcgcgggagtacggcggggcggggcggcgctgactgagggcggcggcggacgcgaatggaggcagcggcgcgagtggactgggtga

SEQ ID NO: 23179 - DNA, 2950 bp, Oryza sativa; identical to SEQ ID NO: 14356
  Clone ID: TF_OsC91_2190

SEQ ID NO: 23180 - DNA, 7344 bp, Oryza sativa
  Clone ID: TF_OsC91_2385
atggcaggtccagaggataaagatgaggagggtgcatctcattccccacgcaccaaaggcatcatccaatactttacaaggcaagtgaagcagcacacagaaggacttgatacagatttgcaggtgacaaatgagaagattggacaattggagtccacgcagatctccaccaacactaagcttacagggctggagacagcggtcgcccgcattgacactagccttgctgctcttgtgaggcattttgatgctctcaatgctggaggcaatggtgggggtaatgatgatgacattgacggagagtacgtcgaggataatttggaggatgaatatattgctgacactgaacaagatgatcgagatgctcgagatcgtcgacggctacacaacaatcgacgaggtatgggtggtcgccgccgacgcgaggtacgcaacaatgatgatgctttttctaaaattaaatttaagattcctccttttgatggaaaatatgatcctgatgcgtacctctcttgggagattgctgttgaccaaaaatttgcatgccatgagtttcctgagagcactagagttagagctgctacgagtgagttcaccgattttgcttcggtttggtggatagaacatggcaagaaaaatcctaataacatgccacaaacttgggatgctttgaaacgggtcatgcgggctagatttgttccttcttactatgcacgtgacttgctgaataggttgcaacaattgagacagggtgcgaaaagtgtagaggaatattatcaggagttacaaatgggcttgcttcgttgtaatttagaggaaactgaggacgctgccatggctagatttttgggtgggttaaaccgcgagatttatgacatcgtagactataaagattacactaatatgacccgattgtttcatcttgcttgtaaggctgaaagggaagtgcagggacgacgtgctagtgccaaggctaatttttctgcaggtaaaacttcatcatggcagacacgcaccactcctccggccggccgtactgcttctccatcttccacacccacaaccagtcgagcagcacctcctccatctagtgacaagtcagcgacaaaggctgctcagcccgcaccgagtgcttcttcaatggcatccacaggccgaatgagagatgttcagtgccaccgttgcaagggctttgggcatgtgcagcgtgactgccctagcaagcgagttttggtagtcaaaaacgatggtgagtactcctctgctagtgatttcgatgatgatacacttgctttgcttgcggctgaccatgcagataatgagccaccggaagagcacattggggctgcatttgcggatcactatgagagcctcattgtgcagcgtgtccttagcgcacaaatggagaaggcggagcaaaatcagcgacacacgttgttccaaacaaagtgtgtcgtcaaagagcgttgttgccgcatgatcattgatggaggtagctgcaacaacttggctagcagcgagatggtggagaagcttgcacttagcacaaaaccgcacccacatccatactacatccaatggctgaacaacagtggtaaggcgaaggtaacaaaactggtgcacattaattttgcaattggaaattaccatgatgttgttgaatgtgatgttgtgcccatgcaagcatgtaatattctgctaggtagaccatggcaatttgatagggattctatgcatcatggtaggtccaaccagtactcttttctgtaccatgataagaaaattgtgttgcattccatgtctcctgaagatattttgcgtgatgatgttgctaaggctgccaaatccaaatgtgagagtgataaaaaagcccaatctgatggcaagaaacctgagacaatcaatttgaaacccaaatgcttacttgctactaaatctgatattaatgagttgattgcatcaccttcagttgcctatgctttggtatgcaaagatgctttgatttcacttcacgatatgcagcattctttgccccctgctgttgctaacattttgcaggagtactctgatgtgtttcccaaggaagtgccaccggggctgccaccggtgcgcggcattgagcatcaaatcgacttgatcccaggtgcttccctaccgaaccgtgcgccataccgaacaaaccctgaggaaaccaaggagattcagcgtcaagttcatgagttgcttgataaagggtatgtacgcgagtctcttagtccatgtgcggttccggtaattttggtaccaaagaaagatggttcatggcgtatgtgtgttgattgtagagctattaataacattaccattcgatatcgtcatcctattcctaggttagatgatatgcttgatgaattgagtggctctattgtgttctccaaagttgatttgcgtagtggttaccaccagattcgtatgaagttgggtgatgaatggaaaacagcatttaaaacgaagtttgggttgtatgagtggttagtgatgccttttggtttaactaatgcacccagcactttcatgaggttgatgaatgaggttttgcgtcctttcattggaaaatttgtggtggtctactttgatgatatcttgatttacagcaagtctatgggtgaacattttaatcatttacgtgctgtttttaatgctcttcgtgatgcacgtttatttggtaaccttgagaagtgcaccttttgcacagatcgagtttcttttcttggctatgttgtaactccgcaggggattgaggttgatcaagccaaggttgaagcaattcagagttggccgactcctaaaacggtctcacaagtgcggagctttctaggactcgcggggttctatcgccgctttgtgcaggatttcagcaccattgctgcaccattgaatgtgcttacaaagaagggagtgcctttcacttggggcacatcacaagagaacgccttccacatgttgaaagataagttgacccacgcacctctcctccaacttcccgattttaataagacttttgaacttgaatgtgatgctagtgggattggattgggtggtgttttgctacaagaaggaaaacctgttgcatattttagtgaaaagttgagtgggcctgttctgaattattctacttatgataaggaattgtatgctcttgtgcgaactttagaaacatggcagcattatttgtggcccaaggaatttgtcatacattctgatcatgagtctttgaagcatattcgtagtcaagggaagctgaaccgtagacatgctaaatgggttgaatttattgaatcttttccttatgttatcaaacacaagaaagggaaggagaacatcattgctgatgctttgtctaggagatacactttgttgacacaacttgactacaagatttttggcctggaaacaatcaaagaccaatatgcgcatgatgctgattttaatgatgtgttgctgcattgtaaggatggaagaacatggaacaaattcgtcatcaatgatgggtttgttttcagagctaacaagctatgcattccagctagctccgttcgcttgttgttgttgcaggaagcgcatggaggcggtttgatgggacattttggtgccaagaagacacatgacatccttgctagtcatttcttttggccacagatgcgaagagatgttggcaggttcgttgctcgctgcgctacatgtcaaaaggctaagtcacgcttacatccacatggtttgtatatgcctcttcctgttcctactgttccttgggaagatatttcaatggattttgtgttaggattgcctaggaccaagagggggcgtgatagcatttttgtggttgtggatcgattttctaaaatggcacatttcataccatgtcataaaactgatgatgcttctcatatcgctgatttgttctttcgagaaattgttcgcttgcatggtgtgccaaacacaattgtttctgatcgtgacacaaaatttcttagccatttttggagaactttgtgggctaaattggggactaaacttttgttttctactacttgtcatccccaaactgatggacaaactgaagtggtgaatagaaccttgtctactatgcttagggctgttttgaagaaaaatatcaagatgtgggaagaatgcttgcctcatattgaatttgcttataatcgttccttgcattctactacaaaaatgtgcccatttcagattgtgtatggtttgttgcctcgtgctccaattgatttgatgcctttaccatcttctgaaaaactgaattttgatgctaagcaacgtgctgagttgatgttaaaactgcatgagacaactaaagaaaacatagagcgcatgaatgctaagtataagtttgctggtgacaaaggtagaagggaattgaattttgaacctggagatttggtttggttgcatttgcgaaaagaacgatttcctgatttgagaaagtctaaattgatgcctagagctgatggaccatttaaagtgttagcaaagattaatgagaatgcatataagattgatttgcctgcagatttcagggttagtcccacatttaacgttgcagatttgaagccgtatttgggagaagaagatgagcttgagtcgaggacgactcaaatgcaagaaggggaggatgatgaggacatcaacaccatcgatacatccacgtccccccatatacagcatgatggtcctattacccgcgctcgtgcacgtcaactaaattatcaggacgagtgccctcgtggccgggttgacgcgcaccacaagttcgcggcgaccattggagacgatcgggccacaaaccctagcgggttcgcatcatacggactgtatgaattcacggtgatgtcattcggtttaaccaatgctcctgccttcttcatgaacttaatgaacaaagtgttcatggaatacttggataagtttgttgtggttttcattgatgacattctggtatactcacaatcagaggaagaccatcagcaccatctccgtctggtgttgggaaagttgcgggaacatcaattgtatgccaaacttagcaagtgtgagttctggttgtccgaagtcaaattcttagggcacgtgatatctgctaaaggagttgctgtggaccccgaaacagtgaccgccgtcaccgattggaagcaacccaagacagtcactcaaattcgcagtttcttaggtttggcaggatactaccggaggttcatcgagaacttctccaaaatcgctcgacccatgacacagttgttgaagaaagaagagaaatttgtgtggagcccgcaatgcgagaaggcgttccaaactctcaaggaaaagctggtttcctcgccggttttaatcttaccggatactcgcaaggacttcatggtgtattgtgacgcttcgccccaaggattggggtgcgtgctcatgcaggaaggtcatgtggtggcctatgcctcacgccagctatggcctcatgaaggcaactaccctacccatgatttggagttagccgcggtggttcatgctctaaaaatctggcggcactatctcattgggaatcgctgtgaaatatatactgatcataagagtttgaaatacatcttcactcagtcggacctgaatcttcggcagagaagatggttagaactcatcaaggattatgatgtgggaattcactatcatcctggtaaggccaatgtggtcgccgacgctctaagtcgaaaaagccattgcaacactcttggagtccgtggcattccacccgaacttaatcaacagatggaagccctgaacctaagcatagttagtcgtggattcttggctacgctggaagccaagcctaccttgctcgatcaaatccgcgaggctcagaagaacgatccggacatgcgtggactcctcaagaatatgaaacagggtaaagccgctggtttcatagaggatgaacacggaaccctatggaacagaaaccgggtatgcgttccagatgtcagggaacttaaacagctgatacttcaggaagctcacgagagtccttattccatccacccgggcagtacgaagatgtacttagacttgaaagagaaatactggtgggttagtatgaagcgggaaattgcggagttcgtggccctttgtgacgtgtgccagcgtgtcaaggcagagcaccaacgaccggccggacttctccaacctctccaagtaccagaatggaaatgggatgaaattgggatggatttcatcaccggacttccaaaaacccaaggtggatatgattctatatgggtagttgtggaccgattaaccaaggtagctcggtttattcctgtgaagaccacctatggagggaacaaactagccgagctctacttcgctaggatcgtgagtctccatggcgttcctaagaaaattgtatctgatagggaaagccaattcacctctcacttttggaagaagctccaagaagagctgggtacccgattaaatttcagcaccgcgtatcacccgcagacagatggacagaccgagcgtctaaatcagatcctagaagatatgcttcatgcatgtgtcctagatttcgggaagacctgggataagagtctcccctatgccgagttctcctacaataacagctaccaagccagcatacaaatggcaccttatgaagcgttgtatgggcgcaaatgccggacaccgctcttgtgggaccaagttggggaaagccaagtgttcgggactgatatactgagagaagctgaagcgaaggtcagaaccatttgggataatctaaaggtggcccagtcccggcagaaaagttatgcagataaccgtcgccgtaacttggaattcgcagtggacgattttgtgtaccttcgggtcacgccattgcgaggtgtacacaggtttcagacgaaagggaagctcgcacctcggttcgtgggtcctttccgtatcattgctcggcgcggagaagtcgcttaccagttggagctgcccgcctccttgggcaacgtgcatgatgtgttccatgtgtcgcaactcaagaaatgccttcgagtgccgtccgagcaggccgactcagagcagattgaagttcgcgaagacttgacctacgtggagaggccagtgaaaatcctggacaccatggagcgcaggaccaggaaccgggtaatccgtttttgcaaggtccaatggagcaaccacgccgaggaagaagctacttgggagcgtgaaaacgagctgaaggcagcccatcctgatctcttcgctagttcctccgaatctcggggtcgagattccgtttaa

SEQ ID NO: 23181 - DNA, 4185 bp, Oryza sativa; identical to SEQ ID NO: 14361
  Clone ID: TF_OsC91_2423

SEQ ID NO: 23182 - DNA, 5247 bp, Oryza sativa; identical to SEQ ID NO: 14353
  Clone ID: TF_OsC91_2584

SEQ ID NO: 23183 - DNA, 4704 bp, Oryza sativa
  Clone ID: TF_OsC91_2593
atggcaggtctagaggataaagatgaggagggtgcatctcattccccacgcaccaaaggcatcatccaatactttacaaggcaagtgaagcagcacacagaaggacttgatacagatttgcaggtgacaaatgagaagattggacaattggagtccacgcagatctccaccaacactaagcttacagggctggagacagcggtcgcccgcattgacactagccttgctgctcttgtgaggcattttgatgctctcaatgctggaggcaatggtgggggtaatgacgatgacattgacggagagtacgtcgaggataatttggaggatgaatatattgctgacactgaacaagatgatcgagatgctcgagatcgtcgacggctacacaacaatcgacgaggtatgggtggtcgccgccgacgcgaggtacgcaacaatgatgatgctttttctaaaattaaatttaaaattcctccttttgatggaaaatatgatcctgatgcgtacctctcttgggagattgctgttgaccaaaaatttgcatgccatgagtttcctgagaacactagagttagagctgctacgagtgagttcaccgattttgcttcggtttggtggatagaacatggcaagaaaaatcctaataacatgccacaaacttgggatgctttgaaacgggtcatgcgggctagatttgttccttcttactatgcacgtgacttgctgaataggttgcaacaattgagacagggtgcgaaaagtgtagaggaatattatcaggagttacaaatgggcttgcttcgttgtaatttagaggaaactgaggacgctgccatggctagatttttgggtgggttaaaccgcgagatttatgacatcgtagactataaagattacactaatatgacccgattgtttcatcttgcttgtaaggctaaaagggaagtgcagggacgacgtgctagtgccaaggctaatttttctgctggtaaaacttcatcatggcagacacgcaccactcctccggccggccgtactacttctccatcttccacacccacaaccagtcgagcagcacctcctccatctggtgacaagtcagcgataaaggctgctcagccagcaccgagtgcttcttcaatggcatccacaggccgaatgagagatgttcagtgccaccgttgcaagggctttgggcatgtgcagcgtgactgccctagcaagcgagttttggtagtaaaaaacgatggtgagtactcctctgctagtgatttcgatgatgatacacttgctttgcttgcggctgaccatgcagataatgagccaccggaagagcacattggggctgcatttgcggatcactatgagagtctcattgtgcagcgtgtccttagcgcacaaatggagaaggcggagcaaaatcagcgacacacgttgttccaaacaaagtgtgtcgtcaaagagcgttgttgccgcatgatcattgatggaggtagctgcaacaacttggctaacagcgagatggtggagaagcttgcacttagcaccaaaccgcatccacatccatactacatccaatggctgaacaacagtggtaaggcgaaggtaacaaaactggtgcacattaattttgcaattggaaattaccatgatgttgttgaatgtgatgttgtgcccatgcaagcttgtaatattctgctaggtagaccatggcaatttgatagggattctatgcattatggtaggtcaaaccagtactcttttctgtaccatgataagaaaattgtgttgcatcccatgtctcctgaagatattttgcgtgatgatgttgctaaggctgccaaatccaaatgtgagagtgataaaaaagcccaatctgatggcaagaaacctgagacaatcaatttgaaacccagatgcttacttgctactaaatctgatattaatgagttgattgcatcaccttcagttgcctatgctttggtatgcaaagatgctttgatttcacttcacgatatgcagcattctttggcccctgctgttgctaacattttgcaggagtactctgatgtgtttcccaaggaagtgccaccggggctgccaccggtgcgcggcattcagcatcaaatcgacttgatcccaggtgcttccctaccgaatcgtgcgccataccgaaccaaccctgaggaaaccaaggagattcagcgtcaagttcatgagttgcttgataaagggtatgtacgcgagtctcttagtccatgtgcggttccggtaattttggtaccaaagaaagatggttcatggcgtatgtgtgttgattgtagagctattaataacattaccattcgatatcgtcatcctattcctaggttagatgatatgcttgatgaattgagtggctctattgtgttctccaaagttgatttgcgtagtggttaccaccagattcgtatgaagttgggtgatgaatggaaaacagcatttaaaacaaagtttgggttgtatgagtggttagtgatgccttttggtttaactaatgcacccagcactttcatgaggttgatgaatgaggttttgcgtcctttcattggaaaatttgtggtggtctactttgatgatatcttgatttacagcaagtctatgggtgaacattttaatcatttacgtgctgtttttaatgctcttcgtgatgcacgtttatttggatttcagcaccattgctgcaccattgaatgcgcttcaaagaagggagtgcctttcacttggggcacatcacaagagaacgccttccacatgttgaaagataagttgactcatgcacctctcctccaacttcccgattttaataagacttttgaacttgaatgtgatgctagtgggattggattgggtggtgttttgctacaagaaggaaaacctgttgcatattttagtgaaaagttgagtgggcctgttctgaattattctacttatgataaggaattgtatgctcttgtgcgaactttagaaacatggcagcattatttgtggcccaaggaatttgtcatacattctgatcatgagtctttgaagcatattcgtagtcaagggaagctgaaccgtagacatgctaaatgggttgaatttattgaatcttttccttatgttatcaaacacaagaaagggaaggagaacatcattgctgatgctttgtctaggagatacactttgttgacacaacttgactacaagatttttggcctggaaacaatcaaagaccaatatgcgcatgatgctgattttaatgatgtgttgctgcattgtaaggatggaagaacatggaacaaattcgtcatcaatgatgggtttgttttcagagctaacaagctatgcattccagctagctccgttcgcctgttgttgttgcaggaagcgcatggaggcggtttgatgggacattttggcgccaagaagacacatgacatccttgctagtcatttcttttggccacagatgcgaagagatgttggcaggttcgttgctcgctgcgctacatgtcaaaaggctaagtcacgcttacatccacatggtttgtatatgcctcttcctgttcctactgttccttgggaagatatttcaatggactttgtgttaggattgcctaggaccaagagggggcgtgatagcatttttgtggttgtggatagattttctaaaatggcacatttcataccatgtcataaaactgatgatgcttctcatatcgctgatttgttctttcgagaaattgttcgcttgcatggtgtgccaaacacaattgtttctgatcgtgacacaaaatttcttagccatttttggagaactttgtgggctaaattggggactaaacttttgttttctactacttgtcatccccaaactgatggacaaactgaagtggtgaatagaaccttgtctactatgcttagggctgttttgaagaaaaatatcaagatgtgggaagaatgcttgcctcatattgaatttgcttataatcgttccttgcattctactacaaaaatgtgcccttttcagattgtgtatggtttgttgcctcgtgctccaattgatttgatgcctttaccatcttctgaaaaactgaattttgatgctaagcaacgtgctgagttgatgttaaaactgcatgagacaactaaagaaaacatagagcgcatgaatgctaagtataagtttgctggtgacaaaggtagaagggaattgaattttgaacctggagatttggtttggttgcatttgcgaaaagaacgatttcctgatttgagaaagtctaaattgatgcctagagctgatggaccatttaaagtgttagcaaagattaatgagaatgcatataagattgatttgcctgcagatttcggggttagtcccacatttaacgttgcagatttgaagccgtatttgggagaagaagatgagcttgagtcgaggacgactcaaatgcaagaaggggaggatgatgaggacatcaacaccatcgatacatccacgtccccccatatacagcatgatggtcctattacccgcgctcgtgcacgtcaactaaattatcaggacgagtgccctcgtggccgggttgacgcgcaccacaagttcgcggcgaccattggagacggtgtatcggttgctaaggcgcagcgtctttggacagttgtagtcgggccgtga

SEQ ID NO: 23184 - DNA, 3590 bp, Oryza sativa
  Clone ID: TF_OsC91_2616
atggctgccggctggatgggcaaggttgtgactcgtgtgaagtgtgactcacaagtcctgcgaccgtcggtctacgatcactgccggacggggcacccgacggcgacgaacaaacccgaggatcccacaaacgaagatgacgagaatgagcacaagaacgttcaagcagctaatgcaatacttagcgccttgagtggaagtgagttcaaccgtgtggacgacatcgagagtgccaaagtgatttgggacacgcttcggaatttgcatgaaggcacggatagtgttcgcgagtccaaggtggagatcctcaaggggcaatttgagcggtttgtgatattggatggtgagagcccaagcgacatgtatgatcgattgaacaagattgtcaatgagatcaagggatttggctccaaggacatgatcgatgaggttgtggtcaaaaagatgattcgagcaatcactccaaggaactctatcttggtaaccataattcgtgagcgtccggactacaagactctcacaccttatgacttgctcgggcatacccttgcccatgacatgctcaaacaagagtccaaggaggtcatccaattcatcaaccaaagctcaaccacaagcatcaagaaggaagacttggcgttgaagggaagttcttccaagcactactccaacaagtcaagtggaagacactccgcaagagtgtgctatatgtgcaaagagcccgagcacttcatcgcagattgcccccacatcaatgaagaaaagaagaagattgagaagaaggttgagaagaaggagaaacacaagcatagcaagcatgatcactatggccaatctcaccttgggatgatctttggctctgactccgagtcaagctcaagtaatgaagaaggagttgccacgttcgccgtcaagccttcatcagcaccgagactcttcaactactcaagtgatgaggatgctcccatttgcctcatggcaaagaagcctaaggtaccttcctccctcaagtcattcaatgttgatcttgttagtgatgaggaggatgatgttcaggatgaggttatggatgaggaattgttcaagtccataaccaaggaatctctaccacacttgagtgagtttcttgggagaattgaggatcagtatgcaacccttgagaggcaagaggcattactcattcgtgaaaaagagcggtctcatgaactcaaggggcctcaaattggtacaacagcgaccttcacagaacttgggaaacgtgaaaaggtagcctctgttaacgcgttatgtaaactttttgaccaaccaaccgcgatccagcagtggagcacagtcacggcactcatcagcagctatgcgactgccaggcgacggggccatggcagcttcccatcagcagcttctcacggctgccgcagtggtggttctcgcctctctgcgtgcggtggcgcagcccgccggcgacggctatggcaacgccaccttctccctctgctccggcgtcgacaacacccaggcggcgggccgttctacttggtccggcagactactgcctccgaagccgtcaaggcggccaccgctgcgacggcggacaggtcctcgagcgtggttagcgacggggagtactacgcgctcgcgcagtgccgcgccgacgtgcccgcgggggactgctcgcggtgcctcgccgcctgcctcggagtcatcggcgggagcggagacgacttgtgcgagaaagccgcggtgcgctacgacgaccgctgcctcctccgcttcgccaagggcgacgacttcaccggcttcgacgtcgacgagcacacggcgaccgtgttcgacggcgggcgcagcggcctcaccgtcgccgaggaggtgcccacccgcctgctcgccacggtggcggccgccgccccggcgagcaggtcgaggaccgccgccgggatagcgtcctacggcggcggcggcagcctgtacgggctggcgcagtgcaccacccagatcccggcgccggactgcgccaggtgcctccgcggcgcgctgtcccgcctctcggaggacttcaactccaccgccgccgggatgcaactgcttcgctccagctgcatgctgcgctacgggagctccctcttcttcaaccagtcgtcgccgctcctccccgtcgcccacctcgccatcgccccggccggtggaggcgccggcccgcccgcagccgctccaccatcaccaggccaccgtcctgctcgagctcgaacgatcgccatttccgctgggcagcctggttaccagactctggtgaactcgacaggtaaattcgcagagcgaaataagcttggatctggtggctgtggcacagtctacaaggggatattgcataacaatgaagaaatagccgtgaagaaactcaccagaaaagatttgagagaagtggaaagggaggtttccctggtggcgcagcttcagcacgagaacattgtcaagttcttgggccactgcttccggcacgacaaaatgttcctcgtctacgaatacctgagcaacgggactctgagccgctatttcaaatccgactgtcagaagctggactggccaaaatggcttaacatcatcagagggatcgctcgtggcctttcttatctccacagagattctgggaaggacatcgtccatcgtgatctcaaaccttccaatgtcctccttattccaacttcaatgcaaagattgctgactttgatcttgcaagaccatacgaccggaacaaaagccatgagagcactcaaaagagagcaggcacccagaaaaaataccacaaggatttattggtttcactgtttctcactgaagtggatacatagctccagaactgtatgcgggaggggaatactctaccaaatcggatgtgtacagtttcggcgtgatgactctggagatcatagttggtcagagcaccagcaagttcgacaacgataactgcacgggcctcgtagaatatggcatggcaacactttgtgaggcgtacggttgaagacatgctggacggtgaccatctcggcctggtgaacgacgagcaggtgcagcaggcgtcacggtgcgtgcacgtcgcgctcctctgcgtccagagcaaccgctccgtgaggccctccatggacagggtccacggcgtgctcggcagcaaggaggagctggaggagccctccacccccggcttcgtcgcggcggcggcggccggcgtttcgccgtcggcttactctgtgaacagcgtgacgatcagcgtcatggagcctcgaccatgaatcaagaagccttttgaggtttccaaaaggatttgtacaaagactgttttcagaagtttggatggatggaagcgtttgggaatgaaatcaatgtatgtatctctgacagttcggtgtggcttgccaggcagtttttgatcagtgcaatgccatttcaagcttcgaagaactagcctgtttacccttttcttctcttttcccctgtttcggtgcaatgcagataggcacaagactacagtagtaatgttctttgaaatacttggctgttacaccgtgctctttgaaaaaaaaaaaaaaaaaaaaaaa

SEQ ID NO: 23185 - DNA, 5388 bp, Oryza sativa
  Clone ID: TF_OsC91_2677
atggcaggtccagaggataaagatgaggagggtgcatctcattccccacgcaccaaaggcatcatccaatactttacaaggcaagtgaagcagcacacagaaggacttgatacagatttgcaggtgacaaatgagaagattggacaattggagtccacgcagatctccaccaacactaagcttacagggctggagacagcggtcgcccgcattgacactagccttgctgctcttgtgaggcattttgatgctctcaatgctggaggcaatggtggggttaatgatgatgacattgacggagagtacgtcgaggataatttggaggatgaatatattgctgacactgaacaagatgatcgagatgctcgagatcgtcgacggctacacaacaatcgacgaggtatgggtggtcgccgccgacgcgaggtatgcaacaatgatgatgctttttctaaaattaaatttaagattcctccttttgatggaaaatatgatcctgatgcgtacctctcttgggagattgctgttgaccaaaaatttgcatgccatgagtttcctgagagcactagagttagagctgctacgagtgagttcaccgattttgcttcggtttggtggatagaacatggcaagaaaaatcctaataacatgccacaaacttgggatgctttgaaacgggtcatgcgggctagatttgttccttcttactatgcacgtgacttgctgaataggttgcaacaattgagacaggaggaaactgaggatgctgccatggctagatttttgggtgggttaaaccgcgagatttatgatatcgtagactataaagattacactaatatgacccgattgtttcatcttgcttgtaaggctgaaagggaagtgcagggacgacgtgctagtgccaaggctaatttttctgcaggtaaaacttcatcatggcagacacgcaccactcctctagccggccgtactgcttctccatcttccacacccacaactagtcgagcagcacctcctccatctagtgacaagtcagcgacaaaggctgctcagccagcaccgagtgcttcttcaatggcatccacaggccgaatgagagatgttcagtgccaccgttgcaagggctttgggcatgtgcagcgtgactgccctagcaagcgagttttggtagtcaaaaacgatggtgagtactcctctgctagtgatttcgatgatgatacacttgctttgcttgcggctgaccatgcagataatgagccaccggaagagcacattggggctgcatttgcggatcactatgagagcctcattgtgcagcgtgtccttagcgcacaaatggagaaggcggagcaaaatcagcgacacacgttgttccaaacaaagtgtgtcgtcaaagagcgttgttgccgcatgatcattgatggaggtagctgcaacaacttggctagcagcgagatggtggagaagcttgcacttagcaccaaaccgcacccacattcatactacatccaatggctgaacaacagtggtaaggcgaaggtaacaaaactggtgcacattaattttgcaattggaaattaccatgatgttgttgaatgtgatgttgtgcccatgcaagcatgtaatattctgctaggtagaccatggcaatttgatagggattctatgcatcatggtaggtccaaccagtactcttttctgtaccatgataagaaaattgtgttgcatcccatgtctcctgaagatattttgcgtgatgatgttgctaaggctgccaaatccaaatgtgagagtgataaaaaagcccaatctgatggcaagaaacctgagacaatcaatttgaaacccaaatgcttacttgctactaaatctgatattaatgagttgattgcatcaccttcagttgcctatgctttggtatgcaaagatgctttgatttcacttcacgatatgcagcattctttgccccctgctgttgctaacattttgcaggagtactctgatgtgtttcccaaggaagtgccaccggggctgccaccggtgcgcggcattgagcatcaaatcgacttgatcccaggtgcttccctaccgaaccgtgcgccataccgaaccaaccctgaggaaaccaaggagattcagcgtcaagttcatgagttgcttgataaagggtatgtacgcgagtctcttagtccatgtgcggttccggtaattttggtaccaaagaaagatggttcatggcgtatgtgtgttgattgtagagctattaataacattaccattcgatatcgtcatcctattcctaggttagatgatatgcttgatgaattgagtggctctattgtgttctccaaagttgaattgcgtagtggttaccaccagattcatatgaagttgggtgatgaatggaaaacagcatttaaaacgaagtttgggttgtatgagtggttagtgatgccttttggtttaactaatgcacccagcactttcatgaggttgatgaatgaggttttgcgtcctttcattggaaaatttgtggtggtctactttgatgatatcttgatttacagcaagtctatgggtgaacattttaatcatttacgtgctgtttttaatgctcttcgtgatgcacgtttatttggtaaccttgagaagtgcaccttttgcacagatcgagtttcttttcttggctatgttgtaactccgcaagggattgaggttgatcaagccaaggttgaggcaattcagagttggccgactcctaaaacggtctcacaagtgcggagctttctaggactcgcggggttctattgccgctttgtgcaggatttcagcaccattgctgcaccattgaatgcgcttacaaagaagggagtgcctttcacttggggcacatcacaagagaacgccttccacatgttgaaacataagttgacccatgcacctctcctccaacttcccgattttaataagacttttgaacttgaatgtgatgctagtgggattggattgggtggtgttttgctacaagaaggaaaacttgttgcatattttagtgaaaagttgagtgggcctgttctgaattattctacttatgataaggaattgtatgctcttgtgcgaactttagaaacatggcagcattatttgtggcccaaggaatttgtcatacattctgatcatgagtctttgaagcatattcgtagtcaagggaagctgaaccgtagacatgctaaatgggttgaatttattgaatcttttccttatgttatcaaacacaagaaagggaaggagaacatcattgctaatgctttgtctaggagatacactttgttgacacaacttgactacaagatttttggcctggaaacaatcaaagaccaatatgcgcatgatgctgattttaatgatgtgttgctgcattgtaaggatggaagaacatggaacaaattcgtcatcaatgatgggtttgttttcagagctaacaagctatgcattccagctagctccgttcgcttgttgttgttgcaggaagcgcatggaggcggtttgatgggacattttggtgccaagaagacacatgacatccttgctagccatttcttttggccacagatgcgaagagatgttggcaggttcgttgctcgctgcgctacatgtcaaaaggctaagtcacgcttacatccacatggtttgtatatgcctcttcctgttcctactgttccttgggaagatatttcaatggattttgtgttaggattgcctaggaccaagagggggcgtgatagcatttttgtggttgtggatagattttctaaaatggtacatttcataccatgtcataaaactgatgatgcttctcatatcgctgatttgttctttcgagaaattgttcgcttgcatggtgtgccaaacacaattgtttctgatcgtgacacaaaatttcttagccatttttggagaactttgtgggctaaattggggactaaacttttgttttctactacttgtcatccccaaactgatggacaaattgaagtggtgaatagaaccttgtctactatgcttagggctgttttgaagaaaaatatcaagatgtgggaagaatgcttgcctcatattgaatttgcttgtaatcgttccttgcattctactacaaaaatgtgcccatttcagattgtgtatagtttgttgcctcgtgctccaattgatttgatgcctttaccatcttctgaaaaactgaattttgatgctaagcaacgtgctgagttgatgttaaaactgcatgagacaactaaagaaaacatagagcgcatgaatgctaagtataagtttgctggtgacaaaggtagaagggaattgaattttgaacctggagatttggtttggttgcatttgcgaaaagaacgatttcctgatttgagaaagtctaaattgatgcctagagctgatggaccatttaaagtgttagcaaagattaatgagaatgcatataagattgatttgcctgcagatttcggggttagtcccacatttaacgttgcagatttgaagccgtatttgggagaagaagatgagcttgagtcgaggacgactcaaatgcaagaaggggaggatgatgagaacatcaacaccatcgatacatccacgtccccccatgtacagcatgatggtcctattacccgcgctcgtgcacgtcaactaaattatcaggtgagttctttcttgagttcatattcctcgtctttataccccggagacgcgtgcactcgtgttttactcaggaacgatggagaggatccaaagggaagaggattcgcgcggggtggattcggactgcagggcagcgccaacttctgacggccgccacgacttcatgcgaactccgatttgggcgtgcaagacgagtgtcctcgtggccgggttgacgcgcaccacaagttcgcggcgaccattggagacgcgcctctgagcggcggcggcggtggtaccccacgagcagcggcgacggcgcccctcctcccgcgagcggtggcgactgcggcggcggtggcgcctctccccccgagcccaagcggcggcggcggcgccctcccctcgagcagcggcggcggcgacggcgcctctctcaccgagcccaagcggcagcggcggtgccctccccccgccagcggcgacgacggctcccccatcaccggcggtgcggccgtgtcctccctcaccaccggcagcgcggcgacgtcctcccccaccaccggcggcggcgcccggggaggcgtcggcggctcgccagcatcccaacggcggtggcgcccctcccctctgtcggatccagcgggaggggagctgcggcggcctggcgtccctatgacaacggcggcgctgtag

SEQ ID NO: 23186 - DNA, 3723 bp, Oryza sativa; identical to SEQ ID NO: 14377
  Clone ID: TF_OsC1528_2042

SEQ ID NO: 23187 - DNA, 3735 bp, Oryza sativa; identical to SEQ ID NO: 14376
  Clone ID: TF_OsC359_5634

SEQ ID NO: 23188 - DNA, 2174 bp, Oryza sativa; identical to SEQ ID NO: 14375
  Clone ID: TF_OsC359_5743

SEQ ID NO: 23189 - DNA, 5604 bp, Oryza sativa; identical to SEQ ID NO: 14384
  Clone ID: TF_OsC359_5787

SEQ ID NO: 23190 - DNA, 2649 bp, Oryza sativa
  Clone ID: TF_OsC359_6467
tcccctggtccctagctccctccccaccgtcgccctctctctcccacgtcgccggccgcctccagccgccggtgccgcctcgaccgtgcgccggccggccgcgccgtcgcctcctccagcgtcgccgccacctcctccaccccggcttgccctccgtttcgcgaggtgacccccggagctgccttcccgccgtcgccctcctcttttctccgcgccggccacctccagccgcacctcccgcctcacccgtgcaccctccggctgcgccgtcttctccctcggcctcgcagccacctcctctccctcggtcagccctccgtttcgcggggaaagcaccggagacgcgtcctcgccggcgtccagtggcgtcgccaccacttctccgtccgccgtcccctcctccgctcagccgctgctgcctgccatcatcgtttcatcgtcgtctccgatcgttctcgtcgtcgacgtcccatcggtcgcccggctcgtcgtctcgcggcgccgcctccgtcgtcggcatcgcagcggcgtggtcctcgtcgtcctcgtccccgtgcagccgctgccggctgtcctcgtcgcctcctcgccggtcccggtcgtcgtcgtcgtcgtcctctcgtcgttcccggtcgtcgtggcgttcgtccctccgtcgagccgttctcgtccgtcgtccgcgttcgtcaagcgagccgctgcagccccgtcctcgcctccgtcctcggctccgcgtcgtcaagcctcgtgccggccgcgtctcgcccgtgtgccggtgtcggtagtcgttcgcttgtgcgtgtggtgtccgtgttagtgtgcccgctcggtagccgcgtggtttctacgtgtgcatcccgtgtggtgtctagtggagtccgtttgttggccactcgcctcggttgacacacggggtccgcttccgtcgacccgtggaccgtctctgtgtacccggttttctttttatgtattgttattgcttctttataggtttgtagctttgcttgtgtgcttcgcgtagcttctgtcgttccggaggttcccgaagcgtggttcgcggtcgtcgccgaaggttcggaagtccgttctctctctcttcccctttcaaaacccctaaaacctgttttcggtggggtttgggtgcatgccagttgtgggaagtagcaccccggccactataaggattaagctcgggcctctgttgcaaagcactaccgtacttccacatgtctagtgggtaaggcttagtttgtggctcagtctagttataaacaaaagtacacggattggagatggatgaagtcgggggtcgatggacattccccggcttttcctgggacggggattaatacactggcgttcgggaaaaggcaattttcccggtcgcgacaagctggtatcagagccatctcgactgtaggataagccaagtggataaaacctaaggacatatttttccatccaccactagcctcaagagagttaacaagggtacacccttggtccattccaagcatgctgcttggttcacagctaccattggttggaagtcaagaccaaaatcagtatgtgtttgatcgagcatttgccacccaggtcgataagcttccaatgccagaagaggatgtccccttttgtcacgattgtagagaacgaggacactgtgccctgaattgtccatgggtatatgccaaagaagccccttcctttggtttagcagggcagacatcgctaaaccagcctcctcacaccaagtcaagcttgcagcctagtgtgcaaagtagagagcccaatggagagaatccatggaatcccgggaaatgctttcctcctagcctttcgtaccacgtggggtcacgtactaagcaagccaaacgcaagaagagtaagaatcagaagagaaaagcgccgatgcgaactgaagaagaagtatgtaagatgactattaccagcaccgaatggcctccagcagggataactattcctagacgtcaaagaggaaataccttccgaggtgcacgacagttgacccagcacctcctaagccatggtggcagagtgtctgatagtgaagggtcagatcaagtctcctcggatgatgaagatgagtctccccgacatctcggcgaggaagagatggaatcaaaggcatgcacccgttgtggagaaattggacacattgctagcatgtgtctcacactctgctcttattgtgaagaagaccatccaccaggggagtgtcccacccgcaaggtgacatgttttctgtgcgaaggaacaaaccatgtgcccaaggattgccaactcagtgtgttgttgaccaagaccgcagaaatccaacgaacaaccctacgattgtctcatcagctagtcagctccaacagcaacatcgacgatatcatccacagcaccaatgctcctcccgctgcacctgactctgcaataaatcatagtaataataccttcagcaccaaccattctctgcaccgacagcctcagcaaagatttgtcatcgatagaagaagttgtgtctctccccgacctactccaggccgagcaaagggcaatcaacctcaggaggacgataccaagcagaagaccgttatccgcttcaaccagcaatcagaaggaagcttcccctgtgaatga

SEQ ID NO: 23191 - DNA, 6794 bp, Oryza sativa
  Clone ID: TF_OsC359_8130
ctaggcaacatccgcctgtagtacgaagcctacgccaagcacctggcgaaaagggctgaggatgcccgcggggtcctcgacgctgccgcggcccaagagcggcgggcataggaggttgacacctcgctgcgggcccgggaggtggcgcttgaggccgagcgcacccgctccgcgcaggagttctacgggccggaacccccgggacaggcaggcaggactgagcccctagcagcaggacaccggccctgtgccatgacatctcgactaccgggccgcagctcgtgtagccttcatttgccctggagaatgtccatcgacccccgacttcatccacctccatccgtgtacttttgtttataactagatgggattcaatatgttcaaagatgatgtgacttgccttgctcgctttcccaaacaccggcttcaacttccacgaagagcggatcttccgaagctgcagcgtcgggttccacgggagtggggcccacgcggcagcctcacggttccacggtggaccgggcgcacgcggcttgcgctggccggcgccgtgggtcccacgcgtcagccgcaccgagggcgcgggcggctgacggccgggccccacctggcagccgcggggcgcgcccgaaggcggcctcgccggcacggccgacgggaggcggcgcgcccgcgcccctatggtcgccggcggcggccataggcacggcggagcggcggccgagagaggggagggaagggggaaacgaaatgggcggtccatggctcaccccggatcgatggcgacgacgggaacggcgaccggagcggagagaggcggcggcgcggctcgggtcgacggggacggcggcgttccggcggtcggcgaccgaaacggagaggtggacgaggtcggcgaggatgcggcgaagccgaaggaggcggtgccgaagcgggagatggtccggggcaacgacggcggcgaaccggagctcggcggcgacggcggagagagaggacgacggcgcgagctcgattccgacggggaaagagagcggcgagtggcggaaacggtggagagaggcacggggagtgtttatatagagccgggggcgagagggatgaatttatcaggacgtgacacacatggagtggactaccagggcaagccggtcccagagcaggagggtgacgatgcagagcccgtcgctgcttgggaggtcactgcagtgatcctctctggctcacctgagaggacttcgctggcagtcaccgcgggtggagattccttctccgccgcttgccagaacgccgctctcctcgccatcggcactctgcaccagcgctacccggacgagttgcagcactcgccctaccgctaccaccctcgccgcggaggagcccgcgactacgccaccttccgggatgctagctcggaggatgacgctaccatcatgcacctggcgcgcatggtggaggcgtacgacgcggcccgtatcgacttccaccagatggtgcgccgcgggatggtcgataacaacatgaagatcctggagctgcgtcaggagaatctgcagctgaagaaggatctggacgtgctggaggcgcagctctgtcagctcaaggtcgcccagggagaggtctgtcgtcccaagcgccgccgcgtctgccgcagccagaagatcaccgctcgcaagagtacctccaggcccgagcttgtttgtcagtccctggcgtggacctgcttcgtggagacccctcgtgccgagcccgcgcccgtggttcctcaggagggggaagcctccggcgtagggagcacggaggatgcgctgctgctcaccttccgtcctggcccgtcgcagcggagaagtgctaataccggtgatggccaccaacccgaaggcagcaacctcaacaaccatggcagcccacctccacctcctcctccgcctccaccaccaccaccagacaccaacgccatcctcacccaaatcctcgcccagcaagccaacatgatggctgctttcctccaccacatccaaaatccaccacagcataatgctccacctccaccaccacccccgcaacactctaagctcgccgagttccttcgcattcgcccgcctaccttctccagctccaataaccccgtggatgccttggattggttgcatgcagtggggaagaagttagacactgtgcagtgcaacgatgaggagaaagtcatctttgccacccaccagctgcaggggcccgcatctctatggtgggaccacttctaggctacgcagcccgaggggcagcctatcacctgggcccgtttcaccgccgctttccggagaacccatgtgcctgccggagtcatggcccttaagaaaagggcattccgggagttgaagcaaggcaaccgctctgtgatggagtatttgcatgagtttaacaacctggcccggtacgccccggaggacgttcgggaagatgaggaaaagcaagagaagttcttggcgggaatggaccctgagctgtccgtacgtctgatctccggggattatccggatttccaacgtctggtggacaagagcatccgcttggaagccaagcacaaagaattggagtcgcacaagcgtcgcttggcgaatttccgcaaccaacagggggctaaccaaagggtccgctacaccaatccctatccagggggatcctcctcgcagcagcaacagcagcaacctccctccgcgccccgacctcaatttgtggtgcgcgtcccacagccgcagcaaccgcagggtcagcaagggacccgtgcaccccgtccccctgcgccagctgtgcagcctggtcaaggccacagagacgttcaaggtcagcagagtctgtgcttcaactgcttcgagcctgggcactttgcggataaatgcccaaagccgaggcgccagcaaggccaagcgccgccccgctccaacaacggtggtaaggacgtcattcggggtcgtgtgaaccacgtgactgccgaggatgtgctgacaactccagacgtcatcgttggtacgttcctcatccattccacccctgctaccattttgttcgactctggagcttcccactcgtttatatctgtgccattcgtggggagaaatcagttgggggtagaaaggcttaggaaccctatgctcatcaccacccctggaggggttatgacagcgaagtactatagccctgccgttcccatagaaattcagggaattccgtttccctcggatctgattcttctagacaccaagaacttggatgtgatccttgggatgaattggttggctcaattccaaggagtagtggattgtgcaagacgcactgtcactctgcaccgagggccggaacaaccggttgttttatttgcacccccaacctctgtcagtagttcagaacttcatcagataggactgttagaaatccccatcgtcagagagttcggagacgtgtttccggaagaactacccggtatgccgcccaagcgagagattgagttccggatagatcttgctccaggaacaactcctttgtacaaacggccctaccgtatggcagcaaatgaactggccgaaattaagaaacagttggaagagttgaaagaaaaggggtatatacgtccgagcacttccccctggggtgctcccgtaatttttgtggagaagaaagacaagacaaagaggatgtgtgtcgactacagagctctcaatgaagttactatcaaaaataagtaccctcttccccgaatcgatgatctgttcgatcagcttaaaggtgccacggtattctccaagattgatcttcgttccggatatcaccagttgcgcatccgtgaagaagatatcccgaagactgcattcaccacgcgatatggactgtatgaattcacggtgatgtcgttcggtctgactaatgctcctgctttcttcatgaacttgatgaacaaagtgttcatggaatacttggataagtttgttgtggtcttcatcgacgacattctggtgtactcgcaatcagaggaagaccatcagcaacatctccgtctggtgttgggaaagttgcgggaacatcaattgtatgccaagcttagcaagtgtgagttctggttgtccgaagtcaaattcttagggcacgtgatatctgctaaaggagttgctgtggaccccgaaacagtgaccgccgtcaccgattggaagcaacccaagacagtcactcaaattcgcagtttcttaggtttggcaggatactaccggaggttcatcgagaacttctccaaaatcgctcgacccatgacacagttgttgaagaaagaagagaaatttgtgtggagcccgcaatgcgagaaggcgttcaaaacactcaaagaaaagctggtttcctcgccagtgttaatcttgccggatactcgcaaagacttcctggtgtattgtgacgcttcgcgccaaggattggggtgcgtgctcatgcaggaaggtcatgtggtggcctatgcctcacgccagctacggcctcatgaaggcaactaccctacccatgatttggagttagccgcggtggttcatgctctaaaaatctggcggcactatctcattgggaatcgctgcgaaatatataccgatcataagagtttgaaatacatcttcacccagtcggatctgaatcttcggcagaggagatggttagaactcatcaaggattatgatgtgggaatccactatcaccctggtaaggccaacgtggtcgcagacgcgctgagtcgaaaaagccgttgcaacactcttggcgtccgtggcattccactggagcttaatcaacagttggaagccctgaacctaagcatcgttagccatggattcttagctacactggaagccaagcctaccttactcgatcaaatccgcgaggctcagaagaatgatctagatatgcatgggatcctcaagaatatgaaacagggtaaagccgctggtttcacagaggatgaacacggaactctatggaatggaaaccggcgtgtcaaggcagagcaccaacgaccggccggacttctccaacctctccaagtaccagaatggaaatgggatgaaattgggatggattttatcactggacttccaaaaacccaaggtggatatgattctatatgggtagttgtggaccgactaaccaaagtagctcggtttattcctgtgaagaccacctatggagggaacaaactagctgaactctatttcgctaggatcgtaagtctgcatggcgtccccaagaaaatcgtatctgatcggggaagtcagttcatctctcacttttggaagaagctccaagaagagttgggtacccgattaaatttcagcaccgcgtatcacccgcagacagatggtcaaaccgagcgtctaaaccagatcctcgaggatatgcttcgcgcatgtgtcctagatttcgggaaaacatgggataatagtctcccctatgccgagttctcctacaataacagctaccaagccagcatacaaatggcaccctatgaagcgttgtatggacgcaaatgtcggacaccgctattgtgggaccaagttggggaaagccaagtgttcgggaccgatatcctgagagaagccgaagctaaggtcagaaccatttgggaaaacctaaaggtggcacagtctcggcagaagagttatgcagacaaccgacgccgtgacctggaattcgcagtggatgactttgtgtatctccgggtaacgccattgcgaggggtacacaggtttcagacgaaagggaagctcgcacctcggttcgtgggtcctttccgcatcactgctcgacgcggagaagtagcgtaccaattggagttgcctgcttccttgggcaacgtgcatgatgtgttccatgtgtcgcaactcaagaaatgtcttcgagtgccgtccgagcaggctgactcagagcagattgaagttcgcgaagacttgacctacgtggagagaccagtgaaaatcctagacaccatggagcgcaggaccaggaatcgggtaatccgtttttgcaaggtccaatggagcaaccatgccgaggaagaagctacttgggagcgtgaagacgagcatccccgtgctcccctccaccgtttccgccactcgccgcccttcctccccgtcggaatcgagcccgcgccatcgcactctctctccgccgtcgccgccgagctccggtccgccgccgtcgtcgccccggaccatctcccgccccggcgccgcctccttcggcttcgccgcatcctcgccgacctcgtccacccctccgcttcgctcgccgaccgccggaacgccgtcgaccccgtcgacccgagccgcgccgccaccttcctccgctccggctgccgttttcgtcgtcgccgtcgactcagggtgagccgtggaccgccgtttcgtttccccctttccctcccctctctcggccgctgctccgccatgccggtggtcgccggcggcgaccatcggggcgagggcgctgcctcccgccggccgcgccgccgtggctgccttcgggcgcaccgagcggctgccgcgtggggcccggccgtcagccgcccgcgccctcgggtgcggctgacgcgtggggcccgcggcgccggtcggagtgagccgcgtgcacccggtccaccgtggaccgtgaggctgccgcgtgggccccactcccgtggacccggtccgcgcgcccctcccttcggctcggccatataaggaccggtcttcgggcctctgttgcaaagcactaccgtacttccacat

SEQ ID NO: 23192 - DNA, 8226 bp, Oryza sativa
  Clone ID: TF_OsC415818_1
atggcgctatggaatggcttgggtcaggtggccaacattgcgcagcttgccggggtagatgcatatgggctcatcaagatgatcgtggaggctgcgcagacagctaaaaggaaccgggagacctgccagaagctagcacggcatgtgaagatgatcggcgacctgctgcagcgactccaaagcacagagcttatgcagcatcaagaaacgaggaacccggtggagcagctggaggagacgctccgacacacctacatgctcatcttgtcctgtcaggacagcagctacctgcacagctgcttcatgggagggaagcaggctcaccagctgcgcgaggtgcagagtgatatcaccttctacctccagctcttccctcttgtcagcttcgttgacacgacccgtacctgggagcggcttctgagaagagctcaaccttcttgcactgaggatactgcagatgagttacaaaaagtacatcattcagatcatagaattaggaaccatgtacaggactatgcacacaaatacattaagctgattgagttacattggcaatttatattcagattcaacacagaaattctcaacgcgactgaatttggtgatcagagtgtaactcaatgtccagaagtttttgaggaaaaacgaagtgaacaagcatcaatcagaagcctgaacctggatcaactagttgttaatgatattggaaaaggagcagtgttgactttttcacagatattggctgctacaaacaatttttcagggagatccttaattggacaaggtggatttgggcctgtttacaagggaaaacttcccaatggacttgagattgctgtcaaaaggcatgatacttcttcacatcaaggtgaagaagagttcatggctgagattgacgtcataccaaaacttcgacgaaaaaatataattgagctgattgggttttgtgttcaaggcaaagaatatgaaacaaaaaggatattgctaaattggtctaagcgccttaaaataattgaaggaatctcagatggtcttctttacctacacaaccattctcccaagtgcattgtccatagggacataaaagcaagtaatatcctcttagattatgaaatgaatgctaagatttctgattttggtctggccataaaattagctccgaaagcaactacagaggtgcttgttcgtggcacatggggttatgccgatcctgaatatgttgctactggagtaatctcggagaaaaccgacgtttatagctttggcattgtactgcttgagataataagtggaaagttggaaacgtggcgcggtgggatgagagggcgaggcgagaggggcgacctggctggcgacgggccgaccaccgcggctgtcacctccggcggccgctccagtgccctcaccattgacttgccgcctctcctcccttctccggcaggtatctccaagctgcgcctcccttctccagcccgggctcttaacctctctcaagttcgaccaggtgaagctttccaaaacctcatccttcatctcttccactgccctgttacccctatcgccactacccttggcccgtcaaaaatcatcccaactcctatttggctttgcgctgctccctctaagccgctcaactcgctctatgtcaaaaatgctcttaatttctggttcagttcttcgttttcgtctttctctgtttcttctttgggttttggtttgtttctttctcatgttgcgaacaaagatgtggctacctcgttgtttcttgcgggttcgtctgttcttaagtctgctggtttgtccatccatttgaccaaagattcagctgcaaaggatattcaagaaaatgttacccggttcttggttcagtttgaaggcagttcgtccgttccctctctggtgggtgaaaaagttgttcccgcgcttcaaacagttaagccagcctttactgcaacgtcacgtcatattggatgctcccaacaatccagcaagacctctaccccctctgtgccgacaggccctgcattgaagtctgtttactgccctgtaacaaactccttcagagacgctctcctctcacagccaaaacctaaaccccccgctcgctcagccacttctcgccttcctagcaggggcagaaaaaacctcaccatgctcaaccgatgctttcgctgccttggttctgatcatcaggtcaaagattgccgggatcccttgatttgcgcatcctgccgtcgagcaggtcacaggcaagattcttgccggtcatctatggcttccaacatctcccctcgccgctcatcttcctccttccacccatccacagcaaactccacctcccgcttcactacccgctgggtcaggcgtgctctaaacactccagccccacctccgcctcgcttacctactgccccataccctcgatccaaccacagctccccccctccagataacctagccattgttccttatgttcctcctctgactcatgtggatgcgcagctggaagatgtgattgccatgttggagagcagtctttgttcctctccggtcagatctgttactgctggacctctggtccccatggaggttagtgagaatgcggtcacttcttctgttgcttctcctttaccggacgtaagaaatgccctagtctgtgtgcaagatagttcaatctcagtggctgccttagttccagttcttgcatgtgctgttaatgatctagagactgtctcaactgaagtggtacctgcgactgtttccttggtgtctgttatgcctacaagagctgctgcggttgctgaagttgctcatgctactgttgagtccgttgttgttccgtcctctgtcagcgaagatctctcgccagcggtcaaccttagcagtatgccacctcgtctcagatgcaagaataaaggtttcctcgcttggtacggcgcctgtccatcttcgaggcagccaagctcggtccccccacaggaacctagggatatcttcgtctgttcggaacagttgtctgccaacccaattctgtctccacctcaggatcctgatagcacgagatcgccacctccgacattgagtggcccctcagctgctgagcaaatcagaagagctctagcaggtctaagtccagaaggatctattcactctgcttcactctctccaggtcgggtgccagtcattacttccaatgacactactgctgcgcaggactttgcttttggggaaccagatccagttaacatatcaggagacagtgacgatgatattcttgatatctttatcccctttgttgacatgagagtaactgctcattacgccactgcttatgttacccctccatgtgaatgccctggcagagtaattcgaaaagcaatgcaggatgctcaccctcgttttcagttcactctcatctcagcttgtagaggtgcaatgactctaagatttattcacagtcaggacagagactttgcagttgatcaccaggagaatcttacagctgaaggccacttggttaggcttgaacggcctgaggacagtgcggctcgcttcattcaacacaacactatgctgtccgaactagactgtattgacttcccgccagagatgttgttccctaacaagataagaaatgcttttgaaaattacggcgagctgatggaagtagatgatcaatgcctctatggggacgaacaatcctctctgcgtcttgttgttctgcactatcctggcaagaggatgagccctagatttcggctgcgctacaatttggggattgtctgcactgtctatgtcagggttctaagaacatgggagctggccatgaacgtggatgaagatggaaattacattaagcattatgaacagtttctattccctcatcagttggatcctccccgttcaggaccaactgttggaccagaggcagagttggacaacttgaatcaggctccttcaaatcaaatctctaacaaccaaggacttcagaacaggggaagattgcttgcgattctgcctgcagctagcactgtcttcattgaggaaatctctgatacacctgaaatttttgtccctccgtcaatccattctgctccctccagtatccatgactgcctccaggacctcgtgccctcagatactgaaaatgaacatgagctttcagcccggaaacgcagaaggcagaagaaacggacaattgattcagatgtcaagaggcgatatagcgaaagactggcggccaaagaaggacatttgtacatttcgatggaatccaaagcagccagagcgaaaaaactaaaggaacaacttgccaaatgctcatccaaactcaatgacgcggtacacaagcacaatctgctcgaccttaacttcaagactactccgaaagcgttggaagatctggctattgcttgcagtttgaatgatcacgatattgcccagcttcgaaagctcttcttcagttctctagtgtcttctctcccttcgttatgttctctttcagtctatttactccatgaaactaaacttcaaaacatcccacctgaaaaagcaaaaactattctacctcctaacctcgctaattatgattttgtgggttcttatggctctactgcgggcctgcccactgcctggaatgctgactttacaaaaacttctttcatctccagacacttctcgctgacaatctccttcacctcaaccttcacagacctgtccttttctttaaccaacatctatgggccagccgagcttgatcaaaaacaagacttccttcatgagcttttagaaatagatcccctaatccagggccctagacttctcataggagacttcaaccttactagatccccttccgacaagaactcccaaaacttttcaactggtcttgcagctgctttcaaccaaacaataaactccctaagcctgtttgaattaccacttccagacagactatacacctggtcgaacaaaagagaagttccagtcctggcaaggctagaccgagctttcttcaacaatgcttggaacaacaccctcccaaacacctccctctcttcttgcactagaaccacctctgaccatgttccacttcttctcactgcttctacttccattccaaaatcgaaaactttccgctttgagaatcatcttttgctggaccgagattttcttccttcagtcatgcacaggtggccacaacagctcaatatgaatgatccggctgcttgccttgctgccaagctaaaacagacaagatctatcatcaaagtttggatgaaagaacacaggaaacgtagttctctcaatgaagactgtaagttcacaattgatctcctcgactatattgaagaactcagacctttgaatgatggggaacgctgcctaagaaatcttgtacaggagaaattgtttcaggccatccaaagcaaggttgcatactggaaacaaaggggaaaggtcaagcggctaaagattggaattgacaattcggcattcttcaaggctcatgcatcaaaaaattacaggaattcaaggatcagatcaatcaagcacaatgggtcagaaattgcagatcacaatggaaaagctctgcttctgcactccttcttccaacattttctagggtccgactgtcagccgttgtgggacttcgatctgtcaacactatactcagaagatgaacgagactataatcttttggcttcgcaaggattgcaattttctacggaagagataataacatcaattaaaggcatgaactccaacagtgcaccgggaccggatggtttcggaccaagcttctacaattcagcttggaattctataaaggaggatattatcaagctggctgcgagtttctgctcaaattcagtccaactggaaagaattaacagagctcacattgttctaattccaaaacctggcaaggagaatacagtagatggctatcgaccaatctccctccaaaactgctcagtaaaaattctttcaaaggttttggcaaataggcttcaaaaagttctgacaagaatgattcatctggaccagacaggcttccttaaaggtagatgcatctctgaaaatttaatttatgccactgaactgatacaagcgtgccatgcaaggaaatgcaagaccctcattatcaagttagattttgctaaagctttcgattcagttctctggacgagcctgttccaaatcttggctgtccgggggtttccaaacaattggatttcttggatcaaaagcctacttcaaacatcaaagtcggcagtgcttcttaatggaattccaggaaaatggattaactgcaaaaaagggcttcgccagggagaccccttatctccttatttatttattctagtggcagatgtgctgcaacgactgctggagaaaaactttcagattcggcaccctatctatcaggacagaccatgtgcgaccattcagtacgccgatgacacgctggtgatatgccgagcagaggaggatgatgttcttgctcttagatcaaccttgctgcaattctccaaagccacaggattacaaatcaactttgccaaaagtacaatgatctcccttcatatcgaccgttcaaaggaatcgtcattgtcggaattgctacagtgcaagctggaatcgcttccaatgtcttacttgggcctacctctatccttgcataaactcaccaacaatgatctacaaccaattgtggtcaaagtggatagttttcttacaggctgggaggcatctctactttcacaggccgaacgcctaatcctagttaatgcagtgctaagcagtgttccagtttatgcaatgtccgcgttcaaactcccaccaaaggtaatagaagcaattgataaacggcgacgagcctttttttggaccggtgatgacacctgctccggagcaaagtgtttagtggcctgggatgaggtttgtaccgcaaaagaaaagggaggactaggaatcaaaagtttaaagactcaaaatgaagctcttcttctcaaaagacttttcaaccttttctcagataattcctcctggactaattggatttggaaagaatttgatggaagatcactattaaaatctctaccgttaggtcaacactggagtgtctttcagaaactgctgccagagcttttcaagataactacggtgcacattggggacggctcgagaacatccttttggcatgatcgctggactggcaatatgactcttgcagcacagtttgaatctctcttctcgcattcaactgacgacttagccactgttgagcaaattttatccttcggaatttacgatattctcacccctaggctttcatctgcagcgcaaaacgacctacaagaactgcaaaccattcttcagaatttttccttgacaaatgaatcggatactcggctcaacaatcgccttggcaatttaacaaccaagacaatctatgatttaaggtctccgcctggctttccttcaccaaattggaaattcatttgggactgcagaatgccattaaagatcaagctctttgcttggcttctagtcagagatcgactgtccacaaaattgaatctcttgaaaaagaaaatagtacagacagcaacctgtgacatatgcagcaccactgatgaaacagcagatcacctcagcttcaactgcccttttgctatcagtttctggcaagcacttcatatccaaccgatcatcaatgagactaagtacctggcccaactaaaggcaccagcaactatcccaacaagacattttcagagtttcttcatgctctgctcttgggtcctgtggaaccacaggcatgatgttgtattccgaggaagaccaccttcaattgcttcatgcttgcaacgcggaatttcggaatcctccctatgggctgaaacttttacacctgatgatagatttgtaatagatgtttggaaagacatttcttcctcaattaatgcaatgacaattcaggtggggaacctctcccccccggcactgaagaacagaaaaaagttgcacaagcttattgatccatcattaggtgctaagaaacatgagcgagctcagattatgcaatgtcttagggtggcgatgttgtgcgttcgggatcgcgctgaacatcggcctaccatgtctgaagttgttactatgcttcctagcatcaagacaccgaaagacagaaaggcagttgtcaacgtgcgcttttga

SEQ ID NO: 23193 - DNA, 2079 bp, Oryza sativa
  Clone ID: TF_OsC91_2199
atgactggtttcaacttaccggaaaactttaaggaaaatccagaagctttcttccggagcatcaaaccgcgagtcgttgctccgcagaaaactctcccgacaaagaaaccagccatactagcgccaccgaccttcaagactatggctgacaagactctccgtgaattcgctgctccctctgttggcaatgtagccattgggccgcagctcaacctgggagatgtggattttgatttgaagtccagcctcatcacgatggcgtaggctagcctgttctgcggcaagcctaacgaggatgccaacgcttacttacaacagttcctggagatctgtagcacgtacaccatgaagggtgtcagtccggacgttgtcaggctccggttgttcccgttttccctcctcgggaaagcaaagtagtggttttatgccaaccgtgctacaatcaatacctgggacaaatgctctatagcatttctctcgaagttctttccgatcggcaaaaccaatccccttcatgggagaatttcaagtttccagcagacaagggacaagtctattcctgagacgtgggaacgacttcagaaatatactcccatgtcctgtgaccacctggacacgctagctggagtagccttcttctctaagacggttcaaggagccgttgatttaatagagaagatggcttctaatatgagttggagcaaggaacgactccaaacccgtcagcgaggcattcacaccatcaaggagatagaaatgcttgctgccaagctggacctcctcatgaagcgattggacgatcacgacaaaaggccacaaggcaccatcaaagccttggactcacacgttacgtgtgagatatgcggcagcaccggtcattctaggaatgactgcccggaaacccgtgaagaggcgatgtacatgggcaacaacaacaatgggtatcgtccacaaggagaaacccagctagctcaattggctttattagtccctgcaaatgaatatgggaggattccgaggcagcccgactcctccaagacagacagcctggtgaaattcatgcagaatttcctggaaaaggaaacaacgatgcccaggaaccgttattggaagacaccggtaaaatcaagcataccggccaagaagctagagcagccggctcagaggaagccgtcttccacaccgaaatcaaaaagggggtctggctcttcatcaagtcatcatgacgagtctagtgctcattcatcagctgatgtctcgatggaggatgccgacgctccgcgacatctcctgaacgacgccgacctcgaccttgtcgatgatcgggaaatgcaagcctactatctgctgagtgaccggaaatatgctcacacgcgagaatactctccggagctgctgaaaaagataggtatggatgttgacttccgtgctatttggaaagctgttggttggcaaagatttgctgtaatagattagcctggttctcatttgctcactttgcaatttctgtgcactttgaaagaaatagaagatggaatttcttttcgctttttccataaggaatacacacctacatggaaaggattaagtacacttcttggttttcacgattcctgtaaaatcgatctcctgaaaggaatatctgggttcgagaaaaataggttttgggaagatatttctggtgctccaatttgcaagaaacctaggacgaatgatatccataatcctacacttatgctcatgcacaaatggattgctatgactttgtttactagaggtgatcttagacccattagggggatgaattaattatcatgtttgccatggttaggaaaatcaaaattgctcctgtgaaatgtatgataaggcaatgctaccatgaactaaccattcccctatagaccatagtagaatctcgtgcaggtggagcatacagggaaacacacaacatgacaaggaatgaatgagaaggttcatcatcctcaacacccgtacagatgtatgaggcaggttgggaaccaactggggatgtacccggatggaccccaagctccatgccacagcatcggagtctcaagc

SEQ ID NO: 23194 - DNA, 7693 bp, Oryza sativa
  Clone ID: TF_OsC280853_1
cccggcccgctcgaactcgcctcgcgcctcctccgcgccccgtggtgctcacgccccgcagccggggcgcggccgcccgagccgctaccccctcctcctgccccgccctcctggcgccgctctccccccgtccccgggcccccccgcgccgggcttccttgcctcctgccagccctggggccgtgcgcgcgagcgacttcgcccccgccgccctccgctctccgtcgctgcttcgtctcccatgggggatctggcgttgatgagctttctgtccgggaagcgggagcgacagcggcagctctgccaccgacaaattggacgaggccgtggctcaattacttcagtggctaaaactgaaagaaagggtctgcactaccaactaaaagaaaacgtttaccttccttaggacatcttgcggctgatccatgccatgatgccactgcgagatgctgctcgtgctgcttgcgcctcgcacatattcctgcagtcctggagatgtcgtcccaaccttatcttcactggggagacgttgggcttgattataaatggtactggaaaggatgacgctaaaagagacttcatcaatatagtacagcgcatactgctgaatcactcaggcattggcgtgaaaacactaaagcttgaactcctccattttagcgatctcgacttaggttgtctcgaagcctggcttcagattgctgttgcaccagggattgaggaactcaccctgatgtttccttgcgtaagatacaaattcccatgctcgctcttatttgaaagaggtggaaactcggttcgatatcttcacctcatggtctgcaccttccgtcctacaattggtcttggttgcttgataaaattgacgcagttgcatctgtctttcgtgtggattactggagatgagttagagctcctttccaaatgcgtcgctttggagtggctgaaactctcatattgccctgagataatttgcttgaaagtaccttgtatgctaaggcagcttggctcccttgaggtggctgaatgcagatatttgaaagtcatagagatctgtgctccaaatctttcaaatttttatcttactggttttctagtacggacttcatttgagaatccattgctagtgaagaaactacgaatcatgtgtttacgtcaaggcaactttgtttcttatgctcgtacgaagcttccatcccttgtgccaaatgttgaaacacttacagtagcatctaatgaagcgaccgggcaggcgattcccaccgaccgacggccactccggccccggcggccacccccctgcgccggtagccaccccggcgccgacgcccaccacccacgcctctcttgccccatcgcgcttcccctggagcctgctcgaccgccgctcgacgttgctggccagatgcggttggcgtctctgccgccgtcgtggccagcactccagccggcgcatcccacgctgctccgccaccacaaaccagtaatcccctctcaacccctctctggaccacccctttccccacgaagctccaccccacgccggaacccccagttctggctggagtcgccgccgccgccgccatccagatctgctgtgcctttctccgccgacgatgtctcccacgtctcggagtccccggatccaaggagttcgcccacgcctgctatgccacgctccttcgctgatgctgtcaggttggatttcaatcccgccaaaggagacggcctgcccgttttcaaatccccacacggccaaccaccgccgcgcccaaaattgaagtccgccattactatcccagcctggagcacctttcagcgtcgcgcctacagggctactcccggagaggaaatgggcgtgcgtcgcatccatggtacggcgagaccaggccgcttcaatggcgagtggaaggaagtcaagccacgccactggtggcgccgctcgccgcattcacccgagtcccagcggccagcttccaggcgacaagacgcacattcaaggcgctcgttggctcccgctgcatcggcatcgctgcgcctcttcagagagagaacggctggaaaatgcttcaactgccttgcgcgtgatcaccgcgcagcgcgctgcagggacccggttcgttgcttcagatgtttccgttcggggcacaaggcaaactcctgctcccggcgtgaaccgcgaccacgccaacctcgccagtctccacagaaagcgctgcgccgccaagcttctacaccacccccgccacagaacacgtcgcaccgccaggcttctacgccatccccgtctcttccccgggctacacgaccacgccaaccacgccagtctccgcagaacacgtcgtgccgccaagcctccacaccacctctgcagctacctcttccacccaagccgtcctgcaacacgcggatggctctactgggagacccggcgacccggccggatgaagaccactgcttcgttccgacaccgttcgccacggaggctgagcggaaagaatgggaaagctcggcggtggtgtcctgggcgatgcgggcaccggcttccacaacggcgcaagatgttgaggcggcttttcgggaggaattccgtcttcggcgaggggaggtcacggtgacgcgccaccacccggaagccttcctgatcaagttcgagcatagcagtcactgctatgaagctatgcgcaagggcttcgtcaagcgaaacggtattgagctccacttcatcaagtggcgcagcctgagtgcggccctcggcatcgcgctcatgtttcgccggctcatcgcgcgcacctgtggcctcgaggagatcgagaccaacctgatccacccggtcgacactcgcacggtggatgtgtgggcttggaccggcaatccgagctccatcccgaagcggatgtggctaacctttaccggctcgacgcggggagccaaaccagagcaaatcctggtgtccgacagaccgccggcacactggcaacatggcgccaaattctgcgtctacatccacctggaggagatccacgactacacgacggtggcggtagacctcgatggcaacgaggcatgcgcgccctccaagcggcgccttccggagtggcacctcggcgtggccgacggggacccggtaccaacgcgagccttcgagaacttcccgcaccacccgcctccaccacgcactcgtcaaggccgcgagccagagcgcatcgacgaccgcgacgaccgtcgccgaagagccaaagatgatcgtgaccggagccgtcccaggcggtcgtataatgacgaccacccggaccacgacagggaccaagcctggcgacggcgcgacgacgacgacgaccgcgacggcaggggcggccggggccgcgaggcatggcgaggacgagaaagccgcaaagtctcgggccttgatggccaacgcgtgcgcgagcgttcgccgcgtcggcgcgactgggcagaggacgaccgtcgcggtgaccggcgtcatcacgtgcaggctgctgtcgccctgcctgctacaatcccgcctctcaagctcgctccgaagcaggcaccaagggaaaacctccgtgagacgggggaaaggcttgtgaacagggtgaacaatttcgccgctgcggtggatgacgcttctcagcctggcggggaagaagcctggtccgaccgccggccaagtcgcgtccatgacgtcccgatccggcaggtgttcgaccggctcaagcactgcctcttccctgctggcatccactctacaccaagccactcgggccaagtgatgcctcatgacgagagggcgtcgatcggcgcgcgaggcaacactgcagccgccacggcggttgcgtcgaagacggtgacgccgccgcagctgattacagctgcgccaacgacggaacaagatgaacaccaagatgccgggaataagaacacgctgcaagtgctggagagcctcttctccaccccgccgcgcgccgttttgccacggccgacctcccctgcgctgacgacgacccaagcgaccccagcgccagcaccggcgccgccaggtggccacgggatggagcgtcgccgcagcgcaagactcgcggcaaagccgccaatgccaactatgcaacgctgcacgagggtgttattgaagcggcttggcatgctccatgacgacaagacgctcgacgaggtgctctccgactacatcgccatgttcaatggacctctaccgcaacacgtgatcgcagcgctcacgtccatcttcgacatcgacgccgatgcaatcatggaagccaatcacgtcgacaacacgctcctggaggttgtcggcgaaggcgtcgctgaccttgtcgaggagtgtactgcactaaacgagctaatcgcagagacatcttgcaacctcgtctgcatccaagaaaccaaactaagagcagttgatgaccagctagcccgtttcttaggagcctacaggctagacagttacgctttcaaaccgtccaggggcactaggggaggcatcctacttctgtggaacagcacggcgatctcggtgcacagcactcgcataggtcgttactcgttgacagcgaatataactgtcctacgctgcggaacaagcttcatgctcaccacggtctacggcccaacgcgtcacagagaaaaagactccttcctccgtcacataaggagtttaaagccgtccccgggaaacaaatggcttatcctaggagatttcaacttggtttatcgggcacgagataaaaacaacaacaacctaaatttaggccgaatgaatcgcttcagagctgcactcaaccgctgcgagctaaaggagatccacctccaaaacaggaaattcacgtggagcaatgaaagacgacgaccaaccctcatgagacttgataggttcttttgcaatgaggaatgggacctatctttcgaccgccacatcctacacgctctttcaacaggaccttccgatcactgcccgttgttgctcaccgacccatcctgcccacgtaagccgcggcctttcaaattcgagaatttctggataaagttacctggtttcaaggaggtcgtagagcaagcttgggggaaaccgtcgaatcacaccgagcctatgcaccggcttgcgtataaactacgggatatggccaaagaactaaaacggtgggcgagaaccacgtgctctcagactaagctgaaataccatatggccctagatgtcatcctacgactggatgtggcccaggaacaacgtaccctttcgccggaggaagggaacctaagagcagccctgaaaaggagagttttgggtttagcggtgattgaaagagcgagaaagagacaagcgtcacgaataacgaacataagagcaggcgacgcaaacaccaagtttttccacctcaaagtaaactccacaagaaggaagaatcatatacatcgcctccgcaaacaaaacgggtgggcagtgacgcacgaagaaaaaagccaagcgattttcgaccacttttccctcttcatggggaggccgcaagaaagacaactagatctaaactggcaatccctagggctagagacaacggatttaaattcgctcaatgaacctttcaccgtggatgaaatcaagagagcaatttgtcacatgccgacagacaaagcacctggccctgatggttttaccgggtgtttcttcaaagcatgctgggaaaccataaaaaacgacgtcacgacagctttcaacgccatctacaatcatcggtgcaatcatctaaacctcctcaactcggcaagcgtcgtcctcatcccaaaaaaagatggtgcagaacaagtctccgatttcaggccaataagccttatacacggatttgcaaaaatcttctcaaaattactggcccttcggctgcaacctctcatgcacaaacttgtttcaacaagccaaagcgctttcattcggggaaggagcatacatgataatttcctatatgtcagaactctgttcgcaacttctagctccaagatactcctaaacggaataccgggtaccaaaataattcatgggcaaggcctaagacaaggagaccccctatccccgctactcttcatcttagcaattgacccacttcaaagactacttagcaaagcgacagaactcaagctactaagcaagctacgaggaaagtctgtgacactatgtacttccctctacgcggatgacgcagcagtctttattaaaccaggaaaatccgaagtgcagaatttcactgctattctacatcgctttggcctcgcaaccggcctacgtgcaaatatagaaaaaacacaagtggtggccatcagatgtgaaaacgtggacttggatgaggtgcttcaaaacaccccggcaacaagagcttccctacctatgaaatatcttggacttcccctaacaacgggcagattgcgcaaggcagacctacagctgttgtttgacaaatcggccggaaaaatggcagcttggcgaggtagaaacttgggactcgccggacgaactacactagtcaaatcagtgctatcatcacagccggtctaccttcttattgcactaaaggtctccaaggaatcaatggagacgcttgacaagcaaagaaagagcttcctctgggcaggatcggaaaagctaacgagaggaaaatgtaaagtaaattggaaaagaacctgctcaccgactgtctatggtggtctgggcattctgaatttagaaaactttgctagagcgttgcggatcagatggctgtggcaagagtggaaagctccggagagaacctggatcggccgggacaacccatgtgacaacacagagaaaactctttttgcggcggcaacgacaataactgtgggagacggggaaacggctagcttctggaactcagcttggatgcaagggcggcggccgagggatgtgatgccacttgtatatgcaatatccaaaagaaagaatagaagcctcaaagaaggcgtcacagataacgtctgggtacaagacctaaatttctcttccccagatgcaataacagttgagctgctggaccaaatagtgactctgtggtcgataatccaaagcgtgcagctcagtccagacgtgacagatgaaatcacttggaagttcaccaatcatggggagtatacaacaagctccgcctataagatgcagtttctcggatccatcaatgcaaactatgacgcaatcatctggaaaccatgggcaccaaacaaatgtaaaattttcgcatggttggccatccaaaacagagtctggacggctggcaggctgactacacgtggatggccgaacaacactttctgcccgctctgtagacatacccgggaaacggtattccacctcctagtagactgcagatactctaggaggatttgggagaatctggcttgctggacgtcgcaagagcacatcaaaccaggcaattgggctcaacctgcgtcgctccaagactggtggactgcaatagcaacacacccagggacaccgagaaaaggaaatcgcacccttctgttgctagtgacatgggagatttggaaagagagaaatcaaagaattttccagcgcaacgaactctccatactatcgctctgcacaaagataaaggaggaggccaagacctggactctagccggcgcgaaaaggctatctgagataatcccttaa

SEQ ID NO: 23195 - DNA, 5157 bp, Oryza sativa; identical to SEQ ID NO: 14397
  Clone ID: TF_OsC359_7853

SEQ ID NO: 23196 - DNA, 4135 bp, Oryza sativa
  Clone ID: TF_OsC1713_4081
tcaagccacattagagaagtctatgacaattaactcattcctcaacttgcaaaagcgggtttcatcaagaggcttggtaaagatgtcagctagttgatccttggttcttatgtggctaatgactatgtcacacttggcaacatggtctcttaggaagtgatggcgtattgtcaatatgcttggatctagaatgttggaccgggttattggctatctttatggcactatcattgtcacataggagtggggttttggtgaaggatatgccataatccaacaagatttgtttcatccaaagcaactgggcacaacaactacccgccgaaacatattccgcctcggcggtagagagggctacggagttttgtttcttggatgaccatgacacaagggatctaccaagcatttggaaactacaggatgtgctctttctatccactttgcaaccggcataatccgaatcggaatagccaacaagcttaaatttagcaccttttgggtaccacaagccaatagtagaggaatgctttaaatatcttagaatccttttcacggccactaagtgacactccttaggagcggcttgaaaccgtgcacacatgcaaacactaaacatgatatctggcctagatgcggtaaggtaaagcaagctaacaatcatagaacgataaagctttaaatctactggtttacctccctcatcaaggtcgagatgcccgttggttgccatatgtgtcttgatgggtttcgcatcctccaagccaaacctcttgagtagatccttaatgtacttggtttggctcacgaacgtcccatcctggagttgcttgatttgaagtccaaggaagaagctcaactctccaatcatggacatatcaaattccctagacatcatatcaccaaattccttgcaaaatacttcattagtagaaccgaatatgatgtcatcaacataaatttggcacacaaagaaatcatcaccaatgatttttgtgaaaagagtggtgtcaacttttccaattttgaaatcatttagaaaagcacttttcacatccatttgaaatagttttatgtcaaaacatgatgcaaatgcaagaaggatgagaatagccttaagtcttgctacgggggcaaaagtttcaccaaagtccaaaccttcaacttgtgtgaaaccttgtgccaccaaccttgccttgtttcttaccaccaacccgttctcatcttgtttgttcctaaagacccactttgtccctatgacattgtggtctctaggtctttcaaccaaagtccaaaccttgtttcttgcaaagttgttgagctcttcatgcatagcattcatccaatcaagatcacaaagagcttcatctacatgttttggctcaagacaagaaacaaacgagtaatgttcacaaatcgaagcgacacgagatcgagtttgaacacccttactaatgtcacccaacacttggtcaattgggtgatccttggaaagagcggtgtgtattcttggtggaataggtggatcttgtgccttctcctcctccacttcaacttgagcttgacttggcgtagcggaagtagatgacttatcttgagtggaggtggatggcttgtcttccacttcaataggcttgacatctccaattgacatgttcttcatagctctcatcaagccttcatcacctacatcatccaaattctcgtgcccctcttgggagccattagtctcgtcaaattgaacatcggcggtttcttccacaatacctttattcttgttgtagacctggtatgccttgctatttgaggcataaccaagatcatcacaatagtcctcgatattggtattcttaaactcggaaccattgtcacttctaattttcacaagagtgcaactaaattcattttgggccctttttgcaaactttttgaaaagctcggcaacaatagacttatcatgcaaaaagaacacccaagtatagcgagaataatcatcaacaatcacaagacaatgactattaccaccaatgctcttataggttgttgggccaaacaaatccatatgcaagagctccaatggtctagatgtggacatgatactctgagtaggatgagaacatgcaacttgcttgccggcttgacaagcactacaaagcttatctttctcaaacttcacatcttttaagtccacaactagatcacgttttgaaagtttgctcaattgattcataccaacatgggctagccttctatgccaaagccaacccaaagaagtttttgcaactaaacaagttttcaaatttgcttcactagaattgaaatcaaccaaataaagatttccatatctaaaacctttgaacacacaagacttgtcaagaaggctagaaacaataacttcttgcggtaagaaagcacatgacaagccaagatcacaaattcgagcaaccgaaagcaaattgaaatttagagatttaacaagagagacattatcaattgacaaatcattggagatagcaattttacctaacccaattacctttcctttgctattgtctccaaatgtcactttctcttgtttattccctcctacttcaaatgtggtgaacatagccctatcaccggtcatgtgttgagtgcatccactatcaaacacccaatggctcccaccggtgcggtagttcaccaccgagtataggggaacccacatatctagcaacaatgctaccatcatgagccttccattgctcttgacaaaacgagtggcacagtgagaaggtttcttacccttctttggaatgaatccaagtccctccttgttaaggatgcaccgttgctcactcaaaatcttgtcaagagtgttcttatccttgaagcacctctccaagctcttgttgagcttagccacttgctctttaagctcattgttctcaacaacaagtgaggcatcacaaatagaaacacaagaggtagagctagagctagacatatccacaagatcatcacaagaggtagaaatgctagatgatgcaacatgagcaatatggcaagtagcactatcaccaagcaaatcacaagatatgccaacatcaatgagagctccatgttgagtagtggaaatgaggttgtcttgagcttccttaagcttctcatgagaaatggtgagtctctcatgagaagtctttagctcctcatacaagacctccaaagaagcatgatccttctttagggccttgaacttgacaatctccttctcactataagcatagagctcctcaaacatactcacaagctcatcataggaaacatcatcacaatcatcatcactctcactatcactaagagatgttaccttagaagagccctttgccatgagacaaagtggagcgaagagtgatggagcctccttgatggcaacaacggccatcttcttcttcttggagcttgtatcatcaccatcttcttcctcggacccggatgaggcggagttcttgagctttttcatgagcttgtagcctccactcttcttcttggatgacttgtctccatcatcatccttggaagggcactttaaagcaaagtgtcccttctcaccacactcaaagcacctcaagttggagagagtcttgttgggtcttctatttcttctcctattggagttggagccccttcctctctcctttctccttcccaagagatcattgaaccttctagcaagaagggcaatctcttcctccaagttctcattggcttcattcaccttgccattgcccttgtcttcaacttcggcttggcgagcaatgcacttcttggaaggtgaggtttcctccatctccttcttcttcaacttgtacatgtcattggtgttgatcttccccaagaggcttgccggtgtcatccttgacatgtcggagttgatgagcatggtgacaagggtctcatacttctccggtagagccctaagcatcttttgggcaacctcaagatcggtgtagtttgccccaagccccttgagatcatccacaatgacattgagcctcccatacatgtcattcacactcatgaggcaacatggagaatgtctcatattggatcttgaggaagtgaagcttggcatccttgtactcacttgtgccctcat

SEQ ID NO: 23197 - DNA, 4293 bp, Oryza sativa
  Clone ID: TF_OsC1713_4390
ttaccagttttcgaatatatgcgggtactccgtcctcaagaattcttcgctttcccatgtggcttcatcctcagtgtgattgctccattgtaccttgtacatacgccacactttgctcctagtcctcttttcggcttcatccaatatccggatcgggtgttctggatatgtgagatcattgctaatgtgaatctcttccagcggagcttgctcttccggcactcgtaaacatttctttagctgagacacatggaagactgggtgcacatccgcgatattctctggtaactgtaactgatatgcaacttctcctcgcttggcgatgatctggaatggtcccacatatcttggtgccagttttcctttgaccttaaacctttttgtttccctcatcggagaaacctttagataaacgtaatctccctccttaaattccaggtttcttcttcgggtgtcggcgtaactcttttgtcgtgattgtgctacttttagacggtcacggatcaagcgaaccttttcttcggcttcttgaataatgtcaggtccaaataccgcccgttctccagtctcggaccacattagcggggtacgacattgtcgaccaaacaatgcctcattggttgacatttttaggcttgcttgaaagctgttgttgtaggagaattcggcgtagggcaaacatctctcccagtccttgctaaaatccagagcacaagccctcagcatgtcctccaggacctggttggttctctccgtctggccatctgtctggggatgataagctgtgctaactgcgaggtaacttcctagggcttcatggactttctcccagaaatgtgaggtaaactgtgtgccccgatcagatataattttcttaggtacaccatgaagacatactatcctggtcatgtataactcggctagcttagcactgctataatttgtcttaacgggaatgaatctcgccgtcttggtgagtcgatccacgatcacccaaatagaatcatatcctgttgcggttttgggcaatccaacaataaaatccatacctatctcatcccatttccattcgggaatcctaaggggttgcagcaagcctgccggtcgctgatgctcagccttcactttttggcacacgtcacagagtgctacgtattccaccacatctctcttcatgttgggccaccagtatccttccttcagatcttggtacatcttcgtacttccggggtgcaatgaatatgccgattcgtgagcttcctttaaaattaatcccctcagtccaccctgttcgggtacgtaaattctctttttataccatagaacatctttttcgtcggttgaaaattcctttgcacgtcctgcagctaagcgttccttcacctctcggacttcctcgttgtccttctgggcttcttctatttgggttctcaaaagaggttgaatgtccagggtgtttatccgtccacgaggtactatatgtaggttcagctgagctatttcctccctaagctcagggaccatcccttccattctcagatgattgcaatggctcttacgactcagagcttcggccaccacgtttgctttgcctgggtgatagtgaacctctaaatcatagtccttgattaattctaaccatcgcctttgcctcaagttgagatctgactgggtgaagatatactttagactcttgtggtcagtgtagatatcgcaatggtttccaattagataatgtcttcctcctagtccttgccttgaagcatcacaatatataacaaagtctttcctgatgtcgggaagaactaaaataggtgccgaggtcagcttttctttgagctgctcaaagctttcctgacactgttctgaccacacaaacttcttttccttcttgagtagttgtgtcattggtcgggctatcttagagaacccttcaatgaaccgtcggtagtatccagccaagcctagaaaactccgaatttcagtcacagatttgggtgctttccattccgtgacagcctctactttagcaggatccactgctactccaccggccgagattacgtggcctagaaaagcgacttcttttaaccagaactcacacttgctgaattttgcatataacttatgcttccgaagtttctcgagtaccaatcgcaagtgttccgcatgttcttcctcatctttagagtagattagaatatcatcgatgaataccaccacaaatttgtccaagtagtccatgaacactttgttcataagattcataaagtatgccggagcgttggttaaaccaaacgacattacggtgaactcatataatccatagcatgttgagaacgcggttttgggtatgtccccggttctaattttcaattggtggtatcctgaccgaaggtcaatcttagagaacaccttagctccgttgagttgatcaaaaagatcatcaatccgtggtagtggatacttgtttttaatagttacttcgttcagtgatcggtagtctacacacattctcatgctaccgtctttctttttaacaaataacactggggctccccaaggtgatgaactggggcgtacaaatcccttctcttgcaactccctgatttgctttttaagttcttctaactcattgaccggcatctgatatggtctcttggatatggaggcagttccgggtatcaggtcaataatgaactctatgtcacgatctggtggcattccaggtaaatcttctgggaacacatcaggaaatcgctgcactacgggcattccctttaggggtagcatggtaaatatacctccggcacgttcggttagcctaggatcttgatccatggttgctctcatatccgatccccagggtgtggtcagggtaacttctctatgtctacagtcaattattcctctatgctttgctaaccaatccatacccaaaatgacatcaagagtttggggtattagcaccataagattgtagagaaataccacatccctaaggcggatgggtacgtcaatgcaagctgtatccactgctatctcaaccccaggtgaatgtactaacattggttgtcttagtttaactctggttaaattgtgttgttgacttgctttcaaagatataaatgaatgcgatgctcctgaatcgaagagaactttaactggagtggagttgagtgaaaacatacccatcagtacgccttggtcttcctgggcctcttcagctcgaacgtggttcacttgcccgcgtccaaatccggtagcggtcctgttagtctgcggagtcctgaatagacctcgtccagcagcaggggtagcagtcccgtgaatagccgttgcattagctccggtgcgaatgggtgtcttgtttggatgaggacatttattggcgaaatgctcgtactctccacagttgaaacagcttcctgtccttactgatccagtggcggcctgattcggtgcaggagctcggttctgaatggtaaccgacctgtggaaattgctggaggcggcaggtcgactggttgtcaccactgttggtctccatgccgaggaggttgtccctttaggacgctggggtgcggtctgaggcgagcggttcatggcaagcctccttttacgattgtgctccacgaccttccggtcgttctccagcctaacgaccttattgattaaactctggaaactatcgtgatcttgtccaatcatgggcccgcgtaactcgtcattcaagccttcaatgaatttgtcgatcttttcctcctcgtcggcaagatctctagtcgcgtagcgcgctagctgagtgaaacggttcaggtactcttgtactgtggtattccctttccgtagtctcctgaactcattcttcttcatccgcatcaccgcggcaggcacgaagttgtcacggaaggctgtggtaaattcctcccagtttggttctccagcatcttcttctcgggcttctttgtacgtgtcccaccagtctccggctggtccttccaattggtttgccgcaaagatcactttattggcctcacgtactcgaacaagagttagcttcttctcaatgatccttaaccaatcttcagcatccataggttcttcagctgtggcgaatgtgggtggcttggtcctcataaactctccaaagcttgaccctccgcggttgccttggttgttcgcgatagcttgcagaagttgagtttgggtggccataactccggccagagtggttaagtcgggtgtctgagtttcgtcattgctggttgttgcccgacgtcggcttgccat

SEQ ID NO: 23198 - DNA, 5181 bp, Oryza sativa
  Clone ID: TF_OsC154683_1
gtgcttatacattggtctgatgatgtgatcgccaatgcaacttgggaagacttggaagatcttcgtactcgtttcccaagagcactggcttgggggcaatccagttttcaaggggggaacattgtcaaggctgcgttgggtgctgatgctgacattgccaaggaggagaagatcgaagggagagttctgaatcctagtttaggcagctatcatgagggcgagagggtggcaccattccacgatggcagcagcacctctgcacgaaggcgacaacgacaacacatgggagaggaccggggattaaccactgatgaggacattgaggtgcttaccacgatagagaggtggcagcaatgccgggtggttgacaacaagttgatggcgatggtggatggcttgatggaagacggcgcaggaagtggggaagacgacagaggtggatggcataacagtgctgcgccattcgctgctcgtgcttgcgatgacagcggcaacattggtgctcactcgatcggactgcaacacaaccgcgtctactcgatgtcccgaggcaggaacctaggccggattatagtgagcagcaatagcagcaagacatggaacggtggtctgcaaagggaaaaggagggggtgctggatctacttatagaggaggacagggagttgagcggccagccggaagatgctcaaggtctgtgggatgctgtcgacaccggcgatgtcccgtatcaggaagattgccaggcgctttcagccatcttgcgagcggtgccggctgagatggtccggccgcttgccgagaaggacagcgccaaagacgcctgggatgcgctcaaatccatgcgagtaggcgcagatcgtgttaaggagtcccgagcacagaagctgcgccaaacttttgagtccatgcgattcaagaatggcgaacacctggaggatttcagccttcgtctccagtccttggagatgatctgtctgaagagaaggttgtttgaaaattgcttcgcgtcgttccccggaggcgctgtccctcacgacgcaggaggtgggagaaaatccccggcgcagaggcggctggcagaggagaagacatggatgggagcaactctcaaaattcttgaagacaacaaaaacaatgctcgccaggagggcaaggcatgcagatttacaacacacgtcgacatcatggccgagtgtcgacgagatgaaatggccaatttatcaatatttgtgctatgtccgagaccgacgagtccggataacatattggctaaagctgacaaggctgcagtcattaactcattccatttgtctatgaccgacgaggtgctcttcagcgaaaaggaggcccctgctcactcaaacaaggaagctgggcagaactcagccggggggagggcgtccagctcacggcaaccacaccgcagcaggcgcgagcgcgacggcaacggctccgacggcaagtcaggttcgtcccaagcggcaaaccgcaatgtgtccaaggacaaatgccggtactgtggcaaacttggtcactgggccaaggactgttgcaaggcgaagcgagaccgcgagaaactggctcaggcaaaccttctcatcaccgagcctgctcaagccgcggacgaaggggagccgacactgctgatggcgcaagtgtgcgagcttgcccctgctaccgatcctgtcattactgacggggaggtgacactgaaggaggaacgtgctcacgtttctcttcaggatgaaggaaagcccgttgatctagactggatccttgacacgggcgcttcaaatcacatgacgggctcccgtgatgccttctccgagcttcacaccaccgtgcgcggcactgtcaagtttggtgatgcgtcgagagtccggattgaaggacgaggcacggtgctgttcgcctgcaagaacggcgaccactgcgcgctcactggcgtctactacatccccaagcttcggagcaacatggtcagccttggccagcttgatgaggcacgttgcaagacggtgatcgaggatggcgttctcactctgcgtgattcacagcgacggctgctgtgtagggtgcgccgaggaactgggtgcctctatgttctccacgtcgagctggcgcaaccggtttcccttctcgcaaaggggaacgatcaagcctgggtctggcacgccagatacgggcacctcaacttcgacgcactccgctcactggcgagccgcggcatggcgcgcgacattcccactctggagcgggtcacccaggtctgcgatggctgtctaataggcaaacagcgacgagcgccgttcccaacagcggcgttgcatcgcgccactggtcgtcttgatctggtgcacggggacatctgtggacccatcacgccgtcgacacatggcggagtggaggtggagaccggctgcaagctgcgcgttctccgcactgatcgaggaggcgaattcacctctgtcgagttcgggctatactgcgcgaacgaaggcgtcgctaggcagttgatggcgccgtactctccacagcaaaacggcgtcgtcgagcgccgcaaccagacggttgtggcaatggccagatgcatgatgaaggccaagaacatgccgggggagttctggggcgaggcggtcacaactgccgtctacatcctcaaccaggcgccgacaaagagcgtccgcgacaaaacaccattcgaggcgtggcacggtcgtacacctgctgtgcactactttcgcacatttggctgcatagtctacgtcaaggaggtgaaaccacacatcaacaaacttgatgatcggagcaaggcgatggtctttctcggctacgagccgggttccaaggcgtatcgtatctacgacccggtggccaagcgcatcgtcgtgagccacgatgccgtgtttgacaaggcagcgtcgtggccatgggcgtcacccggggaggaggatggggtggcgtcttctcaggaaaccttcaccgttcgctacgaggtagcggcggtggaagtgccgtcccgccactccgactccatgtcgtcgccggctcactcgggaccaccggcgccatcaatctctgcatcaccgggcgtcccagcggtcgagttcgtgtcgccgcctgcggaaacgcctgatgtcgacgacgacaacgtagggccacgtcgtttccggacggtggctaacatcctcgacactacctcgccaattgagctcgattccgacgagcttcatctggctgctgccgaggaaccaagtaaccacactgaggcggcacaggacacactctggcagcgagcgatgcaggaggaactaaagtccatcgtggagaacaacacgtggactctcgctgacctccctgctggcaagcgtcccattggcttgaagtgggtgttcaagctcaagaaggacgagacgggcgtaattgtcaagcacaaggcccgactggtcgctaagggttacgttcagcagcaggggattgatttcgacgaagtattcgcccctgtcgccagaatggaatccgtgcggttgctactcgccattgcagctcaccttgggtggtttgtgcatcacatggacgtgaagtcagccttcctgaacggagagctggaggaggaggtgtatgtcgcccagccaccaggtttcgtcgacgacaagcacccacatcaagtcctgcgcctgaacagagcactttatggcctgcgtcaagctcctcgtgcctggaacgcgaagctggatgttagtcttcatgaactcgggttcacgcggggcatcacagaacatgctgtgtacacgcgcgggaccgggaacgcgcggctaatcgtcggcgtctacgtcgacgatctcatcatcaccggcgctcactctgaaacaattcaaagtttcaagggggagatgcactccctattccggatgagtgatcttggattactcagctactacctcggcattgaggttcatcaaggcaacgatgggatcacaataaatcaatccacttacgcgcagaagctcttgaagatgggtggcctggcgggatgcaattcagcttgcgttccaatggaacccagattgaaactgacgaagaatagcgatcgaccaagtgttgattcaaccttttatcgcagcttagtggggagtctgcggtacttggtgcattcacggccggacattgctttcgctgtgggctacttcagccgtttcatggagtcgccgcgcgatgatcatctcacggcggtgaagcacattctgcgctatgttgcaggtactgtgaactacggttgcaagtttgcacattcaggagaagaggggatccatttgctgggattttccgacagtgatttggggggagatgtggacgatcggaagagtacctctggtgctctcttcttcctcggctcaagcccggttgcttggctgtcccagagcaagctcccgctgtcgtcgtccatcaccacaagcagcagcaagttgtatacgccctcctgttcgtcttcaacagcatcagcaagtcggggcccccaggccgccgtcgatcgctgtacgccccgcgccgatctccgcccgcatgcgccgtcgccccgccagtttcggagttcggacgcgtcggcactccgcccgccgtcgcccctcttcgcccgcatgcgccattgccccactccgcccgttgccgccccgccggcttcgcgcgcgtcgctgctccgcccgccgtcgccccgcttcgccctccgtccaagatggactgtttcttttcatcgacgtggcgtcaaggaggagaggacgatactgaaggggataaccgacaaggtgaggccgtgggaggtgctggctgtactgggaccatcggggagaggcaagtcgacgctggtctccatcctcggcgggcggctcgccggccggcacgccgggatggtgctggcaggcgggcgcgcgccgtgccgtgccgtgcagcggcgcgcggggttcgtggcgcaggacgacgtgctccacccccacctcaccgtctgcgagacgctcctcttctgcgccatgctccgcctcccgacctccgcgcccgccaccgccgaggccgccaccgccgaggccgtcatctccgagctcggcctcgcgtcgtgcgccgacaccatcgtcggcaacgccggcatttgtgcctacctgagtgctaagtatatggtgattctctga

SEQ ID NO: 23199 - DNA, 4851 bp, Oryza sativa; identical to SEQ ID NO: 14405
  Clone ID: TF_OsC91_2278

SEQ ID NO: 23200 - DNA, 2216 bp, Oryza sativa; identical to SEQ ID NO: 14406
  Clone ID: TF_OsC1713_4158

SEQ ID NO: 23201 - DNA, 4572 bp, Oryza sativa; identical to SEQ ID NO: 14412
  Clone ID: TF_OsC359_6842

SEQ ID NO: 23202 - DNA, 1248 bp, Oryza sativa; identical to SEQ ID NO: 14410
  Clone ID: TF_OsC359_7631

SEQ ID NO: 23203 - DNA, 3918 bp, Oryza sativa; identical to SEQ ID NO: 14417
  Clone ID: TF_OsC1528_1733

SEQ ID NO: 23204 - DNA, 3067 bp, Oryza sativa
  Clone ID: TF_OsC783_2
ttaagtgctaattcgtggaggtggagggagacacttccgagatgggcctagtctattacaaggcccaaggcccaagttcggtttcagcaacatcactgtcttgttttgacgattcccgttgactcgagatgaatttggacatgagaccggatgcgtttgaaaggtagcgagataacctttccatcaagtccaagatcacccaaatcggagttggcatgaaggcgctaggtccgtttgaagtcagtgctgtctccggaggccgaactggacttggacttggaattatcattggaacgtgtgaagttatgtgcgtttccgacgaagtgatgtcctcatcatcctccccttcttgaattggagtcgtcctcgactcaatcccatcttcttgatcgtgttcactctgtcgtccaggggtcatccttggaggtatctcatcatgaaaagcaccctcatattccttcatcttaccacatgtattaaaccactgaatatgatacggatgtggatgtggatgggtagtcaagccaagcttcttgaccatctcttcacttgctaaattgttgcaactcccgctatcaataatcactttgacggtatggcctttcacaagaactttgctttggaataaattgtggcgttggttttgctcttcacacttctctttagcactaagtgctagcttgacaattaggctaggatactgatctagcgactctggatgcaaatggacttcctcgatgtcatcgttatcttgtcctcctacatggtcagtggcaactaaagcatattcatcatcacaatcactagtagaagtatactcaccatcatcattcacaaatagagctcgctgatttggatagtcgcgggcaatgtgtccaatgccatggcacctatgacatgtaatatcacgggtacgtccagtggaagctaccgaagttgcactcttggctggagtctgaactgaagcatttttgcttgtttcttgagcatgggatggcgtggaggtaggtggacgaacggccgtagtaaattgacgtggtgttgattgtcgtgtggaagtagcacctgcaaaagaactcctatgcttgttgcgtccctgcacttctctttcagctttgcaagcaaattggaataatctattcacggtattgtattctttgtattcaagaataccccgcatctccaccaaaatgataacaatccggcctaggtggggttggccgaggcccaacaaattaaggttgcctggactcaaacagttcttaggcacactaaggttagcgctcgacttttgcgtctttgccagtgggtaatagtagaggatgtcctcatcaagctggtggacagcatgatcaagatgctgtgcaccaatggcgtctggtggctggaggacctgcaggacctcctcgcctgctacctctcgctcaacgccgccgagcaccaccgcaccatcgtcgcactcttccgccgcgtcatcctcgtctgaatccaccttagcagcagaggcttcttcccagccaaaggcttcttgctgacgcggtgcagcctcctgccgaccgcccgtccccgcactcgtcctcgccgtgcgcgcttggctcttcccttggacttcatagtttgtcttagatttcgtgaagatagctttagcattttcccttctaggtgtattcatgttttcgaagatccccgtcaggccgtaagcgatggcgcagaagggcagcgcttcaggctccttggccgacagcgctgctgttcccagtccatgagcactggaagccgtccctattcctcgcgcgatggggtcgttgaggccaagcttgtccatggctgcttgcacaaaatttgcgccgatcagcccggtgaggacgacgaccgcagcggttagcgaagaatttacaccttcaaagaaagacacgatgctcagagccaacgccacggttatgcacctcggtaatattgatatggtcagtgaaggctctagccctatcacccgtcctaggatggcagttgagtataacgagaatgttgatgcgatggcaattgatgtgaaaatttccgctgcatgcctcttcacaagctttctctgcttgaacattgagaatgcaaacgatatgatgactgaaccaagaaatcccatcaggacgtcaccagctccaggattagatggcgcctttgtgaggtaatcacctagcactgcatcaactccagaccgggagagatacccatatgctattgctgccaaatctgcagagagtgcacaacaaatgattgggtgaagcactttcttgacaccagatggtatcccagaaccaaccatgtatcccagtacagttgaagcgaggaggaaaggaagacatgttcttgccgtggtgccaagcgctgtggggttaacatacgcaacagcaaacgatgcgacaaagacagcaccccaggcccagaattccagcgtcgcgaacggagacggcttgctcatcggctcagctggtataagctgtgtctggacaatcttcctcacggtgagtgctgtgtatccggccaccatgagtgaagcaaaccagccaccaaaaatgatgaggaagatcttgaggccggaagcagccgggacgtccctgacggcgagcggcaggacgaccagggaagggacgtagaagaggggcagccacctctggatgaagagggtggccggctcgaagaagtccatgaaccccttggcgagcgcgggcgcgaaggcgtcgaggacgacgaggacggagaagacgcagaacatgccgaagagggcgctggggaacttgatggacgccgccgcgaacgcctgcttcaggaagcatgtcagttcgatcggcaggtcatgcgaaatcgcgacgaggctgcgtgcattttgactgattgacgactcacgctgggtaggcccgagggagaggtggcgcccgcgcctcctcctcctcctccggcggcggcggcggcgtggatcggggcgatgaggcggtggcgaggattggcgggagccatggagattgccgccgcttggcgggaggaggaggaggaggaggaggggttgcgtcggcat

SEQ ID NO: 23205 - DNA, 4188 bp, Oryza sativa; identical to SEQ ID NO: 14421
  Clone ID: TF_OsC1713_3518

SEQ ID NO: 23206 - DNA, 2919 bp, Oryza sativa
  Clone ID: TF_OsC1713_3822
atgcctgtccccgtctacgccgccgccgccatgctgccgccgtcgccgtgcccgtctcttgccgccgccgtcctcgtctacaagggatggctgcaaggggccgaccgcgcatgtcggggtgctcctcccgcaatgggatgcccagctatatctagtaggaatcacctgatacctggtaggtatcatccgatacctcgcaagtatcacgcgatacatggtagaaatcgtctgatacctgacaagtatcacatgatacctcgcgagaatcacgcgatacgtggtagaaatcgtttgatacatgacaggtttcacatgatacctcgcgagtatcacgcgatacgtggtagaaatcgcatgatacctgataagtatcacctgaaacgtggctactccttgatgggttgcattaaagatattccgaccctaaaagaagataactacgcacaatggaaaagaaaactcaaccttgctttcatcttgggagaggtggactgggtgttgactaccccatgtcctatagaacctgctgcacttgtcagaggtgaaaataagtcagatgctgactggaaaaagagacagagggacaatgctcctctcgtcatgtcgtatgacattgaacaaaagacatggtccttagccaacaagaaatgtttggctgtggtaaagaatacgattgagccaactatattgggctcaatcctagagtgtgacgctgtctcagagtaccttgaaagaacaaagagtcagtttactggctcttcaaagacttatgctacacagctgatcaagcagcttgtgacagaaaggtaccatggaggtggtgttagagaccacatacttagaatgagcaacatggcttccaagttgaagccaatggatttgggcataacatatgactttctggtccatcttgttatggcctcatttccaaagcagtttgacaattttattgtcaactacaacataagtccagagaaatggaactttgagaagctcattgctaattgtgtgcaagaggaggagagaatcaaagagtcaaatggtggttcaattaactatgttaaagataagaaaaagaactacaagtctcccacctcaaaagctaaacagtctcaacatctgcctcagcaacaacagttcgctgttgagaaagatcagtgtctccactgcaagaagacaggacattacaagaaagactgtcctgacttcttgaaaatgatcatggcaaggaaaggtgagaacattattacatttgtaaatgaatctcattatgttggttactctagatccacatggtggattgattctggagcaactattcatgcttgtaattgtttaaaggcattccgttcgacaaggactacgcaaagaagagaaagctccattagagttgccaatggagttgaagaaaaagttgaagctgttggagatcttcctctagagattgcgaatggcttcacacttttacttcgagatgtcttttatgttccttctttgcaaagaaacttaataagtgtatcaaagttggattttgatggatatgattgccgctttggaagtggcaaatgtgaactatgtgtggatggctatgactcgttcataacattcacagatgattactcccgctatggttatatttatacaattaaagagcgatcagaagcattggataaatttaagatattcaaagctgaagatgaaaatcagcatgatataaagattaaagtagtaagatctgaccgtgggggggagtactatggtcgacatacgccttatgggcaagtccctggaccttttgcaaggttcttgctagagaatggaatagtagcccagtattcaacaccgggcgaacctcaacagaatggggtagctgaaaggcgtaaccgtacccttatgtatatggtgcgcagcatgatgagctactccacactaccactgggtttatggatggaggcgttaaaaaccgctattcatattctcaacagagttccaagcaaatcggtgaccaaaacaccgtatgagctatggataggaagagtaccctcgctagctcacctccgtgtgtgggggagtcctgtacaaacacctgttgttacctctcctgtggcaacaataaatgaaaatgaggaacctgttatacaagattcaatagaaatggttgccacaccagaggaggagctgcaacagcctcaaacagataatgtgccagtacaggagactcaacaagagcctcaggatgatcccacctcatatgaagaggccatgagaagcgctcgcttgtctgaatggttggaagccatgaaagatgaaatgaaatcaatgaaactaaacgatgtttgggatttagaagaaattcctaaaggagcgaaaatagtaggctatggatgtaaaaacgacatttctaaatggagatttggaggaaaaagtatacatggcgcaaccgaaaggttttgtcatgaaaggaaacgaaaatatgggatgccgtctaaaagatccatttatggattaaagcaagcttcgagacagtggtacttgaagtttgatgggacaataaagaaatttgggtttcaagagaatgtcgaggacaactgtatttattcaaagtttaagaatgggagatttattttcctaattctgtatgtggatgacattctactggctagtagtgatgtcagtctactgcaggaaacaaagaaattcttgtcctcaaactttgacatgaaagatctcggtgaagcttcatatgttttgggcatagagattcaccgagataaaacaaagtatgcattgggactttctcaaaagacatatagaaaaggtgttgaagaaattcaacatgaacagatgcagtgctacacctgctcctatagtcaaaggggaaaagtatggggcatcgcaatgtcccagaaatcaatatga

SEQ ID NO: 23207 - DNA, 4173 bp, Oryza sativa; identical to SEQ ID NO: 14425
  Clone ID: TF_OsC1713_4196

SEQ ID NO: 23208 - DNA, 3447 bp, Oryza sativa; identical to SEQ ID NO: 14427
  Clone ID: TF_OsC1713_4332

SEQ ID NO: 23209 - DNA, 4224 bp, Oryza sativa; identical to SEQ ID NO: 14437
  Clone ID: TF_OsC1713_4463

SEQ ID NO: 23210 - DNA, 4176 bp, Oryza sativa
  Clone ID: TF_OsC1713_4855
atggtcgccttcccttccctaacccctctatgctctctcctagggtgccgccgccgcccgttcgcgcctcggcatcaccagtcgtcgccgccgttttcttccttcgcgccggccgccgtgttcgccggtggctactccttgatgggttgcattaaagatattccgaccctaaaaggagataactacgcagaatggaaaagaaaactcgaccttgcttttatcttgggagaggtggactgggtattgactaccccatgtcctatagaacctgctgaacttgtcagaggtgaaaatgagtcagatgctgactggcaaaagagacagagggacaatgctcctctcgtcatgtcgtatgacattgaacaaaagaaatggtccttagccaacaagaaatgtttggctgtggtaaagaatacgattgagcctaccatattgggctcgatcccagagtgtgacgctgtctcagagtaccttgaaagaataaagagtcagtttactggctcttcaaagacttatgctacacagctgatcaagcagcttgtgacagaaaggtaccatggaggtggtgttagagaccacatacttagaatgagcaacatggcttccaagttgaagccaatggatttgggcataacagatgactttctggtccatctggttatggcctcattgccaaagcagtttgacaattttattgtcaactacaacataagtccagagaaatggaactttgagaagctcattgctaattgtgtgcaagaggaggagagaatcaaagaatcaaatggtggttcaataaactatgttaaagataagaaaaagaaccacaagtctcccacctcaaaaggtaaacagtctcagcatctgcctcagcaacaacagttcgctgttgagaaagatcaatgtctccactgcaagaagacaggacactacaagaaagattgtcctgactttctgaaaatgatcatggcaaagaaaggtgagaacattattacatttgtaaatgaatctcattatgttggttactctagatccacatggtggattgattctggagcaactattcatgcttgtaattgtttaaaggcattccgttcgacgaggactacgcaaggaagagaaagctccattagagttgccaatggagttgaagaaaaagttgaagctgttggagatcttccgctagagctcgcgaatggcttcacacttttacttcgagatgtcttttatgttccttctttgcaaagaaacttaataagtgtatcaaagttggattttgatggatatgattgccgctttggaagtggcaaatgtgaactatggcataataatgcatgtattggtcttgctgtgttgcgagacgagctttatttgttatctctttctgagaatgtgaatgttgtgtcctcgttgacaaaagaaaacaagaaaagaaagcgaacttccaatgtctcatcgaaattatggcactgtcgtttgggccatatttcgagggggagaattgagagactagttaagaatgaaattctttccccattggagttctcagacttagaacaatgcatagaatgcattaaaggaaaatttgtaaagagcatcaaaaagggtgcaaaacgaagcgcaggaattttagagatcattcatacagatatttgtggtccatttcctgtgaaaagtatggatggctatgactcgttcataacattcacagatgattactcccgctatggttatatttatccaattaaagagcgatcagaagcactggataaatttaagatattcaaagctgaagttgaaaatcagcatgatataaagattaaagtaaatggggtagctgaaaggcgcaaccgtacccttatggatatggtgcgcagcatgatgagctactccacactaccactcggtttatggatggaggcgttaaaaaccgccattcatattctcaacagagttccaagcaaatcggtgcccaaaacaccgtatgagctatggacaggaagagtaccctcgctaactcacctccgtgtgtgggggagtcctacagaggccaaagtatttaacccaaatattgggaagttggaccccaaaacagtcagctgccattttattggctatcctgaaagatcaaaaggctatcgtttctactgtccaaacagttatacaaagtttgtagaaacgagacacgccgtcttcttggaagacgaaatgattagggggagctcggtagttcgagaaattgatcttgaggagaggcgggtgtctgtacccgctccgtcgactcaggaacctttcttctctctacctgctgatgttgtgcctgcaatgcctgtcattgaggtaccagcacctgttgttacccctcctgtggcaacaatgaatgagagtgaggaacctgttatacaggattcaacagaaatggttgccacaccagaggaggagctacaacagcctcaaatagataatgtgccagtacaggagactcatcaagagcctcaggtacaggatgtggcaaatgtgcaggcccctagaaggtctgaaagagtcagaagatcggctatccgtgatgactataaagtttataatatagaagagtcgcatatggaggatgatcccacctcatatgaagaggccatgagaagcgctcgctcatctgaatggttggaagccatgaaagatgaaatgaaatcaatgaaactaaacgatgtttgggatttagaagaaattcctaaaggagccaaaacagtaggctgtaaatgggtctacaaaaccaaatatgactccagagggaatatagaaaagtttaaagcgcgacttgtggcaaaaggcttcacgcaacgagaagggattgattacaatgagacattttctccagtctcttgtaaagattccttcaggattataatggcactagtggcacattatgatttggaattacatcagatggatgtaaaaacggcatttctaaatggagatttggaggaaaaagtatacatggcgcaaccgaaaggttttttcatgaaaggaaacgaaaatatgggatgtcgtctaaagagatccatttatggattaaagcaagcttcgagacagtggtacttgaagtttgatgggacaataaaaaaatttgggtttcaagagaatgtcgaggacaactgtatttattcaaagtttaagaatgggagatttattttcctaattctgtatgtggatgacattctactggctagtagtgatgtcagtctactgcaggaaacaaagaaattcttgtccacaaactttgacatgaaagacctcggtgaggcttcatatgttttgggcatagagattcaccgagatagaacaaagtatgcattgggactttctcaaaagacatatatagaaaaggtgttgaagaaattcaacatgtacagatgcagtgctacacctgctcctataatgaaaggcgaaaagtatggggcatcgcaatgtcccataaatcagtatgagctcaatgaaatgaaaacaaagccatatgtgtcagctgtaggaagcctacagtacgcgcaagtgtgcacacgacctgacttggcatttgttaccgggttacttggcagatttcagagtaatccaggcctagagcactggaaattggtaaagaaagtcttgcgttatttgcaaggaacaaaaggcctcatgctgacttacagaagatcagaatcactccagatagtggggtactcagattctgactttgcaaaagataatacaaagtcaacatcgggatacgtgtttaccctggcaggaggagctatttcatggaaaagctcaaaacagactatcactgcagggtctactatgtatgccgagtttatagcatgctatgaggcaacggggcaggtgaactggctaaagaagttcatacccggtttaaaggtggttgacagtattgagaaaccactaaagttatactgcgacaacgaacccgcagtaatgtacgctcacaacaatcagtcaagtggtgctgccaaacacattgacataaagtactatgttgtgaaggacaaagtccgggatcaaacaatcagtctcgagcacattaaaacagaaaggatgctcgcggatccgctcacgaaaggcctaccacccaacgtgttcaaggaacatgtagccggcatgggtttaagggaagccttatga

SEQ ID NO: 23211 - DNA, 4022 bp, Oryza sativa
  Clone ID: TF_OsC1713_5239
gtggctactccttgatgggttgcattaaagatattccgaccctaaaaggagataactacgcagaatggaaaagaaaactcgaccttgcttttatcttgggagaggtggactgggtattgactaccccatgtcctatagaacctgctgaccttgtcagaggtgaaaagtgtgacgctgtctcagagtaccttgaaagaataaagagtcagtttactggctcttcaaagacttatgctacacagctgatcaagcagcttgtgacagaaaggtacaatggaggtggtgttagagaccacatacttagaatgagcaacatggcttccaagttgaagccaatggatttgggcataacagatgactttctggtccatctggttatggcctcattgccaaagcagtttgacaattttattgtcaactacaacataagtccagagaaatggaactttgagaagctcattgctaattgtgtgcaagaggaggagagaatcaaagaatcaaatggtggttcaataaactatgttaaagataagaaaaagaaccacaagtctcccacctcaaaaggtaaacagtctcagcatctgcctcagcaacaacagttcgctgttgagaaagatcaatgtctccactgcaagaagacaggacactacaagaaagattgtcctgactttttgaaaatgatcatggcaaagaaaggtgagaacattattacatttgtaaatgaatctcattatgttggttactctagatccacatggtggattgattctggagcaactattcatgcttgtaattgtttaaaggcattccgttcgacgaggactacgcaaagaagagaaagcaccattagagttgccaatggagttgaagaaaaagttgaagctgttggagatcttcctctagagctcgcgaatggcttcatacttttacttcgagatgtcttttatgttccttctttgcaaagaaacttaataagtgtatcaaagttggattttgatggatatgattgccgctttggaagtggcaaatgtgaactatggcataataatgcatgtattggtcttgctgtgttgcgagacgagctttatttgttatctctttctgagaatgtgaatgttgtgttctcattgacaaaagaaaacaagaaaagaaagcgaactcccgatgtctcatcgaaattatggcactgtcgtttgggccatatttcgagggggagaattgagagactagttaagaatgaaattcttcctccattggagttctcagacttagaacaatgcatagaatgcattaaaggaaaatttgtaaagagcatcaaaaagggtgcaaaacgaagcgcaggaattttagagatcattcatacagatatttgtggtccatttcctgtgaaaagtgtggatggctatgactcgttcataacattcacagatgattactcccgctatggttatatttatccaattaaagagcgattagaagcactggataaatttaagatattcaaagctgaagttgaaaatcagcatgatataaagattaaagtagtaagatctgaccgtgggggggagtactatggtcgacatacgccttatgggcaagtccctggaccttttgcaaggttcttgctagagaatggaatagtagcccagtattcaacaccgggcgaacctcaacagaatggggtagctgaaaggcgcaaccgtacccttatggatatggtgcgcagcatgatgagctactccacactaccactcggtttatggatggaggcgttaaaaaccgccattcacattctcaacagagttccaagcaaatcggtgcccaaaacaccgtatgagctatggacaggaagagtaccctcgctaactcacctccgtgtgtgggggagtcctacagaggccaaagtatttaactcaaatattgggaagttggaccccaaaacagtcagctgccattttattagctatcctgaaagatcaaaaggctatcgtttctactatccaaacagttatacaaagtttgtagaaacgagacacgccgtcttcttggaagacgaaatgattagggggagctcggtagttcgagaaattgatcttgaggagaggcgggtgtctgtacccgctccgtcgactcaggaacctttcttctctctacctgctgatgttgtgcctgcaatgcctgtcattgaggtaccagcacctgttgttacccctcctgtcgcaacattgaatgagagtgaggaacctgttatacaggattcaacagaaatggttgccacaccagaggaggagctacaacagcctcaaataaataatgtgccagtacaggagactcatcaagagcctcaggtacaggatgtgccaaatgtgcaggcccctagaaggtctgaaagagtcagaagatcggctatccgtgatgactataaagtttataatatagaagagtcgcatatggaggatgatcccacttcatatgaagaggccatgagaagcgctcgctcatctgaatggttggaatccatgaaagatgaaatgaaatcaatgaaactaaacgatgtttgggatttagaagaaattcctaaaggagccaaaacagtaggctgtaaatgggtctacaaaaccaaatatgactccagagggaatatagaaaagtttaaagcgcgacttgtggcaaaaggcttcacgcaacgagaagggattgattacaatgagacattttctccagtctcttgtaaagattccttcaggattataatggcactagtggcacattatgatttggaattacatcagatggatgtaaaaacggcatttctaaatggagatttggaggaaaaagtatacatggcgcaaccgaaaggttttgtcatgaaaggaaacgaaaatatgggatgtcgtctaaagagatccatttatggattaaagcaagcttcgagacagtggtacttgaagtttgatgggacaataaagaaatttgggtttcaagagaatgtcgaggacaactgtatttattcaaagtttaagaatgggagatttattttcctaattctatatgtggatgacattctactggctagtagtgatgtcagtctactgcaggaaacaaagaaattcttatcctcaaactttgacatgaaagacctcggtgaggcttcatatgttttgggcatagagattcaccgagatagaacaaagtatgcattgggactttctcaaaagacatatatagaaaaggtgttgaagaaattcaacatgtacagatgcagtactacacctgctcctataatgaaaggcgaaaagtatggggcatcgcaatgtcccagaaatcagtatgagctcaatgaaatgaaaacaaagccatatgcgtcagctgtaggaagcctacagtatgcgcaagtgtgcacacgacctgacttggcatttgttaccgggttacttggcagatttcagagtaatccaggcctagagcactggaaattaataaagaaagtcttgcattatttgcaaggaacaaaaggcctcatgctgtcttacagaagatcagaatcactccagatagtggggtactcagattctgactttgcaaaagataatacaaagtcaacatcgggatacgtgtttaccctggcaggaggagctatttcatggaaaagctcaaaatagactatcactgcagggtctactatgtatgccgagtttatagcatgctatgagacaacggggcaggtgaactggctaaagaagttcatacccggtttaaaggtggttgatagtattgagaaaccactaaagttatactgcgacaacgaacccgcagtaatgtacgctcacaacaatcagtcaagtggtgctgccaaacacattgacataaagtactatattgtgaaggacaaagtccgggatcaaacaatcagtctcgagcacattaaaacagaaaggatgctcgcggatccgctcacgaaaggcctaccacccaacgtgttcaaggaacatgtagccggcatgggtttaagggaagcctta

SEQ ID NO: 23212 - DNA, 4440 bp, Oryza sativa
  Clone ID: TF_OsC1713_5492
atggcgggtgcagcgaaggcgtcgtggatggtggcgatgagcgtgggcgccgtggaggcgctcaaggaccagggcggactctgccgctggaactacgcgctgcggtccatccacaaagcagccaaggccaacgccgccggcgtctctcagggcaagaagctgcctgcttctgcggcggcggtggcggagaggaggagagcggagaaggccgaggaggggctgaggacggtcatgtacctcagctgctggggtcccaattgtggctactccttgatgggttgcattaaagatattccgaccctaaaaggagataactacgcagaatggaaaagaaaactcgaccttgcttttatcttgggagaggtggactgggtattgactaccccatgtcctatagaacctgctgaccttgtcagaggtgaaaatgagtcagatgctgactggcaaaagagacagagggacaatgctcctctcgtcatgtcgtatgacattgaacaaaagaaatggtccttagccaacaagaaatgtttggctgtggtaaagaatacgattgagcctaccatattgggctcgatcccagagtgtgacgctgtctcagagtaccttgaaagaataaagagtcagtttactggctcttcaaagacttatgctacacagctgatcaagcagcttgtgacagaaaggtaccatggaggtggtgttagagaccacatacttagaatgagcaacatggcttccaaattgaagccaatggatttgggcataacagatgactttctggtccatctggttatggcctcattgccaaagcagtttgacaattttattgtcaactacaacataagtccagagaaatggaactttgagaagctcattgctaattgtgtgcaagaggaggagagaatcaaagaatcaaatggtggttcaataaactatgttaaagataagaaaaagaaccacaagtctcccacctcaaaaggtaaacagtctcagcatctgcctcaacaacaacagttcgctgttgagaaagatcaatgtctccactgcaagaagacaggacactacaagaaagattgtcctgactttttgaaaatgatcatggcaaagaaaggtgagaacattattacatttgtaaatgaatctcattatgttggttactctagatccacatggtggattgattctggagcaactattcatgcttgtaattgtttaaaggcattccgttcgacgaggactacgcaaagaagagaaagcaccattagagttgccaatggagttgaagaaaaagttgaagctgttggagatcttcctctagagctcgcgaatggcttcatacttttacttcgagatgtcttttatgttccttctttgcaaaggaacttaataagtgtatcaaagttggattttgatggatatgattgccgctttggaagtggcaaatgtgaactatggcataataatgcatgtattggtcttgctgtgttgcgagacgagctttatttgttatctctttctgagaatgtgaatgttgtgtcctcgttgacaaaagaaaacaagaaaagaaagcgaactcccgatgtctcatcgaaattatggcactgtcgtttgggccatatttcgagggggagaattgagagactagttaagaatgaaattcttcctccattggagttctcagacttagaacaatgcatagaatgcattaaaggaaaatttgtaaagagcatcaaaaagggtgcaaaacgaagcgcgggaattttagagatcattcatacagatatttgtggtccatttcctgtgaaaagtgtggatggctatgactcgttcataacattcacagatgattactcccgctatggttatatttatccaattaaagagcgatcagaagcactggataaatttaagatattcaaagctgaagttgaaaatcagcatgatataaagattaaagtagtaagatctgaccgtgggggggagtactatggtcgacatacgccttatgggcaagtccctggaccttttgcaaggttcttgctagagaatggaatagtagcccagtattcaacaccgggcgaacctcaacagaatggggtagctgaaaggcgcaaccgtacccttatggatatggtgcgcagcatgatgagctactccacactaccactcggtttatggatggaggcgttaaaaaccgccattcatattctcaacagagttccaagcaaatcggtgcccaaaacaccgtatgagctatggacagggagagtaccctcgctaactcacctccgtgtgtgggggagtcctgcagaggccaaagtatttaacccaaatattgggaagttggaccccaaaacagtcagttgccattttattggctatcctgaaagatcaaaaggctatcgtttctactgtccaaacagttatacaaagtttgtagaaacgagacacgccgtcttcttggaagacgaaatgattagggggagctcggtagttcgagaaattgatcttgaggagaggcgggtgtctgtacccgctccgtcgactcaggaacctttcttctctctacctgctgatgttgtgcctgcaatgcctgtcattgaggtaccagcacctgttgttacccctcctgtggcaacaatgaatgagagtgaggaacctgttatacaggattcaacagaaatggttgccacaccagaggaggagctacaacagcctcaaatagataatgtgccagtacaggagactcatcaagagcctcaggtacaggatgtgccaaatgtgcaggcccctagaaggtctgaaagagtcagaagatcggctatccgtgatgactataaagtttataatatagaagagtcgcatatggaggatgatcccacctcatatgaagaggccatgagaagcgctcgctcatctgaatggttggaagccatgaaagatgaaatgaaatcaatgaaactaaacgatgtttgggatttagaagaaattcctaaaggagccaaaacagtaggctgtaaatgggtctacaaaaccaaatatgactccagagggaatatagaaaagtttaaagcgcgacttgtggcaaaaggcttcacgcaacgagaagggattgattacaatgagacattttctccagtctcttgtaaagattccttcaggattataatggcactagtggcacattatgatttggaattacatcagatggatgtaaaaacggcatttctaaatggagatttggaggaaaaagtatacatggcgcaaccgaaaggttttgtcatgaaaggaaacgaaaatatgggatgtcgtctaaagagatccatttatggattaaagcaagcttcgagacagtggtacttgaagtttgatgggacaataaagaaatttgggtttcaagagaatgtcgaggacaactgtatttattcaaagtttaagaatgggagatttattttcctaattctgtatgtggatgacattctactggctagtagtgatgtcagtctactgcaggaaacaaagaaattcttgtcctcaaactttgacatgaaagacctcggtgaggcttcatatgttttgggcatagagattcaccgagatagaacaaagtatgcattgggactttctcaaaagacatatatagaaaaggtgttgaagaaattcaacatgtacagatgcagtgctacacctgctcctataatgaaaggcgaaaagtatggggcatcgcaatgtcccagaaatcagtatgagctcaatgaaatgaaaacaaagccatatgcgtcagctgtaggaagcctacagtacgcgcaagtgtgcacacgacctgacttggcatttgttaccgggttacttggcagatttcagagtaatccaggcctagagcactggaaattggtaaagaaagtcttgcgttatttgcaaggaacaaaaggcctcatgctgtcttacagaagatcagaatcactccagatagtggggtactcagattctgactttgcaaaagataatacaaagtcaacatcgggatacgtgtttaccctggcaggaggagctatttcatggaaaagctcaaaacagactatcactgcagggtctactatgtatgccgagtttatagcatgctatgaggcaacggggcaggtgaactggctaaagaagttcatacccggtttaaaggtggttgacagtattgagaaaccactaaagttatactgcgacaacgaacccgcagtaatgtacgctcacaacaatcagtcaagtggtgctgccaaacacattgacataaagtactatgttgtgaaggacaaagtccgggatcaaacaatcagtctcgagcacattaaaacagaaaggatgctcgcggatccgctcacgaaaggcctaccacccaacgtgttcaaggaacatgtagccggcatgggtttaagggaagccttatga

SEQ ID NO: 23213 - DNA, 2717 bp, Oryza sativa
  unsure (1)..(2717): unsure at all n locations
  Clone ID: TF_OsC1713_5587
aatgcgaatcgatgcaaccaccactgtactgattactgattagtaaaattacaatttgcagattagcagcagttcgcgatgataatatacatgcaaggatggaaggatcagagtagagagagagaagaggagattggaagtccggattacttccgtgtaataatcatacaattgattaatgctacagaaagcatttcccgcgcgcgcgaaatgcatgcaacaaaattacagcccaatgggggagaagggctagtgtacacagcggctttggttgcgatcgatcagaaggtcggcacgacgccgtcgacgccgtagtcggcgtcggagccgccgggcgccatgagcgcggcgacggcggccgcggcggaggagtacatctcctcgtcctcgccgtcggcgtcggcgtccgcgtcggcgtccgcgcccgcgccgcccttggtgcgcttggcgaagcggcccttgatgcgcggccgcgtctccgcgtacgccttgcgggacgcgtaccggatggtcttctcgaaccgccggctcttgcgcttctccctgtaccgcatcagccgcgcctcccgctcccgccccctgctcaccaccggcatcggagcgccgccgcccgccgccgcgtccggcaccaccgccgcctccgaggatgatacgctgtggttcatggagtggtcggagtagaagagcttgccgccggtgatgtcgagctcgggcggaccgttctggacgccgatggccttgatgtcgtccatggagcgcgcgaagtcgaggtcgaggtaagggtcggagtcggcgtagagctcgtcggttgcaccgacggcgccatctttctgcccgtggtcgggctcggggaggagccacgacgcggcctcggcgtcgttgctcccgtcatcgtcggccgccgccgcgtcgccgccgtgggcaccggaacccggcttgggcgcgtcggcgagcgcgccgaagaagggcgcgacggggagccgctcgtggcggcgcgcgagcgggttggcggagtggatgtcggcgtcgcaggcggcgcagagcgcggcggcgtcggccctgcacgtgaccgccgcgggcgcgtgctcgcagacctcgcagagccacacccgcgcgtggcgcgacccgggcccgtgcgcccgcgcgtcgcacccggcgcagaggaacgccgcgtcggcgcggcagaacagccgcgccgcctccccgccgcacgcgtcgcacgccctcgccgccagcccccagtacgcccctcccaccaccgccgacttgtcgtccccctccatggccacaccacctcactcactctcagtctctcactcgcgctagcggcggccgcgagctagaaggcgaggcgaggcgaatctcagccaagctttcctagctgacgcagccatttccgcaatggcagaaatcggtgtacgatctacctattctcctccgcatacaggtaaacagacggctagacttcatgataattcatgctaatgttgggaggggcaatccactatgctcagctcatggatcttcaggaatggagctgccagcatataaatgacaaacaaatacaaggtggctactccttgatgggttgcattaaagatattccgaccctaaaaggagataactacgcagaatggaaaagaaaactcgaccttgcttttatcttgggagaggtggactgggtattgactaccccatgtcctatagaacctgctgaccttgtcagaggtgaaaatgagtcagatgctgactggcaaaagagacagagggacaatgctcctctcgtcatgtcgtatgacattgaacaaaagaaatggtccttagccaacaagaaatgtttggctgtggtaaagaatacgattgagcctaccatattgggctcgatcccagagtgtgacgctgtctcagagtaccttgaaagaataaagagtcagtttactggctcttcaaagacttatgctacacagctgatcaagcagcttgtgacagaaaggtacaatggaggtggtgttagagaccacatacttagaatgagcaacatggcttccaagttgaagccaatggatttgggcataacagatgactttctggtccatctggttatggcctcattgccaaagcagtttgacaattttattgtcaactacaacataagtccagagaaatggaactttgagaagctcattgctaattgtgtgcaagaggaggagagaatcaaagaatcaaatggtggttcaataaactatgttaaagataagaaaaagaaccacaagtctcccacctcaaaaggtaaacagtctcagcatctgcctcagcaacaacagttcgctgttgagaaagatcaatgtctccactgcaagaagacaggacactacaagaaagattgtcctgattttttgaaaatgatcatggcaaagaaaggactacgcaaagaagagaaagcaccattagagttgccaatggagttgaagaaaaagttgaagctgnttggagatcttcctntagagctcgcgaatggcttcatacttttacttcgagatgtcttttatgttccttctttgcaaagaaacttaataagtgtatcaaagttggattttgatggatatgattnccgctttggaagtggcaaatgtgaactatggcataataatgcatgtattggncttgctgtgttgcgagacgagctttatttgntatcctctttcttgagaatgtga

SEQ ID NO: 23214 - DNA, 3354 bp, Oryza sativa
  Clone ID: TF_OsC1713_5318
atggaacatataaaacaatggctttcacatcaagaagaggaaggtaaaaacaattttgaagaaaaaaagaatgaagcacctaaattaggtcaagagagcatttcaggtaatttaactgatggtcaactggaccaagaaaaatatgagaaaccaaatggatggtacaacgttgatgctattgggataaattcacctaacgttgttttaaagatcaatgacaatattcaagaagggaagtgttgtgcactgttaaattcagagggatcatcaactgcgcgtcacggttgcgcgcacgagagatcggaaggagcagggccttcggaaccacaccttcgcctgagatctgcaccgggtaggcgggtgatcaggtttttggggagtgcttcagcacgactgctctcgacttctgctctgttcgtcgtcgtctcgtcgtccaccatgtctgcacctggagccgctggcgccgtctctagagttggtgcacctggagccggagccgccgccggcaccgctgccgccgtctctggagatggcgcgccgggatccagagccgctgcgaacttcaacatcaacggaggcagttctgcctcacaatccagcggagggccattctcggggaaggacatgtgggatgcacttgaggccaagttcggagtttccgacgccggcagtgagctgtatgtcatggagcagttctatgactacaagatggtcgatgaccgttctgtagtagaacaagctcatgagattcagatgctggctaaggaacttgagaacaacaactgtgagttgccggacaagtttgtggcgggtggcattattgccaaattgccaccttcttggtcggactttgccacttctctaaagcacaagagacaagagttcagtgtttctgatctcattggctctttgggtgttgaggagaaggcgagggcaaaggacaatcggggcaaaaagtttgagggaggttctagtgccaatatggtacagaagaagaaccctcatgcatcccacaacaacaagaaagtcaagcctgatgtcaaatccaaggctacaaccaattttaagaagaaaggcaagggaaaggcaaagagagactactttgtgtgtggcaagtctgggcatagggccaaggaatgtcctgagcgcaaagacaggaagtctgccaacatggtcgggagaggttcctccttgttgatgggaaacgggtcgcttgcggctgttcatggtgttggttctaagtgccatacttgtgttcaatcgaaacaacctcgcaagcctcacaaggcatctgaggcgaggaatttggcacctctagaacttgttcattccgatttgtgcgaaatgaacggcgtgttgactaaagggggaaagaaatatttcatgacactgatagatgattgcactagatttctttatgtgtatctattgaaaacaaaggatgaagctttgcattactttaagacctataaagctgaggtagaaaaccaacttgaaaggaaaatcaaacggttgaggtctgatagaggtggggagtatttttccaatgaatttgcatccttttgcaaagagtttggaattattcatgagaggacgcctccctattcaccccaatcaaatggggtggccgaaagaaagaaccgcactctaactgagatggtgaatgccatgttagacactgcagggctttctaaggaatggtggggtgaggcagttttgactgcgtgtcatatcctgaataaaattccaacgaagcataaggaagtgacaccattcgaggaatcggaaaggaagaaattaaatctctcgtacctacgaacatggggctgtttggccaagtctagagatgctacattctttgagaatgaatttcccatgaaacatacacctagcacttctagtcaagaaactgtcatgccccatgagcactttgcaccgatagaacacaatgatcaaatgcctgagggaaatcctgaggagcacaacattgtagatactcataagagtaagcaacaaagggttgcaaaatcctttggagatgactacattgtataccttgtggatgacaccccaagaaccatagaagaggcatattcatctcctgacgctgactactggaaggaagcagtacgcagtgagatggactcgattatgtctaatggtacttgggaagtcattgagtgtccatatgggtgcaagcttgtaggatgcaaatgggttttcaagaaaaagcttaggcctgatggtacaattgaaaagtacaaggcaaggcttgtggtcaagggttatacccaaaaggaagacgaggattttttcgacacatactcaccagttgctcgcttaaccacgattcgagtactacttgctctggcagcctctcatggttttctcgtccatcagatggacgttaagacagctttcctaaacggagagctcctcaatgtgattgaggaggtcaaggactttctgtccaagagttttgaaatgaaggatttgggagaggctgatgttattcttaacattaagctactaagaggagatgaggttgggattacacttgtgcaatcccactatgtggacaaagttttgagtcgctttggatatagtgactgcaagccagctcctactccttatgatcccagcgtgctattaaggaaaaacccaagaatagcaagggatcaactaagatactctcaaatcattggttcattgatgtacttggctagtgcaacgaggcctgacatctcatttgctgtaagcaagctgagcggatttgtctcaaattcgggagatgatcattggcaggctctggaaagagtaatgcgctatctaaagggcactatgagctatggaattcactataccgggtatccaaaagtactcgaaggatatagtgactcaaactggatatctgatgctaatgagataaaagccacaagtagatatgtgttcacacttggaggtggcgctgtttcttggaagtcttgcaagcagaccatcttaacgaggtcaacaatggaagcagaacttacagcactagatactgcgacagttgaggccgagtggcttcttgaactcctgatggatttgccggtggttggaaaaccagtgccagctatcctaatgaactgtgacaatcaaacaatgattattaaagtgaacagttcaaaggacaacatgaagtcatctaggcatatcaagagaagactgaaatctgtcagaaagcagaaaaactccggagtgatagcattggactatgtccaaacggctagaaatctggcagatcagtttaccaaggggctaccacgtaatgtgatagacagtgcatcgatggaaatgggcttgatacccacc

SEQ ID NO: 23215 - DNA, 914 bp, Oryza sativa
  unsure (1)..(914): unsure at all n locations
  Clone ID: TF_OsC951_16
cacgcgtacgtaagcttggcctcctagagcgccgcccgggggtgggttttttgaactcaataatcataatatgcgagaagtgtttctgcgccattactgggaattatatttctagtaatggcgttaagaaataccaacataggcgttgtgaagcatgcggcgctcaccattcttgcaggcgaataggatggtggggggcggtccnatnttttctttttatccatccccnattcgnacattgccggtgacgttggtgttgagccggtcatgtggttcgacgcgtcggtgtcgaggatctagcgcttgttgtcgtggtcggtggcgtcgtccagcgcggcgatcaccttctgctccacaaactcgatgacgtctgccgcgcgtgctacagcggccgcgcgacggtgtacatcacggggcgcccctcccaggaccacggcgtcgcaggtgcctacggtggtggtggccgcgggctcatcctcggtggtggtcacgtgcgcttgctcctggtgctacaacctcggcgagaccggccacatcgcgcgcgagtgccccagcaagacctactaggcgctgctcgcggcgtcagatccagctccctcccatgatgcgttttgctcccccctccctccactgaatcaccgagcagcgggtgatcagttctatcttattagtagtcgtagatctcgttaggaaagctatggatctatcggttcgtcgtcgtcgtcgttctatgtaatgggatgggagtcttggagtggtttaatctttttgtttcgttgggtcggtttgagagacaagccatggatttgcactgtctgatctatctatgaatctatctattatgaaccgagaagaaaatattcatcagcatttggatgagtactttgtgtgaaaaaaaaaaaaaaaaggacggc

SEQ ID NO: 23216 - DNA, 4194 bp, Oryza sativa
  Clone ID: TF_OsC91_2461
atggacatctctaggacaaatgaaggctacacgagctgcggcccggtagtcgagatgtcatggcacagggctggtgtcctgctgctaggggctcaatcctgcctacctgtcccggaggttccggccgtaggtggggttgggtcggtactcttgtctatggctaggatgggttggaaactatgtcatgtcttccgtccatatgccgtggtggtaacgaagtcaagagcaactacgaactctccaagaaaatactcaaaaggacatcacggaagccgttgcaaagtctgtccagatgccttcactaaaatcggcttcctgaaccacatggagaggttggacaagcggatatccacgctaactgatcgggtcgccgcgttggagacaccttccaatgaggaagtggttaagttaaaaataccatctttttcgggatattatgatgctgagaaataccttgattgggagatgacagtagaacaaaagtataatgcccaccttgtacccgaacaacatagagttagacaagccagtagtgagttcaaggattttgctattatgtggtgggctgggttatctgatgagggggtcctacctactacttgggaagaacttaaggtagctatgcgcgataggtttgttcctccatcttatcatagagatttacgcaagaaactgatgcgtttggaacaaggggataaatctgtacaggattactatggtgagctacaaaagggtgtgagacgctgtggcatagtggagggggtcgaggatgctatttgtcgtttttattctggtttgagggaggaaattcataacattgttgattgtaaggaatttaactctgtcaaccagttgtttcggtttgctatgcctgcagagaaggaattacaggggcgcgaccatcagggcaagagcaaggcaagcacatacactccgcgcacgacgccatctgcgggattgcccaaggccgtctcttttcgggcgtcctcccagccagcgggcaagcgaccagctgcatccggagcttctgcggcaccaaaaccatttccaccaccacgaccagcagagtcaggtaaaggttccacgcaggtacccgccaagagtgcctcatatgtcgcctcgacaggacgcattcagtgccaccgttgccaagggtttgggcatgtgcagaaagattgccctagtcaacgggcctatgttgctacagaagatggctacatcaccacctctgacatggaagaggaagaggaggaagaagaagttgaggatgaggatggcgaaatctttggtcgtgatgacacaacggactacagaaccatcattgtgcagcgggtgctcagcacgcagatttttttcgtcatcaacaaccgtcgtgcacgtgtgatcattgatggaggtagctgcaacaacttgtggttaaacgattccggaagagcaaaggtaacacaggtttgtagggtttcgttttccattggctcatatgcagattctgttgattgcgatgtggttcctatgcaagcttgttcacttttgttgggccgtccttgggaacatgataatgatgctacacaccatggtaggagtaataaatacacttttgtgcataatgggaagaaaattactttgctacctttgacccctgctgaaattgtagaagctgataaagagcgagctgctagtttgaaacttgatgaatctgaaaatcagcaagtggctaaatctgtttttccacctaaaaaggataagctttcacctagttctaaggttgagggaattaagttgaagggtggtgttatgattgcaacgaaatgtgaaattgctgaaatttcagatgatgatatgtgttatttcttgatatgcaaacaagccttggtttctttagatgatattgctagttcgatgcctcctgttgttactaaccttttgcaggagtatgaggatgtctttccagctgagatacccctaggattgccacccatgagagggatagagcatcaaattgatttgattccaggagcatcattgccaaaccgtgctgcttatcgaaccaacccagaggagactaaggaaattcagcggcaagttcaagaccttttggaccgctggtatgtacgtcaaagccttagtccctgtgtagttcctgtaattttggttcctaagaaagatggttcttggcgaatgtgtgttgattatagagccattaataatattactatccgatatcgtcatcctattcctaggtcagacgacatgcttgatgaattgtgtggctctataattttcacaaagattgacttgcgtagtggctatcaccaaattagaatgaaacttggagatgaatggaaaacagcttttaaaactaaatttggtttgtatgagtggttagtaatgccttttggtttgactaatgcacctagtacattcatgcgcttaatgaatgaggttttaaggccttttattggacgatttgtggtagtgtactttgatgacatattgatttatagcaagtctttcgatgaacacatggatcatttacgtgctgtttttaatgctctacacgatgcacgtttgtttgctaaccttgaaaactgcatcttttgcacggaacgagtctcttttcttggatatgtagttactccacagggaattgaggtggatgagtcgaaaattgaagccataaagagttggccggttccccaaaccatcacacagctgaggagctttcttggtcttgcaggattctaccgccgtttcgtcaaagatttcagtatttttgctgcaccattgaacgagttgacgaagaaaggggtggtcttccattggggaaagacacaggagcagtcatttgacactttgaaggacaagcttacacacgcaccattgctacaacttccaaactttggtaagacttttgagttagaatgtgatgctagtggagttggcattggaggtgtgttgatgcaagatggtaagcctgttgcatactttagcgagaagttgcatggtcctgttttgaattattccacgtatgataaggaattgtatgctcttgaagcgcatggaggagggttgatcggacattttggagctaagaagacgaaagatgttttggccatgcatttcttttggccaaggatgcgaaaggatgttgagagaactaagagggggagggatagtatttttgtggtggtggatcgtttttctaagatggcacatttcataccatatcataaaagtgatgatgctgttcatattgctgatctgtttttccatgagattgttcgcttgcatggtatgccttttactattgtttcagatcgtgatgcaaaattcttaagtcatttctggcgcacgctatggaacaagttgggtacaaagctattgttttctacaacatgtcaaccacaaacagatggacaaacggaggtagtcaactgcactttgggtaccatgttgagggctattttaaagaaaaatttgaagatgtgggaagaatgtttgcctcatgtggagtttgcatacaatcggacaatacattctactaccaaggtaagtccttttcaggtagtgtatggtttcaacccttgtgcttcaattgatattttgcctttacctactagtgagagggttcataatgatgataaggcacacgctgaatttattttgtcaatgcatgagtcaaccaagttcaacattgaaaagatgactgaaaagtatagaattgctggtagtaaagttgagaagattaatgataatgcatataaacttgagttgcctcccgagtttggggtcagtcccacgtttaacatttcagatttgaagccacacttgggagaagaggatgagcttgagtcgaggacgacttcaattcaagagggggaggatgatgcggacatcactacctcggatacacacaacaatcctccaacggtcattcaaggaccgataacaagagctcgtgcgcgacaattaaatttagaggtgagctcgttcctatgttcttctttgtatgaattcgagaatagattgctacctaatgattatattgtgctttggaacaatggaggggacaaggagacactaggagaaggacttacagccatggaggatcatcggggatgttcaagtcaaggtggaggcccaaaccaagtcgacgtctggtgcaattcggagttcaggaccaatctgcactaa

SEQ ID NO: 23217 - DNA, 1836 bp, Oryza sativa
  Clone ID: TF_OsC91_2524
atggaggggacaaggagacacttggagaaggacttagagccatggaggatcattgaggacgtccaagtcaaggtggaggcccaaaccaattcgacctcgggtgcaattcggagtccaggaccagtctgcactaaaacggccgcccaggtcgcatacgtgctcgaattgggacgtaacgaaggtgagaagagtccccaggattttgctgactgtgtcagtcaagagcaactacgaactctccaagaaaatactcaaaagggtatcacggaggccgttgcaaagtctgtccaagatgccttcactaaaatcggtttcctgaaccacatggagaggttggacaagcggatatccacgctaactgatcgggttgccgcgttggagacaccttccaatgaggaagtgagtggtgacgacgatgctcatcctgaagacacggtgtatgattcgagtggctatattgacggaccagctacaaggcaagcacggctacgacgtcgcctaggcacaaaccgcacaggtatgggtggcactcgccaccaacaaggtaataataatcgtgtgcccgatgatccttatgctaagatgacagtagaacaaaagtttaatgcccaccttgtacctgagcaacatagagttagacaagtcagtagtgagttcaaggattttactatcatgtggtgggctgggttatctgatgagggggtactacctactacttgggaagaacttaaggtagctatgcgcgataggtttgttcctccatcttatcatagagacttacgcaagaaattgatgcgtttggaacaaggggataaatctgtacaggattactatggtgagctacaaaagggtgtcagacgctgtggcatagtggagggggtcgaggatgctatttgtcgtttttattctggtttgagggaggaaattcagaacattgttgattgtaaggaatttaactctgtcaaccagttgtttcagtttgctatacttgcagagaaggaattgcaggggcgtgagcagcagggcaagaacaaggcgagcatgtacactctgtgcacgacgccatctgtgggactgcccaaggccgtctcttttcgggcgctgtcccagccagtgagcaagcgaccagctgcattcggagcttctgcaacaccaaaaccatctccaccacgaccagcagagtcaggtaaaagttcttcgcaggtacccgccaagagtgcctcatctgttgcctcgacgggacgcattcagtgccaccgttgccaagggtttgggcatgtgcagaaagattgccctagtcaacgggcatatgttgttacagaagatggctacatcaccacctccgatgtggaagaggaagaggaggaagaagaagttgaggatgaggatggcgaagtctttggtcgtgatgacacaatggcctacaggaccatcattgtgcagcgggtgctcagcacgcagattttcttcatcatcaacaatcgtcgtgcacgtgtgatcattgatggaggtagctgcaacaacttggtgagttttgatttggtcaagaagcttggcttgaccacacgtacacatccacatccttaccatattcagtggttaaacgattctggaagagcaaaggtcgactctagaggatccccggggtaccgagctcgaattcgccctataatgagtcgtattacaattcactggccgtcgttttacaacgtcgtgactgggaaaaccctggcgttacccaacttaatcgcattgcagcacatccccctttcgccagctggcgtaatagcgaagaggcccgcaccgatcgcccttcccaacagttgcgcagcctga

SEQ ID NO: 23218 - DNA, 5154 bp, Oryza sativa
  Clone ID: TF_OsC91_2590
atggcgcatcagatgggctggcagaggacgacatcgctgcgggcggagatctcgctgaagatggagtcacttggaaatcgcttttgcgccggaggaatcgccggagagagagaaggagttcttgctttcgggttgagctgcatcggtttcgatcttcaacaagaggtaaaacttgttatggcagcttgcgttctcaggattagtgcttccatctttatgacactgtgcttccagtgtatctttcgcttttccatatacacctaggaagccaggaaggtttatgcaaaggttctcagtgaggtgcatcacgtcgattgcatggcagacgtccaagaattcccaatagggtaactcccaaaatatagagttctttttccagatcgttgcgtgaccatcttcgctctctataggctggcttccaggcctctttccaaacactactttaagatctttaaccatagcaaacactgttttcccgctgcgatgtttaggcttcgtacggtggtccatcttatgttcaaagtgcttgcctttcttccgtaccgggtggtttgcagcaaggaatcgacgatgacccatgtacacaaccttcctacagtgcttaagatacgtactttctgtttcatccatacagtgagtgcaagtcttgtaacccttgttggctgccttgaaaggttgcttagcaggaattctcttctttgttggctgcccgtcaacttcacctggatcctctcgtctaatcttgtaacgtagtgctttacaaacagggcatgcttctaagttctcgtactcctcaccgcgatataggatacaatcattcggacatgcgtgaatcttctgaacttccagttttttatagtcctcctttgcatcctgcaacatccgaccaagatcatccgctgcgtcattatcgccagcatccctatccacctcacccgtttgatttccttcaaatccagcgtactgagcccagtcgggaatgttctcgtcctccgcttcatcttcttccatttcaaccccttgctcaccgtgggatatccaacaattatagcttggcatgaaccacttattgcatggacaacaaataaaaccgttacgcttgttagcttcggccactctcaaaaaataatgcacgcactcgataaattctttggacctccggtcagcgtacatccattgctgatccatctgagcgcccattttagtgcagactggtcctggactccgaattgcacccaacgtcgacttggtttgggcctcctccttgacttggacgtcctcgatgatcctccatagctctaagtccttctccaagtgtctccttgtcgcctctaaatttaattgtcgcgcacgagctcttgttatcggtccttgaatgaccgttgcaggattgttgtgtgtatccgagttagtgatgtccgcatcatcctccccatcttgaattgaagtcgtcctcgactcaagctcatcctcttctcccaagtatggcttcaaatctgaaatgttaaacgtgggactaaccctaaactcgggaggcaactcaagtttatatgcattatcaatcttctcaacaattttaaaaggaccatcggcacgaggcatcaacttagactttctcaattctggaaatctatcctttctcaagtgcaaccaaactaaatcacccggttcaagcttaacctcttgcctacctttactaccagcaattctatacttttcagtcatcttggtagtagaatgtgttgcccgattgtatgcaaactccacatgaggcaaacattcttcccacatcttcaaatttttcttcaaaatagccctcaacatggtacccaaagtgcggttgactacctctgtttgtccatctgtttgtgggtgacatattgtagaaaacaatagctttgtacccaacttgttccatagcgtgcgccagaaatgacttaagaattttgcatcacgatctgaaacaatagtagaaggcataccatgcaagcgaacaatctcatggaaaaacagatcagcaatatgaacaacatcatcacttttatgatatggtatgaaatgtgccatcttagaaaaacgatccactaccacaaaaatgctatccctccctctcttagttctctcaacatcctttctcatccttggccaaaagaaatgcatggccaaaacatcttccgtcttcttagctccaaaatgtcccatcaaccctcctccatgcgcttcaagagcatacaattccttatcatacgtggaataattcaaaacaggaccatgcaacttctcgctaaagtatgcaacaggcttaccatcttgcatcaacacacctccaatgccaactccactagcatcacattctaactcaaaagtcttaccaaagtttggaagttgtagcaatggtgcgtgtgtaagcttgtccttcaaagtgtcaaacgacttctcctgtgtctttccccaatggaagaccacccctttcttcgtcaactcgttcaatggtgcagcaaaggtactgaaatctttggcgaaacagcgatagaatcctgcaagaccaagaaagctcctcacctgtgtgatggtttggggaaccggccaactctttatggcttcaattttcgactcatccacctcaattccctgtggagtaaccacatatccaagaaaagagactcgttccgtgcaaaagatgcacttttcaaggttagcaaacaaacgtgcatcgcgtagagcattaaaaacagcacgtaaatgatccatgtgttcatccaaagacttgccgcggtccaaaaggtcttgaacttgccgctgaatttccttagtctcctctgggttggttcgataagcagcacggtttgacaatgatgcccctgggatcaaatcaatttgatgcgctatccctctcatgggtggcaatcctgggggtatctcagcactcttcaacttaattccctcaaccttagaactaggtgaaagcttatcctttttaggtggaaaaacagatttagccacttgctgattttcagattcatcaagtttcaaactagcagctcgctctttatcagcttctacaatttcagcaggggtcaaaggtagcaaaataattttcatggtgtgtagcatcattatcatgttcccaaggatggcccagcaaaagtgaacaagcttgcataggaaccacatcacaatcaacagaatctttgctcttccggaatcgtttaaccactgaatatggtaagggtgtggatgtgtacgtgtagtcaagccaagcttcttgaccaaatcagaactcaccaagttgttgcagctgcgtgctgagcacccgctgcacaatgatggtcctgtagtccattgtatcatcacgaccaaagacttcgccatcctcatcctcaacttcttattccccctcttcctcttccacgtcggaggtggtgatgtagccatcttctgtagcaacataggcccgttgactagggcaatctttctgcacatgcccaaacccttggcaacggtggcactgaatgcgtcctgtagaggcgatagatgaggcactcttggcgggtacttgcgaggaacctttacctgactccgctggtcgtggtggagatggttttggtgccgcagaagctccggatgtagctggtcgcttgctcgctggctgggaggacacccgaaaagagacggccttgggcagtcccacagatggcgtcttgcgcggagtgtatgtgcttgccttgctcttgccttgatggtcgcgcccctgtaattccttctctgcaagcatagcaaaccaaaacaactggttgacagagttaaattccttagaatcaacaatgtcctcaaactagaataaaaatgacaaatagcatcctcgaccccctccactatgccacagcgtctcacacccttttttagctcaccatagtaatcctgtacagatttatccccttgttccaaacgcatcagtttcttgcgtaaatctctatgataagatggaggaacaaacctatcgcgcatagctaccttaagttcttccccagtagtaggtagtaccccctcatcagataacccagcccaccacataatagcaaaatccttgaactcatgactggcttgtctaactctatgttgctcgggtacaaggtgggcattaaacttttgttctactgtcatctcccaatcaaggtatttctcagcatcataatatcccgaaaaagatggtattttaaacttaaccttagcacaaggatcatcgggcacacgattattattattaccttgttggtgatgagtgccacccatacctgtgtggtttgtgcataggcgacgtcgtagccgtgcttgccttgtagccggtgcatcgccactggaatcatacaccgtgtcttccggatgagcatcgtcgtcaccactcgccactggaatcatacaccgtgtctccaacgcggcgacccgatcagttagcgtggatatccgcttgtccaacctctccatgtggttcaggaagccgattttaatgaaggcatcttggacagactttgcaacggcctccgtgatgtccttttgagtattttcttggagagttcgtagttgctcttggctgacatagtcagcgaaattctggggactcttctcaccttcgttacttctagggaacaaagtcatagtaatccatttgtgcatgagcctaagtgtagggttatggatatcattcgtcctagatttcttgcaaattggagcaccagaaatgtcttcccaaaacctatttttctcgaacccataaattcctttctggagatcgattttacagaaatcgtgaaaaccaagaagtgtactcaatcctttccatgtaagtgtatattccttatggaaaaagcgaaaggaaattccatcttctatttctttcaaagtgcacagaaattgcaaagtaaacaaatgagaaccaggctcatctaccacagcaaatctctgccaaccaacagctttccaaatagcacaaaagccaacatctatacttatctttttcagcagctccggagagtactctcgcgtgtgagcatactcccggtcactcagcttgtagtaggcttgtctttcccgatcatcgacaaggtcaaggtcggcatcgttcaggatatgttgcggagcgtcggcatcctccat

SEQ ID NO: 23219 - DNA, 5931 bp, Oryza sativa
  Clone ID: TF_OsC1713_5484
ttgtggaggagaaggaggacgcgccgaagtggaaggatgaggagcatcacgacgacgatgatacacaaatgcttgggagctctccaacatttggacttgagaatccaatgtacccactctagtgtgcaatctccccatggaagcattcaagtctccaacatccgtgcgcaagccacgaacatcctcatgtcatgcttcatgcccggtagacaagcgttgaatacttttacttagggtattaatagccccaagtaccgggttgaaatattcattgggttgaattccaaagtaagtatactgtggatggaagaaagcatttggatcatacccatgaggaggaggaggtgctgagcttgagctagctccaagatgagaagagggcaccatcctaagcatgtggagctccaagctgaaggcggggcttgtactgcttgtgcttcttcaaattttgccagcagccccaagcttgtcttgaatcaacctcatgatgtaaggggcataatagattccctgagtgaatgtccccttggagatggcaatctcctgcatcatgagagacacaatgtcgaactgacgaccctgaatgatcgtatcgatgatgtgccaagccacccctctaatgtcatcattgttgccaaggcgagggaggatagtggctctcacaatcctgttaaccacactggggatagtcctcaatccggcaaccttcccatgtgtgtaccgcactccatcttcataaaactgagagagatagtctatggagagcggattgtgagtgtgctcctcatgcaaatcatatccaaagtctaggcgaatattgaggagccgccagaattgcctccgagagatagaacactggagggtatcggacatccacttcatctcattatagtccccagccacccacaacttctggaaagcggtgtgaaaacggggatccggggtgtcccgaggccttaaaaactgatcatgatgcctcaagatggtatactgcgatggattcctcatgttcacatcaaactagatggagggatcaacgtgcatatcatcacttccttcatcctcatcctctccacttccactgtcatcatctccacttgcctcctcactagccccctcaatatttgcttcaacctcttcatcactttgagcgtaatcctctccgctcgattcctcaggctcactcacgggatccggagtgggcgcacaacgaccatggcgagtgcggggaggcatcatcggccagtcaggggcagtcagaccgcggaccgatggccggtcagaccgacggccacagccagtcagaccgcgagcatgccgcccggtcagaccgccgcaactttgttttgaaacttttctcaaattccttctcaatcttattttggggataaatctcattttggccaaaactaagaatctagattccgccgaaacatattccgcctcagcggtagagagggctacggagttttgtttcttggatgaccatgacacaagggatctactaagcatttggcaactaccggatgtgctctttctatccactttgcaaccggtataatccgaatcggaatagccaacaagcttaaacttagcaccttttgggtaccacaagccaatagtagaggaatgctttaaatatcttagaatccttttcacggccaccaagtgacattccttaggagcggcttgaaaccgtgcacacatgcaaacactaaacatgctatccggcctagatgcgataaggtaaagcaaactaccaatcatggaacgataaagctttaaatctaccagtttacctccctcatcaaggtcgagatgcccgttggttgccataggtgtcttgatgggcttcgcatcctccaagccaaacctcttcagtaaatccttgatgtacttggtttggctcacaaacgtcccatccttgagttggttgatttgaagtccaaggaagaagctcaactctccaatcatggacatctcaaattccctagacatcatatcaccaaattccttgcaaaatacctcattagtagaaccgaatatgatgtcatcaacataaatttgacacacaaagaaatcatcaccaatgatttttgtgaaaagggtggtgtcaacttttccaattttgaaatcctttgacaaaagaaaatctctcaatctttcatatcaagccctaggagcttgttttagaccataaagagcttttgagagtttataaacatggttaggatttttaggatcttcaaaaccgggaggttgttcaacaaagacaagttcggcaatttcaccatttagaaaagcacttttcacatccatttgaaatagttttatatcaaaacatgatgcaaatgcaagaaggatgcgaatagcctcaagtcttgccacgggggcaaaagtttcaccgaagtccaaaccttcaacttgtgtgaaaccttgtgccaccaaccttgccttgtttctcaccaccaacccgttctcatcttgtttgtttctaaagacccactttgtccctatgacattgtggtctctaggtctttcaaccaaagtccacaccttgtttcttgcaaagttgttgagctcttcatgcatagcattcatccatccggatcacaaagagcttcatttacatgttttggctcaagacaagaaacaaacgagtaatgttcacaaatcgaagcgacacgagatcgagtttgaacacccttacttatgtcacccaacacttggtcaattgggtgatccttggaaagagcggtgtgtatccttggaggcataggtggatcttgtgctttctcctcctccacctcaacttgagcttgacttggcgtagcggaagtagatggcttatcttgagtggaggtggatggcttgtcttccacttcaataggcttgacatctccaatagacatgttcttcatagctctcatcaagccttcatcacctacatcatccaaattctcgtgcccctcttgggagccattagtttcatcaaattgaatatcgacgatttcttccacaatacctttattcttgttgtagacccggtatgccttgctatttgaagcataacctagaagaaacccttcatcacaccgactttcaaatttggttagtctaacaccctttcggtaaatataacacttgcaaccaaaaactcgaaaataggcaacatttggcttcctcccaacaattagctcataggaagtctttttcaagagacgatgcaaataaagccaattggttgcatggcaagcggtgtttatggcttccgcccaaaaggaatcggaaacaccatattcatcaagcatagtccttgccatctcaatcaatgtacgatttttcctctccacaccgatgctcttataggttgttgggccaaacaaatccatatgcaagagctccaatggtctagatgtggacatgatactcttagtaggatgagaacatgcaacttgcttgccggcttgacaagcactacaaagcttatctttctcaaacttcacatctttcaagcccacaactagatcacgttttgaaagtttgctcaattgattcatgccaacatgggctagcctcctatgctaaagccaacccaatgaagtttttgcaactaacccaattacctttcctttgctattgtctccaaaagtcactttctcttgttcattccctcctacttcaaatgtggtgaacatagccctatcaccggtcatgtgttgagtgcatccactatcaagcacccaatggctcccaccggtgcggtagttcaccaccgagtataggggaacccacatatctagcaacaatgctaccatcatgagtcttcccttgaagcacctctccaaactcttgttgagcttggccacttgctccttaagctcattgttctcaacaacaagtgaggcatcacaaatagaaatacaagagctagagctagagctaggcatatccacaagaccatcacaagaggtagaaatgctagatgatgcaacatgagcaatatggcaagtagcactatcatcaagcaaatcacaagatatgccaacatcaatgagagctccatgttgagtagtggaaaggaggttgtcatgagcttccttaagcttctcatgagaaatagtgagtctctcatgagaggtctttagttcctcatacaagacctctaaagaagcatgatccttttttagggccttgaacttgacaatctccttctcactataagcatggagctcctcaaacatactcacaagctcatcataggaaacatcatcacaatcatcatcactctcactatcactaagagatgttaccttagaggagccctttgccatgagacaaagtggagcgaagagtgatagagcctccttgatggcaacaacggccatcttcttcttcttggagcttgcatcctcaccaccttcttcctcggacccggatgaggcggagctctcctcatttgagtcccattccccgatgaatgcctcaatcttcttgccttccttcttgagcttcttcatgagcttatagcctccactcttcttcttggatgacttgtctccatcatccttggaagggcacttggaagtaaagtgtcccttctcaccacactcaaagcacttcaagttggagagagtcttgttgggtcttctatttcttctcctactggagttggagccccttcctctctctttgcccttgcccttgtcttcaacttcggcttggagagcaatgcacttcttggaaggtgaggcttcctccatctccttcttcttcaacttgtacatgtcattggtgttgatcttccccaagaggcttgcgggtgtcatccttgacatgtcggagttgatgagcatggtgacaagggtctcatacttccccggtagagccctaagcatcttttgggcaacctcaagatcggtgtagtttgccccaagccccttgagatcattcacaatgacattgagcctcccatacatgtcattcacactctcatgaggcaacatggagaatgtctcatattggatcttgaggaaatgaagcttggcatccttgtactcgcttgtgccctcatggatcttcgccaacttgccaacttgttccaaatctcatatgcggtctcaaggtggctcactctatcaaactcctcttggctcaaagagttgaacaaaacattcattgcttgggcattgagttggaggttgcggtgatcaatctccgtcaagggcgtgccggtgatagcaaagccggcgccgggcctcctccacaatcttctcggagaggtcaccgggcaactcctccacaagccgtctaggaggcggcaacctccaagagtaacaagcaatgacccggcgtggagatgatcaatcaagtgccacactagctctacaaatggaagcaaatgcacttgactcttgtctagagcaacctcaaccactacaatggatgaacactaagctcaaagagggccccatcggcctggccggtcagaccgacgttgagtggccggtcagttcggcctcggctcggtcagaccgccatcagctcggtctgaccgaatacggctccgtcggctctgtatcggccaccccgagcagcaccatcccggcctccagggggccggtctgaccgcgcatgtgccgccggtcagaccgccgtttcgtggccggtcagactagccagggcacgccggtcagaccgccactatgtggccgatctgaccgccccgtcatccatgcgcacacatgacgtggacctaacttaaaatatatctcaatagcaacggttagtccacaattagctcttgtcattaattaccaaaattaacaacgggggactagatgcttcaactactagagtacggattatatttttcaaaacaaaacaactactagtgcgcaaaggtgttagctggatgcatcacattagatc

SEQ ID NO: 23220 - DNA, 1482 bp, Oryza sativa
  Clone ID: TF_OsC1528_1773
ctacttcttttcagcccctgaggtggaactctttccatcctgctgcttctgcttgagctgctctaggtatttcttacagtttctcttccaatgacctgtctccttgcaaaagaagcactctgcatccttagcgagccctgtcttttgaaccttggtcttagagttgctagtactcgtgatctcatcagagtttagctttctcttttgaccacttttcttgttgttgggcttgtgcttatgcataaccatcacatggttggagtttttcttaatgctttcctcggtagtctttagcatcccatgcaattctgccaaggtcctgttcaggttgttcatgttgaaattcattatgaacggctcaaagctgggagggagcgactggagaatcaaatcagtagccaactctcggcttaggggaaagccaagcttatccagactctcggtgtaaccaatcattttgatcacatgtgggctcactggattaccttctgcaagcctgcacgcaaacaaggactttgaggtattaaacctcttagctcttgcttggtcctcaaacatgttacgtagtctcgtgattattgtatgagcatccaatgcctcatattgcctttgaaactcaggggacatagtagcaagcatgagacagcttatatcaaggtattcattgcatcgcctttcatgctccctacgtttagcaacaggagcattgttgggcaagtcagctggaaaaggctgtgtaagcacaaactctttgtgctcttgcctgagaacaattctcaggttgcgataccaatccatgaagtttgttccagtcaacttctctttctcaagaatagaccgcaagttaaaattggatggtgcaagagcactcgacgcgctgtgcagcggaagaagatgctgagaagtcgaaagaactctcgcgaagtagcgcgcgtcgatgtagaggaagtagtcaatcgcaccagctcgaccttgtcctcctcgtgcattctcctcgccgtactcccacgcaccaccacgctggtgccagctatcctcccattttagaatcaaggataaatcaccccacaaagtgctcccctcctggatctctttcccgggcgacacatctcgaatggcgacgaccagacggcaagagagaagacggggatgaggttggccgatggtgatggattgccacgaatggaggacggccggcttgtcaccgtcgccgttcaccttctgcaccgagcttccaactctgtcgctgctcctagccgacagccgtcgctcaaccgctccaccgagccaccgcccggcgcacctcaaatagcggcgaccagacggcgggagaaaggatggggatgaggtcggccggcggtggaggatcaccgcgcctggaggacggccgggcttgtaactgccgccgttcagctttcgcaccgagccgccagatccccgtgcgcccagggggctctcccgcacctttctctccctcaccat

SEQ ID NO: 23221 - DNA, 3980 bp, Oryza sativa; identical to SEQ ID NO: 14482
  Clone ID: TF_OsC547_327

SEQ ID NO: 23222 - DNA, 4164 bp, Oryza sativa; identical to SEQ ID NO: 14475
  Clone ID: TF_OsC547_340

SEQ ID NO: 23223 - DNA, 3977 bp, Oryza sativa; identical to SEQ ID NO: 14481
  Clone ID: TF_OsC547_379

SEQ ID NO: 23224 - DNA, 3691 bp, Oryza sativa
  Clone ID: TF_OsC547_389
atggagatccaatatgagcatacttcgtatagggatccaaataggagtcttacgggccttggaggcccgagtgatggatcctatatattcgtgaggggtgtgaccggtggaggcattgcatcaccgcgtcgagtggtaacgatatatgatctaatacttgcttggttcctggtttatgcgatagaaatgtttgatttatgctatcgtagcttacgcttatcccaacagtggatagatgtcggacatctatgtgcggagattattggtttacttgacaagatcatggcagctcctgcatcatccaattttaacttgcggtctattcttgagaaagagaagttgactggaataaacttcatggattggtatcgcaacctgagaactgttctcaggcaagagcacaaagagtttgtgcttacagagccttttccagctaacttgcccaacaatgctcctgctgctcaacgtagggagcatgaaaagcgatgcaatgattatcttgatacaagctatctcatgcttgctactatgtcccctgagcttcaaaggaaatatgatgcattggatgctcatacgataatcacgagactacgtaacatgtttgaggaccaagcaagagctgagaggtttaatacctcaaagtccttggttgcgtgcaggctagcagaaggtaatccaatgagcccacatgtgatcaaaatgattggttacgccgagagtctggataagcttggttttccccttagccgagagttggttactgatttgattctccagtcgctacctcccagctttgagccgttcataatgaatttcaatatgaacaacctgaacaggaccttggcagaattgcatgggatgctaaagactgctgaggaaagcattaagaaaaactccaaccatgtgatagttgtgcataagcgcaagcccaacaacaagaaaagttgtcaaaagagaaagctaaactctgatgagatcacgagtactagcaactctaagaccaaggttcaaaagacagggcccgctaaggatgcagagtgcttcttttgcaaggagacaggtcattggaagagaaactgtaagaaatacctagagcagttcaagcagaagcagcaggatggaaagagttccacctcagtctataacattaatgcaaaaaggcaacgtcctaatgatttgaatcccacttttatttggcattgtcgcttgggtcatataaatgagaaacgcatggagaagcttcatagagatggacttctacactcttttgattttaaatcatttgagacatgcgaatcttgtttacttggcaaaatgacaaaggcacctttcacgggtcaaagtgaaagggcaagtgaactattgggactagtacatactgatgtatgtggaccaatgagctcaactgccaaaggtggttttgggtactttattacctttaccgctgactttagtagatatggttatgtctacttaatgaggcataagtctgagtactttgaaaagttcaaggaatttcagaatgaggtacaaaatcatttgggcaagacaatcaagtatctacgatttgatcgtggtggaaagtacttgagcctagaatttggcaatcatctaaaggaatgtgcaattgttccacaactcactccgccaggaacgcctcagtggaatggggtgtctgaacggaggaatcgtacattgttggacatggtacgatcaatgatgagccaaactgatctgccgctaagcttttggggttacgctctagagacagttgcgttcacactaaacagggttccatcaaaatcagtggataagacaccatatgagatatggactgggaagcgtcccagtttgtctttcctaaagatttggggctgtgtggtctatgtaaaacgtttgcaatcagacaaactcacacctaaatcagataaatgcttctttgtgggatatcctaaggaaacgaaaggatattatttttataatcgggaagagggcaaagtgtttgtcgcccgacacggtgttttcttggaaaaagagtttatttcaagacaggatagtgggagcatggtgcaacttgaagaaattcaagaaacaccggaaaacgcttcaacgtccacacaaccacaagctgagcaagatgttgttcaacaggttgaacaagttgttgttgaaccagttgtggaagcaccggcttcacgaagatccgataggatacgacgtacacctgcgagtttggaactattggttgatccacctaatggtgtaaaagccattgagtgcaaatgggtctttaagaaaaagacagatgtagatggaaattttaacatctacaaggcacgattggtggcgaaaggtttcagacaaattcaaggtgttgattatgatgaaactttctcaccagtcgccatgctaaaatctattcggattgttttagcgattgctgcctatttcgattatgagatatggcaaatggatatcaaaatagctatccacaatggaaatctcgatgaggatgtgtacatgacacaacccaagggatttgttgatccacaatcagctaaaaagatatgcaaattgcagaaatccatttatgggttgaagcaagcatctcggagttggaatattcgtcttgacaaagtagtcaaggcgttgggctttgtcaaaaacgaagaagaggcttgtgtatacaagaagattagtgggagcgcactggtgtttctaatcctatatgtagatgacatattattgattgggaacgatattcttatgcttgaatccgttaagacatcgttgaaaaatagtttttcaatgaaggacttaggggaagcaacatatattctgggcataaggatctatagagatagatcaaagaggctaattggattaagccagagtacatacattgaaagattcatcatgtatgctatgctatgtacacgtccagatgtttcatattcacttagtgcaacaagccgataccaatcagatccatgtgagagtcactggatagctgtaaagaatatcctgaagtacttgagaagaactaaggatatgttcctagtcaatggaggacaggaagagctcgttgtaaatggttacaccgacgcaagcttccaaactgacaaagatgattttagatcacagtctggatttgtgttctgcctgaatggaggcgctgtgagttggaagagttccaagcaagatacagtgtctaattatacaacagaagccgaatacattgcctcttctgaagcagcaaaggaggctgtttggataaagaaattcatttctcgactaggtgtggtgactagtgcttctagcccaatggacctctattgcgataatagtggtgccattgcgcaagccaaggagcctagatcgcatcaaaagtccaaacacattttacggcggtatcacctcattcgcgagggagtatcaaatagagcgcttgccgtcgtggcaagattccagagtcgatgattttgccggcgatggattgatccacctgctatcgccacgactcggaggtcctgtgccgttgggtcacgcataccaacaacctgagatccaacaatctgagataatggtatggggaatgaccaaaacgccctcaaccgtcattgggaatgcatcagcaacgtatacgtggaaggccaggatcagaggagacggtgatggttcggccgaaccc

SEQ ID NO: 23225 - DNA, 2340 bp, Oryza sativa
  unsure (1)..(2340): unsure at all n locations
  Clone ID: TF_OsC547_396
cccgggcaggagccccgccgggagaatccggggcgacgccaccacgtttcttggctcttactctttcctcctctcctctctgtctctcaccgacggcagcggcgggctcggcaccggcggcggcggcctcgaccgccgatcgccgacgccccgcgccgcctcctcgctcatcaggatgggctcggcggtgtgtgccggtgccggcgtgctcggtgcgccagacccgcgacgtcgccttcgaggccgaggacgcgctcgacgacttcctccggcggcagtccactttggtcgcggtcgcggcgacgtccccaacctccatgacgtcgtcgcctcggctactccggagcccactgcccctggccggatttggaagccagctacacaacgacgggcgccggcctgccgttcttcgccctcggcctccaccggcttcccttccgacgtcgccgccttgagctcctcctcacgccctccccgccggcccttcccgatctgctctacccaagccaccacgacgaccagatccaggaagtctctccatcgctctggtcctgacagtggctggaggaccccggccggttgcagcacttcatccccgcaaaaatatcaaagttgacatcgtcagcctcctcatttggataagaatttgtgaatcaggatgttccatctaatttggttttgctcgggttgtcaaatgctcgatggatatgtacctgcgcatgtgcatcaggttggtgtgcttcggcatgtggtgggttgatttccttcagccaaggttgtgctcatctctagtatcctcaaacactaagatactgatgttcttttcctcttctcgccattcccttgcatgccatttttttcaggtaaccaggttcaatgaagaatgggagaattatgtttactgataatgtgcatttttatttactgtgccttattagttcatttggcatggacgcccttacttttgcatcagctcaggcttagcaagaaagattctcatcctgttttaattgctgacccatgaatgattaatcttgaccccccaccctcaagcaactctgttgcttttcgcttgcgagaacgcagttctgtaatctagcttaactcagaccgattccttattttattgataatctcatctatttgtcatgtgagtaatttaagtggcgcttaaacaacaatgaaacaattgtccagatgtggttggaacaaaaccatatccacttgccgtcaaaaaaaaagaaaagaaaaataagtgcaaatttgntatttcttgttcctcgcatggttaaagatggtcttcctcgtatggttgaagatggtcttgcttctcactatgaattattcttgtgcttgcagatggatgatactctgacaactggaagcatcaggagtacagagggggaaaagagacgtttagcagaggcttcacttgcctacaactgtgagaggatagatgtcggacatctatatgcggagattattggtttacttgacaagatcatggcagctcctgcaccatacaattttatcttgcagtctattcttgagaaagagaagttgactggaacaaacttcatggattggtattgcaacctgagaattgttctcaggcaagagcacaaagagtttatgcttacacaaccttttccagctgacttgcccaacaatgctcctgttgctcaacgtagggagcatgaaaggcgatgcaatgaataccttgatataagctgtctcatgcttgctactatgtcccctgagcttcaaaggcaatatgaggcattggatgctcatatgataatcacgggactacgtaacatgtttgaggaccaagcaagagctgagtggtttaatacctcaaagtccttgtttgcgtgcaggcttgtagaagaattgcatgggatgctaaagactgtcgaggaaagcattaagaaaaactccaaccatgtgatggttatgcataagcgcaagcccaacaacaagaagagtggtcaaaagagaaagctaaactctgatgagatcacgagtacaagcagctctaagaccaaggttcaaaagacagggcccgctaaggatgcagagtgcttcttttgcaaggagacaggtcattggaagagaaactgtaagaaatacctacagcagctcaagcagaagcagcaggatggaaagagttccacctcaggtattaatgttatagaaattaatcttgctacttcctttactgattcttgggtatttgataccgggtcagttgctcacatatgcaaatcgttgcaagggctgaaaagaagtaggagcttagtgtcacaccctgaagttcctttcccaagcctaaattga

SEQ ID NO: 23226 - DNA, 3933 bp, Oryza sativa; identical to SEQ ID NO: 14485
  Clone ID: TF_OsC91_1938

SEQ ID NO: 23227 - DNA, 4551 bp, Oryza sativa; identical to SEQ ID NO: 14509
  Clone ID: TF_OsC359_7913

SEQ ID NO: 23228 - DNA, 4652 bp, Oryza sativa
  Clone ID: TF_OsC1517_1429
ctaagggagcagctccgggaactcggcacggagaagatcttctcgctcccaggttgcctcatcttcagaatggttgctccattggaccttgtagaacttgatggtcttccttcgtgtctgacgttctgcctcttcaagaaccttgatcggtctttccttgtaggttagattcttttccagctcgatattacccaggggaacttgttcttctggaactcgaagacatttctttaactgggatacgtggaacacgttgtgcacatctgcgagaccttcaggtaactcaagctgataagccacttcgccacgtctggcggttatgaggtaggggccgatgtagcggggtgctaacttgccggacattccaaacctcctcataccacggaggggcgatacccgcaggtacacatgatctcctttttcgaactcaaggtcatgcctccgattgtcagcgtaattcttctgacggttctgcgctgtctttaaacgttctcggattagcttaacttgttcttctgctgccttgagtatgtcaggaccgaataccagtgcttcgcccacctcattccagcacaagggagtgcggcactttcttccgaacattgcctcattcggcaacatctggatgctggcctgataactgttattgtatgagaactcagcatacggcaaacaacgatcccaagtgccatcggtctgcggatggtaggccgtactaaaatttagatcggttccgagggcttcatgcaactgcttccagaaccttgaggtgaactgagtgcctcggtctgacacaatcttcttgggacagccaaatctacatacgacatgggtcatgtagagttctgctagtttctttctatcaaaggtggtttttactggcacgaaatgagctgatttcgtgagtcggtccacgattacccagatggagtcgtacccgctaggggttcttggcgaaccggtgatgaaatccattccgatctcttcccatttccactcgggaatcggtaggggttgcaacagaccagctggcctctgatgttctgccttgactctttggcaaatgtcacacagggctacgtattctgcgacatctcgcttcattccagcccaccagaagtatgccttgatatcttggtacatcttcgtacttcctggatgaatggagtaggctgactcatgagcttcctttagcatgagatctcttaattccttcttggccggtacacagatgcgtggaccgcaccaaactgtgccttgatcgtctatggagaaattggtgtctttcttctcttgtattctttttattaactcttttatcccttcgtcgtctttctgagcctcccggatttgcgattctagggtgggctgcactgtcaagctggcagggacacctgactgtaccacggtcagccttaacttctccaattctctgcacaggcgatcttggccaggccgtatttgagctacattgcaataggccttgcgacttagcgcatcagcgaccacattagctttaccggggtgataatgaattccaagatcgtaatccttaattagttccaaccatcttctctgcctcatatttaactcgatctgagtgaagatgtacttaagacttttgtgatcggtgtatacttcacatctgttcccgattaaatagtgcctccagatcttaagagcatgaaccacggctgccaactcgagatcatgggtgggataattgacttcatgaggcctgagctgcctggatgcataggccacaacctttcgttcttgcattaggacacatcctaagccttgtcttgatgcatcacagaagatctcgaaatcttttctgatatctggcaaggtgagaactggggcagtggtcaaccttttcttcatttcttgaaagctgtcttcacaggctacagaccattgaaatttcttttccttctttaacagctcggtcataggtctggctagcttagagaatccttcaatgaatcttcgataatatccagctaggccaaggaagctgcgaatctctgacacattcttgggcgggttccaagcaagtacagcttcaaccttgctgggatctacttcgacaccgttggaggagatcacgtgtccaagaaatgctactcggtctaaccaaaattcgcatttcgagaattttgcgaatagttgatgatctctgagcttttccattatcagcctcaggtgttcaacatgttcttccttattcttggagtatatcaggatgtcatcgatgaacaccacgacaaactggtccaggaattccatgaagattttgttcattaagttcatgaagaacgctggagcattggtgagtccgaaggacatcactgtgaactcatatagaccataacgcgttgagaaagcggtcttcgggatatcttcagatctgattttcagttggtggtaacctgatctcaagtcaattttagagaaaactcttgctcctttaagttgatcgaacaaatcgtcaatccgtggcaacgggtacttgttctttatagttacttcattcagggctctatagtcgattaccattctctcatagccatcctttttcttaaccagaagcactggggctccccaaggggatgagctaggtcgcacataacctttactctccaattcttcgatttgtcttttaacttctgctaactcattagctgccattcggtagggtctttttgtaattggtgcggtgcctggtgccagttctatggcgaactcaatctctcgatctgggggcatactcgataactcttctggaaacacgtcgggatattcacagactatgggcaccgattccaagggagtggcttgcaaattggttaggattgaccgacttgcggtaagagtgttgggggtaaagtgaacttgctttccaccaggtccttgcaaggtgatggacctttcggcacaatctatctgtcctttgtgcttagccaaccaatccatccctaggatgatgtccaagctttgcgagtccaggactatcagtttggctaggaagtcaacttcctcaattctaaggttaacttccgggcatattttagttgcccttatatcccttccagtggaatgtactatcattggtactcgtaaattttaggttttccaaccatttcttttcacaaaggcttgcgatatgaaagaataggaagctcctgaatcaaacagaattattgcgggtatggagttgacagagaacatacccatcacaacgtctggagcatcctgagcggtctcagcttgaatgtggttcacccgacctcgaccgaagttgttggaagcatgggaaccttgtccacttgcctaagagctaggacgagactgagctgctgctagagtaggagttctggcggtgctgccattagcatgccctgagttggtgttggtaggattctgagggcactgtctagcagagtgacccatcttgtcccaccggaaacactgtacggttgacagtcctggtggtgacttgaaagaggtaacactgtttggcgcaatattgccacttggggcacgctgctgcggcggaggtgctggacggttcatctgagggcgaggggcatagcctggctggcggttagcctgagtgaccgactggtgatactgcttaggctgaccaaagcgagggtggggtgcacctcgggaagaattcccttgatgggtagacttgcgtttcttatattcttcagtagcctcttttctggcatcctcaagtggaagtgccttgttgatcatgtgctgaaaggtggggaagtcatgagcaagcaactggagtctcattccaactgtgactcctttcaagaacttcctgatcttcttcttgtctgtgtccacttcttcaggagcgtatcgagccaacttgttgaactgactcagatactcattgacactgctattgccttgcttgagcctgataaattcttccttcttcatgtcaatagtgcttttaggcacatgagctacacgaaaagctgcagcgaactcattccatggaatgttagtgggttcggggtgtgcattgcagtaattctcccaccaatctgcagcaggtcctcttagctggtgagaggcgtagaccgtcttctcaataggaatacactgcactaagttgagttttctctcaacatcctttagccaatcgccagcctcaacgggcttgacggtctgagagaactctggcggacgagacctcagaaagtctgtcagcttggatctattgttgcccatgtgagggtggccatttccatgcgcgttgtgctgaataccggctatagctgtggctaaaccttgcaagatttgagtctgaactgccatcaagtgctgcatgttattctcaacatggggtggtgaaggaatgcgttcttcaccagaattgtgaccgacagagcggtgagagcggtgagactattccacttctgcattacgggaaactatgcgatgcgagcggttgctgcggtgggattgctcaacttctgcattgcgggaagcagtacggtgcgaacggttgctgtggtgagactgctcattagctgactcatgatctgcttctggctcaactctaccttcctcaaaaccgaagcgggctggtgcacgagcagcgcggtggggcggctagccat

SEQ ID NO: 23229 - DNA, 6813 bp, Oryza sativa
  Clone ID: TF_OsC1458_1
atggccgacccgagccgcacttcctcgggtggctttccccctccacaagtagctctctccccgcctgtccccgggtcgccgccctccgctctctagccgaccccacgaaacaaaaaggcttcatagctcaacctcctcgccgccggccacgctcacctcccctcccctccccccccatccctcctcctcctcctagccccaggtcgctgctcggctccgccatgtaccgcgcggccgccagcctcgcctccaaggctcggcaagccgggagcagcgctcgccaggttggaagcaggcttgccttgagcaggaactatgctgccaaggatatcaagtttggagttgaggcccgtgctttgatgctgaggggtgttgaggagttggcagatgcagtcaaagtgacaatgggtcctaagggacgcaatgtggttattgagcagagctatggttcaccgaaagtcacaaaggacggtgtgactgttgccaagagcattgagttcaaggatagagtcaagaatgttggtgcaagccttgtaaagcaggttgctaatgcgaccaatgatactgctggagatggtaccacttgtgctactgtattgactaaagcaatatttactgaggggtgcaagtctgttgctgctggcatgaatgcaatggatttaaggcgtggtatttcaatggctgttgatgctgttgtaactaacctaaagggcatggctagaatgatcagcacatcagaggaaatagctcaggtgggcacaatatcagcaaatggggaaagggaaattggtgagcttattgcaaaggctatggagaaggttggcaagaagggtgtaatcaccatggcgcatggttcctccctttacaaaaggacgtgaagttagtcgatgctatgatgcttgacatggagttggtccctgccaaactttggtaccagacccaaatacccaaagatgtgaactggaagacctcttgaaccttattcatgacaaggctgtgtcgaaccttcatggagtagttagagacttggcgttggctttgaagaagcagaggcctctgctgattgttgctgaagatgtagagagcgaggcattgggtactctgattattaacaagcttcgtgcaggcatcaaggtctgtgctgttaaagctcctgggtttggggagaacaggaaagcaaacttacaggaccttgcgatccttactggaggagaagtcataactgaagagctaggaatgaatcttgagaagttcgagcctcagatgttgggtacatgcaagaaggtaactgtatctaaggacgacactgttattcttgatggagctggagacaagaaatccattgaagagagggctgagcagattagatctgcaattgagctaagcacttctgattatgacaaggaaaagctacaggagcggttggcaaagctctccggaggtgttgctgttctaaagatcggaggagccagtgaagctgaagttggtgagaagaaggatagagtgacagatgcattgaatgccactaaagctgctgtggaagagggtattgtaccaggtggaggtgttgcacttctttatgcatcaaaggagctggataaattgccgactgctaactttgatcaaaagattggtgtacaaatcattcagaatgctttgaagacaccggtgcacactattgcttccaacgcaggtgtagaaggggctgttgttgtcggtaagcttttggaacaagataacaccgaccttggctatgatgcggctaaaggtgaatatgtggacatggtgaaggctggtatcattgacccactaaaagtgatcagaactgccttggtggatgctgcaagcgtatcatctctgatgacaaccacggaatccatcatcgtagagatcccaaaggaagagaaggaggcgccagcgatgggaggcatgggtggaatggattactaatcaacacccattaaagtaaactaaaaacatactcctgggatttaggattttttttgcggtgcaagttcatcgtcgatgtattttttgttcttgttgatgaggtggttgtcagacaattttgattccactggcggtaggacgggttggaacgaataaaattttagttcagagctaggagttcttgagagctgaggactgcacttcgatcaaaattgaatctgacaccttgtgccggaacatttttatgagctgatctgaaagattacgccttttggcctgaaaaagtgagaagatatacaaaaaaaaaagcacgatcattgaaacgaccgagatatggaaacacagcgactctgggagcaggcagcggcgattgaggcacaactggacttcgaccgggagcagggtggacgggacattggcgcacgaagccctcgcaggcagcgcgcctccccttcctcggaccggcaccgtggtcgccgtggacgctccggctctcctcccgttgtgcagaccatcgtcaaggatgttggcggcgcatggcccatgctcaccaagactaactacgccgaatgggcgatggtgatgaaggtgaagttgcaggcgcgccacttgcagaaatggagacaaatggaatcaaggtacccgacgagaccttggacaaggtgctcgcagctaaacaatctggtggaaactctgcgctccaaccgccacctgcagaggcgtaatctgattggaacaagaagcccctttgtagccatacgcatcggcagcgaccgcgcccgcaggtccacgcttcagaagctgcgtcaggattgggagaacctggccttcaagccgggtgaggacatcgatgacttcgttctccgcctcaactccttgcagcagcggttggcgcagctcggcgacaccaccattgacgaggagagagccgtggagaagctccttcgcgtcgtccccgagaagtacacgcagctggctctgtcgatcgagacgctgctggacttcaccgagctcacaatcgaagaggtgatgggtcgcctcaaggccgtcgacaaccgcaagcagctacctccctcagagccgatcaccattggtggcaagcttttcttcaccaaggagcagtggctcgcccgccagcaggagtggaagaagggggaggccacaggctcttcggcttcgggatcgtcgagcagccgcaagcgtcgaccacgcaagtgggagaaggcgcgtagtggcgctcttggcgacgccaatggcgagcacaagggcagccgcgacgacacctgccacaactgcgggaagaccggctactgggccaaggactgccggcaggcgaagcacggcggtcaagcacacgtcgctcaagcacaggaggccgcggcccacgtcttcctcagcaacggatcatgcggcgacaagatcgacggatggtgcctcgacaccggtgccactcaccacatgaccgggcggcgggaattcttctccgagcttgactccagcgttcaaggctccgtcaagtttggggacgcctccaccgtggtgatcaagggcgtcggctccatcctcttcactgccaagaccggcgagcaccggctgctcaccggtgtctactacatccccgcgctaaggaactccatcatcagtttgggacaactggatgagaacggctcgcgcgtggagatagaggacggggtcttgcgggtttgggatcgccatcgtcgccttctcgtcaaggtagcgcagcctgtgtgccttgcagcccgccgcgacgatgatgcatggcggtggcacgagcgctttgggcacctcaacttcggagccttgaagcagctcggcaacaaggagatggtgcagggcatgccgcgagtcgagcacgtggagcagttttgcgacacctgcgtcctcaccaagcagcggcgactcccctttccccgccaagcaagtttccgcgccgaggagaagctggagctcgtgcacggtgacctctgcggccctgtgactccggccacacctggaggccggcgcttcttcctgctgctcgtcgacgacgtgtcccgctacatgtgggtggtcctgcacgactccaaggcagctgctgcagacgccatcaagcaccatcaagttgctgcggagaaggagtgcggccgcaagcttcgggtgctacgcaccaacaacggtggcgagttcacggcggctgagttcgcggcgtactgcgccgacgaggggatccagcgccacttctccgcgccatacaccccgcagcagaacggcgttgtggagcgccgcaaccagacagtggtggccactgcccgcgccctcctcaagcaaagagggatgccggcaatctactgggaggaggcggtgatgactgccgtccatctcctcaaccgcttgcccaccaaggcccttgacggcaagacgccgtacgaggcctggcacgggcgcaagccggtggtgagccacctccgcgtctttggctgtctcgccttcgccaaggagctcaaccacgtcggcaagctcgacgaccggagctcgccgggagtcttcatcggctatgcggagggcgtcaaggcctaccgcatcctcgaccctgcgacgcagcgtgtccgcatttctcgggacgtcgtgttcgacgaagggcgaggttgggcttgggacaaggcggtggacgacggctcgacttcgactctccgagacttcgtcgtcgactacgtccactttgggggagccgggggagctagcagctcatcttcaccgagctcgtccacctcggcacccggctcgccatcagctccggcgagtcctccaccacctacaccaccagcgactcctccatcaccggctacgccctgctctcctacaccagcgcccacaccaccggtggagttcgccactccgttgtccaacgacgaggatcgtgttgatgcgtaccacgacgacgagcctctgcgctaccacaccgtggacaacatcttcggtgatcagcccgtccttggactggcgacgcacgacttcgaggccgagctgcacctggcgcatgaggacggcgagccctgctccttcgcagaggcgaatggagatgtggcatggcgcactgcgatgcagcacgagatggacgcggtcgagcgaaaccggacgtgggtgctggcagatcttcctgtcggccaccgcgccatcacccttaagtgggtctacaagctcaagaaggatgaggccggggcggtgatcaagcacaaggcgcgtctggtggcgcgcggcttcgttcagcaggagggagtcgactttgacgacgccttcgcgcccgttgcgcgaatggagtctgttcgtctcctcctcgcgctggcggcccaggaaggatggcgtgtgcaccacatggatgtcaagtccgccttcctcaacggagacctgaagaaggaggtctacgcccaccagccgccaggattcgtcatccccagcaaggagaacaaggttcttcgcctgcgcaaggccctctacggcttgtggcaggcgccccgagcttggaacgccaagctggactccactctcaagcaaatggggttccagcagagctctcacgaagctgctgtctaccggcggggcaaggacggcaatgccctgttggtaggcgtctacgtcgacgacttggtgatcaccggcaccaaggaggctgaggtggaggcgttcaaggaggagatgaaggcgactttccagatgagcgatttgggccttctctctttctacctggggatcgaggtccaccaggacagctctggcatctctcttcgccagaccgcctacgccaagcgcatcgtcgagttgggcgggctcaccggctgcaacctagcctacactcccatggaggaaaggttgaagctgagccgcgacagcacggctgaggagatttggcattcgctgttggctgttagccggttcatgcagcgaccaacgacagagcaccagcaggctgtcaagaggatcctccgttacgtcgagggcaccaccaactacggcttgcactacccgaggtgtcccggtgcgcagcacttcattgggtacagcgacagtgacctcgccggcgacagcgacacgagcaagagcaccagtggcatgctgttcttcctcagcaagtgcctgatcagctggcagtcggtcaagcaacaagtggtggccctgtccagttgcgaggcggagtacatcgctaccacaaccgcctcaactcaagctctctggttggttcggctgctgggagatctcttgggaagagacgctgaagcagtggagctcagggtggacagcaagtctgctttggccttggcaaagaatcccgtcttccatgagcgcagcaagcacatccgcatcaagtatcatttcattcggagctgcttggaggagaggagcatcaaggccagctacattaacacccaggatcagctcgtcgatcttctcaccaagtccctcgggcgggtcaagttccaggagtttcgcgccaggattggaatggacgagtcatgtggcaaggtcaatgacagaaaggctgagctaaaatcacatggagaaaaagcagttaagagaaatgactaccttgctgcgtcaaagatctactccgaggcacttgagctagattattttgatgcaaccttgtattcaaacagaagcctttgcaacctacaaattggagaagcacaaaaggctttgcttgacgcagatagatgtgtagaactgcggcctaagtgggtgaaaggtcactaccgggaaggagctgctttgatggtgctaaaggagcacaagaaagcatttgaggcattcttgaacgcgctgaaactggatcctgctaatgccgagattgagaaagtgatgtggtaa

SEQ ID NO: 23230 - DNA, 6141 bp, Oryza sativa
  Clone ID: TF_OsC1713_5622
ccaagccttgttagattcagaatcagaagatgttaaagaaaaacttgaaacaatactaaataatatagacaatgactcatgttcagatgaagaaaaaaatgcagagattaattgttgccaagacagtggttgctcttgttatgagccagataattcagaagaagagtctgatgaaaatatactcgttttaaccagtttagaagaatttgttctcgatacttttgaaaccattcaagatccagaagaaaaaagaagagttctcgaaaaattcctttcaagagtcaagactgataaggataaactaaaaaaggatattcaaaagagcaaattcctctctattgatgaagtgttcaaaagattagatgaacagaaaaagaagaatgagaaaccagatttgatgagcctattcgaagaccaaaaaattatgaaacaagatttagaagaaataagaaagcgtctatacatgttagaattaaaagaaggattccatatggaagaaaaggacgaaccaattcaagaagatgatcaggttgttggaaccattcaaaaatatatgaagcaaaaatggtacacagaagttatgtatcgttttatagacggatcctactttcagcatatcactttaattgattctggtgctgatgtcaattgcattcgagaaggtattatccctcataaatatttctataaagccgcccacagaattcgtggggcagatggaggacttttaacagtagaatatcaaatccctgaaatctatatttgcatctcggaagtttgcattaaaacatctttcctactcgttaaaaatcttaagcaagatgttattttaggaacaccatttttatcacttattcgtcctttcctagtcacaaacgaagatattcaatttaagataatgggcaaacaggtgagcctaagattttcgtctaacacagatgagattcttgaccagcttgttcagaccaagagagaacaagttgtgaatacaatatatttacatgacgattctttcccatcatatcttccaaaatctatggacttgccaggtggtgtgaattttggtggtattgaggagaagataatcctgtatcttccatgtccaagtctcctgcagacatctttcacagcatttcctaaatcagattgaaggatctgatcgagggttgcatatatggaattcacaagaccatgatctataatggtttggagagatatttcttcatggttgtatgtgggtaggttccggaatctttgaagatttatctcagctttgagaaccaggaatctataggatgggtcagaaattgcctgattatctagtcttaagagagggagcatatatatgattactcgtatggctgggtttctttctctcccttctaaaagatcaaagaaataatcttggagtccaaggaatattttcatttgtctctccttaaacttttgccaaacaagatcgaggatgtcttgcccaaagcaggataaagtttgttccgttttgaagcttaatctgggttggagattttcgtatgtagtactcatgggattttggcttttaagtttctttttgcaagaatctttgtaggcacaagatctacatggtgcttttggctgagtccggagtatatattgtggaaggaataaattaggatgattatgcagtatgtatggtgtttggggaatgatatcatgcctttttgtggatgatgatggtttattatgtgggaaagattgcaataggttattgatatttatgtggaaagcaaccatgctcgaagcaggatctgctgagatcaaaatcttatctgagaataccttggtattcttatctgttgccatagattgttcgacttccatgagaagtttatcttggccatcacgggatttctcctcgcgataatctagtaacctttcttcatgatgagggatatcttgcattttagcccttttttctgttatcttttgatctgagggcacgaaatttttgaaataatatgccaagctatttaaggcatgagctttttcttttttgttttttgtttgccacaaaagatttaataacccatgttgtagctctgttattctgaaattgtgattaaatcgttctccatggcctctgggcagttggggcagtctccatgaactcatatttgtgagccattcagacttctgtgaagccatttccctgcatatatattcaaaatctttagtagcttttaataaatatctatcttcccatgatgtcttacctggcaattctatagattttggaagatatgatgagaaagaatagttgtctatattctcactaagctcatattcattaattctttcttcagactcaagattaggtacttctaagttgtcgagtttgtcgggttttggggagggggaggttccaccacgctttcgtacctctgagatatatggaacattattttgatatgggataaaagtaattccttgctcatgtattactgtggtttgtactgattgttgaaggaaccttaggccaattatcatgtcatcattaatcattgacaaatctcttattgtaatctcatctattatatatttagttgcattaatgtaaacctctgagatatatggaacattattttgatatgggataaaagtaattccttgctcatgtattactgtggtttgtactgattgttgaaggaaccttaggccaattatcatgtcatcattaatcattgacaaatctcttattgtaatctcatctattatatatttagttgcattaatgtaaacctccatattataagctaactgattatgaattttctttattccggacatgtctgtggaaacttcggccttattgtcatcaattgtgtgaactatttcaggacatcttgtgaaatatttgtcatgaataatattctttgtacacccagtgtctactagtgctaatattttataagatactttgggtgtcaattttactttaacagggattcttatacctaatatttctttgaaaggcaatcttactatatatttatttccaaaattggttatggcctctcttagttgaattattttagcagtattactgtcttttaatgttatcaattgctctttaaattcggtgttttgtatgtccttattctctggtaatgccttaatatcgcaattattttttaggttctctaattctacttctagtttatttagtctattttctaacactcgtactctactagataaagtcttttcatccgattctaattctatttcttttctccatttttgtttatttgcttttatacattcagcacaagcttgttttagacatatactacaagtcactctattttcttgactagggtaatatatgcaaaaagcacatttgatattatagtcaccctttcctcgaatccaatcatgttcacaatttaattgatccatcatttcaacctttagacctgctaattcgtcaattaaatctaactcttcatcggatgattcatattcttcgttgatagtttcaacttcgtctgtttctatgatagaatatattgattcgtcatcttttatttcatcatcgcatactaatatgttttcgtttacgctatctataattagaaccctctcttgttcttcatatttactagaatatctcttttgatctttatttgggcatgttctacttaaatgatctggcgagttgcatataaaacatctgcatgttttgtcataggttttctttggattatatcttcttacatttcttttatgtaagaagggtgctctattatctgatcttcttaagaaatatcttttctttgttctaatattattatggtttctattttgatgtttataaatccttttacttctaggcttgtcttctccatatgacaagggtatttgaactattttattgcagaaattgtaatccgagtgtttcatagatctttgggcttggatacccgtgcatatttttcttagttgcttaaacacaaaagttatagcttgagagatattgatttcagctccttcagtttcctttttatattcttcaaatatcatacttcctagtgggtcaggtaatttattaaagtaacgttcaactattcccctgttatatccttgtttagcagttgtagcattatataaataatgttgggagaattcttttatgcctttccaacttgttaacgttaatttttctatttcttttaacctttcattttgcaaagttgtataacctaattccggatcttcagctataataatgttagatataacatttgcaaaattatgcggattgctaccagctcttttcaattcttcataattattaggattcttttcaacccattgttcccatagaatcttagcagattcacctaagaatgtttctaagtaggttatcatatcttcaactttacttcctatattgtgctggttttgtatatatttttgaactattaaacctttccaaatactaataatattaggccaatcaatagggtcatgtgcggctaaatttaatatagcaccatcactcctctggttttgaaatttaacaggcttctcaaagtctcttctctttgtacccatatgcctatattgacctggtatatagttatatgaaaattcttctctatcagggggccattttcctgctgccctagctggtctttctctttctccttcgtttttcacagtaccttctccatatctttttctctttcctgttcctaagtccacttccatagcttccattgcattatcaagattatgtaaccctacttcatctaatgtgtttataaaatcattatattgttctgtattgtctatttcattttctatattctccatctcatttattagattaatttcttcttcataactttcaagaaataatctttcattctctgcccactgctcttcttcacttaaaattttaccaagattttgctcttctttgtcatacttatcttgctctttcctctttatctgttctatcttggtttcttgggttttaaaaatttctactgccatatcttcgttcttctttactttctttactctagctaattctctatagaaataaagttctttatctcttattttaggccactcacacttcatagagttattatattcttcatttatttcctttaatttattttcgtaatattttatctcactttcttgatctaatttttccataaactctgaaacactatgtcttctattatctattatatttctatcagatgcttctgtttctaagtcatctgtggttctgggtttgtaatttataaatctaatgctggtatttcctttactattttgataacttataaaattttcaggctgactcaaagttttgctttcaattaaatcactaattttccattcttctcctgccctttcttcagaacttatttttaaagggctcatgaaagttattcccttagagtgcatattttcaatcacgtcatttacatttattttgtatttggaggcacttctattagttaatcttcctataaattctatgcttactagcaaatttgttcctttaaattcctcgtatccctttgtttgaaaaccaaaactcattttatctataaattcttttacaggcatcattagatctggggctatatatgttatcaacatattctcattcatgtcaccttctaaaaatcctaatgctgctttatctattgtgtcccaccttttatctaacagagttattagaactttagctcctaatttctttcttgtcatacctttgattcctattatatacataccttggtgaatatatttataccctgaatactttaatccattttcaaattccttggctacaatttttaactcaactggctttgttaaaacgcttaactctacttctctagatattctgtataacccatttttattctcaaaaaatcccatgcaatatatttgttgaggtcttattgcccttaaagtatctcgttgatatctttcgagctgtttgtctacttctgcaatatcttcaagctcatctatgtcttcatttttacctttttgtttatcaatacaacttaaagatttatcgtctctgcttgctattcttctaaacaaactcctagataggtccat

SEQ ID NO: 23231 - DNA, 1916 bp, Oryza sativa
  Clone ID: TF_OsC359_7376
catggggtgcagttttcaccaccgccgccgccgcggatcccgccgcctcccgccgtccccgcgtgcaataaagtggggggaatcattccccgtgattccctctccctttccccccatttttccatctctctcttgcgttcaaacgggcggatttgcccccgcaaatctcgccggcgccattgatggcggctggacctcccgcgccgatttccttcccctccggccgctctctcccccttccaaccctatttaaaccctccccgcacctcctccgtccgtttccgcctctcgccgcccttcctcctcgccggattcaagctcgcgacgtcgctctctttctccgccgtcgccgccgagctccggtccgccgccgccgtcgccccgagccgcctcccacctcggcgccgcctccttcggcttcgccgcatcctcgccgacctcgtccacccctccgtttcggtcgccgaccgccggagcgccgccgtccccatcgacccgagccgcgccaccgcctccctccgctccggccgcctcctccgtcgccgtcgtcgccccgggggtgtgtaccgtcgcctcctttcccccttccctcccctctcttggccgccgctccgccgtgccggtggtcgccggcggcgaccatcggggcgcggacgcgctgcctcccgccgaccgcaccggcatggctgccctcgggcgcgccgagtggctcccgcgtggggcccggccgtcagccgcccgcgccctcgggatgtttaacagagaaaaaggaaagaatgtcagcgggtatgcctccagtaacttaagtttccaactcaatccaccactggcctcaagagagttaacaagggcacacccttggtccattccaagcatgctgcttagttcacagctaccattggttggaagtcaagaccaaaatcggtatgtgtttgatcgagcatttgccacccaggtcaatgagcttccaatgccagaagaggatgtccccttttgtcacgattgtagagaacgaggacactatgccctgaattgtccatgggtatatgccaaagaagccccttcctttggtttagcagggcagacatcgctaaaccagcctcctcgcagcaagtcaagcttgcagcctagtgtgcaaagtagagagcccaatggagagaatccattgaatcccgagaattgctttcctcctagcctttcgtaccacatggggtcacgtactaagcaagccaaaggcaagaagagtaagaatcagaagagaaaagcaccgatgcgaactgaagaagaagtacataagatgactattaccagcaccgaatggcctccagcagggataactattcctagacgtcaaagaggaaataccttccgaggtgcacgacagttgacccagcacctcgtaagccatggcggcagagtatctgatagtgaagggtcagatcaagtctcctcggattatgaagatgagtctctccgacatctcggcgaggaagagatggaatcaaaagcatgcccccgttgtggagaaattggacacgttgctagcatgtgtttcacactctgccctcattgtgaggaagaccatccaccaggtgaatgtcccacccgcaaggtcacatgttttctgtgcgaagttagtcagctccaacagcaacatcgacgatatcatccacagcaccaatgctcctcttgctgcacctgactctgcaataaatcatagcaataataccttcagcaccaaccattctctgcaccgacggcctcagcaaagaattgtcatcgatggaagaagttgtgtctctccccgacctactccaggccgagcgaagggcaatcaacctcaggaggatgatacgaagcagaagaccgttattcgcttcaaccagcaatcagaaggaagcttctcctgtgaatga

SEQ ID NO: 23232 - DNA, 3447 bp, Oryza sativa
  Clone ID: TF_OsC359_7371
atggtgggaccacttccagctacgcagccagagggacagcctatcacctgggcccatttcaccgccgccttccggaggacccatgtgcccgccggagtcatggcccttaagaagagggaatttcgggagttgaaacaaggcaaccgctccgtgatggagtatttgcacgagttcaataatttggcccggtacgccccagaggatgttcgtgaagatgaggagaagcaggagaaattcctggcagggatggaccctgagctatctgttcccctggtggacaagagcatccgcctggaagccaagcacaaggaattggagtcgcacaagcgtcgcttggcgaatttccgcaaccaacagggggctaaccaaaggatccgctacaccaatccctatccagggggatcctcctcgcagccgcagcagcaaccccgctccgcgctccgacctcaattcgtggtgcgcgtcccacagccgcagcagcagcagaatcagcaaggggcccatgcaccccgccctcctgcaccagccgtgcagcctggacaaggccgcagggatgctcaaggtcaacagtgtctgtgcttcaactgcttcaagcccgggcactttgcggataaatgcccaaagccgaggcgacagcaaggccaagcgcctccccgccccaacaacggtggtaaggatgtcactcggggccgtgtgaaccacgtgactgccgaggatgtgctgagaactccagacatcatcgttggtacgttcctcattcattccatccctgctaccattttgttcgactctggagcttcccactcgtttatatctgtgccattcatggggagaaatcagctgggggtagaaaggcttaggaaccctctgctcatcaccacccctggaggggttatgacagcaaagtattatagccctgccgttcctatagaaatccagggaattgctttcccctcggatttgattcttctagacaccaagaacttggatgtgatcctcgggatgaattggttggctcaattccaaggagtagtggattgcgcaaggcgcactgtcactgtgtatcggggccctgatcaaccggttgttttctttgcacccccaacttccgccggcagttcagtacttcatcagctaggattgccagaaatacccatcgtcagtgagttcggagatgtgtttccggaagaactacccggtatgccgcccaagcgagagattgagttccagatagatcttgctccaggaaccgctcctctgtacaagcgaccctaccgtatggcggcaaatgaactggccgaaccgagcacttccccctggggtgctcccgtgatttttgtggagaagaaagagaagacaaagaggatgtgtgtcgactacagagctctcaatgaagttactatcaaaaagaagtaccctcttccccggatcgatgatctgttcgatcagcttaaaggtgccactgtattctccaagattgatcttcgttccggatatcaccagttgcgcatccgtgaagaggatatcccgaagaccgcattcaccacgcaatacggactgtatgaattcacggtaatgttgttcggtctaaccaatgctcctgccttcttcatgaacttaatgaacaaagtgttcatggaatacctggataagtttgttgtggtctttattgacgacatactggtgtactcacaatcagaggaagaccatcagcagcatctccgtttagtgttgggaaagctccgggaacaccaattgtatgccaagctcagcaagtgtgagttctggttgcccgaagtcaagttcttagggcacgtgatatctgctaaaggagttgttgtggatcccgaaacgttgctgaagaaggaagaaaaatttgtgtggagccctcaatgcgagaaagcattccaaactctcaaagaaaagctggtttccttgctagtgttaatcttaccggatactcgcaaggacttcctggtgtactgtgacgcttcgcgccaaggattggggtgcgtattaatgcagaaaggtcatgtggtagcctatgcctcacgccagctacggccctatgaaggcaactatcctacccatgatttggagttagccgctgtggttcatgctctaaaaatccggcggcagtatctcattggaaatcgctgcgaaatatataccgatcataagagtttgaaatacatcttcactcagtcggatctgaatcttcggcaaagaaggtggttagagctcatcaaggattatgatgtgggaatccactatcatcctggtaaggccaacgtggtcgccgacactctaagtcgaaaaagccattgcaacactcttggcatccgtggcattccaccggaacttaatcaacagatggaagccctgaacctaagcatagttggtcgtggattcttggctacgctggaagccaagcctaccttgctcgatcgaatccgcgaggctcagaagaatgatccagatatacatgggatcctcaagaatatgaaacagcgtaaagctgctggtttcacagaagatgaacacggaaccctatggaacggaaatcgtgtatgcgtaccggacgacaaggaacttaaacggttgatacttcaggaagctcacgaaagtccttattccatccaccctggcagcacgaagatgtacttagacttgaaagagaaatactggtgggttagtatgaagcgcgtgtcaaagcagagcaccaacgaccggccggacttctccaacctctccaagtaccagaatggaaatgggatgaaattgggatggatttcatcaccggacttccaaaaacccaaggcggatatgattctatatgggtagttgtggatcgattaaccaaggtagctcgatttattcctgtgaagaccacctatggagggaacaaactagcggagctctacttcgctaggatcgtgagtctccacggcgttcccaagaaaatcgtatctgataggggaagccaattcacctctcacttttggaagaagctccaagaagagttgggtactcgattgaatttcagcaccgcctatcacccgcagacagatggacagaccgagcgtctaaatcaaatcctagaagatatgctccgcgcatgtgtactagatttcgggaagacctgggataagagtctcccctatgccgagttctcctacaataacagctatcaagccagcatacaaatggcaccatatgaagcgttgtacgggcgcaaatgccgaacaccgctcctgtgggaccaagttggggaaagccaagtgttcgggactgatatcctgagagaagctgaagctaaagtcagaatcattcgggataatctaaaggtggcacagtcacggcagaaaagttatgcagataaccgtcgccgtgacctggaattcgcagtggatgattttgtgtatcttcgagtcacgccattgcgag

SEQ ID NO: 23233 - DNA, 5727 bp, Oryza sativa
  Clone ID: TF_OsC160495_1
ttagccgacttctctcaaaatgttggtctccctccacactgcaacttcatccttaatatcactgaagagctccgctgccgttctcgccttttgttcaaagatcctgaggtttcgttctcgccacacgaaccagcagatgaggatacaaagggagtcaaaagcgcccctgtagcccgtctgaaaacagagtctgactttaatccaccagtccgcgaactcccgtgccgcgaagaacatctcatacacagaggctgtgcagaaaactctgttaggagtgagcttccaactggtagagtcttgggcatcctcttgcagctgtacctcctgaatctcatcccacaaacgaaaatattccgataaggccagcgcagagaaactccctcgaatgtcgcgcacccagcgattctgcgagagcgcctccgccacagtcagcttcgttctgcccaggtgtgtgaagagcaaaggtgaggagacagagatgcagcccctcggcaaccagttcgccctccaaaagtccgtatctttaccgtcccctacctgaaacgacgccactgattggaacagaccggtgatgtcgtttgtcggtactgagtttatcagagtccacggccttcctctttgctccaatcgtctagcgagccatttcattcgcatcgcttggccaaataattccagatttttaactcccaatcccccgcactccttcgggctgcagacgatatcccaagccactaggcagtggccgccattaacctcctcttgccctttccacaggaacgctcggcatttcttgttaaactctttgattgcccattttggcagcacaagcacagacatgaaatgaactggcagcgcggtcagcaccgatttgatcaggcgcagtcggccgtcgggagagagcagtttgggcttccagccggccacttttttggacagccgatccaaaatcggttgcacttccgccttcgtcggtcttctcagggagagtggaagaccgaggtaagtgatcgggaaattctcaaccctacacccaagcagctgttgaactccgaccaacacatcatcatcgcacctaatcggcgtcaaagcactcttgctgaggttggtcttgagccctgtagcttttccgaaaagctgaagaatggcgtttaccgctgttgcctccctctcgattggttgcaggaacacaatggtgtcatcggcataaatggatgtgtttgggatggaacgtcgagtgtccagcttggcaagaagcccccaggaagtagctttggcgagcaagccttgcagcgcatccatgacaaggacaaagagtagcggcgacaacgggtcaccctgccgcagtcctcgcgccggcttgaagctgtcactttcatggccattgagcaagattctggtttcagaagttaggagcagggcagctatccacgatcgccacctggacccaaagcctctgtttcggagcaagttcagcaagaaacaccaagagattgtgtcgaacgctttagtgatgtcaagtttcaggaggatcataggcttctttcttcggtggaattgcagcgctaaacctctgacaaaaatgaagttttcgtgtatcgatcggccacggatgaaggcagtctggttttcagcaactagatcgcccattctcggcgccaaccgggacgccaaaatcttcgttgcaagcttggaaaagctgtgtatcaggcttatgggcctgtaatccttgatcaacgtgggcgcatccttctttgggagcagagtaatcaccgctgtgttgagattgtcgagattctgatgattcccagagtgaaatttcgtcagtgccgccagcacttcccctttgatgacttgccaacaccgttggtagaaaagcccggtgaatccatccggtcccggcgccttctcgtttggcatctcttttatcaccttccaaacttcctcttcagagaaaggcacttccagctcttgcaggttcggcgccggagggaagatttgattgaattggagctcagccgagtcgggatccgccacacccaaaattccctgaaaatagtccttggccgagttgacttttccctcccggagcggtgagatccgaccctgctggcgcaatctgaggcgttagagcgtcgcgaatcccaggctgcggttcttcaggaatgccttggaactgggttcaaccgcgcaaaggagtgtgatctctggcgcagcagcaaaacggtagatcaattcattggcaatctggagcaggaggcgaaagcgactgatcctctttggtccccaggaacagaaaggcataggaagacgtgccctcttgacatacagaatgacaaagggatctgagtcctcaactggaggcggacgggaatgcgcctcctcttgatcgaagtccagaaacatagagcaaaaagtttcaaaacgaaaccttcttctaccctgcggggtttccccgcaagaaagcaatagcgcacaatgatctgaactggacgaactcagcgcttgcaagtgcgcgtccggaaacgcatcctcccattccgttgagacaagcaccctgtccaatttgaccagggtgggaatttgttgctcgctactccaggtatacctcctcccgaacagatacagttctttgagctcaagttcattaatcttgttgcggaaagcattcatgagccgcctgttcacccgcgagttgttcttgtccgccgctgccgctattaagttgaaatcacctgccacaagccaaacctccccacagattcctctgatttcggcgagttcctccaagaacagaatcttctcgttatcatcttgtggcccgtagaccgaagtgaggaaacatgaatggttgcctgcaatccactccaacttcgccgtcaccgaccattgtcccaaatgcacttgtgatccacggaatacggaccccttccaggccacaataaccccgcccctggtatgtgacgcgggaagggcaacgaaatcatcgaaatccggcccacacagttcatggattacaagcaaatcaactacctctaatttagaccccgccgccaccagcgaagccaggtccggcggtggaacatctgcttcctccagcgcaacatccacatccagcagctccgctagcaccttcatgtgctgggtcgataacggctgatcaatcacggtagtgttctgctggaaggtgtcttgatccgcttcttcttcctcttcaatgatgcccatcttcttcatcgttaccttctgcgcttttgaagttgaatggcgacgagctccgttcccttgttgttgcagacgtgggctgcgccacggcgtgaaccactcagggatcacattgcgccaacaaggcttggatttggggactgactccggcggcctcctcccgagcagggaggggggaggctcagtagcgaccgacgcgaggaatccctgaagaatctggtccgcctcggggggtagcggcgtgttcgccggcgacccctccgaggttggccgcgcgcgggcgagtgccgtcgacggcgaggcgggaggtgggagcatcatctctccgctgagcgcctccctgctgctctcgatctcagtttcctggaccggccgctcgtcatcgctgtgggccacttcttcttggtgggcctgaggtggctcgtcctcgccacatacaacttggcccaccgacatttcctgtcccaggccagccacagcccgtctcaggtcagcctgccccagatcctggcctgccaagcccatgaggccgatcccctccgtcccaggttgctcatggctcggtttcttctgggcctgcttccgcacatagacacggaactctcccgcctttgccgccgattcaaacccacgatcactcctgctctcctgcgctgagctcagcgcgtcgccagtcgccttcaatgctggccgctcgcacccatgctccacgagcgacacctcagccatcgtatcctcatcactgagctcagcacggtcgccatccttctccgtgccgagcgccgacagttcaccgccggttaactcgtccagggagagttggagcggcggtgaaagaggcgacacaccaccggccacgagcgcccagctgcagtcgtcgtccagaacgataagcgcctttgccgttgcaaccacaggcgccgccagcggggtagcgattcccacgtcggcccctggttgctccactgcttgcaccgcttgcggagagaaccacacacccggcgcttgcaaaaccaacgtcggcgaatgcggctgtgacgccaacacctcccccgcctccatgtcttgaacaacaatgtcagcccggtctagaacccggtccgccgctgccatgtcaacgacccccaccaccgcagcggcgtagacatgaccgcctcccacctccgtcggccagggaccagcgccatcgtagcgacctgcccagcaggagaaagtgttccgccgggtgacgtcttcatcatcggagttgtcgtcgaaggaggtcggcggagtatgcaacggcgtagggtcaatgacttcttctacgtggatgatgaccggataggtgagggccggcttctcccgcggcggggaaggtggtgtcgcgctcgtcccctcccgccatcgccctgcggccgggcgttccgggatttccacgtccagatggtgggaaaggtcggacggattcttgaaccaagcgaagagaccgaggcagcgcgcgtccgccgccgggatcagctcggcaagctgaccgtccaagctgttgaccagcttgtgcatggcttcctcctcccaggcgtgcgggggaaggccgtcgagggagatcttggtgaagaactggaaagccgaggcctccgcccagcagcatatgttccacggcttgaacgaaacaggcacctcattacagaacagcgcctttgaacaccgcaggaccgcctccttctccctctggttccgaaacgagatcaggaaatcctccgggcgcgtgacctccaccctgaagtaacgctgctgcacgcctgtgtgcagctcgattgcctccgcaagctctgccggcgagacgggcggccgtcccttgagcaccgacgccatcagggagagttcctggaggtacctctcatggcgctccatcccggaggtccaggacagcaccacccgccccctttctggccgcgagtcgggctcgccgatgcggtacttttccacgaactgcggcggcgtggccgcacagatctggtagccgcccaggttagcacccgccatggctatcaccgcgcccttttctgtcgctgctctcccctggctctgccgccccggattgcccccagagacctccttcctctccggacacgcccacgctaggtgacccgggtaccagcaatggaaacaccttgtctctcccttgcagtcaagcttgcgatgacccaatcctaggcacttgaagcagcgccccagaagccagcgagggatctccttctccgaattgaatgccctgtcatggttgctgaactccttcctcggcttgaatgctctgtcatgtttgttggaggttgggtcacctgcccgcagtgaatgctccgtgctccccttccgccggacctccgtccaagctgcctcctcagcggcggcagggcccctacctttcttcacgacgtcgcgccacgagccgaactgcggcttggatggtggccggcgggcaccggaatggtggtccgccgggtggtaggtgagagcctcacgccccat

SEQ ID NO: 23234 - DNA, 1924 bp, Oryza sativa
  Clone ID: TF_OsC359_7998
atgtttaacagagaaaaaggaaagaatgtcagcgggtatgcctccagtaactcaagttttcaattcaatccaccactggcctcaagagagttaaccagggcacacccttggtccattccaagcatgctgcttagttcacagctaccattagttggaagtcaagaccaaaatcagtatgtgtttgatcgagcgtttgccacccaggtcaatgagcttccaatgccagaagaggatgtccccttttgtcacgattgtagagagcaaggacactatgccctgaattgtccatgggtatatgtcaaagaagccccttcctttggtttagcagggcagacatcgctaaaccagcctcctcgcaccaagtcaagtttgcagcctagtgtgcaaagtgaagagcccaatggagacaatccattgaatcctagaaaatgctttcctcctagcctttcgcaccacgtggggtcacgtactaagcaagccaaaggcaagaagagtaagaatcagaagagaaaagcaccgatgcgaactgaagaagaagtacgtaagatgactattaccagcaccgaatggcctccagcagggataactattcctagacgtcaaagaggaaataccttccgaggtgcacgacagttgacccagcacctcctaagccatggtggcagagtatctgatagtgaagggtcagatcaagtctcctcggattatgaagatgagtccccccgacatctcggcgaggaagagatggaatcaaaagcatgcccccgttgtggagaaattggacacgttgctagcatgtgtttcacactttgccctcattgtgaggaagaccatccaccaggccgagcgaagggcaatcaacctcaggagggcgataccaagcagaagaccgtcatctgcttcaaacagcaatcagaaggaagcttctcctgtgaatgatagcaatatgcagtcctatcacatcatcacagaaccaatcaaggatgcagtcactagaacaatgccagctatccgcctgggccgcctcgaccgtgcgccggccggccgcgccgtcgcctcctccagcgtcgccgctacctcctccaccccggcctgccctccgtttcgcgcggtgatcgccggaggcgcgttcccgccgtcgcccttctcttttctccgcgccggccgcctccagccgcctctcccgcctcgcccgtgcgccgtccggccgcgccgtcttctccctcggcctcgcagccaccccctctccctcgccgacgtcgccaccacctccctcggcgttgctgcatcgccctctcctccggctgctcctcggtttcgccggaacaccgccgtcacgcgtgccgcctttccctcggtctcgtcggcacccactccggcagcccctttcgccgtgccagtgcgccggccgacgtcgccgtctccacctccggcatcgcagcggcaaggacgccctcggcctcgcctccccttcgaccgaaccccgccggtgttcgtcgtcgtcgtcatcgtcccgtcggttgcccggctcgtcgtctcgcggcgccgcctccgtcgtcggcatcgcagcggcgtggtccgcgtcgtccccgtctccgtgcagctgccgccggctgccctcatcgcctcctcgccggccccggtcgtcgtcgtcgtcgtcctctcgtcgttcccggtcgttgtggcgttcgtccctccgtcgagccgttctcgtccgccgcccgcgtttcccctagtgtgctgcagccccgtcatcgtcttcgtcctcggctccgcgtcgtcaagcctcgtgccggccacgtctcgccttcgtccaaggatcgccgccgaagccgtcccctcgccgttcgtctccgttgtgcccgtctgtctccgccgcgcccgttcgtcgttgtcgtccccgcgcctcgtcgcgtggtggtaa

SEQ ID NO: 23235 - DNA, 1367 bp, Oryza sativa
  Clone ID: TF_OsC359_5677
aaaagtttttaaatccttccctaagtcgttgggccgatttcggcccaactctttctctctccgcgcggccgaaccggcccaatcggcccagcagccgccccctcctctggagtccgatctcttcaatccaaggctataaataggaccccctagtcctcctctttcgtttgccccctctcccgtcctctcccgtgacccgtggagccgtcgccaccgtgcaagccgccgccgccgtcgcttcttcgtcgccggccgtcatccgtcgtcgttcggcacttcggtgagcaccatcgggttcgtctcgtcgtcctctacgtgtacatgccctccaaatccgcagccagccgctctatctccggcgaggtcgccatctttatcttttgtatagcatgattcattatagtgcgccagactgtgaagtggcgagaagtccatgggggtcgctggggagtccatgccttgtttataagggggtgactatgatccaggaacggtgcactgttttgagttgtgttgtgcaaagggtattgtcacgatttccccctttgcaatgccgtggtggtatttcggggcatagcaacatgtgtggaatcgtgtcttgtgggtacagtggtacacctctggccagagtaaaactattcgaatagccgtgcccgcggttatgggcgggttgagcaatgtttttcgtgattagtctcacaagatccgagggaaaaggaattccctgaatttctataggaacagcagggctataatactttgctgtcataacccctccaggggtggtgatgaggagagggttcctaagcctttctacccccaactgatttctccccacgaatggcacagatataaacgagtgggaagctccagagtcgaacaaaatggtagcagggatggaatgaatgaggaacgtaccaacgatgacgtctggagttgtcagcacgtcctcggccgtcacgtggttcacacgaccccgaatgacatccttaccaccattgttggagcggggaggcgcttggccttgctggcgcctctgctttgggcatttatccgcaaagtgcccaggctcgaagcaggtgaagcacaaacgctgcggaccttgaacgtccctgcggccttgaccagactgcgcggctggcgtaagaggacggggcgcacgggtcccttgctggctctgcttgtgctgcggctgcgggacgcgcaccacgaaatgaagtcggggcgcggagcgaggttgctgctgctgttgctgctgcgaggacgatccttctggaaagggattcgggtagcggatcctttggttagcctcccggtgaatgtggaaattcgccaagcggggcttgggcgaccccaaggccttgtgc

SEQ ID NO: 23236 - DNA, 4404 bp, Oryza sativa
  Clone ID: TF_OsC91_2068
tcatgccttaagattcgtggcatgaggcaagaaactgtgcggtggaaattgttcccgttctctcttcaagagagagcaaagcaatggtacacctctaccgttggatgtgtaaacggtagttgggagaagttgcgagacagattctgtcttgccttctttccagttactcgtattactgccccgagtatgtgcttctccaacatttccatacgggttttgatgcagcaacgggggttcccgatctttcgatgagaggaggataaacttcgatttggggaaggatacgacgttggcggtccgactacaactaccacaggggtgctgcgccttagcaaccggtacaccgactccacgttgttgctgttcttgccgtgccaagaacaaccttgaacgagctcgagctctagtcattggtccttgctgtgcaataggcgtggttgtatcgttggaagggatgtcctcatcatcctccccttcttgcatttgagtcatcctcgactctaactcatcttcttctcccaaatatggctttaaatctgcaatgttaaacgtggggctaaccccaaaatcggcaggtagctcaagcttgtatgcattgtcattaatcttttgtagcactttgaaaggaccatcagctctaggtagcaacttagattttctcaaattagggaacctatcctttctcaaatgcaaccaaaccaaatcaccaggttcaaaagcaacatgtttctttcctttgctcccagcaagtttatacttaatattcatgcgctctatgttctccttagtggtcttatgcagttttaacatcaattcagcgcgatattttgcatcaaagttcactctctctgaagttgggaggggcaaaagatcaattggagcacggggtagaaggccataaacaatctcaaaagggcacttcttagtagtagaatgttgtgaacgattataagcaaactcaacatgaggcaaacattcttcccacattttaatattctttttcaaaacagccctaagcattgtagataatgttctattcaccacctcagtttgtccatcagtttgggggtgacatgtagtagaaaataaaagtttagtccccaacttagcccacaaggttctccaaaaatgactaaggaattttgtatcgcgatcagaaactatggtgtttggcactccatgcaagtgaacaatctcacgaaagaacaaatcagcaacatgtgtagcatcatcactcttatgacaaggtatgaaatgcgccatcttagaaaatctatctataacaacaaagatactgtccctccccttctttgttctaggcagccctaaaacaaagtccatagaaatatcctcccaaggcacactaggaagaggcaaaggcatatacaaaccatgagggttaaggcgtgacttagctttttggcatgttgtgcagcgagcaacgaacctctccacgtctctcctcatcttaggccaaaagaaatgatcagcaaggatatcctccgtcttcttcacaccaaagtgtcccatcagccctccaccatgcgcttcctgcaataatagcatacgcacggagctagctggaatgcataacttattagctctaaacacaaacccattggtgagaacgaatttgttccaagtccttccctccttgcaattcaacaacacatctttaaaatcatcatcgtgcgcatattgctcttttattgtttctaagccaaaaattttgaagtcaagttgggatagcattgcgtaacgtctagacaaagcatcagcaatgacattttcttttcccttcttatgtttgatgacatatggaaaagattcaataaattcaacccatttagcatgcctacggttaagttttgcttgacttcgaatgtgtttcaaagattcatgatcagagtgtataacaaattctttgggccataaataatgctgccatgtttccaatgttcgcactagagcaaacaattccttatcataagtagaataattcaaactaggcccactcaatttctcgctgaaatatgctacaggtttgccttcttgtaacaacacaccacccaatccaatcccactagcatcacattcaagctcaaaagttttgttgaaatcaggaagttggagtaaaggagcgtgtgttaacttatctttcaaagtgtcgaatgcattcctttgtgctgcagcccaagtgaatgtgacatttctcttggtaagctcatgtaatggggctgcaatggtgctaaaatccttcacaaagcggcggtagaacccagcaagtcctagaaagcttctcacttgtgtgatcgttgttggaaccggccagctatgtatggcttcaaccttggcttgaactacttcaattccctgtggagtcacaacatagccaagaaaagagactcgatctgtgcaaaatgtgcacttctcaaggttaccaaataaacgtgcatctcgtagagcatcaaaaacaacacgcaaatgaccatgatgatcctctattgatctgctatatatgagaatgtcatcaaaatataccaccacaaatcccttatcgagtaactcttgcacttgacgctgaatctcctttgtttcctccgggttggtcctgtatggcgcacggtttggtagagaggccccaggaatgaggtcaatttggtgctcaatccctcgaattgggggcagccccggtagaacctcctttgggaaaatatcagcatactcctgcaaaaggttagtgaccggaggaggcaaagaaataggagtatcctcaattggaaataaggtttctttgcaaaccaaagcatagcaaacaacagtgtcagtgtcaacttcatccaaatctgattttgttgcaatgaaacaagatcccttcagcttaatctcatttttattattttgaacagagttggtgggtttcttcttatgcttctcaagttcattagccgcaataagatgctcactcctagtacgttccttgccgctgctattaagccattgaatatagtagggctgtggatgtggctgtgtgctcaatgcaagtttctccaccatttcagcactagccaaattattgcagcttcctccatctatgatcacgcggcaagagcgttccttgatcacacacttggtttgaaacaaggtgtggcgctgattctgttcagccctttccatttgtgcgcttagcactcgctgcaccatgaggctctcatagtgctctgcagcttcagccccaatgtgttcctcatcttggtggggcgcgtcaccttcccctgcattgttagttgcaagcaaagcataggtttcttcatctaaatcactagcggaggagtacccaccatcagctctcacaatcattacacgagtgcttgggcagtccttgcgcacgtgaccatagcccttgcagcgtaggcactgaatatctcttgttcttcctgatgaagctactgatgatgagctcttggaaggtgtagcagcaacccctcttgttggttcactcgggcatggtgtagagtttgttgtagagggacgcagcttgttgcttgaggacgatggtgctgctgctcgagttgacggtgcagcagcgttagaagatgtccaagagctagcacgacctgcagaaatgttagtcctgaagctagctcttcgtccctgtacttccctttcagctttacaagcaagatgaaacaaacgattaattgaattatattctttgtaggctagaatgtcctgaatttctcggttcagcccacccatgaatctagccataccagcatcatcattttctaccaatccacaacgaagcattctagtagcagccctaacacgtttattctcaggaaaatcatggcaagcaaatttctgatcaatggctaactcccaagtaagatatgcatcagggtcatattttccatcaaagcaaggaatggtaaacttgatcttgcctaaagaatcatcattatcacgtacctcccgccgtggtggagcgcccatgccatggcgctgccggcgctgttgtctttgtggacgaccaagtacctcctcatcatgctcagtgtcagcagcatactccagttcttcccttgctgcgatgctgctattagcatcatggccattgtggttgcgcctagccgatccatcatgaccatcttggcccattctctccaacgtattcaagatacctgcaagagaagtgttcacagccacaagggacctctccaatgaggaaagcttggagttggtgtcaatttgagcagcctccaattgaccaaggcgatcattggcgaccctaacatcctcatcaaggccttcagcatgctccctcacttggcgctcaaaatgttgtatgatgcccctcgtacgtggtgaatgttgagggtgctcccccgatcctcctgtcat

SEQ ID NO: 23237 - DNA, 3951 bp, Oryza sativa
  Clone ID: TF_OsC91_2397
tcatgggcctttgggcttgtaacttcgtttgggaccccggcccaagtggggcccatgtggggtgcgccccaatctggtggagcacgacccttgtcgagtaactcttgcacttgtgatgcagcaacgggggttcccgatctttcgatgagaggaggataaacttcgatttggcgaaggatacgacgttggcggtccgactacaactaccacaggggtgttgcgccttagcaaccggtacaccgactccacgttgttgctgttcttgccgtgccaagaacaaccttgaacctgataattaagttcacgagcttgagctctagtcattggtccttgctgtgcaataggcgtggttgtatcgttggaagggatgtcctcatcaacttgacgctgattctcctttgtttcctccgggttggtcctgtatggcgcacggtttggcagagaggccccaggaatgaggtcaatttggtgctcaatccctcgaattggtggcagccccggtggaacctcctttgggaaaatatcagcatactcctgcaaaaggttagtgaccggaggaggcaaagaaataggagtatcctcaattggaaataaggtttctttgcaaaccaaagcatagcaaacaacagtgtcagtgtcaacttcatccaaatctgattttgttgcaatgaaacaagatcccttcagcttaatctcatttttattattttgaacagagttggtgggtttcttcttatgcttctcaagttcattagccgcaataagatgctcactcctagtatgctccttgccactgctattaagccattgaatatagtagggctgcggatgtggctgtgtgctcaatgaaagtttctccaccatttcagcactagccaaattattgcagcttcctccatctatgatcacgcggcaagagcgttccttgatcacacacttggtttgaaacaaggtgtggcgctgattctgttcagccctttccatttgtgcgcttagcactcgctgcaccacgaggctctcatagtgctctgcagcttcagccctaatatgttcctcatcttggtggggcgcgtcaccttcccctgcattgttagttgcaagcaaagcataggtttcttcatctaaatcactagcggaggagtacccaccatcagctctcacgatcattacacgagtgcttgggcagtccttgcgcacgtgaccatagcccttgcagcgtaggcactgaatatctcttgtccttcctgatgaagctactgatgatgagctcttggaaggtgtagcagcaacccctcttgttggttcactcgggcatggtgtagagtttgttgtagagggacgcagcttgttgcttgaggacgatggtgctgctgctcgagttgacggtgcagcagcgttgggagatgtccaagagctagcacaacctgcagaaatgttagtcctgaagctagctcttcgtccctgtacttccctttcagctttacaagcaagatgaaacaaacgattaattgaattatattctttgtaggctagaatgtcctgaatttctcggttcagcccacccatgaatctagccataccagcatcatcattttctaccaatccacaacgaagcattcctgtttgcaaagcttgataatactcctctacagatttgtttccctgtctaagttgttgcaatttgtgtagcaaatcacgtgcatgatatgaaggaacaaatctagctcgcatgactcttttcattgcatcccaggtttggggagtgttatttggattggaacgaacaaattcactcccgccgtggtggagcgcccatgccatggcgctgccggtgctgttgtctttgtggacgaccaagtacctcctcattatgctcagtgtcagcagcgtactccagttcttcccttgctgcgatgctgctattagcatcatggccatgtggttgcgcctagccgatccatcatgaccatcttggcccattctctctaacgtattcaagatacctgcaagagaagtgttcacagccacaagggacatctccaatgaggaaagcttggagttggtgtcaatttgagcagcctccaattgaccaaggcgatcattggcgaccctaacatcctcatcaaggccttcagcatgctccctcacttggcgctcaaaatgttgtatgatgcccctcgtacgtggtgaatgttgagggtgctcccccgatcctccggagccgacaacagcacgatccgagcaacttgagctctcataccacttgatgcagcaacgggggttcccgatctttcgatgagaggaggataaacttcgatttggggaaggatacgacattggcggtccgactacaactaccacaggggtgctgcgccttagcaaccggtacaccgactccacgttgttgctgttcttgccgtgccaagaacaaccttgaacctgataattaagttcacgagctcgagctctagtcattggtccttgctgtgcaataggcgtggttgtatcgttggaagggatgtcctcatcattatggtcattctcccaccccttttttgattttggtgcggatggcggcttcttctgagccggctgatctgacttcttggccggtacgggtgattttaccggcgttttccaataacggttcctgggcatcgttgtttccttctccaggaaattcatggagcattgttccgtccttggttgaaactcaaacttttcctccttcccgttgatatggaaacggatactccccgttcccacgtcaatgttggctcctgcggtactaaggaatggacgccctaggatgagcggcatctccttccccatgtccatgtctagcaccacaaaatcaaccgggatgaagaaatcccgtatcttgactggcacattctccgctattcctgctgggtaacgaactgatgagtcagccagttggaggcgcatcggtgttggttccaacactgtgaagttgagcttgtcgaagacgtcttttggcatgacgctaacgctggctccaaggtcgcaccaggtctggtcgaattgttgtgccccgatcgagcaggtgatcgtaggacaccccggatctttcttcttctccgggagcttgtggagtatcaggttgctgcattgttccgtcagcttgaccacctccgttgttggcagcggtctcttgttgttgagtatgtccttgagataacgggcgtatgttggcacttgcatagcatccaacaacggcactttgatgtggatcttctggatcacaaaacgagcgaactgctcgtcttgtttcttcgatttgcttgcaggaatagggttgatctgcaccggcaagatcaacaacccacggagaggtgtatcgatcgctaaggcgcaacacaacgtctcgtacggttgtagtcggatcgtcaacgtttctcccaaatcgtagttatcacaactcaccgaaagatcgggccaacaacagcccttagcggaatcaaaaagttcaaaaaacgccaaaacatgatttttggacatattggagttattgggtgcattcgtggcaaaaactcactacgtgattcgcgcggcgaacttttgtcaattaatgccaatattggcacacgagggtgcgatgttttgtactgtaatcaaaaagttcaaaaagcgccaaaacatgatttttggacatattagagtgtattgggtgcattcatggcaaaaactcacttcgtgattcgcgcggtgaacttttgtcaattaatgccaatattggcacacgagggtacgatgttttctactggaatcaaaaagttcagaaagagccaaaacatgacttttggacataatggagtgtatcgggtgtcttcgtggcaaaaacacatttcgtgattcgcgtggctaacttttctcaaataatgtcaatattggcatatattagcccacacgggtgcgatgtttttgacc

SEQ ID NO: 23238 - DNA, 4209 bp, Oryza sativa
  Clone ID: TF_OsC91_2562
ttaactagatttttgctggcgggtactaaaagcaccgcccttgaaaaaatccacgcacattgaaaaatcattgcccattacaaaaatcaccacccaccactccttatccacaccgctccaaattacaaaaatctcctctggttcctccaccagcatccatagtacaaaaaaaccggaccggctcggcggttgaaccggaaaaaaccagaaccagagggctaggcggctcggtttgctgtaaagaccgccccgccagatttgacggtgacagttgtggggcttggtgaggcgagaggagctcagcggcagtgaggtccgatgaggcgggaaaagctcagtgacggtggggcttcccacatacggtggcttcctcatcacaggggtgctgcgccttagcaaccggtacaccgactccacgttgttgttgttcttgccgtgccaagaataaccttgaacctgataattaagttcacgagctcgagctctagtcattggtccttgctgtgcaataggcgtggttgtatcgttggaagggatgtcctcatcatcctccccttcttgcatttgagtcgtcctcgactctaactcatcttcttctcccaaatatggctttaaatctgcaatgttaaacgtggggctaaccccaaaatcggcaggtagctcaagcttgtatgcattgtcattaatcttttgtagcactttgaaaggaccatcagctctaggtagcaacttagattttctcaaattagggaacctatcttttctcaaatgcaaccaaaccaaattaccaggttcaaaagcaacatgtttctttcctttgctcccagcaagtttatacttaatattcatgcgctctatgttctccttagtggtctcatgcagttttaacatcaattcagcgcgatgttttgcatcaaagttcactctttctgaagttgggaggggcaaaagatcaattggagcacggggtagaaggccataaacaatctcaaaagggcacttcttagtagtagaatgttgtgaacggttataagaaaactcaacatgaggcaaacattcttcccacattttaatattctttttcaaaacagccctctccacgtctctcctcatcttgggccaaaagaaatgattagcaaggatatcctccgtcttcttcacaccaaagtgtcccatcagccctccaccatgcgcttcctgcaataatagcatacgcacggagctagctggaatgcataacttattagctctaaacacaaacccattggtgagaacgaatttgttccaagtccttccctccttgcaattcaacaacacatctttaaaatcatcatcgtgcgcatattgctcttttattgtttctaagccaaaaattttgaagtcaagttgggatagcattgtgtaacgtctagacaaagcattagcaatgacattttcttttcccttcttatgtttgatgacatatggaaaagattcaataaattcaacccatttagcatgcctacggttaagttttgcttgacttcgaatgtgtttcaaagattcatgatcagagtgtataacaaattctttgggccataaataatgctgccatgtttccaatgttcgcactagagcaaacaattccttatcataagtagaataattcaaactaggcccactcaatttctcgctgaaatatgctacaggtttgtcttcttgtaacaacacaccacccaatccaattccactagcatcacattcaagctcaaaagttttgttgaaatcaggaagttggagtaaaggagcgtgtgttaacttatctttcaaagtgtcgaatgcattcctttgtgctgcagcccaagtgaatgtgacatttctcttggtaagctcatgtagtggggctgcaatggtgctaaaatccttcacaaagcggcggtagaacccagcaagtcctagaaagcttctcacttgtgtgatcgttgttggaaccggccagctatgtatggcttcaaccttggcctgatctacttcaattccctgcggagtcacaacatagccaagaaaagagactcgatctgtgcaaaatgtgcacttctcaaggttaccaaataaacgtgcatctcgtagagcatcaaaaacagcacgcaaatgaccatgatgatcctctattgatctgctatatatgagaatgccatcaaaatataccaccacaaatctgccaataaaagcacgtaaaacttcattcattaatctcatgaaagtactgggtgcattagtgagaccaaagggcatgactaaccactcatataggctgaatttagttttaaaagctgttttccattcatctcctaacttcatgcgaatctggtggtaaccactacgcaaatcaattttggagaacacaagtgaaccactcaattcatcaagcatatcatctagcctaggtataggatgacgatatctgattgtgatgttgttaattgctctacaatccacacacatgcgccatgagccatctttcttaggaactaaaagcacggggacagcacaaggactaagagactcacgcacataccccttgtcgagtaactcttgcacttgacgctgaatctcctttgtttcctccgggttggtcctgtatggcgcacggtttggcagagaggccccaggaatgaggtcaatttggtgctcaatccctcgaattggtggcagccccggtggaacctcctttgagaaaatatcagcatactccttgccgctgctattaagccattgaatatagtagggctgcggatgtggctgtgtgctcaatgcaagtttctccaccatttcagcactagccaaattattgcagcttcctccatatatgatcacgcggcaagagcgttccttgatcacacacttggtttgaaacaaggtgtggcgctgattctgttcagccctttccatttgtgcgcttagcactcgctgcaccacgaggctctcatagtgctctgcagcttcagccccaatgtgttcctcatcttggtggggcgcgtcaccttcccctgtattgttagttgcaagcaaagcataggtttcttcatctaaatcactagcggaggagtacccaccatcagctctcacgatcattacacgagtgcttgggcagtccttgcgcacgtgaccatagcccttgcagcgtaggcactgaatatctcttgtccttcctaatgatgctactgatgatgagctcttggaaggtgtagcagcaacccctcttgttggttcactcgggcatggtgtagagtttgttgtagagggacgcagcttgttgcttgaggacgatggtgctgctgctcgagttgacggtgcagcagtgttggaaggtgtccaagagctagcacgaccagcatcatcattttctaccaatccacaacgaagcattcctgtttgcaaagcttgataatactcctctacagatttgtttccctgtctaagttgctgcaatttgtgcagcaaatcacgtgcatgatatgaaggaacaaatctagctcgcatgactcttttcattgcatcccaggtttggggagtgttatttggattggaacgaacaaattcactccaccaaatggatgcaaaatcagtaaactcactagtagcagccctaacacgtttattctcaggaaaatcatggcaagcaaatttctgatcaatggctaactcccaagtaagatatgcatcagggtcatattttccatcaaagcaaggaatggtaaacttgatcttgcctaaagaatcatcattatcacgtacctcccgccgtggtggagcgcccatgccatggcgctgccggcgctgttgtctttgtggacgaccaagtaactcctcatcatgctcggtgtcagcagcgtactccagttcttcccttgctgcgatgctgctattagtatcatggccattgtggttgtgcctagccgatccatcatgaccatcttggcccattctctccaacgtattcaagatacctgcaagagaagtgttcacagccacaagggacctctccaatgaggaaagcttggagttggtgtcaatttgagcagcctccaattgaccaaggcgatcattggcgaccctaacatcctcatcaaggccttctgcatgctccctcacttggcgctcaaaatgttgtatgatgcccctcgtacgtggtgaatgttgagggtgctcccccgatcctcctgtcat

SEQ ID NO: 23239 - DNA, 10023 bp, Oryza sativa
  Clone ID: TF_OsC91_2597
tcattcccacaagggagataacttgtgccgatcccgtgtagtctgaatatttctcagaaccaggtcgccgactaaaaaagctcgtgagcggacattgcgattgtgataacggtgcaatccttgcaaataccgagccgactgaattaaaactgcttcacgggcttcttccagtcggttgatatcatctactcggtcctcttcatagcgctcctcatggaagttccgaaatcgtagcgattcaaattccaattcactcggcaacattgcttctgctccataaactaggaaaaaaggcgactgtcccgtagcttgactaggggtggtgcgcaaggaccaaagtactgacggcagctgttctacccacttgccggtgtaaggacgcagccggtcgaagactcgcgcttttattccttgaagtaccatgccattggcgcgctcgacttgtccattactcatggggtgtgccacggaggcataacaaattttaatgccgaagtcttcacaaaagtctttaaatactccacatgtgaattgagtgccgttgtcagtaatgatacaatttggtaccccaaaccgatgtacaatattgatgaagaaatctctagctttgtctgcggtgattgtaatgacctgtttagcttcaatccacttggaaaatttatccacagctacaaagagatgagtataaccaccgaccgcctttttgaatgggctgaccatatcaagcccccaaaccgcgaacggccaagacagcgggatggtttgcaagtcctgagctggtaaatgagtttgtcgggcaaagaattgacaaccctcacatgttcgcacaattttgtcggcgtcggagacagctgtgggccaaaaaaaaccttgccgataagccttgccaacaatggttcgtgcagcagcgtgattaccacagatgcctgaatgaatatcttttagcagttgcctttcctcttccaaagatacacagcgttgcaagattcctgatgggcttttcttgtacaactcggtctcatgaatgacatagagtctgctgcgcctggagatctgctcggcttcatttttatcttgagggagttcttgtttggtcaaaaatcttatgaaaggttctctccagtcggcttcgatcatgcttacgccttgagtatccatggcttcaattgtttcttttctgggcacgattggttcgtgaagatgttcgacgaacacatcagaaggagctgcctcccgttttgagccaaaattggccagtctgtcggctgcctcattattgtgccgaagaacgtgggtgagctcaagtccatcgaatttgtcttctaacttgcgtacttcctgtcgataagcagtcatgttatcatcaaggcaggaccactctttcatgacttcgttaacaaccaactgagaatctccacggacgatcagacgccgaatgcccaaagagatcgcgatcctcaatccatggagcagcgcctcatattctgctacgttatgggacgcagaaaaatgtatccacaatacgtagctcaatctttctccagtcggggagattaaaacaaccccagctccagtgcctgaaagcctcttcgacccatcaaaatgcatggtccaatattccatcttttcctctggcatgtcttcttggcactcggtccactcggcgacaaagtcggctaaagcttggaacttgatcgaaattcgcggctgaggatatcttgtcttggagtcggccaaaacctcgctaacgaagtagattggtcgttggactttttgaacatggccgtcttcttcacgctcaacaaccaggaccgtgctcacaacttgagaagtcgccgacacgtataacaacagtggctcttgcggatgtggtgaagccagaactggaggagtagtgagaagtttcttaaagtcttcaaaggctttttgtgcttcgggtccccactggaaattgtcagttttcttcagcagcttgaaaaagggcatcccccgctcgccgagtcgtgaaacgaaccggctgagcgccgccatgcaaccagtcagcttttggacatctttctgggagctcggcggtttcatattgaggatggcgttgattttctccgggttggcctgtatgcctctatgagacaccataaatccaagtagcttccctgacggtactccgaagatgcacttttcagggtttagtttcatcctgaaagcgcggatgcttgcaaaggtttcttctaaatccgcaattagaacatccttctgcttggtcttgacgactacatcatcaacataagcttcaacatcgcggccgatctgagctgaaaaacatctctgaatcatgcgttgataggttgctcctgcgttcttcaatccaaagggcatggtgatgtagcagtaggccccaaaaaactggtcaatgcgaggtaaaccaaaaggatcttgagggcaagacttgttgaggtcggtgtaatcgacacacatgcgccattgcccggtcttcttccaaactagaattgggttagccagccagtcgggatggaggacttctttgatgaagcccgctgctaacagcttggttaattcctctttgatcgcgtccttcctatcctgtgcaaaacggcagagtcgttgtttgatgggtttggcatcttccttgacatgtaaagagtgctcaatcacctctctggcaataccaggcatatcagatggtttccacgcaaagatatctttattattagcagttttggtaggatcggagggatctagtggaatcttcttagtcttggcgtcactttcttgagtcttcgacatcttggtcgcaggcacttctccttcgtttgccacggtcgcagccagtcggatctcttctcgggcgaatgtgatctcgcgggtctgagccatctcgcaactttctttatcacatgtgacggcttgcttgatgttgctccgtagggatatgactcctcgaggaccaggcatcttcatcatcatgtaggtgtagtgtgggacagccatgaatttggctagggctggtcgtccgagtatagcatgatacgctgtctcgaagtcagcaactttgaaacaaacgttttctgtgcggaaattgtcccaagtaccgaaagtaaccggaagagtgatctggccgagtggtgtagcagataatcctgggatgacgccgtgaaagggtgcattacttggctttaattccgtacgagggatctgcatatcgtccagggtcttggcgaaaaggatgttgagtgcgcaccgaaggtattggggcgtgttgggctgaactgcgttgatctcccgttcggttagcttctgctttctcttagattcataggccaggggtccgctgaagatgtgattaagttccttgcgatggtcctgaaaaccagtcgggggatcgtcttcattatctttcttctttgatgtgccttgatctccgtccgaaggcttacgtgcgttcttggcgtattgctctgcaaattgtttgtagacgaagcagtctttggccgcatggttggagttgggatgatgcggacattgggagttcattatcttgtcgaaggtgttgacgcgggaacgttgtcgggaagatggagtagttgtcgccacaagttcttcgggcttacgcttgcgatccttgtgattgttacttccactccctcccgcagccggcgtgtctttcttcggcttccaagtggtgcccgactgtttggacgcagtaatagtatcttcggctttggcatactcattggctttttcaaacatctgcttaaccgtcttgggaggtttgcgtccgaacttgccgactaggtcctcgtggcgaatgcctttagtaaaggcggcgatgatgacgtcatcggtgatgtcggagatcttgttgcgttgcttggagaagcgtcggatgtaatcagggcgttcaaaagtgccttcgaagttggcgatgaagtggtcgcgtagttctgcccatgatccaattgtgccgcggggtagcccgtaaagccaggaccgggcagaatctgctaaggccacaggcagataatttgccatagctttgctgtctcctcctgctgcgcggattgcgagaccatagacagtgagccaagactcagggttggtggtgccgtcatacttctcgattccagtcggcttaaagctggctggccagtccactcgacgcagatcatttgtgaaggcagcaactccgtccatatcgtcgtcgtagcggtctagtgaataatggggagcatggcctcttgctgcgcggcgctggttgatggtgtcgcgaagatcgacggggcgccttcgatgtggggagtgtagtcgttcaactcgacgctccctatgtcgttcgggaggcgagcgaacagatcgctcgtcatgtcccctactcctgtgactggatccggcgccggcgatgctgaggcttggctggtgatagtcttgagatcgaagaggagggactcggcttccagtcggggtgcgggtacttgcagagttggctggaaccgaggcagcgatcatggtcttcgtgttgtagtcgttctcactcttgtcgttgtcgttcttcttccagtcagcgacgttcaatttcttgtcgtgtgcgctcttcctccacttctcgggctcggcgctgttcctccgtttagttgtcagccatgaatacgccgaaaaagaggggcgtgtagttatcctcatagctatcgtcgaagtcgtcgatgttgccgtggtcgtagtggtagccgaagtcgtggtagtcgaggatctaggttggtcgtgaactgacgctaggggagctgaggtaaccatccaattcttccgtcgagactgtcccaagaggttggagtataacgccaacctccctggagctagattggatcggggccgaagccggatctcgcctagatcttcgggtgggagatgccccacttcctgagcaaggtatagaccaatggcaaattctgtcaaatcacattcagtcaacatttcccaatgggaatcctgatcaatggaattatgtgtggaacccaaatgtttcagagaaagcatttcaacactcagggagggaccacttgtaacatctgcaaccacaggggtgctgcgccttagcaaccggtacaccgactccacgttgttgctgttcttgccgtgccaagaacaaccttgaacctgataattaagttcacgagctagagctctagtcattggtccttgctgtgcaataggcgtggttgtatcgttggaagggatgtcctcatcatcctccccttcttgcatttgagtcgtcctcgactctaactcatcttcttctcccaaatatggctttaaatctgcaatgttaaacgtggggctaaccccaaaatcggcaggtagctcaagcttgtatgtattgtcattaatcttttgtagcactttgaaaggaccatcagctctaggtagcaacttagattttctcaaattagggaacctatcctttctcaaatgcaaccaaaccaaatcaccaggttcaaaagcaacatgtttctttcctttgctcccagcaagtttatactttatattcatgcgctctatgttctccttagtggtctcatgcagttttaacatcaattcagcgtgatattttgcatcaaagttcactctctctgaagttgggaggggcaaaagatcaattggagcacggggtagaaggccataaacaatctcaaaagggcacttcttagtagtagaatgttgtgaacgattataagcaaactcaacatgaggcaaacattcttcccacattttaatattctttttcaaaacagccctaagcattgtagataatgttctattcaccacctcagtttgtccatcagtttggggatgacatgtagtagaaaataaaagtttagtccccaacttagcccacaaggttctccaaaaatgactaaggaattttgtatcgcgatcagaaactatggtgtttggcactccatgcaagcgaacaatctcacgaaagaacaaatcagcaacatgtgtagcatcatcactcttatgacaaggtatgaaatgcgccatcttagaaaatctatctacaacaacaaagatactgtccctccccttctttgttctaggcagccctaaaacaaagtccatagaaatatcctcccaaggcacactaggaacaggcaaaggcatatacaaaccatgagggttaaggcgtaacttagctttttggcatgttgtgcagcgagcaacgaacctctccacgtctctcctcatcttaggccaaaagaaatgatcagcaaggatatcctccgtcttcttcacaccaaagtgtcccatcaaccctccaccatgcgcttcctgcaataatagcatacgcacggagctagctggaatgcataacttattagctctaaacacaaacccattggtgagaacgaatttgttccaagtccttccctccttgcaattcaacaacacatctttaaaatcatcatcgtgcgcatattgctcttttattgtttctaagccaaaaattttgaagtcaagttgggatagcattgcgtaacgtctagacaaagcatcagcaatgacattttcttttcccttcttatgtttgatgacatatggaaaagattcaataaattcaacccatttagcatgcctacggttaagttttgcttgacttcgaatgtgtttcaaagattcatgatcagagtgtataacaaattctttgggccataaataatgctgccatgtttccaatgttcgcactagagcaaacaattccttatcataagtagaataattcaaactaggcccactcaatttctcgctgaaatattctataggtttgccttcttgtaacaacacaccacccaatccaatcccactagcatcacattcaagctcaaaagttttgttgaaatcaggaagttggagtaaaggagcgtgtgttaacttatctttcaaagtgtcgaatgcattcctttgtgctgcagcccaagtgaatgtgacatttctcttggtaagctcatgtaatggggctgcaatggtgctaaaatccttcacaaagcggcggtagaacccagcaagtcctagaaagcttctcacttgggtgatcgttgttggaaccggccagctatgtatggcttcaaccttggcttgatctacttcaattccctgcggagtcacaacatagccaagaaaagagactcgatctgtgcaaaatgtgcacttctcaaggttaccaaataaacgttcatctcgtagagcatcaaaaacagcacgcaaatgaccatgatgatcctctattgatctgctatatatgagaatgtcatcaaaatataccaccacaaatctgccaatgaaagcacgtaaaacttcattcattaatcttatgaaagtactgggtgcattagtgagaccaaagggcatgactaaccactcatataggccgaatttagttttaaaagctgttttccattcatctcctaacttcatgcgaatctggtggtaaccactacgcaaatcaattttagagaacacaagtgaaccactcaattcatcaagcatatcatctagcctagggataggatgacgatatctgattgtgatgttgttaattgctctacaatccacacacatgcgccatgagccatctttcttaggaactaaaagcacggggatagaacaaggactaagagactcacgtacataccccttgtcgagtaactcttgcacttgacgctgaatctcctttgtttcctctgggttggtcctatatggcgcacggtttggcagagaggccccaggaatgaggtcaatttggtgctcaatccctcgaattggtggcagccccggtggaacctcctttgggaaaatatcagcatactcctgcaaaagattagtgaccggaggaggcaaagaaataggagtatcctcaattggaaataaggtttctttgcaaaccaaagcatagcaaacaacagtgtcagtgtcaacttcatccaaatctgattttgttgcaatgaaacaagatcccttcagcttaatctcatttttattattttgaacagagttggtgggtttcttcttatgcttctcaagttcattagccgcaataagatgctcactcctagtatgctcctgatttttttgtttgctagctctagcaagttcatcctttaaaataacttcaggagacataggatgtaacacaagtttttttccattatgcacaaaggagtattgattggatttgccaaagtgtaaagaatctttatcaaactgccatggcctacctaagaaaatagaacatgcttgcataggcacaacatcacagttgattgaatcatgataagaaccaatggcaaaatgtactcttaccaatcgtgttacctttaccttgccgctgctattaagccattgaatatagtagggctgcggatgtggctgtgtgctcaatgcaagtttctccaccatttcagcactagccaaattattgcagcttcctctatctatgatcacgcggcaagagcgttccttgatcacacacttggtttgaaacaaggtgtggcgctgattctgttcagccctttccatttgtgcgcttagcactcgctgcaccacgaggctctcatagtgctctgcagcttcagccccaatgtgttcctcatcttggtggggcgcgtcacctttccctgcattgttagttgcaagcaaagcataggtttcttcatctaaatcactagcggaggagtacccaccatcagctctcacgatcattacacgagtgcttgggcagtccttgcgcacgtgaccatagcccttgcagcgtaggcactgaatatctcttgtccttcctgatgaagctactgatgatgagctcttggaaggtgtagcagcaacccctcttgttggttcactcgggcatggtgtagagtttgttgtagaggggcgcagcttgttgtttgaggacgatggtgctgctgctcgagttgacggtgcagcaacgttggaagatgtccaagagctagcacgacctgcagaaatgttagtcctaaagctagctcttcgtccctgtacttccctttcagctttacaagcaagatgaaataaacgattaattgaattatattctttgtaggctagaatgtcctgaatttctcggttcagcccacccatgaatctagccataccagcatcatcattttctaccaatccacaacgaagcattcctgtttgcaaagcttgataatactcctctacagatttgtttccctgtctaagttgttgcaatttgtgcagcaaatcacgtgcatgatatgaaggaacaaatctagctcgcatgactcttttcattgcatcccaggtttggggagtgttatttggattggaacgaacaaattcactccaccaaatggatgcaaaatcagtgaactcactagtagcagccctaacacgtttattctcaggaaaatcatggcaagcaaatttctgatcaatggctaactcccaagtaagatatgcatcagggtcatatttttcatcaaagcaaggaatggtaaacttgatcttgcctaaagaatcatcattatcacgtacctcctgccgtggtggagcgcccatgccatggcgctgccggcgctgttgtctttgtggacgaccaagtacctcctcatcatgctcagtgtcagcagcgtactccagttcttcccttgctgcgatgctgctattagcatcatggccattgtggttgcgcctagccgatccatcatgaccatcttggcccattctctccaacgtattcaagatacctgcaagagaagtattcacagccacaagggacctctccaatgaggaaagcttggagttggtgtcaatttgagcagcctccaattgaccaaggcgatcattggcgaccctaacatcctcatcaaggccttcagcatgctccctcacttggcgctcaaaatgttgtatgatgccccttgtacgtggtgaatgttgagggtgctcccccgatcctcctgtcat

SEQ ID NO: 23240 - DNA, 9131 bp, Oryza sativa
  Clone ID: TF_OsC91_2633
ttaattaagttcatgagctcgagctctagtcattggtccttgctgtgcaataggcgtggatgtatcgttggaaaggatgtcctcatcatcctccccttcttgcatttgagtcgtcctcgactctaactcatcttcttctcccaaatatggctttaaatctgcaatgttaaacgtggggctaaccccaaaatcggcaggtagctcaagcttgtatgcattgtcattaatcttttgtagcactttgaaaggaccatcagctctaggtagcaacttagattttctcaaattagggaacctatcctttctcaaatgcaaccaaaccaaatcaccaggttcaaaagcaacatgtttctttcctttgctcccagcaagtttatatttaatattcatgcgctctatgttctccttagtggtctcatgcagttttaacatcaattcagcgcgatattttgcatcaaagttcactctctctgaagttgggtggggcaaaagatcaattggagcacggggtagaaggccataaacaatctcaaaagggcacttcttagtagtagaatgttgtgaacgattataagcaaactcaacatgaggcaaacattcttcccacattttaatattctttttcaaaacagccctaagcattgtagataatgttctattcaccacctcagtttgtccatcagtttgggggtgacatgtagtagaaaataaaaatttagtccccaacttagcccacaaggttctccaaaaatgactaaggaattttgtatcgcgatcagaaactatggtgtttggcactccatgcaagcgaacaatctcacgaaagaacaaatcagcaacatgtgtagcatcatcactcttatgacaaggtatgaaatgcgccatcttagaaaatctatctacaacaacaaagatactgtccctccccttctttgttctaggcagccctaaaacaaagtccatagaaatatcctcccaaggcacactaggaacaggcaaaggcatatacaaaccatgagggttaaggcgtgacttagctttttggcatgttgtgcagcgagcaacgaacctctccacgtctctcctcatcttaggccaaaagaaatgatcagcaaggatatcctccgtcttcttcacaccaaagtgtcccatcagccctccaccatgcgcttcctgcaataatagcatacgcacggagctagctggaatgcataacttattagctctaaacacaaacccattggtgagaacgaatttgttccaagtccttccctccttgcaattcaacaacacatttttaaaatcatcatcgtgcgcatattgctcttttattgtttctaagccaaaaattttgaagtcaagttgggatagcattgcgtaacgtctagacaaagcatcagcaatgacattttcttttcccttcttatgtttgatgacatatggaaaagattcaataaattcaacccatttagcatgcctacggttaagttttgcttgacttcgaatgtgtttcaaagattcatgatcagagtgtataacaaattctttgggccataaataatgctgccatgtttccaatgttcgcactagagcaaacaattccttatcataagtagaataattcaaactaggcccactcaatttctcgctgaaatatgctacaggtttgccttcttgtaacaacacaccacccaatccaatcccactagcatcacattcatgctcaaaagttttgttgaaatcaggaagttggagtaaaggagcgtgtgttaacttatctttcaaagtgtcgaatgcattcctttgtgctgcagcccaagtgaatgtgacatttctcttggtaagctcatgtaatggggctgcaatggtgctaaaatccttcacaaagcggcggtagaacccagcaagtcctagaaagcttctcacttgtgtgatcgttgttggaaccggccagttatgtatggcttcaaccttggcttgatctacttcaattccctgcggagtcacaacatagctaagaaaagagactcgatctgtgcaaaatgtgcacttctcaaggttaccaaataaacgtgcatctcgtagagcatcaaaaacagcacgcaaatgaccatgatgatcctctattgatctgctatatatgagaatgtcatcaaaatataccaccacaaatctgccaatgaaagcacgtaaaacttcattcattaatctcatgaaagtactgggtgcattagtgagaccaaagggcatgactaaccactcatataggccgaatttagttttaaaagctgttttccattcatctcctaacttcatgcgaatctggtggtaaccactacgcaaatcaattttagagaacacaagtgaaccactcaattcatcaagcatatcatctagcctagggataggatgacgatatctgattgtgatgttgttaattgctctacaatccacacacatgcgccatgagccatctttcttaggaactaaaagcacggggacagaacaaggactaagagactcacgtacataccccttgtcgagtaactcttgcacttgacgctgaatctcctttgtttcctccgggttggtcctgtatggcgcacggtttggcagagaggccccaggaatgaggtcaatttggtgctcaatccctcgaattggtggcagccccggtggaacctcctttgggaaaatatcagcatactcctgcaaaaggttagtgaccggaggaggcaaagaaataggagtatcctcaattggaaataaggtttctttgcaaaccaaagcatagcaaacaacagtgtcagtgtcaacttcatccaaatctgattttgttgcaatgaaacaagatcccttcagcttaatctcatttttattattttgaacagagttggtgggtttcttcttatgcttctcaagttcattagccgcaataagatgctcactcctagtatgctcctgatttttttgtttgctagctctagcaagttcatcctttaaaataacttcaggagacataggatgtaacacaagtttttttccattatgcacaaaggagtattgattggatttgccaaagtgtaaagaatctttatcaaactgccatggcctacctaataacatagaacatgcttgcataggcacaacatcacagttgattgaatcatgataagaaccaatggcaaaatgtactcttaccaatcgtgttacctttaccttgccgctgctattaagccattgaatatagtagggctgtggatgtggctgtgtgctcaatgcaagtttctccaccatttcagcactagccaaattattgcagcttcctccatctatgatcacgcggcaagagcgttccttgatcacacacttggtttgaaacaaggtgtggcgctgattctgttcagccctttccatttgtgcgcttagcactcgctgcaccacgaggctctcatagtgctctgcagcttcagccccaatgtgttcctcatcttggtggggcgcgtcaccttcccgtgcattgttagttgcaagcaaagcataggtttctccatctaaatcactagcggaggagtacccaccatcagctctcacgatcattacacgagtgcttgggcagtccttgcgcacgtgaccatagcccttgcagcgtaagcactgaatatctcttgtccttcctgatgaagctactgatgatgaggtcttggaaggtgtagcagcaacccctcttgttggttcactcgggcatggtgtagagtttgttgtagagggacgcagcttgttgcttgaggacgatggtgctgctgctcgagttgacggtgcagcagcgttagaagatgtccaagagctagcacgacctgcagaaatgttagtcctgaagctagctcttcgtccctgtacttccctttcagctttacaagcaagatgaaacaaatgattaattgaattatattctttgtaggttagaatgtcctgaatttctcggttcagcccacccatgaatctagccataccagcatcatcattttctaccaatccacaacgaagcattcctgtttgcaaagcttgataatactcctctacagatttgtttccctgtctaagttgttgcaatttgtgcagcaaatcacgtgcatgatatgaaggaacaaatctagctcgcatgactcttttcattgcatcccaggtttggggagtgttatttggattggaacgaacaaattcactccaccaaatggatgcaaaatcagtgaactcactagtagcagccctaacacatttattctcaggaaaatcatggcaagcaaatttctgatcaatggctaactcccaagtaagatatgcatcagggtcatattttccatcaaagcaaggaatggtaaacttgatcttgcctaaagaatcatcattatcacgtacctcccgccgtggtggagcgcccaagccatggcgctgccggcgctgttgtctttgtggacgaccaagtacctcctcatcatgctcagtgtcagcaacgtactccagttcttcccttgctgcgatgctgctattagcatcatggccattgtggttgcgcctagccgatccatcatgaccatcttggcccattctctccaacgtattcaagatacctgcaagagaagtgttcacagccacaagggacctctccaatgaggaaagcttggagttggtgtcaatttgagcagcctccaattgaccaaggcgatcattggcgaccctaacatcctcatcaaggccttcagcatgctccctcacttggcgctcaaaatgttgtatgatgcccctcgtacgtggtgaatgttgagggtgctcccccgatcctccgagcaacttgagctctgataccacttgatgcagcaacgggggttcccgatctttcgatgagaggaggataaacttcgatttggggaaggatacgacgttggcggtccgactacaactaccacaggggtgctgcgccttagcaaccggtacaccgactccacgttgttgctgttcttgccgtgccaagaacaaccttgaacctgataattaagttcacgagctcgagctctagtcattggtccttgctgtgcaataggcgtggttgtatcgttggaagggatgtcctcatcatcctccccttcttgcatttgagtcgtcctcgactctaactcatcttcttctcccaaatatggctttaaatctgcaatgttaaacgtggggctaaccccaaaatcggcaggtagctcaagcttgtatgtattgtcattaatcttttgtagcactttgaaaggaccatcagctctaggtagcaacttagattttctcaaattagggaacctatcctttctcaaatgcaaccaaaccaaatcaccaggttcaaaagcaacatgtttctttcctttgctcccagcaagtttatactttatattcatgcgctctatgttctccttagtggtctcatgcagttttaacatcaattcagcgtgatattttgcatcaaagttcactctctctgaagttgggaggggcaaaagatcaattggagcacggggtagaaggccataaacaatctcaaaagggcacttcttagtagtagaatgttgtgaacgattataagcaaactcaacatgaggcaaacattcttcccacattttaatattctttttcaaaacagccctctccacgtctctcctcatcttaggccaaaagaaatgatcagcaaggatatcctccgtcttcttcacaccaaagtgtcccatcaaccctccaccatgcgcttcctgcaataatagcatacgcacggagctagctggaatgcataacttattagctctaaacacaaacccattggtgagaacgaatttgttccaagtccttccctccttgcaattcaacaacacatctttaaaatcatcatcgtgcgcatattgctcttttattgtttctaagccaaaaattttgaagtcaagttgggatagcattgcgtaacgtctagacaaagcatcagcaatgacattttcttttcccttcttatgtttgatgacatatggaaaagattcaataaattcaacccatttagcatgcctacggttaagttttgcttgacttcgaatgtgtttcaaagattcatgatcagagtgtataacaaattctttgggccataaataatgctgccatgtttccaatgttcgcactagagcaaacaattccttatcataagtagaataattcaaactaggcccactcaatttctcgctgaaatattctataggtttgccttcttgtaacaacacaccacccaatccaatcccactagcatcacattcaagctcaaaagttttgttgaaatcaggaagttggagtaaaggagcgtgtgttaacttatctttcaaagtgtcgaatgcattcctttgtgctgcagcccaagtgaatgtgacatttctcttggtaagctcatgtaatggggctgcaatggtgctaaaatccttcacaaagcggcggtagaacccagcaagtcctagaaagcttctcacttgggtgatcgttgttggaaccggccagctatgtatggcttcaaccttggcttgatctacttcaattccctgcggagtcacaacatagccaagaaaagagactcgatctgtgcaaaatgtgcacttctcaaggttaccaaataaacgttcatctcgtagagcatcaaaaacagcacgcaaatgaccatgatgatcctctattgatctgctatatatgagaatgtcatcaaaatataccaccacaaatctgccaatgaaagcacgtaaaacttcattcattaatcttatgaaagtactgggtgcattagtgagaccaaagggcatgactaaccactcatataggccgaatttagttttaaaagctgttttccattcatctcctaacttcatgcgaatctggtggtaaccactacgcaaatcaattttagagaacacaagtgaaccactcaattcatcaagcatatcatctagcctagggataggatgacgatatctgattgtgatgttgttaattgctctacaatccacacacatgcgccatgagccatctttcttaggaactaaaagcacggggatagaacaaggactaagagactcacgtacataccccttgtcgagtaactcttgcacttgacgctgaatctcctttgtttcctctgggttggtcctatatggcgcacggtttggcagagaggccccaggaatgaggtcaatttggtgctcaatccctcgaattggtggcagccccggtggaacctcctttgggaaaatatcagcatactccaaagcatagcaaacaacagtgtcagtgtcaacttcatccaaatctgattttgttgcaatgaaacaagatcccttcagcttaatctcatttttattattttgaacagagttggtgggtttcttcttatgcttctcaagttcattagccgcaataagatgctcactcctagtatgctccttgccgctgctattaagccattgaatatagtagggctgcggatgtggctgtgtgctcaatgcaagtttctccaccatttcagcactagccaaattattgcagcttcctctatctatgatcacgcggcaagagcgttccttgatcacacacttggtttgaaacaaggtgtggcgctgattctgttcagccctttccatttgtgcgcttagcactcgctgcaccacgaggctctcatagtgctctgcagcttcagccccaatgtgttcctcatcttggtggggcgcgtcacctttccctgcattgttagttgcaagcaaagcataggtttcttcatctaaatcactagcggaggagtacccaccatcagctctcacgatcattacacgagtgcttgggcagtccttgcgcacgtgaccatagcccttgcagcgtaggcactgaatatctcttgtccttcctgatgaagctactgatgatgagctcttggaaggtgtagcagcaacccctcttgttggttcactcgggcatggtgtagagtttgttgtagaggggcgcagcttgttgtttgaggacgatggtgctgctgctcgagttgacggtgcagcaacgttggaagatgtccaagagctagcacgacctgcagaaatgttagtcctaaagctagctcttcgtccctgtacttccctttcagctttacaagcaagatgaaataaacgattaattgaattatattctttgtaggctagaatgtcctgaatttctcggttcagcccacccatgaatctagccataccagcatcatcattttctaccaatccacaacgaagcattcctgtttgcaaagcttgataatactcctctacagatttgtttccctgtctaagttgttgcaatttgtgcagcaaatcacgtgcatgatatgaaggaacaaatctagctcgcatgactcttttcattgcatcccaggtttggggagtgttatttggattggaacgaacaaattcactccaccaaatggatgcaaaatcagtgaactcactagtagcagccctaacacgtttattctcaggaaaatcatggcaagcaaatttctgatcaatggctaactcccaagtaagatatgcatcagggtcatatttttcatcaaagcaaggaatggtaaacttgatcttgcctaaagaatcatcattatcacgtacctcctgccgtggtggagcgcccatgccatggcgctgccggcgctgttgtctttgtggacgaccaagtacctcctcatcatgctcagtgtcagcagcgtactccagttcttcccttgctgcgatgctgctattagcatcatggccattgtggttgcgcctagccgatccatcatgaccatcttggcccattctctccaacgtattcaagatacctgcaagagaagtattcacagccacaagggacctctccaatgaggaaagcttggagttggtgtcaatttgagcagcctccaattgaccaaggcgatcattggcgaccctaacatcctcatcaaggccttcagcatgctccctcacttggcgctcaaaatgttgtatgatgccccttgtacgtggtgaatgttgagggtgctcccccgatcctcctgtcat

SEQ ID NO: 23241 - DNA, 4984 bp, Oryza sativa
  Clone ID: TF_OsC359_8235
tggtttagtcttttgtttttttttccgctgcgtagaactttgttgtaatgtgtcacgtcctgataaattcatcccgaaattaaaaatcattttcacccctccccgccgtcgcccttctctttcccccgcgccggccgcctccagccgcctctccctcctcgcccgagcgccgtccggccgtgccgtcgcctcctccagcgtcgcagccgcctcctctccaccggcctgccctccgtttcgcgcggtgaccaccggaggcgcgttcccgccgtcgtccagtgccgttgccgccactgtaccacctccagccgcccctgccgcgccgctcaggtgcgggccggccgcgccgtctcctccttcggcgtcgccgcgtcgacctccaccccggcctgctctttgattcgtctggagaccgccgtcgcccgtgccggcctctccatcctcgtcgtcgccaacgtccatttggccgccccttcctcctccccggctcgtcggctcgctgcgccgccaccgtcatcgtcatcgcagcggcgtgttcagcgccgcctcttctccgtgcagccgctctggctgccctcgtcgcctcctcaccggccccggtggtcatcatcgtcgtcctctcgtcgttcccggtcgtcgtggcgttcgtccctccgtcgagccgttctcgtccgtcgtccgcgtccgccaagcaagccgcggcagccccgtcctcgtcttcgtcctcgactccgcgtcgtcaagccttgtccaaggatcgccgccgccgtgtaccggtgtcggtagtcgttcgtgggtgcgtgtggtgaccgtgtttgtgtgcccgctcggtagccgcgtgatttccacgtgtgcaacccgcgtggtgtctagtggagtccgtttgtcggccactcgcctcggttggcacacggggtccgcttccgtcgacccgtggaccgtctctgtgtactcggttttctttttatgtattgttatttcttctttataggcttgtagctttgcttgtgtgcttcgcgtagcttctatcgttccggaggttccagaagcgtggttcgcgggtgtcgccgaaggttcggaaggccgttctccctctcttcctctttcaaaacccctaaaacctgttttctggtggggtttgggtgcatgccagttgtgggaagtagcaccccggccaatataaggattaagctcgggcctctgttgcaaagcactaccgtacttccacatgtctagtggggcaaatgaaggctacacgagctgcggcctggtagtcgagatgtcatggcacagggccggtgtcctgctgctaggggcttagtcctgcctacctgtcccggaggtttcggccgtaggtggggttgggtcaatgtacacctctgatcagagtataatctattcgaatagccgcgccctcggttatgggcaagccgagcaatgtacccaaatggccggcagcatcaaccgtcgtggtctggacctgactggcttcgttttggagctgcggggcatgtgcgttgtcctggggtatccgcatggagtggactaccagggcaagcggctcccggagcaggagggtgacgatgcagagccccacgctgcttgggagattactgcagtgatcctcactggctcacccgagaggacttcgttggtagtcaccgtgggtggagattccttctctgccgcttgccagaacgccgcactcctcgccatcggcactctccaccagtgctacccgaacgagttgcagcactcgccctaccgctaccacccttgccgcggaggagcccgcgactacgccaccttccgggatgctagctcggaggatgacgctaccatcatgcacctggcgcgcatggtggaggcgtacgacgcggcccatatcgacttccatcagatggtgcgtcgtgggttggtcgagaacaacatgaagatcctggagctgcgtcaggagaatctgcagctgaagaaggacctagacgcagtggacgcgcagctgcgtcagctcaagatcgcccagggagaggtctgtcgccccaagcgtcgccgcgtctgccgcagcctgaagatcaccgcccgcaagagtacctccaggcccgagcttgttcgtcagtccctggcgtggacctgcttcgtcgagacccctcgtgctgagcccgcgcccgtggttcctcaggaggatggagcctccggcgttggcagcacggaggatgtgctgctgctcaccttccatggtgacaaccaggagaagtgctgctaccggtgaaggcagtcaccccgaaggcagcaaccacaacaaccatggcagcccacctccacctcctcccccgcctccaccaccaccaccagacaccaactccatcctcacccaaatcctcgcctagcaggccaacatgatggctgctttcctccaccacatccaaaatccgccacaacataatgctccaccaccacccccacaacactctaaactcgccgagttcctccgcatccgtccacctaccttctctagctccaataaccccgtggacgcgttggattggttgcatgccgtggggaaaaagttagacaccgtgcagtgtagcgatgaggagtaagtcatcttcgccgcccaccaactgcaggggcccgcatctctatggtgggaccatttccaggctatgcagccagaggggcagcctattacttgggcccgcttcaccgccgctttccggagaacccatgtgcccgccggagtcatggcccttaagaaaagggaattccgagagttgaagcaaggcaaccgctccgtgatggagtatttgcatgagtttaacaacctggcccggtacgccctggaggatgttcgtgaagatgaggagaagcaagagaagttcttggcaggaatggaccctgagctgtccgtgcgtctggtctccggggactatctggatttccaacgtctggtggacaagagcatccgcttggaagccaagcacaaggaactggagtcgcacaagcgtcgcttggcgaatttccgcaaccaacagggggctaaccaaaaggtccgctacaccgctacaccaatccctatccagggagatcctcctcgcagcagcaacagcagcagcaacctcgctccgcgccccgacctcaattcgtggtgcgcgtcccacagccgcagcaacagcagagtcagcaagggactcgtgcgccccgtcctcctacgccagccgtgcagcctggtcaaggccgcagggacgttcaaggtcagcagtgtctgtgcttcaactgcttcgagcctgggcactttgcggataaatgcccaaagccgaggtgccagcaaggccaagcgcctccccgctccaaccacggtggtaaggatgtcatacggggtcgtgtgaaccacgtgatggccgaggacgtgctgacaactccagacgtcatcgttggtacgttcctcattcattccatccctgctaccattttgttcgactctggagcttcccacttgtttatatttgtgccattcgtggggagaaatcagttgggggtagaaaggcttaggaaccctctgctcatcaccacccctggaggggttatgacagcaaagtattatagccctgccgttcctatagaaattcagggaattcctttttcctcggatctgattcttctagacaccaagaacttggatgtgatccttgggatgaattggttggctcaattccaaggagtagtggattgtgcaagacgcactgtcactctgtaccgagggccggaacaaccggttgttttctttgcacccccaacctctgtcggtagttcagaacttcatcagataagactgtcggaaatccccatcatcagagagttcggagacgtgtttccggaagaactacccggtatgccgcccaagcgagagattgagttccggatagatcttgctctaggaaccactcctctgtacaagcgaccctaccgtatggcagcaaatgaactggccgaagtcaagaaacagttggaagagttgaaagaaaaggggtatatacggccgagtacttccccctggggtgctcctgtgatttttgtggagaagaaagacaagacgaagaggatgtgcgttgattacagagctctcaatgaagttactatcaaaaacaagtaccctcttccccggatcgatgatctgttcgatcagcttaaaggtgccacggtattctccaagattgatcttcgttccggatatcaccagttgcgcatccgtgaagaagatatcccgaagaccgcattcacctcgcgatacggactatatgaattcacggtgatgtcgttcggtttaaccaatgctcctgccttcttcatgaacttaatgaacaaagtgttcatggaatacttggatatgtttgttgtggttttcattgacgacattctggtgtactcacaatcagaggaagaccatcagcaccatctccgtctggtgttgggaaagttgcgggaacatcaattgtatgccaaacttagcaagtgtgagttctggttgtccgaagtcaaattcttagggcacgtgatatctgctaaaggagttgctgtggaccccgaaacagtgaccgccgtcactgattggaagcaacctaagacagtcactcaaattcgcagttttttgggtttggcaggatactaccggaggttcatcgagaacttctccaaaatcgctcgacccatgacacagttgttgaagaaagaagagaaatttgtgtggagcccgcaatgcgagaaggcattccaaactctcaaggaaaggctggtttcctcgccggttttaatcttaccggatactcgcaaggacttcatgttgtactgtgacgcttcgcgccaaggattgggaatattcatatcacatggacattggaatggttggattattgtggaattggattcacaccggggaaatattccccgtgattccctccctctttccccccatttttccctccctctc

SEQ ID NO: 23242 - DNA, 3786 bp, Oryza sativa; identical to SEQ ID NO: 14547
  Clone ID: TF_OsC1713_4303

SEQ ID NO: 23243 - DNA, 2955 bp, Oryza sativa
  unsure (1)..(2955): unsure at all n locations
  Clone ID: TF_OsC333328_1
aaacctttagaaccattggtcatggctgctcatgctgttgatctgatgaggcctgagaagtttgctggtgaaaactttaagcgttggcaatccaaagttcgtcattatctggtgtcgcagaacttgtggtatgttattccacaagtgaggccgctgacccaacagcagcatgcggactttgagaccagtaatgatgtggctttaggtgtcatgctttcgctcctgtctgaccagctctacgacgtgtatggtgcttacaccagcgccgcagagctatgggaggcactggaccgtaaatattcggtttcagatgcaggacgttggatatatgtcgtggagcaatatcatgactttaagatgattgacaaccaatcagtggtgaagcaggctcatgatcnttttaacgattatgggtgagatgtctcagtttggtgctattgtgattcctaagtttgtggtggggggcattattgccaagcttcctccattttggagggattttgccactgcacttaagcacaaacgggaggacatgatggttgatgacctgattgcccacctggatgtggaggagaaggcgcgtgcgaaagacacgccgactatggcacaagaagggacatcaaatgccaacctagtgcagaagtcaaatgcaaagaacaagggcaaacaagcagtgcagaaccataaggccaaaaacacaaccaattttaagaagaaaattacttgctatgtttgcggcttggaagggcacaaggccaacaaatgccgtgacaggaagggcaagaagaatgttcagcaagggcagaaaattgccaacatggttgtgagcgaggctgggtcttcagggtatgattctactcctgttgcactttcagcgtatcaatcctttgattggtgggttgatacgggagctaacattcatgctgcaaccggttcctccatcttgatgggcaatggttcaggtgctgctgttcttggagtagggaaggttgatctgaagctcacttcagggaaaatcatctctttgaagaatgtgcagcacgccgaggctgaaaaccaactagaaagaaaaattaaacgtctacggtcagatcgtggtggtgaatatgtgtcagatgagttctcccaattctgtgcggatcatggaataattcatgaaattacacctccctattcaccccaatctaatggggtcgccgaaagaaagaaccgcactttgactgacttggttaacgccatgttagacagtgccggtatgtctaaggcatggtggggggaggctgtattaaccgcctgtcacatcctaaatagagtgcccactaaaaatagtgagatcactccatatgaaggatggaaagggagaaagccatcactatcatatttgcgcacttgggggtgcttggcgaaagtcaatgtaccaataacaaaaaagcgcaaacttggaccaaagactattgattgtgtctttctaggatatgcacataatagtgtggcctacaggtttttagtagtgagatccgatgtaccggatgtaccgataaacatggtaacggaatctcgtgatgcaacattttttgaggatatttttcctatgaaagctaacgaaacttgggagatcactgatcgaccatttggttgcaagccagtggggtgtaagtggatctttaagaaaaaacttagacccgatggtactattgaaaagtacaaggtaaggcttgtggcaaaggggtacacgcaaaaggaaggcgaggatttctttgatacttattcacctgttgctagacttactactatccgtgtgcttctgtcgctggctgccttatatggtttcgttgttcatcaaatggatgtgaaaacggctttcctaaatggtgagctagatgaagaaatctatatggagcagcccgatggctttgtagcactcggacaggaaggcaaggtggttaagttattgaaatctttgtatggcctaaagcaagctcctaagcaatggcatgagaagttcgatcgaacattaacatccgctggtttcattgtaaatgaagctgataagtgtgtgtactatcggtttggtgggggagagggtgtgattttgtgtttatatgttgatgacatactcatatttgggaccaatattaatgtggtgtctgaattaaaatcatttttgtcccaaaaatttgacatgaaggatttgggagaagctgatgttatttcaaacattaaattgatcaaaggcgaggatgggattatgctttcgcaagcccattatgtggagaaagtcctaactcgtttcgggttgatggactgtaaaatagctccaacgccttatgacccaagtcttaagcttcgaaagaacaaaggactaggaaaggatcaattgagatactctcaaatcattggctctctcatgtatttggcgtgtgctaccagacccgacatctcatatgctgttagcaagctgagccggtttacttctaacccggagatgatcattggcaagcactagaacgcatattaagatacttgagaggcacaatgtcatatgggattcactataccgggtaccccgctgtgcttgaggggtatagtgactcaaattggatctcggatgccgatgagatcaaggccacgagtggatatttgtttactcttggtggtgctgcagtttcatggagatcttgcaaacaaacagttttgacaagatcaactatggaggctgaacttgtagcacttgacacagccactgttgaggcggagtggctgcgtgagctcttgatggacttaccggtaggtgaaaaacctatcccggcgatccttatgtactgtgataaccaaacagttctcataaaggttaagagcacaaaggataatatgaagtcctcaagacatgtgaaaaggccggggatcctctagagtcgacctgcaggcatgcaagcttgagtattctatagtgtc

SEQ ID NO: 23244 - DNA, 7939 bp, Oryza sativa
  Clone ID: TF_OsC359_7957
atgggcaaagaagtagttgagagcatcctagaggtgctcaagaagaacattgatatcttcgcttggagccctgacgaggtgggaggtgtttcgacagatctcatcatgcatcacctagcaatcaagccggataccaagccaagaaaacagaagttgcgcaagatgtccgccgatcaccaagaagcggcgaaagccgaagtccaaaaactgctcagcgctggggttattcaagagattgaccatccggagtggctggcgaatccagtgctgatccacatgaagccgctcgacatccccaaaacatccttcatcagtccattcggcacattttgtcaccttaggatgcctttcggcctgaggaatgcaggagcaaccttcgccaggctggtgtacaaagtcctttgcaagcagttggggcggaatgtggaagcttatgtcgacaacatcatcgtaaaaagccgcaacgctttcgaccatgcgtccgacctacaggagaccttcgacaacttgcgggcagcgggcataaaactgaatcctgagaagtgcgttttcggcgttcgcgcaggcaagttgttgggcttccttgtttccgaaagaggcatcgaggcaaatcccgagaaaatcgatgccattcagcaaatgaagcctccgtcgagcatacatgaagtacaaaagctcgcgggccgaattacggcactcagtcgattcctctcaaaggcagccgaaaggggtttgcccttcttcaagaccctccggggcacgggaaagtttaattggacaccagagtaccaagcagcgttcgacgagctaaagcaatacctgcaaagcccgccagctctgataagcccagcaccaggaagcgaactgctattatacttagcagcttcgccggtggcagtcagtgctgccctcgtccaagaaacagagttcggccagaaaccggtctatttcgtctccgaagcgttgcaaggagcgaagacaagatacattgaaatggaaaagctcgcttacgccctggtgatggctttgcgcaagcttaagcattacttccaggcccacaaagtcatagtgccatcacggtaccccttgggcgaaatactccgaggcaaggaagtcactggccggctcagcaagtgggcggcagagctatccccccgcccctaccgccgcgttagcacgccggccggccgtgccgtcgcctcctccagcatcgcagccgcctcctcttcgccggcctgccctctgttttccgcggagacctccggaggtgcctccccgccggcgacagtggcgttgccgccactgttccgcctccggccgcctctgccgcgtcccctgtgcgccggccgacgtcgccatcacctctcccggcaccggagcgccgtcctctttcccagccaggccacggcgtcgcccgattttcgccggaacgccgtcgcccgcgccggcttctccttcctcctcgtcggcatctcctccggcagcccctttcgccatgcccgtccgtcagccggcgctgccgtcccctccctcggcacgccgcgacgtcatccttggcatcgcttccccttcggccgaacaccgccggtgtccgtcgtcgtcttcaccgttcatcctcgccggctcgtcgtctcgcggcgccgcctccgtaatcggcatcgcagcggcgtgttccacgccatcctcgcctccgtgcagccgctgccggctgccctcgtcgcctcctcgccggccccggtcgctgtagccgtcgtcgtcttcgtcctcggctccgcgtcgtcaagcctcgtgccggccgcgtctcgcccgtgtatcggtatcggtagtcgttcgcttgtccgtgtagtgtccgtgttagtgtgcccgcttggtagccgcgttgtttccacgtgtgaaacccgtgtggtgtctagtagagtccgtttgtcggccactcgcctcggttgacacacggggtccgcttccgtcgacccgtggaccgtctctgtgtacccggttttctttttatgtattgttattgcttctttataggcttgtagctttgcttgtgtgcttcgcgtagcttctgtcgttccagaggttcccgaagcgtggttcgcggtcgtcgccgaaggttcggaaggccgttctctctctccccctctattcaaaacccccaaaatggttttaggctgggctcgaggtgcgtggttgggttttgttagtcgtacctcgggtactataaggattaagctcgagcctctgttgcgaagcactaccgtacttccacatgtctagtgggtaaggcttagtttgtggctcagtctggttataaacaaaagtacacggatggagatggacgaagtcgggggtcgatggacatctctaggacaaatgaaggctacacgagctgcggcccggtagtcgagatgtcatggcacagggccggtgtcctgctgctaggggctcagtcctgcctacctgtcctgggggttccggccgtaggtggggttgggtcgatgtacacctctgatcagagtataatctattcgaatagccgcgccctcggttatgggcaagccgagcaatgtacccaaatggccggcagcatcaaccgtcgtggcctggacctgactggattcgttttggagctgcggggcatgtgcgttgtcctggggtatctgcatggtgtggactaccagggcaagcagctcccggagcaggagggtgacgatgcagatccccacgctgcttgggaggttactgcagtgatcctcactggctcacccgagaggacttcgttggcagtcaccgcgggtggagattccttctccgccgcttgccagaacgccgcactcctcgccatcggcactcttcaccagcgctacccggacgagttgcagcacccgcctatcgctaccacccacgccgcggaggagcccgcgactacgccaccttccgggatgctagcttggaggatgacgctaccatcatgcacctggcgcgcatggtggaggcgtacgacgcggcccgtatcgacttccatcagatggtgcgccgcgggttggtcgagaacaacatgaagatcctggagctgcgtcaggagaatctgcagctgaagaaggacctagacgcagtggaggcgcagctgcgtcagctcaagatcgcccagggagaggtctgtcgccccaagcgtcgccgcgtctgtcgcagcctgaagatcaccgcccgcaagagtacctccaggcccgagcttgttcgtcagtccctggcgtggacctgcttcgtcgagacccctcgtgccgagcccgcgcccgtggttcctcaggaggagggagcctccggcgttggtagcacggaggatgcgctgctgctcaccttccaccctggcccgtcgcagaagtagacgagtagttagtaggcttgcgcatggtgacaaccaggagaagtgctgctaccggtgaaggcagtcaccccgaaggcagcaaccacaacaaccatggcagcccacctccacctcctcccccgcctccaccaccaccaccagacaccaacgccatcctcacccaaatcctcgcccagcaggccaacatgatggctgctttcctccaccacatccaaaatccgccacaacataatgcttcaccaccacccccacaacattctaaactcgccgagttcctccgcatccgtccgcctaccttctctagctccaataaccccgtggatgctttggattggttgcatgccgtggggaaaaagttagacatcgtgcagtgcaacgatgaggagaaagtcatctttgccgctcaccaactgcaagggcccgcatcgctatggtgggaccacttccaggctatgcagccagaggggcagcctattacttgggcccgcttcaccgccgctttccggaggacccatgtgcccgccggagtcatgacccttaagaaaagggaattccaagagttgaagcaaggcaaccgctccgtgatggagtatttgcatgagtttaacaacctggcccggtacgccccggaggatgttcgtgaagatgaggagaagcaagagaagttcttggcaggaatggaccctgagctgtccgtgcgtctggtctccggggactatccggatttccaacgtctggtggacaagagcatccacttggaagccaagcacaaggaactggagtcgcacaagcgtcgcttggcgaatttccgcaaccaacaaggggctaaccaaagggtccgctacaccaatccctatccaggggaatcctcctcgcagcagcaacagcagcagcaacctcgctccgcgccccgacctcaattcgtggtgcgcgtcccacagccgcagcagcagcagagttagcaagggacccgtgcgccccgtcctcctacgccagctgtgcagcctggtcaaggccgcagggacgctcaaggtcagcagcgtctgtgcttcaactgcttcgagcccgggcactttgcggataaatgccaaagccgaggcgccagcaaggccaagcgcctccccgccccaacaacggtggtaaggatatcattcggggtcgtgtgaaccacgtgactgccgaggatgtgctgacaactccagacgtcatcgtgggtacgttcctcattcattctgtccctgctaccattttgttcgactctggagcttcccactcgtttatatctgtgccattcatggggagaaatcagttgggggtagaaaggcttaggaaccctctgctcatcaccacccctggaggggttatgacagcaaagtattatagccctgccgttcctatagaaattcagggaattccttttctctcggatctgattcttctagacaccaagaacttggatgtgatccttgggatgaattggttggctcaatttcaaggagtagtggattgtgcaagacgcactgtcactctgtaccgagggccggaataaccggtcgttttctttgcacccccaacctctgtcggtagttcagaacttcatcagataagactgtcggaaatccccatcgtcagagagttcggagacgtgtttccggaagaactacccggtatgccgcccaagcgagagattgagttccggatagatcttgctctaggaaccactcctttgtacaagcgaccctatcgtatggcagcaaatgaactggccgaagtcaagaaacagttggaagagttgaaagaaaaggggtatatacggccgagcacttcctcctggggtgctcccgtgatttttgtggaaaagaaggacaagacaaagaggatgtgtgttgactacagagctctcaatgaagttactatcaaaaacaagtaccctcttccccagatcgatgatctgttcgaccagcttaaaggtgccacggtattctccaagattgatcttcattccggatatcaccagttgcgcatccgtgaagaagatatcccgaagaccgcattcaccacgcgatacggactgtatgaattcacggtgatgtcgttcggtttaaccaatgctcctgccttcttcatgaacttgatgaataaagtgttcatggaatacttggataagtttgttgtggttttcattgacgacattctagtgtactcacaatcagaggaagaccatcagcactatctccgtctggtgttgggaaagttgcgggaacatcaattgtatgccaaacttagcaagtgtgagttctggttgtccgaagtcaaattcttagggcacgtgatatctgctaaaggagttgctgtagaccccgaaacagtgaccgccgtcactgattggaagcaacccaagacagtcactcaaattcgcagtttttgggtttggcaggatactaccggaggttcatcgagaacttctccaaaatcgctcgacccatgacacagttgttgaagaaagaagagaaatttgtgtggagcccgcaatgcgagaaggcattccaaactctcaaggaaagactggtttcctcgccggttttaatcttaccggatactcgcaaggacttcctggtgtactatgacgcttcgcgccaaggattggggtgcgtgctcatgcaggaaggtcatgtggtagcctatgcctcacgccagctacggcctcatgaaggcaactaccctacccatgatttggagttagccgcggtggttcatgctctaaaaatctggcggcactatctcattgggaatcgctgtgaaatatatactgatcataagagtttgaaatacatcttcacccagtcggatctgaatcttcggcagagaagatggttagaactcatcaaggattatgatgtgggaatccactatcaccctggtaaggccaacgtggtcgccgacgctctaagtcgaaaaagccattgcaacactcttaacgtccgtggcattccacccgaacttaatcaacagatggaagccctgaacctaagcatagttcgtcgtggattcttggctacgctggaagccaagcctaccttgctcgatcaaatccgcgaggctcagaagaatgatccggatatgcgtggactcctcaagaatatgaaacagggtaaagccgctggtttcacagaggatgaacacggaaccctatggaacggaaatcgggtatgcgttccagacgacaaggaacttaaacagctaatacttcaggaagctcacgaaagtccttattccatccaccctggcagtacgaagatgtacttagacttgaaagagaaatactggtgggttagtatgaagcgggaaattgcagagttcgtggccctttgtgatgtgtgtcagcgtgtcaaggcagagcaccaacgaccggccggacttctccaacctctccaagtaccagaatggaaatgggatgaaattgggatggatttcatcaccggacttccaaaaacccagggcggttatgattctatatgggtagtcgtggatcgactaaccaaggtggctcggtttattcctgtgaagaccacctatggagggaacaaactagccgagctctacttcgctaggatcgtgagtctccatggcgttcctaagaaaattgtatctgataggggaagccaattcacctctcacttttggaagaagctccaagaagagctgggtacccgattaaaattcagcaccgcgtatcacccgcagacagatggacagaccgagcgtctaaatcagatcctagaagatatgctagaacatgcccccgacacactgctgtcctaccattctcgggaacgacatgggataagaatctccccctatgccgagttctcctacaataacagctaccaaaccagcatacaaatggcaccctatgaagcgttgtatggacgcaaatgccggacaccgctattgtgggaccaagttggggaaagccaagtgttcgggacggatatcctgagagaagctgaagctaaagtcagaaccattcgggataatctaaaggtggcacagtcccggcagaagagttatgcagataaccgacgctgtaatctggaattcgcagtggacgactttgtgtaccttcgggtcacgccattgcgaggtgtacacaggtttcagacgaaagggaagctcgcacctcggtttgtgggtcctttccgtatcattgctcgacgcggagaagtcgcttaccagttggagctgcccgcctccttgggcaacgtgcatgatgtgttccatgtgtcgcaactcaagaaatgccttcgagtgccgtccgagcaggccgactcagagcagattgaaattcgtgaagacttgacctacgtggagagaccagtgaaaatcctggacaccatggagcgcaggaccaggaaccgggtaatccgtttttgcaaggtccaatggagcaaccacgccgaggaagaagctacttgggagcgtgaagacgagctgaaggcagcccatcccaatctcttcggcagttcttccgaatctcggggtcgagattccgtt

SEQ ID NO: 23245 - DNA, 1102 bp, Oryza sativa
  Clone ID: TF_OsC359_8257
ctagttgaatgagatgctttctgatagtattgtgctggcgagtttgttttttcgacacaaatcttcttttgcttgaatctctagggacattactttgcgtctcttgtattcttgcatctctttcttttcttggatgtcttggcacatgtcgcaggatgcttttgctcttttgtcatcagggaaggttggacgtactgcattaacatttggcgaattcgggcttccttggggatagaagggcatccttgagatgctcatattagcttgtagtagtgcatccatatagggtttttgggggcagtgtctcatgtaatggccaatttcgtggcaaatgaagcatatgaatccgggaacgtgtctgatcttctttgatttgagggtgggggtcttggataagttttggcaagattgcagtgtctgacattgtgggacatcttgcatgtcaacttctgatggcaaggtctttcttttgtgacaacttccttctttaaccatgctattttcttgcgatacggattcattgattgagttctgaaggttggggcaattattagctcgaagtggggttttcatccctgtaatcatcacatttaagaattctttgttcttctctttatgggtatcagtgccttctactgattgtgttccttgtatttctgcggcctcattcttactcttgtctggattcaccttgggctgtggtagtagcagttgttgttgtatagaagccaaattttgagctatttcttgtagcatctgagtctgattggctagaatctgataaatatccattgaggagtgttggtttctggttgcaacttccttctttggtccaggaacagcattaccagtcttggcgacttggttggtgacttgttcagctagttgatttggattttctgacaaagctgggtcttcctcagaaccaaggtagttgcggacacaagtctgacaggttggttgaggtgccatttgcttcagaggaactgagaacccaatctgataccgccgtataacggcacctgataggagcgtgtcgtaggggaaaacggcgcgaaccgcttcctacgaaaccgcggtctcggtaccagtcccaggacat

SEQ ID NO: 23246 - DNA, 1215 bp, Oryza sativa
  Clone ID: TF_OsC91_2592
ctagctgattccaaattcaagtccagaccacccaccagtccaaatcttgttcctcttctttccccaaaccctcgcgctcagggctctgatccagcgctcgccgacggccgcgtcggccaaggcctccttggtggcggcgacggcaggcgtgggcggggtggagccagccgtgacgctcgaccaggtgccacggtggagcaaccctgaccagcgcctctcctcctcttcccgcaccgccgccggatcctttgtgctcatgttggggcattctttatatggatggaaagctaagaagataaattttccaatggtcttggtcccacgtccaaattctttccgagtcaacgggacttgactgaacaatttgacgtccagaatcttgtccttgtttgtgttcttcaattcgcaaacagggattagccttctcggcgaggtcatccgcgtttcgacacgggtgataacaagagaagacgtggtgctgtgattgcggagctcaagagcgtgcgcgttcaagaagccggatcgatttgtgtcgcgagtctttgccagcgggtaatagtagaggatgtcctcatcattcccacccccacttgaccccttgttgcgtctttgccagcgggtaatggtgggagatgtcctcatcaccagatctatcctgaattctatatctctcttaggcggtatgccacgtagatcaactgggaacacatttggatagtcccgcatcgaaatcacatctggtgcgccttgagcttctgcggcagcaacatgattgacacgagccttcggtgctggtgcaatggacttgttctgaataggggcagtctccacacgtcgaggtttcggacacttgtcagcaaaatggcctggctcatcatagttgaagcacaccactggcatgtttccttgctccttgataggctggttgtgagcaatcttgtgtttcttctcttccattcggttgtacttgtcttcctggcgaatagccttgtccaccaacttctcgtccatgcaaacatcctcaggagcataacgggccagacaattgaactcatgcagaaactcggtgatagaacaagatctcagagtgagtgccctgaactccctcttcttgagagccaccactcccgatggtacatgaatcttcttgaaagcaacagtaaactcgagccaagtgattggctcaacaacaacctgaaggatctccttcatcat

SEQ ID NO: 23247 - DNA, 2799 bp, Oryza sativa; identical to SEQ ID NO: 14557
  Clone ID: TF_OsC91_2399

SEQ ID NO: 23248 - DNA, 1140 bp, Oryza sativa
  Clone ID: TF_OsC334495_1
gtctttctctccatttttcctctcttcctcctcatcatcttcaacgtcgaagatgctgatgtagccatcttccatagcaatgtatgcccgttgactagggcaatccttctgcacatggccaaatccatggcagcggtggcactgaatgctgggcgtgcatcccgtcaaagcgacggacgaggcactcttgaaactccggacgcaactggtcgcttgcttgctggtgggggtgtccggaaagagatgggcttgggcagccccaaagatggcttcgcccgcggcatgggaatagacactgtggtgtacatgtgctcctctgcctccgcctcctcctcccgcaaggacgccgccgttgtcggcctcggcaggcgcagcgtcctcgccgcgtcgttccggagcgcgagcaccagcaccccgctcatccccgtcggcgtcgacaaggcgccgaacattgaccccaacctctacttcgtcgccatcaccggcatcaaggtcgccagcggcgagatcgtcagcgacaaggccgccgcgatcatgaccaccgtttccaccctttacacgttcctcaacccggtgctcttcgaccacctcaagaagcagctgccgccgctagcagacaagggctcatccgtactgtgctacacgaaggacaccgagctcccggcgatcacgctggtgttcgccggcaaggacgccgccatgaagctggcgccggagcactactcgtacaagaggagcgatggcgccgtgtgcctctccatcctgcgctcgccgctgcacggcggggtgttcgtcatcggcagaaggggcgggcccaggattttcaacttggtgaggtatcgacttcgtcacctcgtcgtcgacggcagcggcaggtcggtggccggtggcggcgacgcggcgcggggccctgcgcccctgcgactgcgggctagcaggctgccgtggtcggtgcctcggtggagcgtaggcaggcaggcaggcgccaggcggcaactcgtcaccgcggcgccgcaccggcgggcggcggcggctggagcatggaggcgggcgccgcggggggatgccggatgcgccgagcgcccgagccgccaaggcgccgacggcgccgtgcgcgcctgcgccgcggccgaagggtag

SEQ ID NO: 23249 - DNA, 4494 bp, Oryza sativa; identical to SEQ ID NO: 14568
  Clone ID: TF_OsC359_5835

SEQ ID NO: 23250 - DNA, 4883 bp, Oryza sativa
  Clone ID: TF_OsC359_6886
atgtcatggcacagggccggtgtcctgctgctaggggctcagtcctgcctgcctgtcccgggggttccggccatggccggcagcgtcacccgtcgtggtttggacatgactggcttcgtcttggagctgcggggcatatgcgtggtcttggggtacccacatggagtggactaccaggccaggccgcttccggagcaggagggtgacgacgcggagccccacgctggttgggaggtcactgcagtgatcctctctggctatcccgagcggacttcgctggcagtcaccgcgggtggggattccttccccgccgcttgccagaacgacgctctcctcgccatcgtcactcttcaccagcgctacccggacgagttgcagcactcgccctaccgctaccaccctcgtcgcggaggagcccgcgactacgccaccttccgagatgctagctcggaggatgacgctaccatcgtgcacctggcgcgcatggtggaggcgtacgacgcggctcgtatcgacttccatcagatggtgcatcgcgggatggtcgagaacaacatgaagatcctggagctgcgtcaggagaacctgcagctcaagaaggacctagacgtggtggaggcgcagctgcatcagctcaagatcgcccagggagaggtctgccgccccaagcgtcgccgcgtctgccgcagccagaagatcaccgcccgcaagagcacctccaggcccgagcttgttcgtcagtccctggcgtggacttgcttcgtcgagacccctcgtgccgagcccgcgcccgtggttccccagaagggggaagcctccggcgttggtagcacggaggatgcgctgttgctcaccttccgtcctggcccgtcgcagcggagaaatgctgctaccggtgatggcaaccaacctgaaggcagcaaccacaaccaccagggcaacccacctccacctcctcctccacctccaccaccaccaccagataccaatgccattctcacccaaatcctcgcccagcaggccaacatgatgactgctttcctccaccacctccaaaatccaccacaacataatgctccaccaccacccccacaacactctaaactcgccgagttcctccgcatccgtccacccaccttctctagctccaacaaccccgtggatgcgttggattggttgcatgccgtggggaaaaagctagacacggtgcagtgcagcgatgaggagaaagtcatcttcgccgcccaccagctgcaggggcccgcatctctatggtgggaccatttccaggctacgcagccagaggggcaacctattacttgggcccgcttcaccgccgctttccggagaacccatgtgcccgccggagtcatggcccttaagaaaagggaattccgagagttgaagcaaggcaaccgcttcgtgatggagtatttgcatgagttcaacaatctggcccgttacgccccggaggatgtgcgggaagatgaggagaagcaagagaagttcttggcaggaatggaccccgagctgtccgtccgtctagtctctggggactatccggatttccaacgtctggtggacaagagcatccgcttggaagccaagcacaaggaactggagtcgcacaagcgccgcttggcgaatttccgcaatcaacagggtgctaaccaaagggtccgctacaccaatccctatcccgggggatcctcttcgcagcagcaacaacagcagcagcaaccccgctctgcgccccgacctcaattcgtggtgcgcgtcccacagccgcagcagcagcagaatcagcaagggactcgtgcgccccgtcctcctacgccaacggtgcagcctggtcaaggccgcagggacgctcaaggtcagcagcgtctgtgcttcaactgcttcgagcccgggcactttgtggataaatgcccgaagccaaggcgccagcaaggccaagcgcctccccgctccaacaacggtgggaaggatgtcattcggggtcgtgtgaatcacgtgacggccaaggacgtgctgacaactccagacgtcatcgttgggagttcggagatgtgtttccggaagaactacccggtatgccgcccaagcgagagattgagttccggatagatcttgctccaggaatcactcctctgcacaagcgaccctaccgtatggcagcaaatgaactggccgaagtaaagaaacagttggaagagttgaaagaaaaggggtacatacgtccgagtacttccccctggggtgctcctgtgatttttgtagagaagaaagacaagacgaagaggatgtgcgttgactacagagctctcaatgaagtcaccatcaaaaacaagtaccctcttccccggatcgatgatctgttcgatcagcttaaaggtgccactgtattctccaagattgatcttcgttccggatatcaccaattacgtattcgtgaagaggatattccgaagaccgcattcaccacgcgatacggactgtatgaattcacggtgatgtcgtttggtttaaccaatgcacctgccttcttcatgaacttaatgaacaaagtgttcatggaatacttggataagtttgttgtggttttcatcgatgacattctgatatactcacaatcagaggaagaccatcagcaccatctccgtctggtgttgggaaagttgcgggaacatcaattgtatgccaaacttagcaagtgtgagttctggttgtccgaagtcaaattcttagggcacatgatatctgctaaaggagttgctgtggaccccgaaacagcgaccgccgtcaccgattggaagcaacccaagacagtcacccaaattcgcagtttcttaggtttggcaggatactaccggagattcatcgagaacttctccaaaatcgctcgacccatgacacagttgctgaagaaagaagagaaatttgtgtggagcccgcaatgcgagaaggcgttccaaactctcaaagaaaagctggtttcctcgccggacggtcatgtggtggcctatgcctcacgccagctacggcctcatgaaggcaactaccctacccatgacttggagttagccgcggtggttcatgctctaaaaatctggcggcactatctcattgggaatctctgtgaaatatatactgatcataagagtttgaaatacatcttcacccagtcggatctgaatcttcggcaaaggagatggttagaactcatcaaggattatgatgtgggaattcactatcatcctggtaaggccaacgtggttgccgacgctctaagtcgaaaaagccattgccacactcttaacgtccgtggcattccacccgaacttaatcaacagatggaagccctgaacctaagcatagttagtcgtggattcttggctacgctggaagccaagcccaccttgctcgatcaaatccgcgaggctcagaagaacgacccggacatgcatggactcctcaagattatgaaacagggtaaagccgctggtttcacagaggatgaacacggaaccctatggaacgaaaatcgggtatgcgttccagataacagagaacttaaacagctgatacttcaggaagctcacgagagcccttattccattcactcgggcagtacaaagatgtacttaaacttgaaggagaaatactggtgggttagcatgaagcgggaaattgcagagtttgtggccctatgtgatgtgtgccagcgtgtcaaggcagagcaccaacgaccggccggacttctccaacctctccaagtaccagaatggaaatgggatgaaattgggatggatttcatcaccggacttccaaaaacccaaggtggatatgattctatatgggtagttgtggatcgattaaccaaagtagctcgatttattcctgtgaagaccacctatggagggaacaaactagccgagctctacttcgctaggatcgtgagtctccatggcgttcccaagaaaatcgtatctgataggggaagccaattcacctctcatttctggaagaaactccaagaagagttgggaacccgattaaatttcagcaccgcgtatcacccgcagacagatggacagaccgagcgtctatatcagatcctagaagatatgcttcgcgcatgtgtcctagatttcgggaagacctgggataagagtctcccctatgccgagttctcctacaataacagttatcaagccagcatacaaatggcaccttatgaagcgttgtacgggcgcaaatgccggacaccactattgtgggaccaagttggagaaagccaagtgttcgggactgatatcctgagagaaactgaagctaaagtcagaaccattcgggataatttaaaggtggcccagtctcggcagaaaagttatgcggataaccgacgccgtgatatggaattcgcagtggatgactttgtgtatcttcgggtcacgccattgcgaggtgtacacaggtttcagacaaaggggaagctcgcacctcggtatgtgggtcctttccgtatcattgctcggcgcggagaagtcgcttaccagctggagctgcccgcctccttgggcaacgtgcatgatgtgttccatgtgtcgcaactcaagaaatgccttcgtgtgccatccgagcaggccgactcagagcagattgaagttcgcgaagacttgacctatgtggagaggccagtgaaaatcctggacaccatggagcgcaggaccaggaaccgggtaatccgtttttgcaaggtccagtggagcaaccacgccgaagaagaagctacctgggagcgtgaagacgagctgaaggcagcccatcccgatctcttcgccagttcttccgaatctcggggtcgagattccgtttaa

SEQ ID NO: 23251 - DNA, 2323 bp, Oryza sativa
  Clone ID: TF_OsC1713_5255
ctatttgcatatcttgtcagttgcaggatcaaactgactagcatgtctgcatctcatcaagatttggacctgcacaggagctaagcagatctcccaggctggtgtgttcgattttttcgtcaacatccgtgcgccgccgctgcttgtgttgcttctgtctgcttccccggttctaattgcttgcgcgcacgagagatcggaacgagcagggcctccagaaccacaccttcgcctgagatctgcaccgggtaggcgggtgatcaggtttttggagagtgcttccgcacgactgctctcgacttctgctctgttcatcgtcgtctcgtcgtccaccatgtctgcacctggagccgccgccgccgctggagccactgtcgccatccctgaagatggcgcgccgggagccggagccgctgcgaacgtcaacgtcaacggaggcagttctgcctcacaatccagcggagggacattctcggggtcattttcggtagttggctttgctgctgcactgaaaccacatgcatttgatggttctaactataagaggtgtaaagcacgtgcactattgtggttgacagcgatgcaatgcttctatgtttcacgcggtatacgaagtgaaccacctctctctcctgaggaagaggttaagttcgaggcttcggattgcctgttccgtggggcattgatcagtgtactcgctgacaacatagtggacgtgtacatgcacatgccttctgggaaggacatgtgggatgcacttgaggccaagtttggagtttccgataccggcagtgagctgtatgtcatggagcagttctatgactataagatggtcgatgaccattctgtagtagaacaagctcatgagattcagatgctggctaaggaacttgagaacaacaactgtgagttgccggacaagtttgtagcgggtggcattattgccaagttgccaccttcttcgtcggactttgccacttctctaaagcacaagagacaagagttcagtgtttctgatctcattggctctttgggtgttgaggagaaggcgagggcaaaggacaaccggggcaaaaaggttgagcgaggttctagtgccaatatggtacagaagaagaacccacatgcatcccacaacaacaagaaagtcaagcctgatgtcaaatccaaggctacaatcaattttaagaagaaaggcaagggaaaggcaaagggagactgctttgtgtgtggcaagtctgggtattgggccaaggactgtcctgagtgcaaagacaggaagtctgccaacatggtcgggagaggttcctccttgttgatgggaaacgggtcgcttgcggctgttcatggtgttggtacagtcgatctgaagtttacttcgggaaagaccgtgcagctgaagaacatgcagcatgtcccttcaataaagaagaatcttgttagcggctctctattgtgtagagaaggttttaggcttgcgtttgaatccaataaatgtgtcgtatctaaatatggaacttttgttggaaaaggttatgacagaggaggcttgttccgctcttctttggatgacatgtgtaataatcataatgttgtgaaccatattagcaagaatgatgagtctaatgtgtggcattcgcaactctgtcatgacgcctccctattcaccccaatcaaattgggtggccgaagaaagagccgtactctaactgagatggtgaatgccatgttagacactgcggggctttccatggaatggtggggtgaggcaattttgactgcgtgtcatatcctgaataaaattccaatgaagcataaggaagtgacaccattcgaggaatggaaaaggaagaaattaaacctcccatacctacgaacatggggctgtttggccaaggtaagtgtacctatagccaaaatgcgaaaacttagaccaaatactgttgattgtgtgttccttggttatgttattcatagtgtgggttatagattcttaatagtaaactctggagtacccaacatgcgtgttggtacaattattgagtccagagatgctacattctttgagaatgaatttcccatgaaacatacacctagcacttctagtcaagaaactgtcataccccatgagcactttgcaccgatagaacacaatgatcaaacgcctgaggaaaatcctgaggaggacaacattgtagatactcgtaagagtaagagacaaagggttgcaaaatcctttggagatgactacgttgtatacctcgtggatgacaccccaagaatcatagaagaggcatattcatctcctaacgctgactactga

SEQ ID NO: 23252 - DNA, 630 bp, Oryza sativa
  Clone ID: TF_OsC369407_1
atgaagtctgagtatatgaccgaggaagatccactggtattatggcaatccctgaaggatcgctgcgaccatcaagggtcaattttgctcccatgggcacaacatggcctaatcaccctatgcttccaagactacaaatttatagtggcgtataactctgccctatattggatcagtgcttggttatgtttatgtgaccaaaagatcactgatactgagatgattgagaaaaagttatccacctaccaccccaacaacatgcatgggagaagagatagaagggtaagggaagtatcatgttcaaggggcaagggaagggtaagcccaaaggcaaaagccgaatgcaagaaagttacatgtggaacatctggggaaaacatgataattgctatagatgtggaggcattgagcattggtctcgtaactgccatgttcccaagcatctggttgagctctaatgagaaaatgagccaatatgagtcatacttcaccactgagcctgaagctcacattgaaaactatgatgacatgtttgtcaacactaaggatggtgaagatgtccatatggacgatgatgaggacaaccttattgaagaagtaatctcctatatgtctcttataagtgtctga

SEQ ID NO: 23253 - DNA, 3342 bp, Oryza sativa; identical to SEQ ID NO: 14692
  Clone ID: TF_OsC1713_4313

SEQ ID NO: 23254 - DNA, 3956 bp, Oryza sativa
  Clone ID: TF_OsC1528_1743
atggctggttttgccgatgcactgaggccagataaattctccggtgtgcactttaagagatggcaaatcagggtcactctgtggctgacagctatgaaatgcttctgggtgagtactggcaaacctgaaggaattcttattgctgatcagcagaagcaattcgaggaagccactactctctttgtgggatgcattcttagcgttcttggcgatcgtctggtcgaggtgtatatgcatatgaccgacgctaaggagttgtgggatgcactgaatactaaattcggtgctactgatgctagcaatgatctgtatatcatggagcagtttcatgactacaagatgactgacaaccgttctatagtcgaacaggctcatgagatacaaaccatggctaaggaactcgaactccttaagtgtgtcttacccgataaatttgtggctgggtgcattattgcgaaactacctccatcttggagaagtttcggtactgcactcaaacacaagagataggaatactccgttgaggggttgatagcgtctcttaatgttgaggggaaagctcgggaaaaagatgctgcgtctaagggtgatagtgggcagtccagtgccaatgttgtgcataaggctcagaacaagagcaaggggaaatacaaagctcaacagaccaccaactttaagaagaagaagaagaacaacaacaatcctaatcaggatgagaggacttgctttatgtgtggccaacctggtcatctggctaggaagtgtccacaacgcaaggggatgaaggcacctgcagggcagacttctaagtctgctaatgtgaccattggcaacactggagatggaggcgggtatagtaatttacctactgtttttttagttaatcagtctactaattggtgggttgatactagggccaatgtacatgtttgtgctgacatcttattgttttcttcttatcaggtcgcacggggttccatcgtcctaatggggaatgggtcacatgcttcttttcatggtgttggcacggtagatctgaagtttacttcgggaaagatcgtgcagctgaagaacgtgcagcatgtcccttctatcgataggaatcttgttagtggctcccgtcagactagagacgaatttaagttggtttttgagtgtaataaagtagtcgtgtctaaacatggatattttattggtaaaggttatgagtgcggaggactgttccgcttttccctttctgatttctgcaataagtctgtgaaccatatttgtggcagtgtggatgatgaggctaatgtttggcactcatgtttatgtcatattaattttgacttgatgtctcggctttccagcatgtgtttaattcctaagttcttcactgtcaaaggttctaagtgccatagttgtgtgcaatcgaagcaacctcgcaagcctcacaaggctgtcgaggagagaaacttggcaccactagaactcctacattcagatctttgtgaaatgaatggggtgttgacgaagtgtggaaaatgatatttcatgacgttgattgatgatgctactatattttgctatgtgtacttgttgaaaacgaaagacgaggctctagactatttgaaaatttataaggcagaagttgaaaatcaacttgacaaaaagataaaaaggcttaggtttgatcgtggtggagagtttttctcaaacgagtttgacttattctgtgaggaacatgacatcatacataagaggacgcctccctattctcccgagtctaatgggattgctgaaaggaataaccgcacactgactgacttggtgaatgacatgttggacaccacgggactacctaaggcatggtgggggaggcattgttgacctcgaatcatttgttaaatagagttcctaacagaaataaggacaaaacaccatatgagatatggattgggagaaaaccatcactttcaccaagcacatgagggtgcttggcgaaagtcaatataccaataacgaagaagcgcaaattgggacctaagactgtggactgtgtctttctgggatatgctcattacagcattacctatagatttttaatagttaaatctgaggtacctgacatgcatgttggtacaattatggagtctcgtgatgctaccttctttgagagctttttcccaatgaaggatacacatagtagttcgagccaaccctctgaagtaattccccgttcaatcacacaaccagaacaaactgaacatacacataaacatgtcattgaggaggatgtcagtgaagctcctcgaaggagtaagagacaaaggacggctaagtcctttggtgatgatttcactgtgtacctcgtggatgacactcctaagtcaatttcagaagcatatgcatctcctgatgcagactactggaaggagactgtccgtagtgaaatggattccattatcgctaacgggacttgggaggtgacaaatcgaccctatgggtgtaaacctgtggggtgcaagtgggtgttcaagaagaagcttaggcctgacggtactattgaaaagtacaaggctcggcttgttgctaagggctataatcagaaagaaggcgaagatttcattgacacttactcacctgttgctagattgaccacagttcatgtgctactttccctagcagccacacatggtcttctcgttcatcaaatggacgttaagacagcttttcttaatggagagctagatgaggagatctatatggatcaacctgatgggtttgtagttgaaggtcaagaaggcaaagtgtgcaaattgttgaagtctttgtatggtctgaaacaagctcctaagcaatggcatgagaaatttgacaaaacattgacatcttcaggctttgcagtcaatgaggcagataaatgtgtgtactatcgctatggtgggggtgagggagttattctgtgcttgtatgttgatgacatactgatatttgggacaaaccttgaggtgataaatgaggttaaatcattattgtctcaaaattttgatatgaaggatttgggagtagctgatgttatcttaaacattaagctaattagaggtgagaatgtgattacattcttgcagtcccattatgtggagaagatcttgaatcgctttggctacattgatagtaagccttctccaacaccttatgatcctactccctcccttcgcaagaacaagagaattgctaggaatcaactggaatactcccaaatcattggctcgctgatgtacctagctagtgcaactaggcctgatatctcctttgttgtgagcaagttgagccggtttacctctaatccaggagatgattactggcgtgcgcttgagcgagtaatgcgctatctgaaagatactatggaattggggcttcactattctaggtatcctgcggtactggagggatatagtgattctaagtggatctctgatgtggatgagataaaagccactagtggatatgtcttcacactgggtggtggtgctgtttcgtggaggtcttgcaaacagaccattttgacgaggtcaaccatggaagcagagctgacggtactggatactgctactgttgaggcagaatgactgcgtgatctattaatggatcttcctattgttgaaaaaccggtgccggctgtccttatgaactatgacaatcaaacgacatgtgaaaagacgattgaagtctgtcaggaaattgagaaactccggagttataacgttggattacatccaaacagctagaaacctggcagatcccttcacgaagggactatcacgaaatgtgatagacaatgcatcgtaggagataggtttgagacccatagcattcttgaaagaactcacctttgtaagcttgactgttggtcgcagtctatagagattttgggtgaatcttctaggaatcttactaaagatctaggagta

SEQ ID NO: 23255 - DNA, 5408 bp, Oryza sativa
  Clone ID: TF_OsC1713_5231
tatgggctcaaatatgtctctatgaatgtaaatagcaaaaatgtaaatgcaacaaataaatgagacaagagacaaggaatttttcaccgaggttcggaaactcgccggtttcctaatccccgttgaggcgagcccaactccaccgctcaaccacgaagccaccgcacgcccccttcgtcaagggatgggcaaggcgggagctggcccacggagaggactacccaagcctcgatcactcggggtagttcttccttcactccgaaggtggtgaactccaaaccactcacaaaccggcgccgggcctcctccacaatcttctcggagaggtcaccgggcaactcctccacaagccgtctaggaggcggcaacctcattatgtagagagcataatagattccttgtccaatagtcccctttgagatggcaatctccttcatcataaggttgataacatcaaaccgacgaccatccataatggcatcaataacatgccaagcaactctgcgtatgtcatcattgttgccgcatcttgggaggatggtggcccttactatgtggttgatcacacttgggagagcccttaaacccgccacctttccatatgtgtgccttcccccttcttcataaaactgagaaaagtgatcaatggggaagggattgtgggtgtgctcatcatgaaggtcatccccgttgttgaagcgaatgtgcaagagctccttgaattcacggcggttgatagagcatcggagggtccccaacatccacttcattgcatcacaatcgccggacacccatacggtggcatagaattgccggatgagatcttcatcaaaaggttgcttcatggtgacaattctatcaatcccaacggtccggaacatctcttgcaaattctcaaactccggtgtctcaccaatgtgcctccaagagatccatttgtgtttggcgaaggctttgttggcatacacttgtacatacacggacttttggaaccgtgtatgaaatcttggatcattacaatcgttaggcctccggaattgatcatgatgacggaagatagtgtattgttgagcattcctcaaattaagcacaaattggatggaggaatcgagaggactcccatcatcacttgcctcatcatcttcaccatttccactctcattgtcatcaccatcatcacttacttccatctcatcaccctcaacattttccatattgtcctcatcactttgaacatactcatctccgcttgattcctcattttcactaacgggatcgggcgtgggagcacgacgaccatgccgagtgcggggaggcatagcaagcatttggcaactaccggatgtgctctttctatccactttgcaaccggtataatccgaatcggaatagccaacaagctgaaatttagcaccttttgggtaaatccttttcacggccactaagtgacactccttaggagcggcttgaaaccgtgcacacatgcaaatactaaacatgatatccggcctagatgcggtaaggtaaagcaagctaccaatcatgaaacgataaagctttaaatctaccagtttacctccctcatcaaggtcgagatgcccgttggttgccataggtgtcttgataggcttcgcatcctccaagccaaacctcttgagtagatctttgatgtacttggtttggctcacgaacgtcccatccttgagttgcttgatttgaagtccaaggaagaagctcaactctccaatcatggacatctcaaattccctagacatcatatcaccaaattccttgcaaaatacctcattagtagaactgaatatgatgtcatcaacataaatttgacacacaaagaaatcatcaccaatgatttttgtaaaaagagtggtgtcaacttttccaattttgaaatcctttgacaaaagaaaatctttcaatctttcataccaagccctaggagcttgttttaaaccataaagagcttttgagagtttgtaaacatggtttggatttttaggatcttcaaaaccgggaggttgttcaacaaagacaagttcggcaatttcaccatttagaaaagcacttttcacatccatttgaaatagttttatatcaaagcatgatgcaaatgcaaaaaggatgcgaatagcctcaagtcttgccatgggggcaaaaatttcaccaaagtctaaaccttcaacttgtgtgaaaccttgcgccaccaaccttgtcttgtttctcaccaccaatccgttctcatcttgtttgtttctaaagatccactttgtccctatgacattgtggtctctaggtctttcaatcaaagtccacaccttgtttcttgcaaagttgttgagctcttcatgcatagcattcatccaatccggatcacaaagagtttcatctacatgttttggctcaagacaagaaacaaacgagtaatgttcacaaatcgaagcgacacgagatcgagtttgaacacccttactaatgtcacccaacacttggtcaattgggtgatccttggaaagagcagtgtgtattcttggaggcataggtggatcttgtgccttctcatcctccacttcaacttgagcttgacttgacgaggcggaagtagatggctcatcttgagtggaggtggatggcttgtcttctacttcaataggcttgacatctccaatatacatgttcttcatagctctcatcaagccttcatcacctttgttcttgttgtagacccggtatgccttgctatttgaggcataacctagaagaaaccctttatcacaccgactttcaaatttggttagtctaacacccttatggtaaatataacacttgcaaccaaaaactcgaaaataggcgacatttggcttcctcccaacaattagctcataggaagtctttttcaagagacgatgcaaataaagcctattgattgcatggcaagcggtgtttatggcttccgcccaaaaggaatcggaaacaccatattcatctagcatagtccttgccatctcaatcaatgtacgatttttcctttccactacaccattttgttgaggtgagtaggtagcggaaagttcgtgtttgataccaagatcatcacaatagtcctcgatattggtattcttaaattcggaaccattatcacttctaattttcacaagagtgcaactaaattcattttgggccctttttgcaaactttttgaaaagctcggcaacaatagacttatcatgcaaaaagaacaccccaagtatagcgagaataatcttcactttgctattgtctccaaatgtcactttctcttgttcattccctcctacttcaaatgtggtgaacatagccctatcaccggtcatgtgttgagtgcatccactatcaagcacccaatggctcccaccggtgcggtagttcacccaaacaagtttgggtccttggaggttagagaccaaagctttgggcacccaaatggcattctttttaccaccgagtataggggaacccacatatctagcaacaatgctaccatcatgagccttcttaagcatataatgagaatcaaacatacatgtcttaggaggcttacttccggggcaatcactcaccaaatgcccaacctcacgacacttggagcaatacttaccatttctcttgacaaaacgagtggcatggtgagaaggtttcttacccttctttggaatgaatccaagtccctccttattaaggatgcaccgttgctcactcaaaatcttgtcaagagtgttcttacccttgaagcatctctccaaactcttgttgagcttagacacttgctccttaagctcattgttctcaacaacaagtgaggcatcacaaatagaaacacacgagctagaactagagcaagggctaggcatatccataagattatcacaagaggtagaaatgctagatgatgcaacatgagcaatatggcaagtagcactatcatcaagcaaatcacaagatatgtcaacatcaatgtgagctccatgttgagtagtggaaaggaggttgtcatgagcttccttaagcttctcatgagaaatggtgagtctctcatgagtggtctttagctcctcatacaagacctctaaagaagcatgatccttctttagggccttgaacttgacaatctccttctcactataagtatggagctcctcaaacatactcacaagctcatcataggaaacatcatcacaatcatcatcactctcactatcactaagagatgttaccttagaggaaccctttgccatgagacaaagtggagcgaagagtgatggagcctccttgatggcaacaacggccatcttcttcttcttggagcttgcatcatcaccaccttcttcctcggacccggatgaggcggagctctcctcatttgagtcccattccccgatgaaagcctcaatcttcttcccttccttcttaagcttcttcatgagcttgtagcctccactcttcttcttggatgacttgtctccatcatcatccttggaagggcacttggaagcaaagtgtcccttctcaccacactcaaaacacctcaagttggagagagtcttattgggtcttctattttttctcctattggagttggagccccttcctctctcctttctccttcccaagagatcattgaaccttctagcaagaaggaccatctcttcctccaagtcctcattgacttcattcaccttgctcttgctctggtcttcaacttcggcttggagagcaatgcacttcttggagggtgaggcttcctcaatctccttcttcttcaacttgtacatgtcattggtgttgatcttccccaagaggcttgcgggtgtcattcttgacatgtcggagttgatgagcatggtgacaaaggtctcatacttctccggtagggctctaagcatcttttgggcaacctcaagatcggtgtagtttgccccaagccccttgagatcatttacaatgacattgagcctcccatacatgtcattcacactctcatgaggcaacatggagaatgtctcatattggatcttgaggaaatgaagcttggcatccttgtactcacttgtaccctcatggatctccgccaacttgttccaaatctcatatgcggtctcaaggttgctcactctatcgaactcctcttggctcaaagagttgaacaaggcattcatggcttgggcattgagttggaggttgcggtgatcaatctccgtcaagggtgtgccggtgatggcaaagcctacatccacaatactccaaatatggaagctcatagctttgaggtgagtagacattttaattttccaagtggagtagtttgtgccattaaacatgggagccttccctacatggttcacctcgttcgacat

SEQ ID NO: 23256 - DNA, 11169 bp, Oryza sativa
  Clone ID: TF_OsC359_8337
atggatgaagtcgggggtcgatggacattctccagggcaaatgaaggctacacgagctgcggcccgatggccggcagcgtcacccgtcgtggtttggacatgactggcttcgttttggagctgcgaggcatgtgcgtggtcctggggtatccacacggagaggactaccaggccaggccgcttccggatcaggagggagatgacgcggagccccacgctgggtgggaggtcaccgcagtgatcctctctggctcccccgagcggacttcgctggcagtcaccgcgggtggagactccttccccgccgcttgccagaacgccgctctcctcgccatcggcacccttcaccagcgctacccggacgagttgcagcactcgccctaccgctaccaccctcgtcgcggaggagcccgcgactacgccaccttctgggatgctagctcggaggatgacgctaccatcgtgcacctggcacgcatggtggaggcgtacgacgcggctcgtatcgacttccatcagatggtacgccgcgggatggtcgagaacaacatgaagatcctggagctgcgtcaggagaacctgcagctcaagaaggacctcgacgcagtggaggcgcagctgcaccagctcaaggtcgcccagggagagatctgccgccccaagcgtcgccgtgtttgccgcagccagaagatcaccgcccgcaagagcacctccaggcccgagcttgtccgtcagtccctggcgtggacttgcttcgtcgagacccctcgtgccgagcctgcgcccgtggttccccaggagggggaagcctccggcgttggtagctcggaggcagtagacgagcagttagtaggcttgcgcgtgtgttctttctcgtttgtcttttttggagtcgtgtggggcatggttatgccgatggtgacgaccaggagaaatgctgttaccggtgatggcaaccaacccgaaggcagcaaccccaaccaccagggcaacccacctccacctcctcctccgcctccaccaccaccaccagacaccaacgccattctcacccaaatcctcgcccagcaagccaacatgatgaatgctttcctccaccacctccaaaatccgccacaacagaatgctccaccaccacccccacaacactctaaactcgccgagttcctccgcatccgcccacctaccttctccagctccaacaaccccgtggatgctttggattggttgcatgccgtggggaaaaagctagacacggtgcagtgcagcgatgaggagaaagtcgtcttcgccgcccatcagctgcagggacctgcatctctatggtgggaccacttccaggctacgcagccagagggacagccgattacttgggctcgcttcaccgccgctttccggagaacccatgtgcccgctggagtcgtggctcttaagaaaagggaattccgagagttgaagcaaggcaaccgctccgtgatggagtatttgcatgagttcaacaacctggcccgttacgctccggaggatgtgcgggaagatgaggagaagcaagagaagttcttggcaggaatggaccctgagctgtccgtccgtctagtctctggggactatccggattttcaacgactggtggacaagagcatccgcttggaagccaagcacaaggagctggaatcgcacaagcgccgcttggcgaatttccgcaatcaacagggtgctaaccaaagggttcgctacaccaatccctatccagggggatcctcctcgcagcagcagcaacagcagcagcaacctcgcccagcgccccgacctcaattcgtggtgcgcgtcccacagccgcagcagcagcagaatcagcaagggactcgtgcgccccgtcctcctacgccaactgtgcagcccgttcaaggccgcagggacgctcaaggtcagcagcgtctgtgcttcaactgcttcgagcccgggcactttgcggataaatgcccaaagccaaggcgtcagcaaggccaagcgcctccccgctccaacaacggcgggaaggatgtcattcggggtcgtgtgaatcacgtgacggccgaggacgtgctgacaactccagacgtcatcgttggtacgttcctcgttcattccatccctgctacaattttgttcgactctggagcttcccactcgtttatatctgtgccattcgtggggaaaaatcagttgggggtagaaaggcttagaaaccctctgctcatcaccacccctggaggggttatgacagcaaagttttatagccctgccgtccctatagaaattcaggggattccttttccctcggatctgattctgctagacaccaagaacttggatgtgattcttgggatgaattggttggcacaattccaaggagtagtggattgcgcgagacgcactgttactctgtaccgagggccggaacaaccggttgttttctttgcacccccaacctctgttagaagttcagaacttcatcagatagaactgtcagaaattcccatcgtcagagagttcggagacgtgtttccggaagaactacctggtatgccgcccaagcgagagattgagttccgaatagatcttgctccaggaactactcctctgcacaagcgaccctaccgtatggcagcaaatgaactagccgaagtaaagaaacagttggaagagttgaaagaaaaggggtacatacgtccgagtacttccccatggggtgctcctgtgatttttgtagagaagaaagacaagacgaagaggatgtgcgttgactacagagctctcaatgaagtcaccatcaaaaacaagtaccctcttccccggatcgatgatttgttcgatcagcttaaaggtgccactgtattctccaagattgatctccgttccggatatcaccaattacgtattcgtgaagaagatattccgaagaccgcattcaccacgcgatacgggctgtatgaattcacggtgatgtcgttcggtttgaccaatgcacctgccttcttcatgaacttaatgaataaagtgttcatggaatacttggataagtttgttgtggttttcattgatgacattctgatatactcacaatcagaggaagaccatcagcaccatctccgtctggtgttgggaaagttgcgggaacatcaattgtatgccaagcttagcaagtgtgagttctggttgtccgaagtcaaattcttagggcacgtgatatctgctaaaggagttgctgtggatcccgaaacagtgaccgccgtcaccgattggaagcaacccaagacagttacccaagtccgcagtttcttaggtttggcaggatactatcggagattcatcgagaacttctccaaaatcgctcgacccatgacacagttgttgaagaaagaagagaaatttgtgtccagcccgcaatgcgagaaggcgttccaaactctcaaggaaaagctggtttcctcgccggtgttaatcttgccggatactcgcaaggacttcatggtgtattgtgatgcttcgcgccaaggattggggtgcgtgctcatgcaggacggtcatgtggtagcctatgcctcacgccagctacgtcctcatgaaggcaactaccctacacatgatttggagttagccgcagtagttcatgctctaaaaatctggcggcactatctcattgggaatcgctgtgaaatctataccgaccataagagtctgaaatacatcttcactcagtcggacctgaatcttcggcaaaggagatggttagaactcatcaaggactatgatgtgggaattcactatcatcctggtaaggccaacgtggttgccgacgctctaagtcgaaagggccattgcaacactcttaacgtccgtggcattccacccgaacttagtcaacagatggaagccctgaacctaaacatagttggtcgtggatttttggccgcgttggaagccaagcccaccttgctcgatcaaatccgcgaggctcagaagaatgatccggacatgcatggactcctcaagaatatgaaacagggtaaagccgctggtttcacagaggatgaacacggaaccctatggaacggaaatcgggtatgcgttccagataaccgagaacttaaacagctgatacttcaggaagctcacgaaagtccttattccatccaccctggcagtacaaagatgtacttagatttgaaggagaaatactggtgggttagcatgaagcgggaaattgcagagtttgtggccctgtgtgatgtgtgccagcgtgtcaaggcagagcaccaacgaccggccggacttctccaaccactccaagtacctgaatggaaatgggatgaaattgggatggatttcatcaccggacttccaaaaacccaaggcggatatgattctatatgggtagttgtggatcgattaaccaaggtggctcgatttattcttgtgaagaccacctatggagggaacaaactagcggagctctacttcgctaggatcgtgagtctccacggcgttcccaagaaaatcgtatctgataggggaagccaattcacctctcacttttggaagaagctccaagaagagctgggtactcgattgaatttcagcaccgcctatcacccgcagacagatggacagaccgagcgtctaaatcaaattctagaagatatgctccgcgcatgtgtactagatttcgggaagacctgggataagagtctcccctatgccgagttctcctacaataacagctatcaatccagcatacaaatggcaccatatgaagcgttgtacgggcgcaaatgccggacaccgctcctgtgggaccaagttggggaaagccaagtgttcgggactgatatcctgagagaagctgaagctaaagtcagaatcattcgggataatctaaaggtggcacagtcacggcagaaaagttatgcagataaccgtcgccgtgacctggaattcgcagtggatgattttgtgtatcttcgagtcacgccattgcgaggtgtccacaggtttcagacgaaagggaagcttgcacctcggtatgtgggtcctttccgtatcgttgctcgacgcggagaagtcgcttaccagttggagctgcccgcctccttgggcaacgtgcatgatgtgttccatgtgtcgcaactcaagaaatgccttcgagtgccatccagcagaccgactcagagcaaattgaagttcgcgaagatttgacctacgtggagaggccagtgaaaatcctggacaccatggagcgcaggaccaggaaccgggtaatccgtttttgcaaggtccagtggagcaatcacgccgaagaaaaagctacttgggagcgtgaagacgagtttctctccgccgtcgccgccgtgctccggttcgccgccgccgtcgctccggacttcctccccactcggcgtcacctccatcggcttcgccgcgttcccgtcgacctcgtccgcgcctccgtttcgctcgccgaccgccggagcaccgtcgtcctcgtcgtcccgaaccgcgccgccgccttcttccgcttcggccgccgttcccgtcgtcgccgtcgaccggggtgagccgaagaccgctccattcgcttcccccttccctcctctctctcgggtgccgctccgccgcgccggtggtcgccggcggtgaccatcggggcgcgggcgcgtccccctaccttcggccgtgccggcgaggccgccttcgggcgcgccctcgcggctgccaggtgggacccggccgtcagccgcccgagcccgcgggtgcggctgacgcgtgggacccacggcgccgaccgccgccagccgcgtgctcccggtccaccgtggaccgagaggctgacgcgtgggacccactcccgtggacccggtccgcgcgccctctccctcggctcggccatataaggaccggtcttcgggcctctgttgcaaagcactaccgtacttccaaatgtctagtggggcaaatgaaggctacacgagctgcggcccgatggccggcagcgttacccgtcgtggtttggacatgactggcttcgtcttggagctgcgaggcatgtgcgtggtcttggggtatccacatggagtggattaccaggccaggccgcttccggatcaggagggagacgacgcagagccccacgctgcgtgggaggtcacagcagtgatcctctccggctctcccgagcggacttcgctggcagtcaccgcgggcggagactccttccccgccgcttgccagaacgccgctctcctcgccatcggcacccttcaccagcgctacccggacgagttgcagcactcgccctaccgctaccaccctcgtcgcggaggagcccgcgaccacgccaccttccgagacgccagctcggaggatgacgctaccgtcgtgcatctggcacgcatggtggaggcgtacgacgcggctcgtatcgacttccaccagatggtgcgtcgtggcatggtggagaacaacctgaagatcctggagctgcgtcaggagaacctgcagctcaagaaggacctcgacgcgttggaggcgcagctgcaccagctcaagatcgcccagggagaggacagccgtcccaagcgtcgccgcgtctgccgcagccagaagatcaccgcccgcaagagcacctccaggcccgagcttgttcgtcagtccctggcgtggacctgcttcgtcgagacccctcgtgccgcacctgcgcccgtggttccccaggagggggaagcctccggcatggtgacgaccaggagaaatgttaacaccggtgaaggcaaccaacccgagggcagcaaccccaacccccaaggcaacccacctccaccaccaccaccagacaccaacgccattctcacccaaatcctcgctcagcaagccaacctgatgactgctttcctccaccacctccaaaatccgccacaacagaatgctccaccaccccctccccaacactccaaactcgccgaattcctccgcatccgcccacccaccttctctagctccaacaatcccgtagatgcgttggattggttgcatgccgtggggaagaagctagacacggtgcagtgcagcgacgaagagaaagtcatcttcgccgcccaccagctgcaggggcccgcatctctctggtgggaccacttccaggctacgcagccagaggggcagccgatcacttgggctcgcttcaccgccgctttccggagaacccatgtgcccgccggagtcgtggctctcaagaagagggaattccgagagttgaagcaaggcaaccgctccgtgatggagtatttgcacgagttcaacaacttggcccgttacgcccctgaggatgtgcgggaagatgaggagaagcaagagaagttcttggcaggaatggaccccgagctgtctgttcgtctagtctctggggactatccggattttcaacgactggtggacaagagcatccgcttggaggccaagcacaaggagctggaatcgcacaagcgccgcttggcgaacttccgcaatcagcagggtgctaaccagagggtccgctacaccaatccctatccagggggatcctcctcgcaacagcaacaacagcagcagcaacctcgcccagcgccccgacctcaattcgtggtgcgcgtcccacagccgcagcagcagaatcagcaagggactcgtgcatcccgtcctcctacgccagctgtgcagcccgttcaaggccgcagggacgcttcaggtccgcagcggctgtgcttcaactgcttcgagcccggacactttgcggataaatgcccaaagccaaggcgtcagcaaggccaagcgcctccccgctccaacaacggcgggaaggatgtcattcggggccgtgtgaatcatgtgacggccgaggacgtgctgacaactcccgacgtcaccgttggtacgttcctcgtccattccatccctgctacaattttgttcgactctggagcttcccactcgtttatatctgtgccattcgtggggaaaaatcagttgggggtagaaaggcttagaaaccctctgctcatcaccacccctggaggggttatgacagcaaagtattatagccctgccgtccctatagaaattcaggggattccttttccctcggatctgattctgctagacaccaagaacttggatgtgatccttgggatgaattggttggcccaattccaaggagtagtggattgcgcgaggcgcactgtcactctgtaccgaggaccagaacaaccggttgttttctttgcacccccaacctctgtcagaagttcagaacttcatcagatagaactgtcagaaattcccatcgtcagagagttcggagacgtgtttccggaagaactacctggtatgccgcccaagcgagagattgagttccggatagatcttgctccaggaaccactcctctgtacaagcgaccctaccgtatggcagcaaatgaactggccgaagtaaagaaacagttggaagagttgaaagaaaaggggtacatacgtccgagtacttccccatggggtgctcctgtgatttttgtagagaagaaagacaagacgaagaggatgtgcgtcgactacagagctctcaatgaagtcaccatcaaaaacaagtaccctcttccccggatcgatgatctgttcgatcaactcaaaggtgccactgtattctccaagattgatctccgttccggatatcaccaattacgtattcgtgaagaagatattccgaagaccgcattcactacgcgatatggactgtatgaattcacggtgatgtcgttcggcttgaccaatgctcctgccttcttcatgaacttaatgaacaaagcgttcatggaatacttggataagttcgttgtggttttcatcgatgacattctgatatactcacaatcagaggaagaccatcagcaccatctccgtctggtgttgggaaagttgcgggaacatcaattgtatgccaagcttagcaagtgtgagttctggttgtccgaagtcaaattcttggggcacgtgatatctgctaaaggagttgctgtggaccccgaaacagtgaccgccgtcaccgattggaagcaacccaagacagtcactcagattcgcagtttcttgggtttggcaggatactaccggaggttcatcgagaacttctccaaaatcgctcgacccatgacacagttgttgaagaaagaagagaagtttgtgtggagcccgcaatgcgagaaggcgttccaaactctcaaagaaaagctggtttcctcgccagtgttaatcttgccggatactcgcaaggatttcatggtgtattgtgatgcttcgcgccaaggattggggtgcgtgctcatgcaggacggtcatgtggtagcctatgcttcacgtcagctacgacctcatgagggcaactaccctacgcatgacttggagttagcagcggtggttcatgctctaaaaatctggcggcactatctcattgggaaccgctgtgaaatatatactgatcacaagagcttgaaatacatattcacccagtcggatctgaatcttcggcaaaggagatggttagaactcatcaaggattatgacgtgggaatacactatcaccctggtaaggctaacgtggttgccgacgctctaagtcggaagagccattgcaatactctcaacgttcgaggcattccacccgagcttaatcaacagatggaagccctgaacctaaacatagttggtcgtggattcttggctgcgttagaagccaagcccaccttgctcgatcaaatccgcgaggctcagaagaatgatccggacatgcatggactcctcaagaatatgaaacagggtaaagccgctggtttcacagaggatgaacacggaaccttatggaacggaaagcgggtatgcgttccagatagcagagaacttaaacagctgatacttcaggaagctcacgaaagtccttattccattcacccgggcagtaccaagatgtacttagacttgaaggagaaatactgcgtgtcaaggcagagcactagcgaccggctggacttctccaacctctccaagtaccagaatggaaatgggatgaaattgggatggatttcatcaccggacttccaaaaacccaaggtagctcgattcattcctgtgaagaccacctatggaggacacaagctagccgagctctacttcgctaggatcgtgagtctccatggcgttcccaagaaaatcgtatctgataggggaagccaattcacctctcacttttggaagaagctccaagaagagcttggtacccgactaaatttcagcaccgcgtatcacccgcagacagatggacagaccgagcgtctaaatcagatcttagaagatatgcttcgcgcatgtgtcctggacttcgggaagacttgggataagagtctcccctatgccgagttctcctacaataacagctatcaagccagcatacaaatggcaccttatgaagcgttgtatgggcgcaaatgccgaacaccgctattgtgggaccaagttggagaaagccaagtgttcgggactgatatcctgagagaagctgaagctaaagtcagaatcattcgggataatctaaaggtggcacagtctcggcagaaaagttatgcagataaccgtcgccgtgatctggaattcgcagtggatgattttgtgtaccttcgggtcacgccattgcgaggtgtgcacaggtttcagacaaaagggaagctcgcacctcggtatgtgggtccctttcgtatcactgctcgacgcggagaagtcgcttaccagctggagctgcccgcctccttgggcaacgtgcatgatgtgttccatgtgtcgcaactcaagaaatgtcttcgagtgccatccgagcaggccgactcagagcaaatcgaagttcgcgaagatttgacgtatgtggagaagccagtgaaaatcctggacaccatggagcgcaggaccaggaaccgggtaatccgtttttgcaaggtccagtggagcaaccacgccgaagaagaagctacttgggagcgtgaagacgagctgaaggcagcccatcccgatctcttcgccagttcttccgaatctcggggtcgagattccgtttaa

SEQ ID NO: 23257 - DNA, 2146 bp, Oryza sativa; identical to SEQ ID NO: 15065
  Clone ID: TF_OsC359_7847

SEQ ID NO: 23258 - DNA, 3211 bp, Oryza sativa
  Clone ID: TF_OsC359_8062
atggactccccagcgacccccgtgggcttatctccgccacttctcagtctggtgccccgcaatgaaccatgctatacaaaaggaaaaggagatttattgcgtcagcggctagggtttgcggtggaccgggcgcacggcggcggttcacaagaacggacggccgagatcaatccatccaaaacggacggccgagatcgattggtgcacgaccggctcacagcgaacggccccgatgacgtcggcgatgacgtcacctaccggcggcggctcgggctcacacgctcgacggcgaacggtggtgcttcagcacgaacggagggcaccagcacgtagaggacgacgcggcgaactcaccggtgaccaaaacggcggcggaagaacaacggacgacgacggcgatgaggaagaagcggcggcgctcttcggcttgacgacggcgacggtgctccggcggacaacaacgacggcgaaggggcggacgaggacgtcggcctccccgcgcgcgcgcgccgctgacaggcgggcccgcccgccactctcgctgacgggtgggacccacctgtcatccccaaccccgcgccgcgcccgccgccgcccgtgccctagcgccgccgccgccgcggattccgccgcatcccgccgtccccgcgcgcattaaagagaggggaattactccccgcgtttccctctcccgattccccctcttttccctctctctctccctcggattcgtccggattcatcccgcgaagttcgccggcgtcttcaatggcgcccgagatctccgcgcgcggtttcctctctccccggccgcgctctccccctcccgttgctataaaatcgtccctcgtgcttcgctcttccgtttccgccgctcgccgctcgctctcgccgtcggtttcgtgcccgcgccgtgctcctctctctccgccgtcgccgccgagctccgtttcgccgccgtcgtcgctccggtcctcctcccgactcggcgccacctccatcggcttcgccgagtggttgccgaccccgtccgccgctccgcttcgcccgccgaccgccggagcaccgtcgacatcggcatcccgaaccgcgccgccgcttttctccactccggccgtcgtttccgccgtcctcgttgtcccggggtgagccgtggaccgtccctctcgcttccctctcctctccgctctctcgggcgccgctccgccgcgccggtggtcgccggcggtgaccatcggggcgcgggcgcgccgctcccgtcggccgtgccggcgaggccgccttcgggcgcgccccgcggctgccaggtgggcccggccgtcagccgcccgcgcccgcgggtgcggctgacgcgtgggacccacggcgccgaccgccgccagccgcgtgctcccggtccaccgtggaccgagaggctgacgcgtgggccccacttcccgtggacccgggcaaatgaaggctacacgagctgcggcccgatggctgacaatgagaaaggcaataaggtcagaagtcaggacattggtacctcaagctcccgagtgaatgaagcaccagacaccagttgtgtggcagtggtccaacacctgattaaccagaacaaattgcttatagagatactacagcagcatcggatgccaattttgaacccgagtcagatgcaacctcaagtgcagttggaggcagtccaagcactcacaccacaagtcagcgcaccgccaacatcccagaaggcccctcatgccatgccacatgttgacccaaaagaagcaagtatcatctgttttatgtgtgatgagcaagggcactacgcaaggaactgtcctcagcagaaaagaaaagcaccaatgcgaaccgaagatgaagtccgtaagatgatcattaccagcacagaatggcctccaccaggaatgacaaaacatcagagaagaaattccttccgaggtgcacaacagttgacagagcatcttttagctaatggaggtagagtgtctgatagtgaagattcagatcaagtctcctcagatgatgaagatgagaagtctccccaaggttttaaccagaataaaatggaacgtaaggcatgctctcgttgtggagaaatcggtcatgttgccagctcgtgtgccactacctgctttcattgtgaggaagaccgtccacccggtgaatgccccatgagcaggatcacttgtttcttttgtgaaggaactgatcatgtaccaaaagattgtcaattcagttttctgctgacgaagaagatggccaaccaacccaccagttccaacggagagaagcatcaaggcaacacaaatccccgccaagattaccgtttcagcctaactccagtgccaggacagaggaatcgaaatgagaaaagaaaatgccgagtccgggaagacatctgttgcttcaattgtcaaggaatgggtcatttcgccgacaagtgcccaaaaccgagaaacatagctgccagcacgtcagtccacgcaactccctgcaatcagaagcttgctcctcagcgaattgtcatccatgcatcccaaagcagtcctatagcccgcgttgcaacagctccaactccagcgagtgcattaccacaaggtgtcaatgctcaatttcagccccagccatcagttgacaagacagaggccagtatcggcattgtacctttggatgttccagcacagcagccaagaaatcaagtacaggatgaagaacccaagcagaaacatgagataatgaatgagcttgataagtttattgagggatccatgttagggttgcaagtgctttctggaactgaagccccatcttcaagtgccgcaacccagtcgaagtcagctaaaggttcaaccagggacaagtcaggtgaagagaagattccatctatcttcttgctagcctcctcgaatctcggggacgagattcctgtaaggggggtggatttgtcacgtcgggtggggcccacctctatcggcttcgccgcatcctcgtcgacctcgtccgcgcctccgtttcgcccgccgaccgtcggagcgccgtcgtcctcgtcgtcccgaaccgcgccgccgccttcctccgcttcggccgccgttcccgtcgtcgccgtcgacccggggtgagccgaagaccgcccctttcgcttccctctcctctccgctctctcgggcgccgctccgccgtgccggtggtcgccggcggtgaccat

SEQ ID NO: 23259 - DNA, 1335 bp, Oryza sativa
  Clone ID: TF_OsC359_7548
tcattttagcacattttggtcttcaacaacattgggtccataaaggtaagtcacatgagacttaggtacccaaatggattttatgctagcatgtggtgaactaatcaccctaatagcacaaatgtcctttttggcatccctaggcaaatcataatcaaatgaggagtttggcttaggaatgttacccatgggacaattgttaccaatatgtccctttgcacggcaattgtagcaaagtcgattcttgtctttacatggtgctttcttcaccacatcttgcatcttctctgctaccttgctacttgctaccttgatattaagcttcttccttgatgacacaaagtgattcttcatgtgagggcaagatgcaacttcatgactcttctcattgcatccatagcacttcctattgcttcttcttgttctcctctttggaagtgtgacttggtcatcaatcttgttggaacatatcaaggcatagtgtcccactttcttgcacatgaagcaagtaatgagagttttgatccaactttgaatttgccccttactcttgttgttggacttattgttttcttgacaggacttggtgcaagctacggttgatcccttctcaagcttcttcaccatgttcccacggttatcttgagaaggttgagccttgtccacaagtccatgatccatgtgcttctctctttttcctacacaatccaagtcacatgtagtgctcggggaaatgtttgtgttggagcaacaagtgttagcacaagtaaaatcaacttgaacatgtggctcataagattttaccgttgcaattatcacctcatgagctatctctaccatggcatgagaatctacaaggttctcatgagacacacaaaagttcatcgtgtgtttcttgtaaatccatatactttttagtgatctcctcaaattgagatttgagctcttaattttccttctccaaagatgcttgctcatagtgtatgttgatgagatggatgatgaggtgagatcttcttggtcggaggagataatcacttgggacttgtcatgatgaggtaatgaagtagagcaattcccaaatgatgcttccacaagagtatcctctccatcacatttagacttgtcatatctttcctttagtgttatccaaatgagatgagcatctacaagtggcatgatggttttgaacacatattcactcaaagcactaaacaaaacattaatagcttgagcattgagatgtgtgcatttctcttcctcttcaaatgatagctctttatcattaggaggagaaatactcacatctacaactcgctctatatgaggacccat

SEQ ID NO: 23260 - DNA, 5800 bp, Oryza sativa
  Clone ID: TF_OsC91_2609
atggcaggtctagaggataaagatgaggagggtgcatctcattccccacgcaccaaaggcatcatccaatactttacaaggcaagtgaagcagcacacagaaggacttgatacagatttgcaggtgacaaatgagaagattggacaattggagtccacgcagatctccaccaacactaagcttacagggctggagacagcggtcgcccgcattgacactagccttgctgctcttgtgaggcattttgatgctctcaatgctggaggcaatggtgggggtaatgacgatgacattgacggagagtacgtcgaggataatttggaggatgaatatattgctgacactgaacaagatgatcgagatgctcgagatcgtcgacggctacacaacaatcgacgaggtatgggtggtcgccgccgacgcgaggtacgcaacaatgatgatgctttttctaaaattaaatttaagattcctccttttgatggaaaatatgatcctgatgcgtacctctcttgggagattgctgttgaccaaaaatttgcatgccatgagtttcctgagaacactagagttagagctgctacaagtgagttcaccgattttgcttcggtttggtggatagaacatggcaagaaaaatcctaataacatgccacaaacttgggatgctttgaaacgggtcatgcgggctagatttgttccttcttactatgcacgtgacttgctgaataggttgcaacaattgagacaggatgcgaaaagtgtagaggaatattatcaggagttacaaatgggcttgcttcgttgtaatttagaggaaactgaggacgctgccatggctagatttttgggtgggttaaaccgcgagatttatgacatcgtagactataaagattacactaatatgacccgattgtttcatcttgcttgtaaggctgaaagggaagtgcagggacgacgtgctagtgccaaggctaatttttctgcaagtaaaacttcatcatggcagacacgcaccactcctccggccggccgtactacttctccatcttccacacccacaaccagtcgagcagcacctcctccatctggtgacaagtcagcgataaaggctgctcagccagcaccgagtgcttcttcaatggcatccacaggccgaatgagagatgttcagtgccaccgttgcaagggctttgggcatgtgcagcgtgactgccctagcaagcgagttttggtagtaaaaaacgatggtgagtactcctctgctagtgatttcgatgatgatacacttgctttgcttgcggctgaccatgcagataatgagccaccggaagagcacattggggctgcatttgcggatcactatgagagcctcattgtgcagcgtgtccttagcgcacaaatggagaaggcggagcaaaatcagcgacacacgttgttccaaacaaagtgtgtcgtcaaagagcgttgttgccgcatgatcattgatggaggtagctgcaacaacttggctagcagcgagatggtggagaagcttgcacttagcaccaaaccgcacccacatccatactacatccaatggctgaacaacagtggtaaggcgaaggtaacaaaactggtgcacattaattttgcaattggaaattaccatgatgttgttgaatgtgatgttgtgcccatgcaagcttgtaatattctgctaggtagaccatggcaatttgatagggattctatgcatcatggtaggtcaaaccagtactcttttctgtaccatgataagaaaattgtgttgcatcccatgtctcctgaagatattttgcgtgatgatgttgctaaggctgccaaatccaaatgtgagagtgataaaaaagcccaatctgatggcaagaaacctgagacaatcaatttgaaacccagatgcttacttgctactaaatctgatattaatgagttgattgcatcaccttcagttgcctatgctttggtatgcaaagatgctttgatttcacttcacgatatgcagcattctttgccccctgctgttgctaacattttgcaggagtactctgatgtgtttcccaaggaagtgccaccggggctgccaccggtgcgcggcattgagcatcaaatcgacttgatcccaggtgcttccctaccgaatcgtgcgccataccgaaccaaccctgaggaaaccaaggagattcagcgtcaagttcatgaattgcttgataaagggtatgtacgcgagtctcttagtccatgtgcggttccggtaattttggtaccaaagaaagatggttcatggcgtatgtgtgttgattgtagagctattaataacattaccattcgatatcgtcatcctattcctaggttagatgatatgcttgatgaattgagtggctctattgtgttctccaaagttgatttgcgtagtggttaccaccagattcgtatgaagttgggtgatgaatggaaaacagcatttaaaacaaagtttgggttgtatgagtggttagtgatgccttttggtttaactaatgcacccagcactttcatgaggttgatgaatgaggttttgcgtcctttcattggaaaatttgtggtggtctactttgatgatatcttgatttacagcaagtctatgggtgaacattttaatcatttacgtgctgtttttaatgctcttcgtgatgcacgtttatttggtaaccttgagaagtgcaccttttgcacagatcgagtttcttttcttggctatgttgtaactccgcaggggattgaggttgatcaagccaaggttgaggcaattcagagttggccgactcctaaaacggtctcacaagtgcggagctttctaggactcgcggggttctatcgccgctttgtgcaggatttcagcaccattgctgcaccattgaatgcgcttacaaagaagggagtgcctttcacttggggcacatcacaagagaacgccttccacatgttgaaagataagttgactcatgcacctctcctccaacttcccgattttaataagacttttgaacttgaatgtgatgctagtgggattggattgggtggtgttttgctacaagaaggaaaacctgttgcatattttagtgaaaagttgagtgggcctgttcagaattattctacttatgataaggaattgtatgctcttgtgcgaactttagaaacatggcagcattatttgtggcccaaggaatttgtcatacattctgatcatgagtctttgaagcatattcgtagtcaagggaagctgaaccgtagacatgctaaatgggttgaatttattgaatcttttccttatgttatcaaacacaagaaagggaaggagaacatcattgctgatgctttatctaggagatacactttgttgacacaacttgactacaagatttttggcctggaaacaatcaaagaccaatatgcgcatgatgctgattttaatgatgtgttgctgcattgtaaggatggaagaacatggaacaaattcgtcatcaatgatgggtttgttttcagagctaacaagctatgcattccagctagctccgttcgcctgttgttgttgcaggaagcgcatggaggcggtttgatgggacattttggcgccaagaagacacatgacatccttgctagtcatttcttttggccacagatgcgaagagatgttggcaggttcgttgctcgctgcgctacatgtcaaaaggctaagtcacgcttacatccacatggtttgtatatgcctcttcctgttcctactgttccttgggaagatatttcaatggactttgtgttaggattgcctaggaccaagagggggcgtgatagcatttttgtggttgtggatagattttctaaaatggcacatttcataccatgtcataaaactgatgatgcttctcatatcgctgatttgttctttcgagaaattgttcgcttgcatggtgtgccaaacacaattgtttctgatcgtgacacaaaatttcttagccatttttggagaactttgtgggctaaattggggactaaacttttattttctactacttgtcatccccaaactgatggacaaactgaagtggtgaatagaaccttgtctactatgcttagggctgttttgaagaaaaatatcaagatgtgggaagaatgcttgcctcatattgaatttgcttataatcgttccttgcattctactacaaaaatgtgcccttttcagattgtgtatggtttgttgcctcgtgctccaattgatttgatgcctttaccatcttctgaaaaactgaattttgatgctaagcaacgtgctgagttgatgttaaaactgcatgagacaactaaagaaaacatagagcgcgtgaatgctaagtataagtttgctggtgacaaaggtagaagggaattgaattttgaacctggagatttggtttggttgcatttgcgaaaagaacgatttcctgatttgagaaagtctaaattgatgcctagagctgatggaccatttaaagtgttagcaaagattaatgagaatgcatataagattgatttgcctgcagatttcggggttagttccacatttaacgttgcagatttgaagccgtatttgggagaagaagatgagcttgagtcgaggacgactcaaatgcaagaaggggaggatgatgaggacatcaacaccatcgatacatccacgtccccccatgtacagcatgatggtcctattacccgcgctcgtgcacgtcaactaaattatcaggaacgatggagaggatccaaagggaagaggattcgcgcggggtggattcggattgcagggcagcgccaacttctgacggccgccacgacttcatgcgaactccgatttgggacgagtgccctcgtggccgggttgacgcgccccacaagttcgcggcgaccattggagacgcccaccaacagctccaccacaaacccgactacagcttgacaggtcttgttgctacagcaccgatacacctcgttccacggttgctaacttgtggtgttgctgtccccctcctgtgggcaaggtccagaggataaagatgaggagggtgcatctcattccccacgcaccaaaggcatcatccaatactttacaaggcaagtgaagcagcacacagaaggacttgatacagatttgcaggtgacaaatgagaagattggacaattggagtccacgcagatctccaccaacactaagcttacagggctggagacagcggtcgcccgcattgacactagccttgctgctcttgtgaggcattttgatgctctcaatgctggaggcaatggtgggggtaatgacgatgacattgacggagagtacgtcgaggataatttggaggatgaatatattgctgacactgaacaagatgatcgagatgctcgagatcgtcgacggctacacaacaatcgacgaggccgaatgagagatgttcagtgccaccgttgcaagggctttgggcatgtgcagcgtgactgccctagcaagcgagttttggtagtcaaaaacgatggtgagtactcctctgctattgatttcgatgatgatacacttgctttgcttgcggctgaccatgcagataatgagccaccggaagagcacattggggctgcatttgcggatcactatgagagcctcattatgcagcatgtccttagcgcacaaatggagaaggcggagcaaaatcagcgacacacgttgttccaaacaaagtgtgtcgtcaaagagcgttgttgccgcatgatcattgatggag

SEQ ID NO: 23261 - DNA, 2398 bp, Oryza sativa
  Clone ID: TF_OsC359_5828
taaaaagaaaaatccctaaaagaagtccttttccccccctcccttcttgggccggctcggcccagtccctccctctctctctcttcccccgcggcccatcggcctcccgcgcgcgcgcgccgctgacaggcgggcccgcccgccgccctcgctgacgggtgggtcccacctgtcgtcttcctcctcgcgccgcgccgccgctcgcccgtgccctagcgccgccgccgccgcggatttcgccgcatcccgccgtccccgcgcgcattaaagagggggaaaatcacccccgtgattccctctcccgtttccccctcttttccctctctctccctcggattcgttcgaatcgcgcccgcaatcctcgccggcgcaatcaatggcggccgagatctccgcgcccgtttactcccttttcggccgcgctctccccctttcggcgctatataatcgttccccgagctccgttcttccgtttccgccgcttgccgctcgctctcgccttcggattcgtgctcgcgacgttctcctctctctccgccgtcgccgccgaccttcggttagccgccgtcgtcgctccggtcttcctcccgactcggcgccacctccatcggcttcgccgcgttgtcgccgaccccgtccgccccttcgcttcgcccgccgaccgccggagctccgtcgccttcgtcgtcccgaaccgcgccgccgcgttcctccgctccggccgtcgtttccgccgtcctcgttgtcccggggtgagccgtggaccgtccctctcgcttccctctcctctccgctctctcgggcgccgctccgccgcgccggtggtcgccggcggtgaccatcggggcgcgggcgcgcgtctcccgtcggtcgagccggcgaggccgccttcggccgcctcccgcggctgccaggtggggcccggccgtcagccgcccgcgcccgcgggatgtttaacagagaaaaaggaaagaatgtcagcgggtatgcctcaagtaactcaagttttcaactcaatccaccactggcctcaagagagttaaccagggcacacccttggtccattccaagcatgccgcttagttcacagctaccattggttggaagtcaagaccaaaatcagtatgtgtttgatcgagcatttgccacccaggtcaatgagcttccaatgccagaagaggatgtccccttttgtcacgattgtagagaacaaggacactatgccctgaattgtccatgggtatatgccaaagaagccccttcctttggtttagcagggcagacatcgctaaaccagcctcctcacaccaagacaagcttgcagcctagtgtgcaaagcagagagcccaatgaagagaatccattgaatcctgggaattgctctcctcctagcctttcgtaccacgtggggtcacgtactaagcacgccaaaggcaagaagagtaagaatcagaagagaaaagcgccgatgcgaactgaagaagaagtacgtaagatgactattaccagcaccgaatggtctacagcagggataactattcctagacgtcaatgaggaaataccttccgaggtgcacgacagttgacccagcacctcctaagccatggtggcagagtatctgatagtgaagggtcagatcaagtctcctcggattatgaagatgagtcccccccacatctcggcgaggaagagatggaatcaaaagcatgcccccgttgtggagaaattggacacattgctagcatgtgtctcacactctgccctcattgtgaagaagaccatccaccaggggagtgtcccacccgcaaggtcacatgttttctatgcgaaggtacaaaccatgtgcccaaggattgccaactcagtgtgttgttgaccaagaccgcagaaatccaacgaacgaccctacgattgtctcgtcagctagtcagctccaacagcaatatcgacgatatcatccacagcaccaatgctcctcctgctgcacctgactctgagaaaagaaaatgccgagtccgggaagatatctgttgcttcaattgtcaaggaatgggtcatttcgccgacaagtgccccagaccgagaaacatagctgccagcacgtcagtccacgcaactccttgcaatcagaagcttgctcctcagcgaattgtcatccatgcatcccgaagcagtcctatagaccgcgttgcaacagctccaactccagcgagtgcattaccacaagttgtcaatgctcaatttcagccccagccatcagttgacaagacagaggccagtatcggcattgtacctttggatgttccagcacagcagccaaagaaatcaagtacaagatgaagaacccgagcgtaagaaaccgcccgccgccctcgctgacgggtgggtcccacctgt

SEQ ID NO: 23262 - DNA, 1863 bp, Oryza sativa; identical to SEQ ID NO: 14949
  Clone ID: TF_OsC359_6320

SEQ ID NO: 23263 - DNA, 9778 bp, Oryza sativa
  Clone ID: TF_OsC359_6170
atggcgatgcggcggaggcgcgcggtcgccggcgacgacaaccagcggcaggcgatgccgcgctacaagcctgagtacttgtttggtgttgagggttttgtccaggagttgcgtacgatgtcctttgtcataggatttgggactgtccttttttatgcccagattcctcatgatcgtcatgaagagaagtgccgagtcaaagtcaccttgaacagtaatagtgaagatatcccctcagtgatgttcgaagctggaggaagaaactacatccatgcatgtcaggaggtggcaaggatcgccataggagagctccgcgatcgctacagtgatcagttggccgacactgagtatcgctaccatcctcgccaaccacagggaagtgatcgtggcagctaccttgagactgagggaattgagaatgatgctaccacaaggcatttggttgagatgctgtgggctatggatgaaacccgtgcggagacagtgttagcggctcaagatcgtgaagaccggaatcgtggtaagatttgcaagttggaggacaaggtggatcgtttggagaaggaactagccgcgttgaagggagaagcaccaccgcagaaggccaggattcgtcttaccgcaaggaagagagctctatttgtccctcgttaccaattggcgctaaagatggtgaacactcgcgccagtggaagtggaaacaataacaatgaagggaacccaactcttgcccaagtcctggctcaacaggcacagcttatgaacatgatgatgcagcaactccagaaccagcagaaccaaggaaataaccatgcacctccccagaacaagttagcagaatttcttcgtgtgaggccgcctactttctctagcaccactaatcctgttgaagctggtgattggttgcatgctatagagaagaagttggatttgcttcaatgcaccgatcaggagaaggtctcatttgcatcacatcagctgcatggccctgcctctgaatggtgggatcacttccgcctgaataggactactgctgaacctatcacttggcttgaattcaccgctgctttccggaagacgcatataccatcgggagtggtgtctctcaagaagaaggaattcaggtcgctcactcaggggtctcgctctgttacggagtatctgcacgagttcaatcgtcttactcgttatgctccagaagatgtgcgcactgatgaagagcgccaggagaagttcttggaaggacttaatgatgagctttcttacccactcatgactggggattatcctgatttccagaagttggtggataaggctattcgccaggaagacaagtacaatcgcatggagcaaaagaaacgccggattgctcaattcaagacacaacagggaaataatcagaagccgcgtcttactttaggaccccagtctatgccacagggaggttcttcgtctgttgttcgtccgcagcgtcagttcttcaacaacaatgctggcaacaacatccgcaatcaagctccacgccctgttgcagtttcgacacagcaacaacctgccaagagggagcaaggcagcatgcccgtggtgtgtttcaactgtggagacccaggacattatgctgacaagtgtccgaagccccgacgcgtgaaggttgtccctgcccagagcaactctaccgcacctgcgtcaaaggcccgtgtcaatcatgttgcggctgcagaagctcaaggtgctccagatgtgattttgggtacgttccttgttaactcagtttctgcaacagtgcttttcgattctggtgctacacattcattcttatctatgagttttgcgggaaatcatgggatggaagtagaagatcttagacgtcctttgatggttagtaccccaagtaatcaagcactctctttgcaacgtagcccctctgtcagaatagaaattaaaggagtaccatttttggccaatcttatcctgttagaatccaaagaccttgatgtcatcctatggatggactggttagccagacataaaggtgtgatagactgtgctaacagaaaagtaactctcaccagcaatgatggtcgagttgtaactgttcatgcattgtcttctgagtctttaaggccaagtctaaaccaaataactttggaagagattcctatagtccgggagtatcctgatgtgttcccagatgatttacctggtatgccgcctaaaagggatatagagttcagaatagatttggtaccaggaacaactccgatccataagagaccttatagaatggcagccaatgagttggcagaagtcaagaggcaagtagatgatttgcttcagaaaggatacatcagaccgagttcatctccatggggagctccaattatttttgtggaaaagaaagaccatacccagaggatgtgtgtggactatcgtgcactaaatgatgtgactatcaagaataagtatccgctacccagaattgatgatttgtttgatcagcttaaaggtgccactgttttctccaagatagatcttcgatcagggtatcaccagttgagaattaaagaggaagatatacctaagacagcttttaccactaggtatgggttgtttgaatgtactgttatgtcttttggacttaccaatgcccccgctttcttcatgaacttgatgaataaggtgtttatggaatacctagacaagttcgtggtggtctttattgatgacattcttatctactcccgaaccaaagaagagcatgaagaacatcttcgccttgcactagagaagctacgagaacatcaactgtatgctaagtttagcaagtttgaattttggttgtctgaagtgaagttccttggtcacgtcatctcagccggaggagttgccgtcgatcctagtaatgtggaatccgtaaccaattggaaacaaccaaagacagtttcagagattcgcagtttcttaggcctcgcaggatattatcggaggtttatagagaatttttccaagattgctaagcccatgacacgattgcttcagaaagatgtgaagtacaagtggtcggaagaatgtgagcagagttttcaagagttgaagaatcgcttgatatcagctcctattttgattttgcctgatccaaagaagggtttccaagtgtattgcgatgcatccaaacttggggtaggttgtgttctgatgcaagatgggaaggtggttgcctatgcatctcgtcagttacgtccgcatgagaagaactaccctactcatgatcttgagttagctgcagtagttcatgcgttgaaaatttggcatcattatcttttcggtactcgtacagaagtatataccgatcacaagagtttaaagtatatctttactcagccggatctgaacatgagacaacggagatggttggaattaattaaggattatgacatgggaatacattatcacccgggaaaggctaatgttgtagcagacgctcttagcaggaaaggctattgcaatgctacggaaggacgacagttgccattggaattatgcaaggaatttgaaagattaaatttgggaattgtcagtagaggtttcgttgcagccttagaagcgaagcccactctaattgatcaagttagagaagcccaaattaatgatcctgatattcaagaaatcaagaagaatatgagaagaggaaaagctattggtttcttggaagatgagcaaggaactgtgtggttgggtgagagaatctgcgtccccgacaacaaagatttaaaagatgcaattctgaaagaagctcatgatactttatactccattcaccctggtagtactaaaatgtaccaggatctcaaggaaaggttttggtgggcaagtatgaagcatgaaatcgcagaatacgtagcagtatgtgatgtttgtcagcgcgtcaaggcagaacatcagaaacccgcagtcgacagacttaccaaagtggctcatttcatcccagtaaagacaacctattccggaagtcggttagcggaattgtatatggcaaggattgtgtgtttgcatggcgtccctaagaaaatagtgtctgatcgaggcagtcagtttacttcaaatttttggaagaagcttcaggaagagacagacgaacaaaccgaaagggtgaatcagattttggaagacatgttgagagcttgtgctttagacttcggtggaagttgggataagaatctaccctatgcagaattttcatacaacaacagttatcaagctagtcttcagatggctccttacgaagcactgtatggtcgaaagtgtcgcactccgcttttgtgggatcaaacgggagaacgtcaggttttcgggacggatatcctaagggaagcagaagaaaagccgtgcgccgccgccgttccagtcgtcgccgtcgctcgggaaggtcgtcatcgtggtcgccaagtcgtcgccgtcctcgtccgccccttcgccgtcgctgtagaccgccggagcaccgtcgccgccgtcgacccgatcttctccgccgcttcgacctcgacgccgtcgccgtccgttgatcttccgccgcttctttggtcaccgattccgacgtttccggagagtccgttttcgcaggagaagaatttgaagagttccaaggccagcaaggcaactcctggtttggaatggtatattcctggtttggagatagaactgtgcagccgggatggttgttcagaatggttggtcctatacaacaggatgccgcgctacaagcttgagtatttgtttggtgttgagggatttgtccaggatttgcgtacgatgtcctttgccataggatttgggactgcccctttttatgcccagattcctcatgatcgtcacgaagagaagtgccgagtcaaagtcaccttgaacagtaatagtgaagatatcccctcagtgatgttcgaagctggaggaagaaactacatccatgcatgtcaggaggtagcaaggatcgccataggagagttccgcgatcgttacagtgatcagttggccgacactgagtatcgctaccatcctcgtcaaccacagggaagtgaccgtggcagctaccttgagactgaaggaattgagaatgatgctaccacaaggcatttggttgagatgttgtgggctatggatgaaacccgtgcggagactgtgttagcagctcaagatcgggaagatcggaatcgtggtaagatttgcaagctagaagacaaggtggatcgtttagagaaggaactagccgcgttgaagggagaagcaccaccgcagaaggccaggattcgtcttaccgcaaggaagagagctctatttgtccctcgctaccaattggtgccaaagatggtgctcactcgcagcaacgggaatggccctaacaacaataacaacaacaatggagagaatcccccacttgcccaagtcctggctcaacaggcacagcttatgaacatgatgatgcagcaactccagaaccagcagaaccagggaaataaccatgcacctccccagaacaagttagcagaatttcttcgtgtgaggccgcctaccttctctagcaccactaatcctgttgaagcaggtgattggctgcatgccatagagaagaaattggatttgctccagtgcactgatcaggagaaggtctcatttgcatcacatcagctgcatggccctgcctctgaatggtgggatcacttccgccttaacaggactactgctgaacctatcacttggcttgaattcaccgctgctttccggaagacgcatataccatcgggagtggtgtctctcaagaagagggaattcaggtcgctcactcaggggtctcgctctgttacggagtatctgcactagttcaatcgtctggctcgttatgctccggaagatgtacgcactgatgaagagcgtcaggagaagttcttggaaggacttaatgatgagctttcttatccactcatgactggagattatcctgatttccagaagttagtagataaggctattcgccaggaggacaagtacaaccgcatggagcaaaagaaacgccggattgctcaattcaagacacaacaggggaataatcagaggccgcgtcttactttaggaccccagtccatgccacagggaggttcttcgtctgttgttcatccgcagcgtcagttcttcaacaacaatgctggcaacaacatccgcaatcaagctccacgccctgttgcagttttgacacagcaacaacctgccaagaaggagcaaggcagcaagcccgtagtgtgtttcaactgtggagaaccaggacattacgctgacaagtgtccgaagccccgacgcatgaaggttgtccctgcccagagcaactctactgtaccagcatcaaaggcccgtgtcaatcatgttgcggctgcagaagctcaagatgctccagatgtgattttgggtacgtttcttgttaacttagttcctgcaacagtgcttttcgattctggtgctacacattcattcttatctatgagttttgcgggaaatcatgggatggaagtagaagatcttagacgtcctttgatggttagtaccccaagtaatcaagcactctctatgcaacgtagcccctctgtcagaatagaaattcaaggagtaccatttctggccaatcttatcctgttagaatccaaagaccttgatgtcatcctagggatggactggttagccaggcataagggtgtgatagactgtgccaacagaaaagtaactctcaccagcaatgatggtcgagttgtaactgttcatgcattgtcttctgagtctttaaggtcaagactgaaccaaataactttggaagagattcctgtagtccgggagtatcctgatgtgttcctagatgatttacctggtattcctcctaaaagggatatagaattcagaatagatttggtaccaggaacaactccgatccataagagaccttatagaatggcagccaatgagttggcagaagttaagaggcaagtagacgatttgcttcagaaaggatacatcagaccgagttcatctccatggggagctccggttatttttgtggaaaagaaagatcatacccagaggatgtgtgtggactatcgtgcactaaatgatgtgactatcaagaataagtatctgctgcccagaattgatgatttgtttgatcagcttaaaggtgccaccgttttctccaagatagatcttcgatcagggtatcatcaattgagaatcaaagaggaagatatacctaagacagcttttaccactaggtatggattgttcgaatgtactgttatgtcttttggacttaccaatgcccccgctttcttcatgaacttgatgaataaggtgtttatggaatacctagacaagttcgtggtggtctttattgatgacattcttatctactcccgaaccaaagaagagcatgaagaacatcttcgccttgcactagagaagctacgagaacatcaactgtatgctaagtttagtaagtgtgaattttggttgtctgaagtgaagttccttggtcacgttatctcagcaggaggagttgccgtcgatcctagtaatgtggaatccgtaaccaactggaaacaaccaaagacagtttcagagattcgcagtttcctaggcctcgcaggatattatcagaggtttatagagaatttttccaagattgctaagcccatgacacgactgcttcagaaagatgtgaagtacaagtggtcagaagcatgtgagcagagttttcaagaattgaagaatcacttaatatcagctcctattttgattttacctgatccaaagaagggtttccaagtgtattgcgatgcatccaaacttgggttaggttgtgttctgatgcaagatgggaaggtggttgcctatgcatctcgtcagttacgtccgcatgaaaagaactaccctactcatgatcttgagttagctgcagtagttcatgcgttgaagatttggcgtcattatcttttcggcactcgtacagaggtgtataccgatcacaagagtttaaagtatatctttactcagccggatctgaacatgagacaaaggagatggttggaattaattaaggattatgacatgggaattcattaccacccgggaaaggctaatgttgtagcagacgctcttagcaggaaaggctattgcaatgctacggaaggacgacagttgccattggaattatacaaggaatttgaaagattaaatttgggaattgtcagtagaggtttcgttgcagccttagaagcgaagcccactctaattgatcaagttagagaagcccaaattaatgatcctgatattcaagaaatcaaaaagaatatgagaagaggaaaagctatcggtttcttggaggatgagcaaggaactgtatggttgggcgagagaatctgtgtccccgacaacaaagatttaaaagatgcaattctgaaagaagcccatgatactttatactccattcaccctggtagtactaagatgtaccaggatctcaaggaaagattttggtgggcaagtatgaagcgtgaaatcgcagaatacgtagcagtatgtgatgtttgtcagcgagtcaaggcagaacatcagaaactcgccggtttgttgcagcctttgaagattcctgaatggaaatgggaggaaatcggtatggatttcattactggtttacccagaacgtcatcaggccatgactctatttgggtgatagtcgacagacttaccaaagtggctcatttcattccggtaaagacaacatattctggaagtcgattggcggaattgtatatggccaggattgtgtgtttgcatggcgtccctaagaaaatagtgtctgatcgaggcagtcagtttacttcaaatttttggaagaagcttcaggaagagatgggttctaagctgaactttagtactgcttatcatccgcagacagacggacaaactgaaagggtaaatcaaattttggaagacatgttgagagcttgtgctttagatttcagtggaagttgggataagaatctaccttatgcagaattttcatacaacaacagttatcaagctagtgttcagatggctccttacaaagcactatatggtcggaaatgccgcactccgcttttgtgggatcaaacgggagaacgtcaggttttcgggacggatatcctgagggaagcagaagaaaaggtgaaaatcattcaagaaagattacgtgtggcccagtctcgtcataagagttatgccgacaatcgtcgtagggatctaagttttgacgaaggagattatgtgtaccttcgtgtcacgccttttcgaggagttcatcgttttcacaccaaaggaaaattggcaccgcgtttttgtgggaccttataagattatcagtagaagaggagaggttgcttatcagttggaattacctcaatctttggcaggagtccataatgtgttccatgtgtcacaattgaaaaagtgattaagggtacctaccgaagaagctaatcttgaacagatagaagtccaagaggatctgacctatgttgagaaaccaatccgtattttggaaatagatgagagaagaaccagaaatcgagttatccgtttttgcaaagttcaatggagtaatcactcggaagaagaatcaactggggaacgagaagatgaattgaagtcagctcatccgcatctgttcgccggttcttccgaatctcgaggacgagattctgtt

SEQ ID NO: 23264 - DNA, 2706 bp, Oryza sativa
  Clone ID: TF_OsC359_7815
gtcgtcctcccgtcgttcccggtcgtcgtcgtcgtcgtcctcccgtcgttccgggtcgtcgtggcgttcgtccctccgtaaagccgatcgcgttcgccgcccgtggttcatcaagcgagccgctccagccccgtcatcttcgtcctcgcctccgtgtcgccaagcgttgcgccggccgcgtctcgcccgtgtactggtgtcggtagtcgttcgcttgtgcgtgtagtgtccgtgttagtgtgcccgctcggtagccgcgtggtttccacgtgtgcagcccgtgtggtgtctagtggagtccatttgtcgaccgcttgcctcggttgacacacgggatccgcttccttcgacccgtggaacgtctctgtgtactcggttttctttttatgtattgttattgcttctttataggcttgtagctttgcttgtgtgcttcgcgtagcttctgtcgttccgaaggttctcgaagcgtggttcgcggtcgtcgccgaaggttcagaaggccgttctctctcccccctctattcaaaactcccaaaatggttttaggctgggctcgaggtgcagggttttgctagtagcacctcggccactataaggaccggttttcgggcctctgttgcaaagcactaccgtactaaccacatgtctaatgggtaaggcttaactcggtgctcagtctagtcctgaacaaaaggacacggatagagatggatgaagtcgttgcgacgatggatatctctgaggcaaatgaaggctacgcgagctgtggctcggtaatcgagatgtctaggcaaatgaaggctacacgggtcggtgcccgggctcaatcctggcctgcctgtcccgggataccggccgtaggcagggttggatcggtacttttgttcacggctaggatgggtaaagggttatgtcacgttttttatgatgggttccaattgcaatggaatgcagagtaaaggcgtgtcttgtgggttggcctgggttggcttgggacgagctgggacccaggtcgggttgccagttcggtccgaatcatcgtaggccttgggttaaggcagtactaggtggtcagctttgcgaagaagaagatgtcgtcaattgtctgccgaagctccgcaagactgttggatctgctagcgaagcgagggaagcagtgaagccagatgtgaagcaggagaaaaagtgtagctctgttaaggtcctatccttagtttctgatctgtctctcccctttgtttttcctctctccctctccaaaacctgcaacagatggcggataatgagaaaggcaataaggtcagaagtcaggaaatgggtacctcaagctcccgagtgaatgaagcaccagacaccaattgtgtggcagtggtccaacacttgattaaccagaacaaattgcttatagagatactacagcagcatcggatgccaattctgaacccgagtcagatgcaacctcaggcgcagttggaggcaatccaagcactcacaccacaagtcagcgcaccgccaacatcccagaaggcccctcatgccatgtcacatgttgactcaaaagaagcaagtatcattggttttatgtgtgatgaacaagggcactatgcaaggaactgtcctcagcagaaaagaaaagcaccaatgcgaaccgaagatgaagtccgtaagatgatcattaccagtacagaatggcctccaccaggaatgacaaaacgtcagagaagaaattccttccgaggtgcaccatagttgacagagcatcttttagctaatggaggtagagtgtctgatagtgaagattcagatcaagtctcctcagatgatgaagatgagaagtctccccaagggttcaaccagaataaaatggaacataaggcatgctctcattgtggagaaatcggtcatgttgccagctcatgtgccactacctgctttcattgtaaggaagaccatccacccggcgagtgccccatgagcaggatcacttgtttcttgtgtgaaggaactgatcatgtaccaaaagattgtcaactcagttttctgctgacgaagaagatggccaaccaacatgcccgttctaatggagagaagcatcaaggcaacaccaatcctcgccaagattacagtttcagcctaactccagtgccaggacagaggaatcaaaatgagaaaagaaaatactgagtccggaaagatatctgttgcttcaattgtcaagaaatgtgtcatttcactgacaagtgcccaaaaccgagaaacatagctaccagcacgtcagtccacgcaactccccacaatcagaagcttgctcctcagcgaattgtcatccatgcatcccgaagcattcctatagcccgcgttgcaacagctccaactccagtgattgcactaccacaaggtgtcaatgctcaatttcagccccagccaccagttgacaagacagaggccagtatttgcgttgtacctttggatgttccagcacagcagccaagaaatcaagtacaagatgaagaacccgagcgtaaaaaagttatagtctatttcaactgtagagaagaagggcattactcgagggactgtcccctaccaaggcaaaatcagcccccacattttcgccaatttacaggaagcagacataccaatcgccaagtggtcactggagcaaatgcagtacctgttaagcctagtgctagtcaaaagcaa

SEQ ID NO: 23265 - DNA, 2781 bp, Oryza sativa
  Clone ID: TF_OsC359_8038
atggacgaagtcgggggtcgatggacatctctaggacaaatgaaggctacacgagctgcggcccggtagtcgagatgtcatggcacagggctggtgtcctgctgctaggggctcaatcctgcctacctgtcccggaggttccggccgtaggtggggttgggtcggtactcttgtctatggctaggatgggttggaaactatgtcacgtcttccgtccgtataccgtggtggtattttgctcaataactaaaatgtcgaatggttagcctgggttggcttgggacgagctgggacccagggtcgggttgccagttcggtcttgatcatcgtaggccttgggttaaggcagtactagatggtcaggtcagtgaagaagaagacatcgtcagttgtttgccgaagctccggaagactgcaggatccgctagcgaagtggaggaagcagtgaagccagctgtgaagcaggacaaaagacttagatctgttaaggtcctatccttagtttctaatctgtctctcccctttgttttccctctcttcctctccaaacctttgcaacagatggctgacaatgagaaaggcaataaggtcagaagtcaggacattggtacctcgagctcccgagtgaatgaagcaccagacaccagttgtgtgacactggtccaacacctgattaaccagaaccgattgcttatagagatactacagcagcatcagacgccaattctgaacctgagtcagatacaacctcaagtgcagttggaggcagtccaagcactcacaccacaagtcagcatgccgccagcatcccgaaggacccatggtgacgtgccacatgttgactcaaaagaagcaagtatcatttgttttatgtgtgatgagcaagggcactatgcaagggagtgtcctcagcagaaaagaaaaacaccaatgcgaaccgaagatgaagtccgaatgacaaaacgtcagagaagaaataccttccgaggtgcaccacagttgacagagcatcttttagctaatggaggtagagtgtctgatagtgaagattcagatcaagtctcctcagatgatgaagatgagatggaacgtaaggcatgctctcgttgtggagaaatcggtcatgttgccagctcgtgtgccactacatgcgttcattgtgaggaagaccatccacccgacaggtgtccaacgagcaggatcacttgtttcttttgtgaaggaactgatcatgtaccaaaagattgtcaattcagtttgctgctgacgaagaagatggccaaccaacccgccagttccaacggagagaagcatcaaggcaacacaaatcctcgccaagattacagtttcagcctaactccagtgccaggacagaggaatcaaaatgagaaaagaaaatgccgagtccgggaagatatatgttgcttcaattgtcaaggaatgggtcatttcgccgacaagtacccaaaaccgagagacatagctgccagcacgtcagtccacgcaactccctgcaatcagaagcttgctcctcagcgaattgtcatccatgcatcccgaagcagtcctatagcccgcgttgcaacagctccaactccagcgagtgcattaccacaaggtgtcaatgctcaatttcagccccagccaccagttgacaagacagaggccagtatcggcattttacctttggatgttccagcacagcagccaagaaatcaagtacaagatgaagaacccaagccaatgggaatgatcacagtgcaactactcctagaggaatatgaagattttgagaaacttgtggacaaagccatacaactcgaaagtgagcataatcggatgaagaactgtaagagaaggattgtcagcatcccagtattcccatgtggtaaccaaagacagcgcacggagccacttcagatcaccggatcttctgttgcgcatcaagagtttccgccccaagaagatggacacaatgcagacaacaacattagcaatactaatgatgatgataccaccaacaaccatgcttcttgccccattagtgaccactcaaatcaagcgtgcaatgtcaacatcattcaccaaggtgtcgacgatagtatcaatgatggcacccaaaatgacaaccctagcaattgtgactctgagaaagactccaatggtgatagcaactatggtaccactgatgccaatgttagcaaggatttccaaccaccaattccaactccaagtcagaatgatcgtccccagacggatagctcagcaaagaagacgttgatttgctacaattgcaaaggaccagggcattactcgagggactgcctgcaaccaaggcaaagtcgatctccacattaccgccaatttacacgaagcagacatcccaatcgtattgtggtcactggagcaaacgccgtacccgtttcactgaaaggcagcaagccaaaggatctcatcgtccccagaagcgtccgcaatccacattaaagaataccacctgttagaggttgacgccaaagatatgaatgataagaagttctagaaccgaagccccatcctcaaccaccgcagcctagtctgggtcagttagaagttcaaccagggacaagtcgggtgaagagaagattccatctgcaacaggagatcgagccaagcgttccagagtggagaagtcctgttaggcaagttggttatagaagacggagcggaagaagtcagacaagaagagaagactgcccaacctatcttcatgctagcctgctcgaatctcggggaccagat

SEQ ID NO: 23266 - DNA, 4825 bp, Oryza sativa
  Clone ID: TF_OsC1458_2
atggcgctgcgcctcgctgccgtaccagagagcgccgccgccgacctgagcgccgccgccaataccctgccgtgcatctcctaccgcgactcgatccggagcgtcgccgccgtcgtctccggcggccgagggcctctcttccagtccgaagattccgcctccacctggtcgtcttcctcctacgcgtccgactgctccggccactcctccggcgtctccgccgccgcggccgctggcttcagggcactcacggcgcacgagctcagggaggtcgcgcgtcgcatggtcgccgacggctacgcccagcgcatggtccaagcgttcgacgacgcggcgacggtcgaggtcctcgagggggagatgttagccgattgtaggttagatgacgatattgccaaagattatgaggcgcgagcggctgtgcgggaagcgcgcgcggcgcgtgaggaagcagaggcgcggctgcaggtagccacgagggcggcacgtctcgtggcagcagaagctgaagcagcacgcaccgcggaggccgccaggcaggctgcagctgctgctgctactttgcgagctgaggaggaggaggagcgacgtgacctggagctgacagacgcggcccgcgtgcgacgcgacgcggaccgggatcgacacataggccgacgtgatcgcgacttcagcccccatcgcagaggatcagatctccaccgcggtgaggaggagcggcgcgatccatggcgcgatcctcgaatcaaccgcgctctggagacccagcgactccgggagcaggcagcggcgattgaggcacaactggacttcgaccgggagcagggtggacgagacgttggcgcacggagccctcgcaggcagcgcgcctccccttccccggaccggcgccgtggtcgccgtggacgctccggctctcctcccgttgtgcagatcgtcgtcaaggatgttggcggcgcatggcccatgctcaccaagactaactacgccgagtgggcgatggtgatgaaggtgaagttgcaggcgcgccacatgtgggacgcggttcgatacggcgacgtcgactacggggaagatcggcgggcgttggagcggttggcgcagctcggcgacaccaccatcgatgaggagagagccgtggagaagctcctttgcgtcgtccccgagaagtacacgcagctggctctgtcgatcgagacgctgctggacttcaccgagctcacgaacgaagaggtgacaggtcgcctcaaggccgtcgacaaccgcaagcagctacctccctcagagccgatcaccattggtggcaagcttttcttcaccaaggagaagtggctcgcccgccaacaagagcggaagaagggggaggccacaagctcttcggcttcgggatcgtcgagcagccgcaagcgtcgaccacgcaagtgggagaaggcgcgtagtggcgctcttggcggcgccgatggcgagcgcaagggcagccgcaacgacacctgccacaactgcgggaagaccggccactgggccaaggactgccggcaggcgaagcacggcggtcaagcacacgtcgctcaagcgcaggagggtgatgaggtggctctgtttttcgtacacggaagcatcgagccacacttcactcccacaccggacgctaccgcgcccctccacctcgacgagctgtgggcccacgtcttcctcagcaacggatcctgcgacgacaagatcgacgggtggtgcctcgacactggtgccactcaccacatgaccgggcgacgggaattcttctccaagcttgactccagtgttcaaggctccgtcaagtttgaggacgcctcagccgtggagatcaagggcgtcggctccatcctcttcaccaccaagaccggcgagcaccggctgctcaccggtgtctactacatccccgcgctgaggaactccatcatcagtttgggacaactggatgagaacggcttgctcgtggagatagaggacggggtcttgcgggtttgggatcgccatcgtcgccttctcgtcaaggtgaacaggggtgccaaccgcctctatgttctccatgtacaggtggcgcagcccgtgtgccttgcagcccgccgcgacgatgatgcatggcggtggcacgagcgctttgggcacctcaacttcgaggccttgaagcagctcagcaacaaggagatggtgcagggcatgccacgagtcgagcacgtggagcagttttgcgacacctgcgtcctcaccaagcagcggcgactcccctttccccgccaagcaagtttctgcgccaaggagaagttggagctcgtgcacggcgacctctgcggtcccgtgactccggccacacctggaggccggcgcttcttcctgctgctcgtcgacgacgtgtcctgctacatgtgggtggtcctgctcgactccaaggcagtggctgcagacgccatcaagcaccatcaagttgctgcggagaaggagtgcggccgcaagcttcgggtgctacacaccgacaacggtggcgagttcacgacggctgagttcgcagcgtactgcgccgacgagaggatccagcgccacttctccgcgccatacaccccgcagcagaacggcgttgtggagcgccgcaaccagacagtggtggccactgcccgcgccctcctcaagcaaagagggatgccggcaatctactggggggaggcggtgatgactgccgtccatctcctcaaccgctcgcccaccaaggcccttgatggcaagacgtcgtacgaggcctggcacgggcgcaagccggtggtgagccacctccgcgtctttggctgtctcgccttcgccaaggagctcaaccacgtcggcaagctcaacgaccggagctcgccgggagtcttcatcggctatgcggagggtgtcaaggcctaccgcatcctcgacccttcgacgcagcacgtccgcatttctcgggacgtcgtgttcgacgaagggcgaggttgggcttcgtacaaggcggtggacgacggctcgacttcgactctcagagacttcgtcgtcgactacgtccactttagggcagccgggggagctagcagctcatcttcaccgagctcgtccacctcggcacccggctcgccatcagctccggcgagtcctctaccacctacaccaccagcaactcctccatcaccagctacgccccgctctcctacaccggcgcccacaccaccggtggagttcgccactccgttgtccaacgacgaggatcgtgttgatgcgtaccacgacgacgagcctctgcgctaccgcaccatggacaacatcttcggtgatcagcccgtccctggactggagacgcgcgacttcgaggccgagttgcacctggcgcatgaggacggcgagccctgctccttcgcagaggcgaatggagatgtggcatggcgcactgcgatgcagcacgagatggacgcggtcgagcggaactggacgtgggtgttggcagatcttcctgccagccaccgcgccatcacccttaagtgggtctacaagctcaagaaggatgaggccggggcggtgatcaagcacaaggcacgtctagtggcgcgcggcttcgttcagcaggagggagtcgactttgacgacgccttcgcgcccgttgcgcgaatggagtctgttcgtctgctcctcgcgctggcagcccaggaaggatggcgtgtgcaccacatggatgtcaagtccgccttcctcaacggagacctgaaggaggaggtctacgtccaccagccgccgggattcgtcatccccggcaaggagaacaaggttctccgcctgcgcaaggccctctacggcttgcggcaggccctctacgccaagctggactccactctcaagcaaatggggttccagcagaactctcacgaagctgctgtctaccagcggggcaaggacggcaatgccctgttggtaggcgtctacgtcgacgacttggtgatcaccggcaccaaggaggctgaggtggaggcgtttaaggaggagatgaaggcgactttccagatgagcgatttgggccttctctctttctacctggggatcgaggtccaccaggacagctctggcatctcccttcgccaaaccgcctacgccaagtgcatcgtcgagttgggcgggctcaccggctgcaacccagcctacactcccatggaggaaaggttgaagctgagccgcgacagcacggctgagggaggtcgacgccacgcagtaccggcatattgtgggcagccttcgctacctcgtccacacgcggccagacttggcatttgctgttggctatgtcagccggttcatgcagcgaccgacgacagagcaccagcaggctgtcacgtcgagggcaccaccgactacggctttcactacccgaggtgtcccgtgcctgatcagctggcagtcggtcaagcaacaagtggtggccctgtctagttgcgaggcagagtacatcgctaccacaaccgcctcaactcaagctctctggttggctcggctgctgggtgatctcttgggcagaaacactgaagcagtggagctcaggatggacagcaagtccgctttggccttggcaaagaatcccgtcttccatgagcgcagcaagcacatccgcatcaagtatcatttcattcggagctgcttggaggaggggagcatcaaggccagctacattaacacccaggatcagctcgccgatcttctcaccaagtcccttgggcgggtcaagttccaggagtttcgcgccaggattggaatggttcaaattccccaaaaggcgccacacatgacttag

SEQ ID NO: 23267 - DNA, 1671 bp, Oryza sativa; identical to SEQ ID NO: 15037
  Clone ID: TF_OsC1528_1632

SEQ ID NO: 23268 - DNA, 5808 bp, Oryza sativa; identical to SEQ ID NO: 15020
  Clone ID: TF_OsC1528_1674

SEQ ID NO: 23269 - DNA, 3657 bp, Oryza sativa; identical to SEQ ID NO: 15031
  Clone ID: TF_OsC1528_1689

SEQ ID NO: 23270 - DNA, 4326 bp, Oryza sativa; identical to SEQ ID NO: 14952
  Clone ID: TF_OsC1528_1718

SEQ ID NO: 23271 - DNA, 4230 bp, Oryza sativa; identical to SEQ ID NO: 15016
  Clone ID: TF_OsC1528_1730

SEQ ID NO: 23272 - DNA, 3924 bp, Oryza sativa
  Clone ID: TF_OsC1528_1831
atggctggttttgccgatgcactgaggccggataaattaaccggtgtgcattttaagagatggcaaatcagggtcactctgtggctgacagctatgaaatgcttctgggtgagtactggcaaacctgaaggagttcttactgctgaacagcagaagcaattcgaggaagccactactctctttgtgggatgcattcttagcgttcttggcgatcgtctggtcgaggtgtatatgcatatgaccgacgctaaggagttgtgggatgcactgaatactaaattcggtgctactgatgctagcaatgatctgtatattatggagcagtttcatgactacaagatggctgacaaccgttctgtagtcgaacaggctcatgagatacaaaccatggctagggaactcgaactccttaagtgtgtcttacccgacaaatttgtggccgggtgcattattgcaaaactacctccatcttggagaagtttcggtactgcactcaaacacaagagacaggaatactccgttgaggggttgatagcgtctcttgatgttgaggagaaagctcgggaaaaagatgccgcgtctaagggcgatggtgggcagtccagtgccaatgttgtgcacaaggcccagaacaagagcaaggggaaatacaaagctcagcagaccaccaacttcaagaagcagaagaagaacaacaacaatcctaatcagaatgagaggacttgctttgtgtgtggccaagttggtcatctggctaggaagtgtccacagcgcaaggggatgaaggcacctgcagggcagacttctaagtctgctaatgtgaccattggcaacactggacatggaagcgggtatggtaatttacctactgttttttcagttaatcaatctactaattggtgggttgatactggggccaatgtacatgtttgtgctgacatttcattgttttcttcttatcaggtcgcacggggttccaccgtcctaatagggaatgggtcacatgcttctgttcatggtgttggcacggtagatctgaagtttacttcgggaaagatcgtgcagctgaagaacatgcagcatgtcccttctatcgacaggaatcttgttagtggctcccgtctgactagagacggatttaagttggtttttgagtctaataaagtagtcgtgtctaaacatgtatattttattggtaaaggttatgagtgcggaggcctgttccgtttttccctttctgatttctgcaataagtctgtgaaccatatttgtggcagtgtggatgatgaggctaatgtttggcattcacgtttatgtcatattaattttggcttgatgtctcggctttccagcatgtgtttaattcctaagttttccattgtcaaaggttctaagtgccatagttgtgtgcaatcgaagcaacctcgcaagcctcacaaggctgccgaggagagaaacttggcaccactagaactcctacattcagatctttgtgaaatgaatggggtgttgacgaagggtggaaaacgatatttcatgacattgattgatgatgctactagattttgctacgtgtacttgttgaaaacgaaagacgaggctctagactattttaaaatttataaggcagaagttgaaaatcaacttgacagaaagataaaaaggcttagatctgatcgtggtggagagtttttctcgaacgagtttgacttattctgtgaggaacatggcatcatacatgagaggacgcctccctattctcccgagtctaatgggattgctgaaaggaagaaccgcacactgactgacttggtgaatgccatgttggacaccgcgggactgcctaaggcatggtggggggaggcattgttgacctcaaatcatgtgttaaacatagttcctaacagaaataaggacaaaacaccatatgagatatggattggtaaaaaaccaccactttcttatttgcgcacatgggggtgcttggcgaaagtcaatgtaccaataacgaagaagcgcaaacttggacctaagactgtggactgtgtttttctgggatatgctcatcatagcattgcctatagatttttaatagttaaatccgaggtaccggacatgcatgttggtacaattatggagtctcgtgattctatcttctttgagagctttttcccaatgaaggatacacatagtggttcgaaccaaccctctgaaataattcccagtccaatcacaccaccagaacaaactgaacatacacatgaacttgtctctgaggaggatgtcagtgaagctcctcgaaggagtaagagacaaaggacggctaagtcttttgatgatgatttcactgtgtaccttgtggatgacactcctaagtcaatttcagaagcatatgcatctcctgatgcagactactggaaggaggctgtccgtagtgaaatggattccattatcgctaacggaacttgggaggtgacagagcgaccctatgggtgtaaacctgtggggtgcaagtgggtgttcaagaagaagcttaggcctgacggtactattgaaaagtacaaggctcggcttgttgctaagggctatactcagaaagaaggcgaatatttctttgacacttactcacctgttgctagattgaccacaattcgtgtgctactttccctagcagcctcacatggtcttctcgttcatcaaatggacgttaagacagcttttcttaatggagagctggatgaggagatctatatggatcaacctgatgggtttgtagttgaaggtcaagaaggcaaagtgtgcaaattgttgaagtctttgtatggtctgaaacaagctcctaagcaatggcatgagaaatttgacaaaacattgacatctgcaggctttgcagtcaatgaggcagataaatgtgtgtactatcgccatggtgggggtgagggagttattttgtgcttgtatgttgacgacatactgatatttgggacaaaccttgaggtgataaatgaggttaaatcattcttgtctcaaaattttgatatgaaggatttgggagtagctgatgttatcttaaacattaagctaattagaggtgagaatgggattacactcttgcagtcccattatgtggagaagatcttgaatcgttttggctacattgatagtaagccttctccaacaccttatgatcctagcttgttgcttcgcaagaacaagagaattgctaggaatcaactggaatactcccaaatcattggctcgttgatgtacctggctagtgcaactaggcctgatatctcctttgctgtgagcaagttgagccgatttacctctaatccgggagatgatcactggcgtgcgcttgagcgagtaatgcgctatctgaaaggtactgtggaattggggcttcactatactgggtatcctgcggtactggagggttatagtgattctaactggatctctgatgtggatgagatcaaagccactagtggatatgtcttcacactaggtggtggtgctgtttcgtggaggtcttccaaacagaccattttgacgaggtcaaccatggaagcagagctgacggcattggatactgctactgttgaggcagaatggatgcgtgatctattaatggatctgcctattgttgaaaaaccaacatgtgaaaagacgattgaagtctgtcaggaaattgagaaacttcggagttataacgttggattacatccaaacagctaaaaacctggcagatcccttcacgaagggactatcacgaaatgtgatagacaatgcatcgaaggagatgggtttgagacccatagcattcttgaaagaactcacctttgtgagcttgactgttggtcgcagtctatggagattttgggtgaatcttctaggaagcttactaaagacctaggagta

SEQ ID NO: 23273 - DNA, 4486 bp, Oryza sativa
  Clone ID: TF_OsC1528_1835
tcagccctcctcttcttcctcctctccccatctccctctctcttcaactctctcccctctcctctctcgcgacgcgcgcgacggcagaggctcggctccggcggctatggacggaagaggtagggggcggcgggaggtggacctagctgcggcgaccggcggagaggaactgggcgtcagcagcggaagcggagtctcgaaggctggcccccaggcgatgcggaatcgacagcgggagctgcgggaagacggcagccgctgtggccgcccgcgcatggaggagaggtgggagccagagagcgcgagctcctcctcttccgcgacgccaccggcctcaatgctcgatctcaccctcctcgcggcgttagagctccgtctaatattcttgtcgagatccggccagagtagcaccaagcccacgaggccaagctggccatcgtcccgccacagctcgatgagacgatggtgctcctcgattggtgagctcgagccggcggccagatgcagagcggaagaggacgcagagcacgtgctacgacaagtccgcccggcggccggctgtgtccggtgttctgtgttcatgtgcgctcctccatgggggaagccgccccgatctaatgatgcgttcatgctagttttcatctgtaatgtcatgatttatttatggaataaattaaatccttatatgcccataatctcaacaatccaaaaaccttattataggcactgtgattttactatggctggttttgccgatgcactgaggccggataaattcaccggtgtgcattttaagagatggcagatcagggtcactctgtggctgacagctatgaaatgcttctgggtgagtactggcaaacctgaaggagttcttactgctgaacagcagaagcaattcgaggaagccactactctctttgtgggatgcattcttagcgttcttggtgatcgtctggtcgaggtgtatatgcatatgaccgacgctaaggagttgtgggatgcactgaatactaaattcggtgctactgatgctagcaatgatctgtatatcatggagcagtttcatgactacaaaatggctgacaaccgttctgtagtcgaacaggctcatgagatacaaaccatggctaaggaactcgaactccttaagtgtgtcttacccaacaaatttgtggccgggtgcattattgcaaaacttcctccatcttggaggagtttcggtactgcactcaaacacaagagacaggaatactccgttgaggggttgattgcgtctcttgatgttgaggagaaagctcgggaaaaagatgccgcgtctaagggcgatggtgggcagtccagtgccaatgttgtgcacaaggcccagaacaagagcaaggggaaatacaaagctcagcagaccaccaacttcaagaagcagaagaagaacaacaacaatcctaatcaggatgagaggacttgctttgtgtgtggccaagttggtcatctggctaggaagtgtccacaacgcaaggggatgaaggcacctgcagggcagacttctaagtctgctaatgtgaccattggcaacactggagatggaagcgggtatggtaatttacctactgttttttcagttaatcaatctactaattggtgggttgatactggggccaatgtcgcacggggttccaccgtcctaatggggaatgggtcacatgcttctgttcatggtgttggcacggtagatctgaagtttacttcgggaaagatcgtgcagctgaagaacgtgcagcatgtcccttctatcgacaggaatcttgttagtggctcccgtctgactagagacggatttaagttggtttttgagtctaataaagtagtcgtgtctaaacatggatattttattggtaaaggttatgagtgcggaggcctgttccgcttttccctttctgatttctgcaataagtctgtgaaccatatttgtggcagtgtggatgatgaggctaatgtttggcattcacgtttatgtcatattaattttggcttgatgtctcggctttccagcatgtgtttaattcctaagttttccattgtcaaaggttctaagtgccatagttgtgtgcaatcgaagcaacctcgcaagcctcacaaggctgccgaggagagaaacttggcaccactagaactcctacattcagatctttgtgaaatgaatggggtgttgacgaagggtggaaaacgatatttcatgacattgattgatgatgctactagattttgctatgtgtacttgttgaaaacgaaagacgaggctctagactattttaaaatttataaggcagaagttgaaaatcaacttgacagaaagataaaaaggcttaggtctgatcgtggtggagagtttttctcgaacgagtttgacttattctgtgaggaacatggcatcatacatgagaggacgcctccctattctcccgagtctaatgggattgctgaaaggaagaaccgcacactgactgacttggtgaatgccatgttggacaccgcgggactgcctaaggcatggtggggggaggcattgttgacctcaaatcatgtgttaaacagagttcctaacagaaataaggacaaaacaccatatgagatatggattggtagaaaaccatcactttcttatttgcgcacatgggggtgcttggcgaaagtcaatgtaccaataacgaagaagcgcaaacttggacctaagactgtggactgtgtttttctgggatatgctcatcatagcattgcctatagatttttaatagttaaatccgaggatgtcagtgaagctcctcgaaggagtaagagacaaaggacggctaagtcttttggtgatgacttcactgtgtacctcgtggatgacactcctaagtcaatttcagaagcatatgcatctcctgatgcagactactggaaggaggctgtccgtagtgaaatggattccattatcgctaacgggacttgggaggtgacagagcgaccctatgggtgtaaacctgtggggtgcaagtgggtgttcaagaagaagcttaggcctgacggtactattgaaaagtacaaggctcggcttgttgctaagggctatactcagaaagaagacgaagatttctttgacacttactcacctgttgctagattgaccacaattcgtgtgctactttccctagcagcctcacatggtcttctcgttcatcaaatggacgttaagacagtttttcttaatggagagctggatgaggagatctatatggatcaacctgatgggtttgtagttgaaggtcaagaaggcaaagtgtgcaaattgttgaagtctttgtatggtctgaaacaagctcctaagcaatggcatgagaaatttgacaaaacattgacatctgcaggctttgcagtcaatgaggcagataaatgtgtgtactatcgccatggtgggggtgagggagttattttgtgcttgtatgttgacgacatactgatatttgggacaaaccttgaggtgataaatgaggttaaatcattcttgtctcaaaattttgatatgaaagatttgggagtagctgatgttatcttaaacattaagctaattagaggtgagaatgggattactctcttgcagtcccattatgtggagaagatcttgaatcgctttggctacattgatagtaagccttctccaacaccttatgatcctagcttgttgcttcgcaagaacaagagaattgctaggaatcaactggaatactcccaaatcattggctcgttgatgtacctggctagtgcaactaggcctgatatctcctttgctgtgagcaagttgagccgatttacttctaatccgggagatgatcactggcgtgcgcttgagcgagtaatgcgctatctgaaaggtactgtggaattgggacttcactatactgggtatcctgcggtactggagggttatagtgattctaactggatctctgatgtggatgagatcaaagccactagtggatatgttttcacactgggtggtggtgctgtttcatggaggtcttgcaaacagacaattttgacgaggtcaaccatggaagcagagctaacggcactggatactgctactgttgaggcagaatggctgcgtgatctattaatggatctgcctgttgttgaaaaaccggtgccggctatccttatgaactgtgacaatcaaacgacatgtgaaaagacgattgaagtctgtcaggaaattaagaaactccggagttataacgttggattacatccaaacagcgagaaacctggcagatcccttcacgaagggactatcacgaaatgtgatagacaatgcatcgaaggagatgggtttgagacccatagcattcttgaaggaactcacctttgtgagcttgactgttggtcgcagtctatgaagattttgggtgaatcttctaggaagcttactaaagacctaggagtatga

SEQ ID NO: 23274 - DNA, 5433 bp, Oryza sativa; identical to SEQ ID NO: 14986
  Clone ID: TF_OsC1528_1869

SEQ ID NO: 23275 - DNA, 4662 bp, Oryza sativa
  Clone ID: TF_OsC1528_2006
atctaatctcctctctctcaactaagcctgcggcacggggcaacctcgccggagaagacgacggaccgaggctacgagctacgtagccgagggccggctacccgagggcctgacgcccttgacaacctggtatcacgttccagacgatcctcgccgcgccgcgccgtctccccaccacccgccacatcctcgccaccaccagccgccgcgccaccatcctcggactcgtcctccggcgcgtcctgcccacccggcatgggtgaccccaatgacctcaagacctccgtggaggctctcaccaccgccatgaaggagatgcaggcctcgatcgccgccaacgccaaggccattgccgccctctcctccggccgcacctcatcctcgggcgccacgacagactccggcgaaccccgcaccgtccggccgccgcgatttcagaaaatggatttcccgcgctatgatgggaagtccgatccgctcaccttcctcaattggtgtgagtcgtacttccaccaacaacggatcatggacgaagagaaggtttggatggcgtcctacaaccttgaagatggtgcacagctatggtacatgcaagtccaggcggatgagggtaaaccgtcgtggcgtcgcttccgggaactcctcgtcctacggtacgggccgccactccgttcggctcccctcttcgagttagccgactgccgccgcactaccaccgtggaggactaccaggaccacttccaagcgctcctgccccgcgccggccgcctgacgaaggcacaacgggttcagctcttcaccggcggtctgcttcctccgctcagtctcaaggtccagatgcagaatccgcagtccctcgtcaccgccatgagtttggctcggcagttcgagctgatggagcagtgcactgccaccctggccaaagcccctggccacgggatactgccgacgctgggtccgcgccaggccccgccccagccgccggcgcctagggccgcatcgccccctgtcctcatcgacggtcgcccggtgaagcggctctctcaggcggagcaggacgagcgtcgccgcctcgggctatgctttaactactactccatcccgctcgccggcgtgcaccagcgatcaggagagcaggtctccggaacctctgcctttgacgtcctgcaccgggagaaggcggcaataaggcactgtgattttactatggctggttttgctgatgcactgaggccggataaattcaccggtgtgcattttaagagatggcagatcagggtcactctgtggctgacagctatgaaatgcttctgggtgagtactggcaaacctgaaggaattcttactgctgaacagcagaagcaattcgaggaagccactactctctttgtgggatgcattcttagcgttcttggcgatcgtctggtcgaggtgtatatgcatatgaccgacgctaaggagttgtgggatgcactgaatactaaattcggtgctactgatgctagcaatgatctgtatatcatggagcagtttcatgactacaaaatggctgacaaccgttctgtagtcgaacaggctcaagagatacaaaccatggctaaggaactcgaactccttaagtgtgtcttacccgacaaatttgtggccgggtgcattattgcaaaactacctccatcttggaggagtttcggtactgcactcaaacacaagagacaggaatactccgttgaggggttgattgcgtctcttgatgttgaggagaaagctcgggaaaaagatgccgcgtctaagggcgatggtgggcagtccagtgccaatgttgtgcacaaggcccagaacaagagcaaggggaaatacaaagctcagcagaccaccaacttcaagaagcagaagaagaacaacaacaatcctaatcaggatgagaggacttgctttgtgtgtggccaagttggtcatctggctaggaagtgtccacaacgcaaggggatgaaggcacctgcagggcagacttctaagtctgctaatgtgaccattggcaacactggagatggaagcgggtatggtaatttacctactgtcgcacggggttccaccgtcctaatggggaatgggtcacatgcttctgttcatggtgttggcacggtagatctgaagtttacttcgggaaagatcgtgcagctgaagaacgtgcagcatgtcccttctatcgacaggaatcttgttagtggctcccgtctgactagagacggatttaagttggtttttgagtctaataaagtagtcgtgtctaaacatggatattttattggtaaaggttatgagtgcggaggcctgttccgcttttccctttctgatttctgcaataacatgtgtttaattcctaagttttccattgtcaaaggttctaagtgccatagttgtgtgcaatcgaagcaacctcgcaagcctcacaaggctgccgaggagagaaacttggcaccactagaactcctacattcagatctttgtgaaatgaatggggtgttgacgaaggaagttgaaaatcaacttgacagaaagataaaaaggcttaggtctgatcgtggtggagagtttttctcgaacgagtttgacttattctgtgaggaacatggcatcatacatgagaggacacctccctattctcccgagtctaatgggattgctgaaaggaagaaccgcacactgactgacttggtgaatgccatgttggacaccgcgggactgcctaaggcatgtgaagctcctcgaaggagtaagagacaaaggacggctaagtcttttggtgatgatttcactgtgtacctcgtggatgacactcctaagtcaatttcagaagcatatgcatctcctgatgcagactactggaaggaggctgtccatagtgaaatggattccattatcgctaacgggacttgggaggtgacagagcgaccctatgggtgtaaacctgtggggtgcaagtgggtgttcaagaagaagcttaggcctgacgcctcacatggtcttctcgttcatcaaatggacgttaagacagcttttcttaatggagagctggatgaggagatctatatggatcaacctgatgggtttgtagttgaagtcaatgaggcagataaatgtgtgtactatcgccatggtgggggtgagggagttattttgtgcttgtatgttgacgacatactgatatttgggacaaaccttgaggtgataaatgagtcccattatgtggagaagatcttgaatcgctttggctatattgatagtaagccttctccaacaccttatgatcctagcttgttgcttcgcaagaacaagagaattgctaggaatcaactggaatactcccaaatcattggctcgttgatgtacctggctagtgcaactaggcctgatatctcctttgctgtgagcaagttgagccgatttacttctaatccgggagatgatcactggcgtgcgcttgagcgagtaatgcgctatctgaaaggtactgtggaattgtggcttcactatactgggtatcctgcggtactggagggttatagtgattctaactggatctctgatgtggatgagatcaaagccactagtggatatgttttcacactgggtggtggtgctgtttcatggagcaaagatgttgtcctgcagagcattcttgaaggaactcacctttgtgagcttgactgttggtcgcagtctatgaagattttggactactccatcccgctcgccggcgtgcaccagcgatcgggagagcaggtctccggaacctctgcctttgacgtcctgcaccgggagaaggcggcaataagccgtggccataacaaaatctgcaagcacttgttcctcttggactgcgctatggatgacgacgacgacaccgacgcggctgaggaaccgcaggacttggagtccccggtgttctccctccacgcgatcgccggcgtaccggtcgccgacaccatgcaggtacaggtgaccgtcggcgccaccaccctcaccgctctcctcgacagcggctccacccacagcttcattgccgaggaggcagcgtgccgcacgggtctgccggtccagccacgcccacgcatgacggcgactgtggccaatggcgagaaggtcgcatgtcctggcgtcatccgacaggccgtgctctccatcgacggctcgctcttcaccgtcgatctctttgtcattccacttgcaggttacgacatggtgctcggcacccagtggatggcgtctctggggccgattgtttgggacttcacggagcggacgatgtccttccagtaccacggccgcaccatctgctgggcaggcgtgccgtcgtctcctgcaccacgcatccgagtcacaacagcggccagcgagtcgctactcgatgagctcctagccgacttcggcgacgtcttcgccgagcccaaggggctgcccctgcagcatgctcgagatcacaccatcgtcctcaagccggacgcgccccctgtcgctgttcgtccgtaccggtacccggcggcccataaggatgaactggaacggcagtgcgccgctatgatcgagcagggcatcgtccgccgtagcgactcggcgttctcttcaccagtccttctcattaagaaggctgacgggtcgtga

SEQ ID NO: 23276 - DNA, 4299 bp, Oryza sativa; identical to SEQ ID NO: 15028
  Clone ID: TF_OsC1528_2011

SEQ ID NO: 23277 - DNA, 4071 bp, Oryza sativa
  Clone ID: TF_OsC1528_2060
atggctggttttgccgatgcactgaggccggataaattcaccggtgtgcattttaagagatggcagatcagggtcactctgtggctgacagctatgaaatgcttctgggtgagtactggcaaacctgaaggagttcttactgctgaacagcagaagcaattcgaggaagccactactctctttgtgggatgcattcttagcgttcttggcgatcgtctggtcgaggtgtatatgcatatgaccgacgctaaggagttgtgggatgcactgaatactaaattcggtgctactgatgctagcaatgatctgtatatcatggagcagtttcatgactacaagatggctgacaaccgttctgtagtcgaacaggctcatgagatacaaaccatggctaaggaactcgaactccttaagtgtgtcttacccgacaaatttgtggctgggtgcattattgcgaaactacctccatcttggagaagtttcggtactgcactcaaacacaagagacaggaatactccgttgaggggttgatagcgtctcttgatgttgaggagaaagctcgggaaaaagatgccgcgtctaagggcgatggtgggcagtccagcgccaatgttgtgcacaaggcccagaacaagagcaaggggaaatacaaagctcagcagaccaccaacttcaagaagcagaagaagaacaacaacaatcctaatcaggatgagaggacttgctttgtgtgtggccaagttggtcatctggctaggaagtgtccacagcgcaaggggatgaaggcacctgcagggcagacttctaagtctgctaatgtgaccattggcaacactggagatggaagcgggtatggtaatttacctactgttttttcagttaatcaatctactaattggtgggttgatactggggccaatgtacatgtttgtgctgacatctcattgttttcttcttatcaggtcgcacggggttccaccgtcctaatggggaatgggtcacatgcttctgttcatggtgttggcacggtagatctgaagtttacttcgggaaagatcgtgcagctgaagaacgtgcagcatgtcccttctatcgacaggaatcttgttagtggctcccgtctgactagagacggatttaagttggtttttgagtctaataaagtagtcgtgtctaaacatggatattttattggtaaaggttatgagtgcggaggcctgttccgcttttccctttctgatttctgcaataagtctgtgaaccatatttgtggcagtgtggatgatgaggctaatgtttggcattcacgtttatgtcatattaattttggcttgatgtctcggctttccagcatgtgtttaattcctaagttttccattgtcaaaggttctaagtgccatagttgtgtgcaatcgaagcaacctcgcaagcctcacaaggctgccgaggagagaaacttggcaccactagaactcctacattcagatctttgtgaaatgaatggggtgttgacgaagggtggaaaacgatatttcatgacattcattgatgatgctactagattttgctatgtgtacttgttgaaaacgaaagacgaggctctagactattttaaaatttataaggcagaagttgaaaatcaacttgacagaaagataaaaaggcttaggtctgatcgtggtggagagtttttctcgaacgagtttgacttattctgtgaggaacatggcatcatacatgagaggacgcctccctattctcccgagtctaatgggattgctgaaaggaagaaccgcacactgactgacttggtgaatgccatgttagacaccgcgggactgcctaaggcatggtggggggaggcattgttgacctcaaatcatgtgttaaacagagttcctaacagaaataaggacaaaacaccatatgagatatggattggtagaaaaccatcactttcttatttgcgcacatgggggtgcttggcgaaagtcaatgtaccaataacgaagaagcgcaaacttggacctaagactgtggactgtgtctttctgggatatgctcatcatagcattgcctatagatttttaatagttaaatccgaggtactggacatgcatgttggtacaattatggagtctcgtgatgctaccttctttgagagctttttcccaatgaaggatacacatagtggttcgaaccaaccctctgaaataattcccagttcaatcacaccaccagaacaaactgaacatacacatgaacttgtctctgaggaggatgtcagtgaagctcctcgaaggagtaagagacaaaggacggctaagtcttttggtgatgatttcactgtgtacctcgtggatgacactcctaagtcaatttcagaagcatatgcatctcctgatgcagactactggaaggaggctgtccgtagtgaaatggattccattatcgctaacgggacttgggaggtgacagagcgaccctatgggtgtaaacctgtggggtgcaagtgggtgttcaagaagaagcttaggcctgacggtactattgaaaagtacaaggctcggcttgttgctaagggctatactcagaaagaaggcgaagatttctttgacacttactcacctgttgctagattgaccacaattcgtgtgctactttccctagcagcctcacatggtcttctcgttcatcaaatggacgttaagacagcttttcttaatggagagctggatgaggagatctatatggatcaacctgatgggtttgtagttgaaggtcaagaaggcaaagtgtgcaaattgttgaagtctttgtatggtctgaaacaagctcctaagcaatggcatgagaaatttgacaaaacattgacatctgcaggctttgcagtcaatgaggcagataaatgtgtgtactatcgccatggtgggggtgagggagttattttgtgcttgtatgttgacgacatactgatatttgggacaaaccttgaggtgataaatgaggttaaatcattcttgtctcaaaattttgatatgaaggatttgggagtagctgatgttatcttaaacattaagctaattagaggtgagaatgggattacactcttgcagtcccattatgtggagaagatcttgaatcgctttggctacattgatagtaagccttctccaacaccttatgatcctagcttgttgcttcgcaagaacaagagaattgctaggaatcaactggaatactcccaaatcattggctcgttgatgtacctggctagtgcaactaggcctgatatctcctttgctgtgagcaagttgagccgatttacctctaatccgggagatgatcactggcgtgcgcttgagcgagtaatgcgctatctgaaaggtactgtggaattggggcttcactatactgggtatcctgcggtactggagggttatagtgattctaactggatctctgatgtggatgagatcaaagccactagtggatatgttttcacactgggtggtggtgctgtttcatggaggtcttgcaaacagaccattttgacgaggtcaaccatggaagcagagctaacggcactggatactgctactgttgaggcagaatggctgcgtgatctattaatggatctgcctgttgttgaaaaaccggtgccggctatccttatgaactgtgacaatcaaacgacatgtgaaaagacgattgaagtctgtcaggaaattaagaaactccggagttataacgttggattacatccaaacagcgagaaacctggcagatcccttcacgaagggactatcacgaaatgtgatagacaatgcatcgaaggagatgggtttgagacccatattcaaaatggatactatagcattagtttggtggaaacaacaatagaaccaaacaaggttggttatgatctttgtgttggaatcacgagcctgggttacacgcagaaagacatgtattctcaaaaggttacaacatgtgttgtttttacttttggctccaccacttctcctatagcaaaaattccaccaccatttgtggaatcaaggcaatga

SEQ ID NO: 23278 - DNA, 3846 bp, Oryza sativa
  Clone ID: TF_OsC1528_2066
atggctggttttgccgatgcactgaggccggataaattcaccggtgtgcattttaagagatggcagatcagggtcactctgtggctgacagctatgaaatgcttctgggtgagtactggcaaacctgaaggagttcttactgctgaacagcagaagcaattcgaggaagccactactctctttgtgggatgcattcttagcgttcttggcgatcgtctggtcgaggtgtatatgcatatgaccgacgctaaggagttgtgggatgcactgaatactaaattcggtgctactgatgctagcaatgatctgtatatcatggagcagtttcatgactacaaaatggctgacaaccgttctgtagtcgaacaggctcatgagatacaaaccatggctaaggaactcgaactccttaagtgtgtcttacccgacaaatttgtggccgggtgcattattgcaaaactacctccatcttggaggagtttcggtactgcactcaaacacaagagacaggaatactccgttgaggggttgattgcgtctcttgatgttgaggagaaagctcgggaaaaagatgccgcgtctaagggcgatggtgggcagtctagtgccaatattgtgcacaaggcccagaacaagagcaaggggaaatacaaagctcagcagaccaccaacttcaagaagcagaagaagaacaacaacaatcctaatcaggatgagaggacttgctttgtgtgtggccaagttggtcatctggctaggaagtgtccacagcgcaaggggatgaaggcacctgcagggcagacttctaagtctgctaatgtgaccattggcaacactggagatggaagcgggtatggtaatttacctactgttttttcagttaatcaatctactaattggtgggttgatactggggccaatgtacatgtttgtgctgacatctcattgttttcttcttatcaggtcgcacggggttccaccgtcctaatggggaatgggtcacatgcttctgttcatggtgttggcacggtagatctgaagtttacttcgggaaagatcgtgcagctgaagaacgtgcagcatgtcccttctatcaacaggaatcttgttagtggctcccgtctgactagagacggatttaagttggtttttgagtctaataaagtagtcgtgtctaaacatggatattttattggtaaaggttatgagtgcggaggcctgttccgcttttccctttctgatttctgcaataagtctgtgaaccatatttgtggcagtgtggatgatgaggctaatgtttggcattcacgtttatgtcatattaattttggcttgatgtctcggctttccagcatgtgtttaattcctaagttttccattgtcaaaggttctaagtgccatagttgtgtgcaatcgaagcaacctcgcaagcctcacaaggctgccgaggagagaaacttggcaccactagaactcctacattcagatctttgtgaaatgaatggggtgttgacgaagggtggaaaacgatatttcatgacattgattgatgatgctactagattttgctatgtgtacttgttgaaaacgaaagacgaggctctagactattttaaaatttataaggcagaagttgaaaatcaacttgacagaaagataaaaaggcttaggtctgatcgtggtggagagtttttctcgaacgagtttgacttattctgtgaggaacatggcatcatacatgagaggacgcctccctattctcccgagtctaatgggattgctgaaaggaagaaccgcacactgactgacttggtgaatgccatgttggacaccgcgggactgcctaaggcatggtggggggaggcattgttgacctcaaatcatgtgttaaacagagttcctaacagaaataaggacaaaacaccatatgagatatggattggtagaaaaccatcactttcttatttgcgcacatgggggtgcttggcgaaagtcaatgtaccaataacgaagaagcgcaaacttggacctaagactgtagactgtgtttttctgggatatgctcatcatagcattgcctatagatttttaatagttaaatccgaggtaccggacatgcatgttggtacaattatggagtctcgtgatgctaccttctttgagagctttttcccaatgaaggatacacatagtggttcgaaccaaccctctgaaataattcccagttcaatcacaccaccagaacaaactgaacatacacatgaacttgtctctgaggaggatgtcagtgaagctcctcgaaggagtaagagacaaaggacggctaagtcttttggtgatgatttcactgtgtacctcgtggatgacactcctaagtcaatttcagaagcatatgcatctcctgatgcagactactggaaggaggctgtccgtagtgaaatggattccattatcgctaacgggacttgggaggtgacagagcaaccctatgggtgtaaacctgtggggtgcaagtgggtgttcaagaagaagcttaggcctgacggtactattgaaaagtacaaggctcggcttgttgctaagggctatactcagaaagaaggcgaagatttctttgacacttactcacctgttgctagattgaccacaattcgtgtgctactttccctagcagcctcacatggtcttctcgttcatcaaatggacgttaagacagcttttcttaatggagagctggatgaggagatctatatggatcaacctgatggctttgcagtcaatgaggcagataaatgtatgtactatcgccatggtgggggtgagggagttattttgtgcttgtatgttgacgacatactgatatttgggacaaaccttgaggtgataaatgaggttaaatcattcttgtctcaaaattttgatatgaaagatttgggagtagctgatgttatcttaaacattaagctaattagaggtgagaatgggattacactcttgcagtcccattatgtggagaagatcttgaatcgctttggctacattgatagtaagccttctccaacaccttatgatcctagcttgttgcttcgcaagaacaagagaattgctaggaatcaactggaatactcccaaatcattggctcgttgatgtacctggctagtgcaactaggcctgatatctcctttgctgtgagcaagttgagccgatttacttctaatccgggagatgatcactggcgtgcgcttgagcgagtaatgcgctatctgaaaggtactgtggaattggggcttcactatactgggtatcctgtggtactggagggttatagtgattctaactggatctctgatgtggatgagatcaaagccactagtggatatgttttcacactggttggtggtgctgtttcatggaggtcttgcaaacagacaattttgacgaggtcaaccatggaagcagagctaacggcactggatactgctactgttgaggcagaatggctgcgtgatctattaatggatctgcctgttgttgaaaaaccggtgccggctatccttatgaactgtgacaatcaaacgacatgtgaaaagacgattgaagtctatcaggaaattaagaaactccggagttataacgttggattacatccaaacagcgagaaacctggcagatcccttcacgaagggactatcacgaaatgtgatagacaatgcatcgaaggagatgggtttgagacccatagcattcttgaaggaactcacctttgtgagcttgactgttggtcacagtctatgaagattttgggtgaatcttctaggaagcttactaaagacctaggagtatga

SEQ ID NO: 23279 - DNA, 4674 bp, Oryza sativa
  Clone ID: TF_OsC1528_2076
tcagcttattacaagcttatgaatagtcgatattgccctttgcatgatttgttctacttcttcgattgcttgggcatcggctgcatctgtgcttgggatcggtttcacagtcttatttagttcggctaagtgcttgattgaagacttcagcttgggtttttgttcttcgatggctcttggcagatcggcaagcttatgttcttctaaagctagttcagcattacatgcttcaagttcagccagcaattcaatttttctgtttttcagccgatctatgttagattggataggattgggtccagagatcattgcatcaagcttagctttttcttcaataatggattgccgattggattgaatggtggcttcaagatcttttctttccctcctatcggctatcctttgtcttgctctctccagtttgtgccgatattgctcaaggaagactgctggagagatgatctcaaaccttgccctgattagaccacagtccgcaactagagcatccaaagaactttcaagctgatgagctatatccttaagtgtggttttcaagtcatcggctagaggagcttgtgttttgctggttgtttcttcctcttcatccataaactgcatgatgtcaaatgaaaacatatcagctaaggcaggaatggcaggaatcggctggtcttcaatttggtggctacctctagccgatggcgtatgtttacttgattcatgttggattggagttggagaccgaatccgatatcctctctttctctcttcctcttcttcctcagcaatgtcgacggcggcggcgtccgagactagcagcgcgagcgcgtggtgggcggcccttgacagcgtcccgtgcgcggagcgacgcatcggccaacgccgccacgggcaacagccgccgccaagcacgcgagtgtcctgctgctgggccgaggcggcggcggtggcggagcaggcggggttgagatggtcgagcgcgcatgaggcagggagcgggagcgggagcgcccgtggaggcggggagcgggagcgacaagcggccacgggcaacaagcagatccacgacgagcgagtgagcgacaaggccgacacgcgattgacgacgaggatgacgagatggcgaagagcggcggggaactggcagctgccgaactcgacggtgtacgccctcgcgaagttggcgccgctcgtcgccagcctcttcttgtcgttcagctcctgcacgatcaatcaatcgatagatggatcagctcatcgaagcaactactccatcccgctcgccggcgtgcaccagcgatcgggagagcaggtctccggaacctctgcctttaacgtcctgcaccgggagaaggcggcaataaggcactgtgattttactatggctggttttgccgatgcactgaggccggataaattcaccggtgtgcattttaagagatggcagatcagggtcactctgtggctgacagctatgaaatgcttctgggtgagtactggcaaacctgaaggagttcttactgctgaacagcagaagcaattcgaggaagccactactctctttgtgggatgcattcttagcgttcttggcgatcgtctggtcgaggtgtatatgcatatgaccgacgctaaggagttgtgggatgcactgaatactaaattcggtgctactgatgctagcaatgatctgtatatcatagagcagtttcatgactacaagatggctgacaaccgttctgtaatcgaacaggctcatgagatacaaaccatggctaaggaactcgaactccgtaagtgtgtcttacccgacaaatttgtggctgggtgcattattgcgaaactaccttcatcttggagaagtttcggtactgcactcaaacacaagagacaggaatactccgttgaggggttgatagcgtctcttgatgttgaggagaaagctcgggaaaaagatgccgcgtctaagggcgatggtggacagtccagtgccaatgttgtgcacaaggcccagaacaagagcaaggggaaatacaaagctcagcagaccaccaacttcaagaagcagaagaagaacaacaacaatcctaatcaggatgagaggacttgctttgtgtgtggccaagttggtcatctggctaggaagtgtccacaacgcaaggggatgaaggcacctgcagggcagacttctaagtctgctaatgtgaccattggcaacactggagatggaagcgggtatggtaatttacctactgtcgcacggggttccaccgtcctaatggggaatgggtcacaagcttctgttcatggtgttggcacggtagatctgaagtttacttcgggaaagatcgtgcagctgaagaacgtgcagcatgtcccttctatcgacaggaatcttgttagtggctcccgtctgactagagacggatttaagttggtttttgagtctaataaagtagtcgtgtctaaacatggatattttattggtaaaggttatgagtgcggaggcctgttccgcttttccctttctgatttctgcaataagtctgtgaaccatatttgtggcagtgtggatgatgaggctaatgtttggcattcacactactggaaggaggctgtccgtagtgaaatggattccattatcgctaacgggacttgggaggtgacagagcgaccctatgggtgtaaacctgtggggtgcaagtgggtgttcaagaagaagcttaggcctgatggctttgcggtcaatgaggcagataaatgtgtgtactatcgccatggtgggggtgagggagttattttgtgcttgtatgttgacgacatactgatatttggaacaaaccttgaggtgataaatgagtcccattatgtggagaagatcttgaatcgctttggctacattgatagtaagccttctccaacaccttatgatcctagcttgttgcttcgcaagaacaagagaattgctaggaatcaactggaatactcccaaatcattggctcgttgatgtacctggctagtgcaactaggcctgatatctcctttgctgtgagcaagttgagccgatttacctctaatccgggagatgatcactggcgtgcgcttgagcgagtaatgcgctatctgaaaggtactgtggaattggggcttcactatactgggtatcctgcggtactggagggttatagtgattctaactggatctctgatgtggatgagatcaaagccactagtggatatgttttcacactgggtggtggtgctgtttcatggaggtcttgcaaacagaccattttgacgaggtcaaccatggaagcagagctaacggcactggatactgctactgttgaggcagaatggctgcgtgatctattaatggatctgcctgttgttgaaaaaccggtgccggctatccttatgaactgtgacaatcaaacggaaattaagaaactccggagttataacgttggattacatccaaacagcgagaaacctggcagatcccttcacgaagggactatcacgaaatgtgataaacaatgcatcgaaggagatgggtttgagacccatgtctccggaacctctgcctttgacgtcctgcaccgggagaaggcggcaataaggtactcgtcgaacacgccggccctggcctgcccggccttgcgcagcggcggaggcggcgatcacggcggcgagacccagcagcgcggcgcgcctgccgccgccctgctcagcttgggcggtgccgcgacgtgcacgcgcttcggcagcgccggcgagccggccgactgcggcaccgccgcggcgggcttgaggccgacaaggctgttgttcactccggccatggctcgattgagctgcgtgcaagcggctgtcaccacctgccgcctacctctgacaaatccgtgggatacacaacaaacaaagctatgggaattgtccaaaacaccctcaaccgtcattgggaaggcatcagcaacgtacacgtggagggccaggatgagggatgcagatctttgtgaagacactcactggcaataccataaggttgagtcctctgacacgattgacaatgtcaaggccaagattcaggacaaggagggtattccacctgaccagcagcgcctcatctttgcgggcaagcaacttgaggacggacgcaccctcgcagattacaacattcagaaagagtccaccctccaccttgtccttcgcctcaggggaggaatgcagatctttgtgaagaccttgacaagaaagacccatcactttggagcgtctttatctttgctggcaagcagcttgaggatggacaaggagggcatccccccggaccagcagcgcctcatcttcgccggcaagcagctcaaggacggacgcaccctggctgactacaatatccagaaggagtctacccttcacctagtgctcaggctcaggggtggaatgcaaatctttgtcaagacattgaccggcaaaaccattaccttggaggttgagtcgtcggacacaattgacaacgtgaaagcaaagattcaggacaaggagggcattcccccggatcagcagcgactgatctttgctggcaagcagctcgaggatggccgcaccttagcaggttacaacatccagaaggagtccaccttgcacctggcgctccgtctccgtggtggcct

SEQ ID NO: 23280 - DNA, 3099 bp, Oryza sativa; identical to SEQ ID NO: 14991
  Clone ID: TF_OsC1528_2095

SEQ ID NO: 23281 - DNA, 2655 bp, Oryza sativa; identical to SEQ ID NO: 14964
  Clone ID: TF_OsC1528_2104

SEQ ID NO: 23282 - DNA, 3458 bp, Oryza sativa
  Clone ID: TF_OsC1528_2131
atgttattgaaaaaattattgctgtctccatctccaatgcagcaatgatatctacaaagaagaggattcctcggacgccacccgccagggaaagggcaccgctggctgggggggcgccgaccgccaaggggagggcgccgcccctcgggggaaaggcgccgctggcctggtggaggatgccacgtctgaggcaccgggcgccgtcggccgggaggtcgccctggctgaggggtaggaagagcggtgccgccgactactccatcccgctcgccggcgtgcaccggcgattgggagagcaggtctccggaacctctgccttcgacgttctgcaccgggagaaggcggcaataaggcactgtgattttactatggctggttttgccgatgcactgaggccggataaattcaccggtgtgcattttaagagatggcagatcagggtcactctgtggctgacagctatgaaatgcttctgggtgagtactggcaaacctgaaggagttcttactgctgaacagcagaagcaattcgaggaagccactactctctttgtgggatgcattcttagcgttcttggcgatcgtctggtcgaggtgtatatgcatatgaccgacgctaaggagttgtgggatgcactgaatactaaattcggtgctactgatgctagcaatgatctgtatatcatggagcagtttcatgactacaaaatggctgacaaccgttctgtagtcgaacaggctcatgagatacaaaccatggctaaggaactcgaactccttaagtgtgtcttacccgacaaatttgtggccgggtgcattattgcaaaactacctccatcttggaggagtttcggtactgcactcaaacacaagagacaggaatactccgttgaggggttgattgcgtctcttgatgttgaggagaaagctcgggaaaaagatgccgcgtctaagggcgatggtgggcagtccagtgccaatgttgtgcacaaggcccagaacaagagcaaggggaaatacaaagctcagcagaccaccaacttcaagaagcagaagaagaacaacaacaatcctaatcaggatgagaggacttgctttgtgtgtggccaagttggtcatctggctaggaagtgtccacagcgcaaggggatgaaggcacctgcagggcagacttctaagtctgctaatgtgaccattggcaacactggagatggaagcgggtatggtaatttacctactgtcgcacggggttccaccgtcctaatggggaatgggtcacatgcttctgttcatggtgttggcacggtagatctgaagtttacttcgggaaagatcgtgcagctgaagaacgtgcagcatgtcccttctatcgacaggaatcttgttagtggctcccgtctgactagagacggatttaagttggtttttgagtctaataaagtagtcgtgtctaaacatggatattttattggtaaaggttatgagtgcggaggcctgttccgcttttccctttctgatttctgcaataacatgtgtttaattcctaagttttccattgtcaaaggttctaagtgccatagttgtgtgcaatcgaagcaacctcgcaagcctcacaaggctgccgaggagagaaacttggcaccactagaactcctacattcagatctttgtgaaatgaatggggtgttgacgaaggaagttgaaaatcaacttgacagaaagataaaaaggcttaggtctaatcgtggtggagagtttttctcgaacgagtttgacttattctgtgaggaacatggcatcatacatgagaggacgcctccctattctcccgagtctaatgggattgctgaaaggaagaaccgcacactgactgacttggtgaatgccatgttggacaccgcgggactgcctaaggcatgtgaagctcctcgaaggagtaagagacaaaggacggctaagtcttttggtgatgatttcactgtgtacctcgtggatgacactcctaagtcaatttcagaagcatatgcatctcctgatgcagactactggaaggaggctgtccgtagtgaaatggattccattatcgctaacgggacttgggaggtgacagagcgaccctatgggtgtaaacctgtggggtgcaagtgggtgttcaagaagaagcttaggcctgacgcctcacatggtcttctcgttcatcaaatggacgttaagacagcttttcttaatggagagctggatgaggagatctatatggatcaacctgatgggtttgtagttgaaggctttgcagtcaatgaggcagataaatgtgtgtactatcgccatggtgggggtgagggagttattttgtgcttgtatgttgacgacatactgatatttgggacaaaccttgaggtgataaatgagtcccattatgtggagaagatcttgaatcgctttggctacattgatagtaagccttctccaacaccttatgatcctagcttgttgcttcgcaagaacaagagaattgctaggaatcaactggaatactcccaaatcattggctcgttgatgtacctggctagtgcaactaggcctgatatctcctttgctgtgagcaagttgagccgatttacctctaatccgggagatgatcactggcgtgcgcttgagcgagtaatgcgctatctgaaaggtactgtggaattggggcttcactatactgggtatcctgcggtactggagggttatagtgattctaactggatctctgatgtggatgagatcaaagccactagtggatatgttttcacactgggtggtggtgctgtttcatggagcaaagatgttgtcctgcagagcattcttgaaagaactcacctttgtgagcttgactgttggtcgcagtctatgaagattttggactactccatcccgctcgccggcgtgcaccggcgatcgggagagcaggtctccggaacctctgccttcgacgttctgcaccgggagaaggcggcaataagagtcctgacatggaatgacgggttctacaacggcgagataaagacaaggaagatagagaacaacctagtgacggagctcacagctgagcagctcctcctacagagaagcgagcaactgagggagctgtacaactctctcctctctggtgagtctgcagaccaacagaggaggaggcctgtcactgcactatcgccggaggatctcggcaacgtagaatggtactacgttgtctgcatgacctacgccttccgccctggacaatgtgtgccaggtaaaagctttgcaagcaatggatgtgcctggctgtgcaacgctcagtctgccgatagcaaagccttcccgcgcaagctcttagccaagaacgcttctattcagacaattgtctgcgttccattcatgactggcgttcttgagcttgggaccactgatccgaaaaccgacaccttctag

SEQ ID NO: 23283 - DNA, 4185 bp, Oryza sativa
  Clone ID: TF_OsC1528_2144
atgcagcctccttttgcagttttgttttgctgcaaattcggattcgtttttgttttggaaacgttccgaaaaatccgatctaatgatgcgttcatgctagttttcatctgtaatgtcatgatttatttatggaatagattaaatcattatatgtctataatctcaacaatccaaaaaccttattataggcactgtgattttactttggctggttttgccgatgcactgaggccggataaattcaccggtgtgcattttaagagatggcagatcagggtcactctgtggctgacagctatgaaatgcttctgggtgagtactggcaaacctgaaggagttcttactgctgaacagcagaagcaattcgaggaagccactactctctttgtgggatgcattcttagcgttcttggcaatcgtctggtcgaggtgtatatgcatatgaccgacgctaaggagttgtgggatgcactgaatactaaattcggtgctactgatggtagcaatgatctgtatatcatggagcagtttcatgactacaaaatggctgacaaccgttctgtagtcgaacaggctcatgagatacaaaccatggctaaggaactcgaactccttaagtgtgtcttacccgacaaatttgtggccgggtgcattattgcaaaactacctccatcttggaggagtttcggtactgcactcaaacacaagagacaggaatactccgttgaggggttgattgcgtctcttgatgttgaggagaaagctcgggaaaaagatgccgcgtctaagggcgatggtgggcagtccagtgccaatgttgtgcacaaggcccagaacaagagcaaggggaaatacaaagctcagcagaccaccaacttcaagaagcagaagaagaacaacaacaatcctaatcaggatgagaggacttgctttgtgtgtggccaagttggtcatctggctaggaagtgtccacagcgcaaggggatgaaggcacctgcagggcaaacttctaagtctgctaatgtgaccattggcaacactggagatggaagcgggtatggtaatttacctactgttttttcagttaatcaatctactaattggtgggttgatactggggccaatgtacatgtttgtgctgacatctcattgttttcttcttatcaggtcgcacggggttccaccgtcctaatggggaatgggtcacatgcttctgttcatggtgttggcacggtagatctgaagtttacttcgggaaagatcgtgcagctgaagaacgtgcagcatgtcccttctatcgacaggaatcttgttagtggctcccgtctgactagagacggatttaagttggtttttgagtctaataaagtagtcgtgtctaaacatggatattttattggtaaaggttatgagtgcggaggactgttccgcttttccctttctgatttctgcaataagtctgtgaaccatatttgtggcagtgtggatgatgaggctaatgtttggcattcacgtttatgtcatattaattttggcttgatgtctcggctttccagcatgtgtttaattcctaagttttccattgtcaaaggttctaagtgccatagttgtgtgcaatcaaagcaacctcgcaagcctcacaaggctgccgaggagagaaacttggcaccactagaactcctacattcagatctttgtgaaatgaatggggtgttgacgaagggtggaaaacgatatttcatgacattcattgatgatgctactagattttgctatgtgtacttgttgaaaacgaaagacgaggctctagactattttaaaatttataaggcagaagttgaaaatcaacttgacagaaagataaaaaggcttaggtctgatcgtggtggagagtttttctcgaacgagtttgacttattctgtgaggaacatggcatcatatatgagatgacgcctccctattctcccgagtctaatgggattgctgaaaggaagaatcgcacactgactgacttggtgaatgccatgttggacaccgcgggactgcctaaggcatggtggggggaggcattgttgacctcaaatcatgtgttaaacagagttcctaacagaaataaggacaaaacaccatatgagatatggattggtagaaaaccatcactttcttatttgcgcacatgggggtgcttggcgaaagtcaatgtaccaataacgaagaagcgcaaacttggacctaagactgtggactgtgtttttctgggatatgctcatcatagcattgcctatagatttttaatagttaaatccgaggtaccggacatgcatgttggtacaattatggagtctcgtgatgctatcttctttgagagctttttcccaatgaaggatacacatagtggttcgaaccaaccatttgaaataattcccagttcaatcacaccaccagaacaaactgaacatacacatgaacttgtctctgaggaggatgtcagtgaagctcctcgaaggagtaagagacaaaggacggctaagtcttttggtgatgatttcactgtgtacctcgtggatgacactcctaagtcaatttcagaagcatatgcatctcctgatgcagactactggaaggaggctgtccgtagtgaaatggattccattatcgctaacgggacttgggaggtgatagagcgaccctatgggtgtaaacctgtggggtgcaagtgggtgttcaagaagaagcttaggcctgacggtactattgaaaagtacaaggctcggcttgttgctaagggctatactcagaaagaaggcgaagatttctttgacacttactcacctgttgctagattgaccacaattcgtgtgctactttccctagcagcctcacatggtcttctcgttcatcaaatggacgttaagacagcttttcttaatggagagctggatgaggagatctatatggatcaacctgatgggtttgtagttgaaggtcaagaacgcaaagtgtgcaaattgttgaagtctttgtatggtctaaaacaagctcctaagcaatggcatgagaaatttgacaaaacattgacatctgcaggctttgcagtcaatgaggcagataaatgtgtgtactatcgccatggtgggggtgagggagttattttgtgcttgtatgttgacgacatactgatatttgggacaaaccttgaggtgataaatgaggttaaatcattcttgtctcaaaattttgatatgaaggatttgggagtagctgatgttatcttaaacattaagctaattagaggtgagaatgggattacactcttgcagtcccattatgtggagaagatcttgaatcgctttggctacattgatagtaagccttctccaacaccttatgatcctagcttgttgcttcgcaagaacaagagaattgctaggaatcaactggaatactcccaaatcattggctcgttgatgtacctggctagtgcaactaggcctgatatctcctttgctgtgagcaagttgagccgatttacctctaatccgggagatgatcactggcgtgcgcttgagcgagtaatgcgctatctgaaaggtactgtggaattggggcttcactatactgggtatcctgcggtactggagggttatagtgattctaactggatctctgatgtggatgagatcaaagccactagtggatatgttttcacactgggtggtggtgctgtttcatggaggtcttgcaaacagaccattttgacgaggtcaaccatggaagcagagctaacggcactggatactgctactgttgaggcagaatggctgcgtgatctattaatggatctgcctgttgttgaaaaaccggtgccggctatccttatgaactgtgacaatcaaacgacatgtgaaaagacgattgaagtctgtcaggaaattaagaaactccggagttataacgttggattacatccaaacagcgagaaacctggcagatcccttcacgaagggactatcacgaaatgtgatagacaatgcatcgaaggagatgggtttgagacccatatgagttatactatggtgagcattcttgaaagaactcacctttgtgagcttgactgttggtcgcagtctatgaagattttgggtgaatcttctaggaagcttactaaagacctaggagtatga

SEQ ID NO: 23284 - DNA, 3206 bp, Oryza sativa
  Clone ID: TF_OsC1528_2147
atgggcacaaaaaccaaccctgaccggtggaatggttcactgtcacagggtctgggggagggagggttattttttgaagatgagagcggttatgacgacaaagtgggggtcggctcggccggtcagacagggcgccaggccagtcaggcctctggcactcctgcggtcagaccgacgcatgacgtgggtcagaccggcctgggtcgtcggctgagggttctgttgatgctgctcgagatggtcctccagaaattactacttcggccaatactgatacagaacgtggatcaacttcagaagttactgctcctttgcacattcaccgccgacatccgccggaacacaattattggtaatataggtgagcggactgcaagacttgtctggttgttgcctgtcacaagaccaaattgtggcaagggcgagacatcagtcaaagggaacactggtggcaagacctacatccgcgtcttgggcaaccatgttgaacacggcggtggcgtgctggagctcatcagcaagcctcatattttgaaagctcaagtatcggtgctgtactactactccatcccgctcgccggcgtgcaccagcgatcgggagagcaggtctccggaacctctgcctttgacgtcctgcaccgggagaaggcagcaataagggtcactctgtggctgacagctatgaaatgcttctgggtgagtactggcaaacctgaaggagttcttaccgctgaacagcagaagcaattcgaggaagccactactctctttgtgggatgcattcttagcgttcttggcgatcgtctggtcgaggtgtatatgcatatgaccgacgctaaggagttgtgggatgcactgaatactaaattcggtgctactgatgctagcaatgatctgtatatcatggagcagtttcatgactacaaaatggctgacaaccgttctgtagtcgaacaggctcatgagatacaaaccatggctaaggaactcgaactccttaagtgtgtcttacccgacaaatttgtggccgggtgcattattgcaaaactacctccatcttggaggagtttcggtactgcactcaaacacaagagacaggaatactccgttgaggggttgattgcgtctcttgatgttgaggagaaagctcgggaaaaagatgccgcgtctaagggcgatggtgggcagtccagtgccaatgttgtgcacaaggcccagaacaagagcaaggggaaatacaaagctcagcagaccaccaacttcaagaagcagaagaagaacaacaacaatcctaatcaggatgagaggacttgctttgtgtgtggccaagttggtcatctggctaggaagtgtccacaacgcaaggggatgaaagcacctgcagggcagacttctaagtctgctaatgtgaccattggcaacactggagatggaagctggtatggtaatttacctactgtcgcacggggttccaccgtcctaatggggaatgggtcacatgcttctgttcatggtgttggcacggtagatctgaagtttacttcgggaaagatcgtgcagctgaagaacgtgcagcatgtcccttctatcgacaggaatcttgttagtggctcccgtctgactagagacggatttaagttggtttttgagtctaataaagtagtcgtgtctaaacatggatattttattggtaaaggttatgagtacggaggcctgttccgcttttccctttctgatttctgcaataacatgtgtttaattcctaagttttccattgtcaaaggttctaagtgccatagttgtgtgcaatcgaagcaacctcgcaagcctcacaaggctgccgaggagagaaacttggcaccactagaactcctacattcagatctttgtgaaatgaatggggtgttgacgaaggaagttgaaaatcaacttgacagaaagataaaaaggcttaggtctgatcgtggtggagagtttttctcgaacgagtttgacttattctgtgaggaacatggcatcatacatgagaggacgcctccctattctcccgagtctaatgggattgctgaaaggaagaaccgcacactgactgacttggtgaatgccatgttggacaccgcgggactgcctaaggcatgtgaagctcctcgaaggagtaagagacaaaggacagctaagtcttttggtgatgatttcattgtgtacctcgtggatgacactcctaagtcaatttcagaagcatatgcatctcctgatgcagactactggaaggaggctgtccgtagtgaaatggattccattatcgctaacgggacttgggaggtgacagagcgaccctatgggtgtaaacctgtggggtgcaagtgggtgttcaagaagaagcttaggcctgacgcctcacatggtcttctcgttcatcaaatggacgttaagacagcttttcttaatggagagctggatgaggagatctatatggatcaacctgatgggtttgtagttgaaggctttgcagtcaatgaggcagataaatgtgtgtactatcgccatggtgggggtgagggagttattttgtgcttgtatgttgacgacatactgatatttgggacaaatcttgaggtgataaatgagtcccattatgtggagaagatcttgaatcgctttggctacattgatagtaagccttctccaacaccttatgatcctagcttgttgcttcgcaagaacaagagaattgctaggaatcaactggaatactcccaaatcattggctcgttgatgtacctggctagtgcaactaggcctgatatctcctttgctgtgagcaagttgagccgatttacttctaatccgggagatgatcactggcgtgcgcttgagcgagtaatgcgctatctgaaagactactccatcccgctcgccggcgtgcaccagcgatcgggagagcaggtctccggaacctctgcctttgacgtcctgcaccgggagaaggcagcaataaggtttttgggaagcgcttcgcgcgactgctccctgttcgttcgcgacggctcgccttcctcttcgctcgcgtgtttcgtgccttcgtagacggtaacaatggtggctctaaaggctccagggtgcttttaggtaagttcagccctttcggcaggttttcgtgtattcttctaggcgacaagcctggctccgaactgctcatcagtcat

SEQ ID NO: 23285 - DNA, 4323 bp, Oryza sativa
  Clone ID: TF_OsC1528_2189
atggcggcggcggcggcctgcacgaagctgccgttgctgctcctgctcgtcgccgtcgccgtcgcagcgtcgtcggcgtcgtcactaacgccgcagcacgcggcgtgccggagaagggacctcgccccggcggcggcggcgttaccttgcacctcgaccaccgccaggtactgggatgtggtatggaatttccccggatccaataatccaagaggcatgatcgatatgctggatagtactgaattcaaggtagtatcctcaagtgaagatcaagtggagctttccttcaggagcacctacaatccatcacgtccaaatagtgtcaggctaaacatcgacaagaggcactgtgattttactatggctggttttgccgatgcactgaggccggataaattcaccggtgtgcattttaagagatggcagatcagggtcactctgtggctgacagctatgaaatgcttctgggtgagtactggcaaacctgaaggagttcttactgctgaacagcagaagcaattcgaggaagccactactctctttgtgggatgcattcttagcgttcttggcgatcgtctggtcgaggtgtatatgcatatgaccgacgctaaggagttgtgggatgcactgaatactaaattcggtgctactgatgctagcaatgatctgtatatcatggagcagtttcatgactacaagatggctgacaaccgttctgtagtcgaacaggctcatgagatacaaaccatggctaaggaactcgaactccttaagtgtgtcttacccgacaaatttgtggccgggtgcattattgcaaaactacctccatcttggagaagtttcggtactgcactcaaacacaagagacaggaatactccgttgaggggttgatagcgtctcttgatgttgaggagaaagctcgggaaaaagatgccgcgtctaagggcgatggtgggcagtccagtgccaatgttgtgcacaaggcccagaacaagagcaaggagaaatacaaagctcagcagaccaccaacttcaagaagcagaagaagaacaacaacaatcctaatcaggatgagaggacttgctttgtgtgtggccaagttggtcatctggctaggaagtgtccacagcacaaggggatgaaggcacctgcagggcagacttctaagtctgctaatgtgaccattggcaacactggagatggaagcgggtatggtaatttacctactgttttttcagttaatcaatctactaattggtgggttgatactggggccaatgtacatgtttgtgctgacatctcattgttttcttcttatcaggtcgcacggggttccaccgtcctaatggggaatgggtcacatgcttctgttcatggtgttggcacggtagatctgaagtttacttcgggaaagatcgtgcagctgaagaacgtgcagcatgtcccttctatcgacaggaatcttgttagtggctcccgtctgactagagacggatttaagttggtttttgagtctaataaagtagtcgtgtctaaacatggatattttattggtaaaggttatgagtgcggaggcctgttccgcttttccctttctgatttctgcaataagtctgtgaaccatatttgtggcagtgtggatgatgaggctaatgtttggcattcacgtttatgtcatattaattttggcttgatgtctcggctttccagcatgtgtttaatttctaagttttccattgtcaaaggttctaagtgccatagttgtgtgcaatcgaagcaacctcgcaagcctcacaaggctgccgaggagagaaacttggcaccactagaactcctacattcagatctttgtgaaatgaatggggtgttgacgaagggtggaaaacgatatttcatgacattgattgatgatgttactagattttgctatgtgtacttgttgaaaacgaaagacgaggctctagactattttaaaatttataaggcagaagttgaaaatcaacttgacagaaagataaaaaggcttaggtctgatcgtggtggagagtttttctcgaacgagtttgacttattctgtgaggaacatggcatcatacatgagaggacgcctccctattctcccgagtctaatgggattgctgaaaggaagaatcgcacactgactgacttggtgaatgccatgttggacaccgcgggactgcctaaggcatggtggggggaggcattgttgaccttaaatcatgtgttaaacagagttcctaacagaaataagaacaaaacaccatatgagatatggattggtagaaaaccatcactttcttatttgcgcacatgggggtgcttggcgaaagtcaatgtaccaataacgaagaagcgcaaacttggacctaagactgtggactgtgtttttctgggatatgctcatcatagcattgcctatagatttttaatagttaaatccgaggtaccggacatgcatgttggtacaattatggagtctcgtgatggtaccttctttgagagcttttgcccaatgaaggatacacatagtggttcgaaccaaccctctgaaataattcccagttcaatcacaccaccagaacaaactgaacatacacatgaacttgtctctgaggaggatgtcagtgaagctcctcgaaggagtaagagacaaaggacggctaagtcttttggtgatgatttcactgtgtacctcgtggatgacactcctaagtcaatttcagaagcatatgcatctcctgatgcagactactggaaggaggctgtccgtagcgaaatggattccattatcgctaacgggacttgggaggtgacagagcggccctatgggtgtaaacctgtggggtgcaagtgggtgttcaagaagaagcttaggcctgacggtactattgaaaagtacaaggctcggcttgttgctaagggctatactcagaaagaaggcgaagatttctttgacacttactcacctgttgctagattgaccacaattcgtgtgctactttccctagtagcctcacatggtcttctcgttcatcaaatgaacgttaagacagcttttcttaatggagagctggatgaggagatctatatggatcaacctgatgggtttgtagttgaaggtcaagaaggcaaagtgtgcaaattgttgaagtctttgtatggtctgaaacaagctcctaagcaatggcatgagaaatttgacaaaacattgacatctgcaggctttgcagtcaatgaagcagataaatgtgtgtactatcgccatggtgggggtgagggagttattttgtgcttgtatgttgacgacatactgatatttgggacaaaccttgaggtgataaatgaggttaaatcattcttgtctcaaaattttgatatgaaggatttgggagtagctgatgttatcttaaacattaagttaattagaggtgagaatgggattacactcttgcagtcccattatgtggagaagatcttgaatcgctttggctacattgatagtaagccttctccaacaccttatgatcctagcttgttgcttcacaagaacaagagaattgctaggagtcaactggaatactcccaaatcattggctcgttgatgtacctggctagtgcaactaggcctgatatctcctttgctgtgagcaagttgagccgatttacctctaatccgggagatgatcactggcgtgcgcttgagcgagtaatgcgctatctgaaaggtactgtggaattggggcttcactatactgggtatcctgcggtactggagggttatagtgattctaactggatctctgatgtggatgagatcaaagccactagtggatatgttttcacactgggtggtggtgctgtttcatggaggtcttgcaaacagaccattttgacgaggtcaaccatggaagcagagctaacggcactggatactgctactgttgaggcagaatggctgcgtgatctattaatggatctgcctgttgttgaaaaaccggtgccggctatccttatgaactgtgacaatcaaacgacatgtgaaaagacgattgaagtctgtcaggaaattaagaaactccggagttataatgttggattacattcaaacagcgagaaatctggcagatcccttcacgaagggactatcacgaaatgtgatagacaatgcatcgaaggagatgggtttgagacccatagcattcttgaaagaactcacctttgtgagcttgactgttggtcgcagtctatgaagattttgggtgaatcttctaggaagcttactaaagacctaggagtatga

SEQ ID NO: 23286 - DNA, 5135 bp, Oryza sativa
  Clone ID: TF_OsC1528_2233
cttttgcagttttgttttgctgcaaattcggattcgtttttgttttggaaacgttccgaaaaatccggtgcgtgcaaacggcgtggagtccggataagttacgcgcgacttatccggttcggttacgcgcagtagagatcgtgcgggcgccctgatcaagcgacccttctctatataaaccgacccgccgtcttcacgcaggatatacgcaaaatcaatctagggtttgcctcctactctgtactgcgccgtcgctcgtagactactccatcccgctcgccggcgtgcaccagcgatcgggagagcaggtctccggaacctctgcctttgacgtcctgcatcgggagaaggcggcaataaggtttttgggaagcgcttcgcgcgactgctccctgttcgttcgcgacagctcgccttcctcttcgctcgcgtgtttcgtgccttcgtagacacctgcgaaaagtttcgaccaagcagccggtctttccgtcacctcggtgagtactggcaaacctgaaggagttcttactgctgaacagcagaagcaattcgaggaagccactactctctttgtgggatgcattcttagcgttcttggcgatcgtctggtcgaggtgtatatgcatatgaccgacgctaaggagttgtgggatgcactgaatactaaattcggtgctactgatgctagcaatgatctgtatatcatggagcagtttcatgactacaaaatggctgacaaccgttctgtagtcgaacaggctcatgagatacaaaccatggctaaggaactcgaactccttaagtgtgtcttacccgacaaatttgtggccgggtgcattattgcaaaactaccttcatcttggagaagtttcggtactgcactcaaacacaagagacaggaatacttcgttgaggggttgatagcgtctcttgatgttgaggagaaagctcgggaaaaagatgccgcgtctaagggcgatggtgggcagtccagtgccaatgttgtgcacaaggcccagaacaagagcaaggggaaatacaaagctcagcagaccaccaacttcaagaagcagaagaacaacaacaacaatcctaatcaggatgagaggacttgctttgtgtgtggccaagttggtcatctggctaggaagtgtccacagcgcaaggggatgaaggcacctgcagggcagacttctaagtctgctaatgtgaccattggcaacactggagatggaagcgggtatggtaatttacctactgtttttttagttaatcaatctactaattggtgggttgatactggggccaatgtacatgtttgtgctgacatctcattgttttcttcttatcaggtcgcacggggttccaccgacctaatggggaatgggtcacatgcttctgttcatggtgttggcacggtagatctgaagtttacttcgggaaagatcgtgcagctgaagaacgtgcagcatgtcccttctatcgacaggaatcttgttagtggctcccgtctgactagagacggatttaagttggtttttgagtctaataaagtagtcgtgtctaaacatggatattttattggtaaaggttatgagtgcggaggcctgttctgtttttccctttctgatttctgcaataagtctgtgaaccatatttgtggcagtgtggatgatgaggctaatgtttggcattcacgtttatgtcatattaattttggcttgatgtctcggctttccagcatgtgtttaattcctaagttttccattgtcaaaggttctaagtgccatagttgtgtgcaatcgaagcaacctcgcaagcctcacaaggctgccaaggagagaaacttggcaccactagaactcctacattcagatctttgtgaaatgaatggggtgttgacaaatggtggaaaacgatatttcatgacattgattgatgatgctactagattttgctatgtgtacttgttgaaaacgaaagacgaggctctagactattttaaaatttataaggcagaagttgaaaatcaacttgacagaaagataaaaaggcttaggtctgatcgtggtggagagtttttctcgaacgaatttgacttattctgtgaggaacatggcatcatacatgagaggacgcctccctattctcccgagtctaatgggattgctgaaaggaagaatcgcacgctgactgacttggtgaatgccatgttggacaccgcgggactgcctaaggcatggtggggggaggcattgttgacctcaaatcatgtgttaaacagagttcctaacagaaataaggacaaaacaccatatgagatatggattggtagaaaaccatcactttcttatttgcgcacatgggggtgcttggcgaaagtcaatgtaccaataacgaagaagcgcaaacttggacctaagactgtggactgtgtttttctgggatatgctcatcatagcattgcctatagatttttaatagttaaatccgaggtaccagacatgcatgttggtacaattatggagtctcgtgattctatcttctttgagagctttttcccaatgaaggatacacatagtggttcgaaccaaccctttgaaataattcccagttcaatcacaccaccaaaacaaactgaacatacacatgaacttgtctctgaggaggatgtcagtgaagctcctcgaaggagtaagagacaaaggacggctaagtcttttggtgatgatttcactgtgttcctcgtggatgacactcctaagtcaatttcagaagcatatgcatctcctgatgcagactactggaaggaggctgtccgtagtgaaatggattccattatcgctaacggaacttgggaggtgatagagctaccctatgggtgtaaacctatggggtgcaagtgggtgttcaagaagaagcttaggcctgacggtactattgaaaagtacaaggctcggcttgttgctaagggctatactcagaaagaaggcgaagatttctttgacacttactcacctgttgctagattgaccacaattcgtgtgctactttccctagcagcctcacatggtcttctcgttcatcaaatggacgttaagacagcttttcttaatggagagctggatgaggagatctatatggatcaacctgatgggtttgtagttgaaggtcaagaaggcaaagtgtgcaaattgttgaagtctttgtatggtctgaaacaagctcctaagcaatggcatgagaaatttgacaaaacattgacatctgcaggctttgcagtcaatgaggcagataaatgtgtgtactatcgccatggtgggggtgagggagttattttgtgcttgtatgttgacgacatactgatatttgggacaaaccttgaggtgataaatgaggttaaatcattcttgtctcaaaattttgatatgaaggatttgggagtagctgatgttatcttaaacattaagctaattagaggtgagaatgggattacactcttgcagtcccattatgtggagaagatcttgaatcgctttggctacattgatagtaagccttctccaacaccttatgatcctagcttgttgcttcgcaagaacaagagaattgctaggaatcaactggaatactcccaaatcattggctcgttgatgtacctggctagtgcaactaggcctgatatctcctttgctgtgagcaagttgagccgatttacctctaatccgggagatgatcactggcgtgcgcttgagcgagtaatgcgctatctgaaaggtactgtggaattggggcttcactatactgggtatcctgcggtactggagggttatagtgattctaactggatctctgatgtggatgagatcaaagccactagtggatatgttttcacactgggtggtggtgctgtttcatggaggtcttgcaaacagaccattttgacgaggtcaaccatggaagcagagctaacggcactggatactgctactgttgaggcagaatggctgcgtgatctattaatggatctgcctgttgttgaaaaaccggtgccggctatccttatgaactgtgacaatcaaacgacatgtgaaaagacgattgaagtctgtcaggaaattaagaaactccggagttataacgttggattacatccaaacagcgagaaacctggcagatcccttcacgaagggactatcacgaaatgtgatagacaatgtatcgaaggagatgggtttgagacccataaagaggaagcaaacaagagattgcaaggggttcaaataactaccacagctccaattataagccaccttttgtttgctgatgatagcttgttactattcaaagctactagtgtttgtgcagatgcagtgagtagagttttaactaactattgtgcagcttccggacaactggtcaacttttctaagtcctgcattttcttcagcaagaagtgtgatatggccatccgtgaggacatcaaacgaaaggttggaatgactaatgaatctataacagatcgctatttgggtttgccaacggatgtgggtagagccaaggaaggaaaatttaaatacttgaaggacagagtgtggaaaagagtgcagggatggatggagaaaacactttcagttggaggtaaagaagtccttattaaatcaatagttcaagccatcccaacttattcaatgagttgtttccgtttacccatgggcctttgcaaccatataaattctttaatccggaaattttggtgggcaagtaaacaaggttcaaggaaaaccaattgggtagcatgggacaagatgactgtgcctaagtttcttggtggaatgggatttagggacataaatattttcaatctagtattgcttgccaagcaagggtggagaatcttgcagtatcctaattcactagcagcaagagttttgaaagctgtctatttttcaaatggtgacttcctgaatgctggtttgggaagtaggccatcacatacttggcgtgctattattgaaggtcgtgaaattcttaaactaggaattattcgaaggattggaagtggaaaagatacttttatctgggatgataattggattccaagagattggatgcttcgaccaatcagggcctaa

SEQ ID NO: 23287 - DNA, 3633 bp, Oryza sativa; identical to SEQ ID NO: 14993
  Clone ID: TF_OsC1528_2246

SEQ ID NO: 23288 - DNA, 4938 bp, Oryza sativa
  Clone ID: TF_OsC1528_2253
atggcagcgatctgcggggagacgatctccgtcgacgagttgtggcgggagatcttgctcagggcgccaaccaaagacgtcgcccgttcatgctgcgtctcgacgcagtggcgcggcatcgtcagggacccctccttccggaagctccaccatgacaggcatgccgtgccgtccaaggacgacgtcccggacgctctgctcgtcatcacggtcaacgccgacggccaaagcgtctccaccgtcgtcccagctatggtctctccggtgtcgacgagccagcgggcgcccatgtaccgggttattaagaacggcatcagctatagcctcgccaatgtctgcaatggcttcctctgcttcgcgtcatggagcagggccaaggtcgtcgtgtgcaaccccatcaccggcgagaagctggcgatccccagggctcctcccatcgggccagattataaatcgtcgcgtgccaggatcgacgtgtacacgctgcccacaagcggtggcaagatatgcgtgatgaccgctactggcaccccgagctggcacccacccgaaattcccacactcggtccggtgttggtggtcgacgtcgcgagcgagaagcatcgcatgtatagcccaccggacaacgggtgcccagcggctgacgaaacgtcgttcactgcctttgagctgcacggacggttgtgcctggccatcaggatatccatgaccaacacagtccagttctggactttgtcggttgaagaagacgacgacgacgacgacgacctgccgtggcagcttctctacacgatcaaaatcaacatgaaagatggctataataatggattccaggaactagagcctatgaatgattggttcaatggcggcaataatggatttatccaggtaccagagcccatggatgcttggctcgacggcgagacccacacccttgctacagagagggcagcacattgtactttagactactccatcccgctcgccggcgtgcaccagcgatcgggagagcaggtctccggaacctctgcctttgacgtcctgcaccgggagaaggcggcaataagatctaatgatgcgttcatgctagttttcatctgtgatgtcatgatttatttatggaataaattaaatccttatatgcccataatctcaacaatccaaaaaccttattataggcactgtgattttactatggctggttttgccgatgcactgaggccggataaattcaccggtgtgcattttaagagatggcagatcagggtcactctgtggctgacagctatgaaatgcttctgggtgagtactggcaaacctgaaggagttcttactgctgaacagcagaagcaattcgaggaagccactactctctttgtgggatgcattcttagcgttcttggcgatcgtctggtcgaggtgtatatgcatatgaccgacgctaaggagttgtgggatgcactgaatactaaattcggtgctactgatgctagcaatgatctgtatatcatggagcagtttcatgactacaaaatggctgacaaccgttctgtagtcgaacaggctcatgagatacaaaccatggctaaggaactcgaactccttaagtgtgtcttacccgacaaatttgtggccgggtgcattattgcaaaactacctccatcttggaggagtttcggtactgcactcaaacacaagagacaggaatactccgttgaggggttgattgcgtctcttgatgttgaggagaaagctcgggaaaaagatgccgcgtctaagggcgatggtgggcagtccagtgccaatgttgtgcacaaggcccagaacaagagcaaggggaaatacaaagctcagcagaccaccaacttcaagaagcagaagaagaacaacaacaatcctaatcaggatgagaggacttgctttgtgtgtggccaagttggtcatctggctaggaagtgtccacagcgcaaggggatgaaggcacctgcagggcagacttctaagtctgctaatgtgaccattggcaacactggagatggaagcgggtatggtaatttacctactgttttttcagttaatcaatctactaattggtgggttgatactggggccaatgtacatgtttgtgctgacatctcattgttttcttcttatcaggtcgcacggggttccaccgtcctaatggggaatgggtcacatgcttctgttcatggtgttggcacggtagatctgaagtttacttcgggaaagatcgtgcagctgaagaacgtgcagcatgtcccttctatcgacaggaatcttgttagtggctcccgtctgactagagacggatttaagttggtttttgagtctaataaagtagtcgtgtctaaacatggatattttattggtaaaggttatgagtgcggaggcctgttccgcttttccctttctgatttctgcaataagtctgtgaaccatatttgtggcagtgtggatgatgaggctaatgtttggcattcacgtttatgtcatattaattttggcttgatgtctcggctttccagcatgtgtttaattcctaagttttccattgtcaaaggttctaagtgccatagttgtgtgcaatcgaagcaacctcgcaagcctcacaaggctgccgaggagagaaacttggcaccactagaactcctacattcagatctttgtgaaatgaatggggtgttgacgaagggtggaaaacgatatttcatgacattgattgatgatgctactagattttgctatgtgtacttgttgaaaacgaaagacgaggctctagactattttaaaatttataaggcagaagttgaaaatcaacttgacagaaagataaaaaggcttaggtctgatcgtggtggagagtttttctcgaacgagtttgacttattctgtgaggaacatggcatcatacatgagaggacgcctccctattctcccgagtctaatgggattgctgaaaggaagaaccgcacactgactgacttggtgaatgccatgttggacaccgcgggactgcctaaggcatgcattgcctatagatttttaatagttaaatccgaggtaccggacatgcatgttggtacaattatggagtctcgtgatgctaccttctttgagagctttttcccaatgaaggatacacatagtggtttgaaccaaccctctgaaataattcccagttcaatcacaccaccagaacaaactgaacatacacatgaacttgtctctgaggaggatgtcagtgaagctcctcgaaggagtaagagacaaaggacggctaagtcttttggtgatgatttcactgtgtacctcgtggatgacactcctaagtcaatttcagaagcatatgcatctcctgatgcagactactggaaggaggctgtccgtagtgaaatggattccattatcgctaacgggacttgggaggtgacagagcgaccctatgggtgtaaacctgtggggtgcaagtgggtgttcaagaagaagcttaggcctgacggtactattgaaaagtacaaggctcggcttgttgctaagggctatactcagaaagaaggcgaagatttctttgacacttactcacctgttgctagattgaccacaattcgtgtgctactttccctagcagcctcacatggtcttctcattcatcaaatggacgttaagacagcttttcttaatggagagctggatgaggagatctatatggatcaacctgatgggtttgtacttgaaggtcaagaaggcaaagtgtgcaaattgttgaagtctttgtatggtctgaaacaagctcctaagcaatggcatgagaaatttgacaaaacattgacatctgcaggctttgcagtcaatgaggcagataaatgtgtgtactatcgccatggtgggggtgagggagttattttgtgcttgtatgttgacgacatactgatatttgggacaaaccttgaggtgataaatgaggttaaatcattcttgtttcaaaattttgatatgaaagatttgggagtagctgatgttatcttaaacattaagctaattagaggtgagaatgggattacactcttgcagtcccattatgtggagaagatcttgaatcgctttggctacattgatagtaagccttctccaacaccttatgatcctagcttgttgcttcgcaagaacaagagaattgctaggaatcaactggaatactcccaaatcattggctcgttgatgtacctggctagtgcaactaggcctgatatctcctttgctgtgagcaagttgagccgatttacctctaatccgggagatgatcactggcgtgcgcttgagcgagtaatgcgctatctgaaaggtactgtagaattggggcttcactatactaggtatcctgcggtactggagggttatagtgattctaactggatctctgatgtggatgagatcaaagccactagtggatatgttttcacactgggtggtggtgctgtttcatggaggtcttgcaaacagacaattttgacgaggtcaaccatggaagcagagctaacggcactggatactgctactgttgaggcagaatggttgcgtgatctattaatggatctgcctgttgttgaaaaaccggtgccggctatccttatgaactgtgacaatcaaacgacatgtgaaaagacgattgaagtctgtcaggaaattaagaaactccggagttataacgttggattacatccaaacagcgagaaacctggcagatcccttcacgaagggactatcacgaaatgtgatacacaatgcatcgaaggagatgggtttgagacccatagcattcttgaaggaactcacctttgtgagcttgactgttggtcgcagtccatgaagattttgggtgaatcttctaggaagcttactaaagacctaggagtatga

SEQ ID NO: 23289 - DNA, 3332 bp, Oryza sativa
  Clone ID: TF_OsC1528_2265
gagcgcgggtgagcgggagagagggggaagtgggcgcgggtgcgagggcgacgtggacggcgtggcccgggaggcgcggacgcgaggcgcggcggcggttgcgggcgcggcggcgagcggctggagcgtgcaccggcgatcgggagagcaggtctccggaacctctgccttcgacgtcctgcaccaggagaaggcggcaataaggcactgtgattttactatggctggttttgccgatgcactgaggccggataaattcaccggtgtgcattttaagagatggcagattagggtcactctgtggctgacagctatgaaatgcttctgggtgagtactggcaaacctgaaggagttcttactgctgaacagcagaagcaattcgaggaagccactactctctttgtgggatgcattcttagcgttcttggcgatcgtctggtcgaggtgtatatgcatatgaccgatgctaaggagttgtgggatgcactgaatactaaattcggtgctactgatgctagcaatgatctgtatattatggagcagtttcatgactacaagatggctgacaaccgttctgtagtcgaacaggctcatgagatacaaaccatggctaaggaactcgaactccttaagtgtgtcttacccgacaaatttatggccgggtgcattattgcaaaactacctccatcttggaggagtttcggtactgcactcaaacacaagagacaggaatactccgttgaggggttgattgcgtctcttgatgttgaggagaaagctcgggaaaaagatgccgcgtctaagggcgatggtggacagtccagtgccaatgttgtgcacaaggcccagaacaagagcaaggggaaatacaaagctcagcagaccaccaacttcaagaagcagaagaagaacaacaacaatcctaatcaggatgagaggacttgctttgtgtgtggccaagttggtcatctggctaggaagtgtccacagcgcaaggggatgaaggcacctgcagggcagacttctaagtctgctaatgtgaccattggcaacactggagatggaagcgggtatggtaatttacctactgtcgcacggggttccaccgtcctaatggggaatgggtcacatgcttctgttcatgttgttggcacggtagatctgaagtttacttcgggaaagatcgtgcagctgaagaatgtgcagcatgtcccttctatcgacaggaatcttgttagtgactcccgtctgattagagacggatttaagttggtttttgagtctaataaagtagtcgtgtctaaacatggatattttattggtaaaggttatgagtgcggaggcctgtttcgcttttccctttctgatttctgcaataagtctgtgaaccatatttgtggcagtgtggatgatgaggctaatgtttggcattcacaagttgaaaatcaacttgacagaaagataaaaaggcttaggtctgatcgtggtggagagtttttctcgaacgagtttgacttattctttgaggaacatggcatcatacatgagaggacgcctccctattctcccgagtctaatgggattgctgaaaggaagaaccgcacactgactgacttggtgaatgccatgttggacaccgcgggactgcctaaggcatgtgaagctcctcgaaggagtaagagacaaaggacggctaagtcttttggtgatgatttcactgtgtacctcgtggatgacactcctaagtcaatttcagaagcatatgcatctcctgatgcagactactggaaggaggctgtccgtagtgaaatggattccattatcgctaacgggacttgggaggtgacggagcgaccctatgggtgtaaacctgtggggtgcaagtgggtgttcaagaagaagcttaggcctgacgcctcacatggtcttctcgttcatcaaatggacgttaagacagcttttcttaatggagagctggatgaggagatctatatggatcaacctgatgggtttgtagttgaaggctttgcagtcaatgaggcagataaatgtgtgtactatcgccatggtgggggtgagggagttattttgtgcttgtatgttgacgacatactgatatttgggacaaaccttgaggtgataaatgagtcccattatgtggagaagatcttgaatcgctttggctacattgatagtaagccttctccaacaccttatgatcctagcttgttgcttcgcaagaacaagagaattgctaggaatcaactggaatactcccaaatcattggctcgttgatgtacctggctagtgcaactaggcctgatatctcctttgctagcattcttgaaagaactcacctttgtgagcttgactgttggtcgcagtctatgaagattttggactactccatcccgctcgccggcgtgcaccagcgatcgggagagcaggtctccggaacctctgcctttgacgtcctgcaccgggagaaggcggcaataagaggatggaagcagcagcagcagcagcagcagatgccatggcaacgacgtgatctccgtccaattcatgcagaaggtacatccatggtgcatgtgcatgaacaaaaacctgctgattcttgcggaaattctggggacatatttcatgatattcgccgggtgcggcgccgtggtggtgaaccagagcaccggcggcgcggtgacgttcccggggatctgcgccgtgtgggggctcgtcgtcatggtgctagtctacactgtcagccacatctccggtgcccacttcaaccccgccgtcaccgtcgccttcgccacgtgcggacgcttccggtggaagcaggtgccatcgtacgtggtggcccaggtgctgggatccaccatggcaagcctgacgctgcgcgtggtgttcggcggcggcggcggcggcgcgcgcggggagcacttgttcttcgggacgacgccggcggggtcgatggcgcaggcggcggcgctggagttcgtcatctccttcttcctcatgttcgtcgtctccggcgtcgccacggacaacagagcaatcggtgaattggctgggctcgctgtcggtgcgacggtcgcggtgaacgtgctcttcgcagggccggtgacgggggcgtcgatgaacccggctcggagccttggtccggcgatggtggcggggaggtacggcggcgtgtgggtgtacgtggcggcgccggtgagcgggacggtgtgcggcgcgtgggcgtacaacctgctccgcttcaccgacaagccgctgcgtgacatcgccaacaccgcctccttcctcaggaggagctcgcgtaggagttag

SEQ ID NO: 23290 - DNA, 9993 bp, Oryza sativa
  Clone ID: TF_OsC1528_2274
atggagtacggattcaccgccaactacaaggtttggacctatcacggggaattcgccaatccggaagatgacgatgaagagttaagtttcgagatgaatgaggcagagaattttataatcgaagacatgtcgcgtgaaagaatggttgtcgatgtttccaccgatagtgatgatttcgatggtggttttgatttagaggatatgctacgccatgttgaaccagaggtgctagcgggcaggtcacgaggattggagaattggcaagcattagagaaggcatcgaaggatcttctttacgatgaaacgaagggatgtgataaggatttcacagtcttgcgttcagtgcttgaacttctgagattgaaggctaaacatggatggtcggacacaaagtgtaccgatccagattctgataagggtaagcgcgggaagattccttcaatggtgatgtggtacctaccaattaaggaccgcctgaagcgtctgtactcaaacccgactgatgctgagttgatgagatggcatcaagagagctggaaaatagatggtatgattcgacatcccgccgacgctcgccagtggaagacatttgatgcaaaacacccagaatttgctaaggatcctaggaatgtaaggtttgcgttgagcactgatggaatgaacccgtttgtggagaatgacactgccccagtagcaagaggtggtacatacgtgtatgagataacaaagaagattaaggttgtatatggaaagggaaagaagaagacagtaaagaggaagaaagctgatggtgacaacggtactgcgtcgcctttcaagaagcactcaattttctttaaatacttagattactggaaggacctagagattcgacatgcaattgatgttatgcacctcgagaagaacgtgtttgatagcaccgttggcacattgctggacatcccgagtccgcttcagacatttgccgtcgagactgtatgccagcttgagatgtatttcccaccatcatttttagatatgatggagcatttgatcgttcacatcgtccctcagattattgaacttggtccattatacttacatcagatgtgggcctatgagcgttacatgtcgatcctcaaaggctatgtacgcaatcgcgctcacccggaaggatcaatgatagagggatacacaactgaagaggcagtcgagtgttgtatggactacataaaggatgctaatgccattggaattcctgttcatcgacatgaaggtagattgtctagaaggggtactgttggtaggaagcagttcttcgataatgattacaaaaaggtgtccgcggcatacaacagcgttcttcaacagctcgctatcgttgagccattcattgagcgacacctagaagaaatcaaagcctgcttcccagggcggtccaatgattggatatcaagagagcacaagcgtcgctttcctctgtggttgaaagatctaaacctgccagttggtgattctgtggaggaacttactttacaaagattggcatgtgggccttcaagtattgtcaattcatggcaaggttacgacatcaatggatttaccttgagtacgactacgaaggacatgaaaagcaccacacaaaacagtgggatccgtgtcgaagcgattgacacgagtggagaaaagaggtcgtattatgggaccattcaagaaatatgggaactggactatggcctaaacatccagatccctgtgctccgttgtgaatgggttaaagacacaataggggtttccgttgatgactacgggctaacgatagtcgatcacagtaaaacaggccacaaggatgatccatgggttttagcagagcgtgtggctcaagtgttttatgtgaaggacccttcagatgaaagaaaaactattgtcatatccggaaagcaacagatcgtcggcatcgacaacatcgaagaccccaatgattacaaccagttcgacgatgtaccattgtttactgatcttcctatgcgaattaagaaggttgagagaacaatcgatgaagcaaatatgtcgtacgttcgagcagatggtgttgccaaggacctctcccccctcgccgttgccgtcgccgccgccaggacctctcccccctcgccgtcgccgtcgccgccgccaggtcgccgtcgccaccgcacggaactctcccccctcgccgttgccatcgccgccgccaggtcgtccccgccgccaagtcgtccccgctaccgccaggctcctccccgaagtcgccccgcccctcgccgtcgccgacgccactgccaggacctctcccccctcgccgtcgccgtcgccgccgccaggtcgccgtcgccgccgcacggacctctcccccctcgccgttgccatcgctgccgccaggtcgtcgccgccgccaggtcgtccccgccgtcgctcggcgggagtgggaaaaaaagacgtggtgagagaagcaagaataaattaaccaaggaaacttacaacgtgattgctctcgatcaggatgggaagcccatcgagccaccgatagtgcggtccaagttcagcaacgcctgtggcactctagtcaggacgcgttgtcccattaatgtcaagttgtgggaaacagtggacgacaacatcaagacacttctctggaatgagttgcagaagtattttgtgttccctcctggatcagaggtcagggggagagattacgcacttaaaaagatgggagatcgatggcgacagtggaagtccgatctaaatcgggattatgttcagaagaatctcccaccgtttacggattatggacatatatcgcaggctgactgggacacgtttgttgcggatcgtacaacagctgaagcattggctttgaggaaaaaaatgtccgagctcgcaaagaagaacaaatatccccatagattggggtcgagcggatacgctggtcacgtcgatcaatggcgggagatcgagcaaagatttgccgcggccggtaagcccctgctggtagaccccatggttgaacgtagcaagaactgggtttgggcgcgcagcacaggtcaagtctcggatgagggagacatactattcgagactccagacatagaagaagtgactactaatttgcagcagatagtcgagaaagaaagatcaggacagttcgtcccacggagggagagagatcagcttactgcggcgttggggacggctgaacactctggacgtgtaaggggtttgtcctcaaagacaagttggaaggtcgggtttccacaagacgcaccaagttataagaagagagacaaatacaaagaacaactatcggacaagatctatgcgcaagtgaaggaacacttctactcgttggcagctgaaaacccgacagcatttccaaggttattccctgatagccagcaacccacacaatccgcacagcaaacaactaatgtacccagcagtgtaggctcagtgcagacaagtaccttccctgtggatagtataactggaccaactccgtgcagtctcgtcgtaccaatcggccgcgctggaaagactaaggaggttgcaacgggtttagcgatacctggacgtcaattccacaacacggcaatccctgaggattacgcaagggtacaggtcgccaaggtccatagcgaccacgtttccttggaactagacatacctgcacctgaggggattgaacttctcggtgatgcagtgaatcagtttatcttgtggcaccgcagagacataatcctgagcgcggccgttcttgcagcaggatcttcaaccccatcctcatcgcaggcaatgactgctgccgctcctgcaccaccgtcgcctcctaaaccaccgtcacctcgacatccgccgtcaccaccaccgcttaggtcaccgcctcgccaacctacaccaccaccctccccttctcaacaaccgcctctcccgaccccgcaaccagttcaagcctctcccacctccccaactaaacagcatgctcccccggctccgccctcagttcaaacctctccacctacaccccaatctgctctggtagaagaagtgcacataccagatggtactacatccgaaccaaagtctaatactttggaacctcgtcgtataattccaaagttgatatcgacatacgacccaaaggagattgacaaggataaggagaagttcatgttttcagctttcaggaattctgagaagagaaaagaacttgctcacgtcttgtcagactcccagaagtcagtactagcggcccaagatgaagtgcaatcctggttatctgccgatgtgcctgaaacttatgagtatggcaagccattcttgccaacttatcttatgaacaagctaccatgggaaatgagggtaatgcacgaatggtatatgaaggcatctaggaaaggtctcggtttcataagcgtcgccgtcccggaaggcgctttcatgagtggtcctaatgggatattttttatctctttccaagacctttacgccctctacaagctagataaaatggacgttaatctcgttgcggctttctgtcttatgcaattccacgaagctgatagaactggagcaaaggttggatacgtcgatccaacaagaatatgcaaaacacaacacaccgtagagctgagacaggactgcgagcaattggttggcaagaccccggaagaaaaggaagaatatgtgaagacattgcacaagaggaagaagctagaagtagcaacatacttggcaatagcaatgttggcgcacgccgacaaagatgtcttaatggtcccctaccagttcacagaccactacatattattccttgtatatccgaaagaccaattgatcatatcattggaccccgcacactatgacaaggagacatttatggaattcctcactattttgaatttagcacacaagtactaccgcaaaagaggtggaccagtacatattccatcccagaagaagttatccgtcaggactggctggccgtgctacaaacaaccaccaggaaccaacttgtgtggttattacgtgtgcgagatgctcagagtaaatgggaggtacaaaacaaccagtaaccgaatccccgaaatcccatatattgcacaacgattcaaccacactactatcttgaacgtggccgctgacctctgccgattcatccgtcgcgatgtctgcaacgcaagaggtgtcacgcctgagtcagcaagctttgccgatactggatatgaccccccgccaaaaaaatggaaagggatttgccaggttggcccatcgtttgaggccataagttgcaaccggaagtttatcggtgcacggtggtacatcgatgacgagattctaagtagcatatccgataacgaggttctttctcctagggatgtcgaaggccacggcacgcacacagcctcaacggctggcggcaacatcatccacaatgttagctttctggggctagctgcagggacagttcggggtggagcgccccgtgcacgattagccatatacaaggcctgttggtccggttatggctgctccggtgccaccgtgttgaaagccatggacgacgctgtctatgatggtgttgatgtcttatcactttctataggtggtacaaaagaagatgtgggaaccctacatgtcgtcgctaatggtatctcggttgtctacgctggtggaaacgatggtcccattgctcagacggtggagaaccaatcaccatggctagtaacggtcgctgcaaccaccattgatcggtccttgcctgtggttatcaccttgggaaacggcgaaaagttggtggcgcaatcctttgtcctcctggaaactgcaagtcagttcagtgagatacagaagtacacagacgaggaatgcaatgccaacaatattatgaacagcacggtgaaggggaaaatagccttctgcttcatgggagagatgttgaataataagcagcagacatcataccctgatgtcaccacggcagtggcagccaaaggaggcagagcaccggacattgctgcaccaggggtttcgattttagccgctgctcagattccatattacaaaggtgtttcctaccatttcgattctggaacatctatggcttgcccccatgtagctgggatcattgcggtgctcaagtccattcatccaaaatggtcacctgcggctctcaaatccgcaatcatgacaacagactactccatcccgctcgctggcgtgcaccagcgatcgggagagcaggtctccggaacctctgcctttgacgtcctgcaccgggagaaggcggcaataaggcactgtgattttactatggctgattttgccgatgcactgaggccggataaattcaccggtgtgcattttaagagatggcagatcagggtcactctgtggctgacagctatgaaatgcttctgggtgagtactggcaaacctgaaggagttcttactgctgaacagcagaagcaattcgaggaagccactactctatttgtgggatgcattcttagcgttcttggcgatcgtctggtcgaggtgtatatgcatatgaccgatgctaaggagttgtgggatgcactgaatactaaattcggtgctactgatgctagcaatgatctgtatatcatggagcagtttcatgactacaagatggctgacaaccgttctgtagtcgaacaggctcatgagatacaaaccatggctaaaagtttcggtactgcactcaaacacaagagacaggaatactccgttgaggggttgatagcgtctcttgatgttgaggagaaagctcgggaaaaagatgccgcgtctaagggcgatggtgggcagtccagcgccaatgttgtgcacaaggcccagaacaagagtaaggggaaatacaaagctcagcagaccaccaacttcaagaagcagaagaagaacaacaacaatcctaatcaggatgagaggacttgctttgtgtgtggccaagttggtcatctggctaggaagtgtccacagcgcaaggggatgaaggcacctgcagggcagacttctaagtctgctaatgtgaccattggcaacactggagatggaagcgggtatggtaatttacctactgttttttcagttaatcaatctactaattggtgggttgatactggggccaatgtcgcacggggttccaccgtcctaatggggaatgggtcacatgcttctgttcatggtgttggcacggtagatctgaagtttacttcgggaaagatcgtgcagctgaagaacgtgcagcatgtcccttctatcgacaggaatcttgttagtggctcccgtctgactagagacggatttaagttggtttttgagtctaataaagtagtcgtgtctaaacatggatattttattggtaaaggttatgagtgcggaggcctgttccgcttttccctttctgatttctgcaataagtctgtgaaccatatttgtggcagtgtggatgatgaggctaatgtttggcattcacgtttatgtcatattaattttggcttgatgtctcggctttccagcatgtgtttaattcctaagttttccattgtcaaaggttctaagtgccatagttgtgtgcaatcgaagcaacctcgcaagcctcacaaggctgccgaggagagaaacttggcaccactagaactcctacattcagatctttgtgaaatgaatggggtgttgacgaagggtggaaaacgatatttcatgacattcattgatgatgctactagattttgctatgtgtacttgttgaaaaagaaagacgaggctctagactattttaaaatttataaggcagaagttgaaaatcaacttgacagaaagataaaaaggcttaggtctgatcgtggtggagagtttttctcgaacgagtttgacttattctgtgaggaacatggcatcatacatgagaggacgcctccctattctcccgagtctaatgggattgctgaaaggaagaactgcacactgactgacttggtgaatgccatgttggacaccgcgggactgcctaaggcatggtggggggaggtattgttgacctcaaatcatgtgttaaacagagttcctaacagaaataaggacaaaacaccatatgagatatggattggtagaaaaccatcactttcttatttgcgcacatgggggtgcttggcgaaagtcaatgtaccaataacgaagaagcgcaaacttggacctaagactgtggactgtgtctttctgggatatgctcatcatagcattgcctatagatttttaatagttaaatccgaggtactggacatgcatgttggtataattatggagtctcgtgatgctaccttctttgagagctttttcccaatgaaggatacacatagtggttcgaaccaaccctctgaaataattcccagttcaatcataccaccagaacaaactgaacatacacatgaacttgtctctgaggaggatgtcagtgaagctcctcgaaggagtaagagacaaaggacggctaagtcttttggtgatgattttactgtgtacctcgtggatgacactcctaagtcaatttcagaagcatatgcatctcctgatgcagactactggaaggaggctgtccgtagtgaaatggattccattatcgctaacgggacttgggaggtgacagagcaaccctatgggtgtaaacctgtggggtgcaagtgggtgttcaagaagaagcttaggcctgacggtactattgaaaagtacaaggctcggcttgttgctaagggctatactcagaaagaaggcgaagatttctttgacacttactcacctgttgctagattgaccacaattcgtgtgctactttccctagcagcctcacatggtcttctcgttcatcaaatggacgttaagacagcttttcttaatggagagctggatgaggagatctatatggatcaacctgatgggtttgtagttgaaggctttggagtcaattatgcgtatccatgtgtgtattatcgccatggtgggggtcagggagttattttgtgcttgtatgttgacgacatactgatatttgggacaaaccttgaggtgataaatgaggttaaatcattcttgtctcaaaattttgatatgaaagatttgggagtagctgatgttatcttaaacattaagctaattagaggtgagaatgggattacactcttgcagtcccattatgtggaaaagatcttgaatcgctttggctacattgatagtaagccttttccaacaccttatgatcctagcttgttgcttcgcaagaacaagagaattgctaggaatcaactggaatactcccaaatcattggctcgttgatgtacctggctagtgcaactaggcctgatatctcctttgctgtgagcaagttgagccgatttacctctaatccgggagatgatcactggcgtgcgcttgagcgagtaatgcgctatctgaaaggtactgtggaattggggcttcactatactgggtatcctgcggtactggagggttatagtgattctaactggatctctgatgtggatgagatcaaagccactagtggatatgttttcacactgggtggtggtgctgtttcatggaggtcttgcaaacagacaattttgacgaggtcaaccatggaagcagagctaacggcactggatactgctactgttgaggcagaatggctgcgtgatctattaatggatctgcctgttgttgaaaaaccggtgccggctatccttatgaactgtgacaatcaaacgacatgtgaaaagacgattgaagtctgtcaggaaattaagaaactccggagttataacgttggattacatccaaacagcgagaaacctggcagatcccttcacgaagggactatcacgaaatgtgatagacaatgcatcgaaggagatgggtttgagacccatgtgagttatactatggtggtaacccagtctatgtga

SEQ ID NO: 23291 - DNA, 3969 bp, Oryza sativa
  Clone ID: TF_OsC1528_2320
atggggggatccggccgattcggccggatgcagccgcccgagcgctcgggcgagcaggggcgaacgacatgtgggtcgcgtcacccctctcaccacgaggcgagctcggcggccaggcaaggcgacgccatggaggcgagctcgacggcggcggctagggtgacgcgagctcggcggctagggcaagccggcgacgagagaggagacgagctcggcgacgggagaggagacgagctcggcgacgagaaaggagatgagccggcgacgaccggatctgggagggcaccggcgagagcgagcgacggcggccggggagagaggatacgaggtggcgagggcggcccggaggggaatattccccctagatgccggatggggggatccggccgattcggccggatgcagccgcccgagcgctcgggcgagcaggggcgaacgacatgtgggtcgcgtcacccctctcaccacgaggcgagctcggcggccaggcaaggcgacgccatggaggcgagctcgacggcggcggctagggtgacgcgagctcggcggctagggcaagccggcgacgagagaggagacgagctcggcgacgggagaggagacgagctcggcgacgagaaaggagatgagccggcgacgaccggatctgggagggcaccggcgagagcgagcgacggcggccggggagagaggatacgaggtggcgagtctacctcgtacgcggtacgtcgggtcgccggcagccactactccatcccgctcgccggcgtgcaccggcgatcgggagagcaggtctccggaacctctgccttcgacgtcctgcaccgggagaaggcggcaataagggtcactctgtggctgacagctatgaaatgcttctgggtgagtactggcaaacctgaaggagttcttactgctgaacagcagaagcaattcgaggaagccactactctctttgtgggatgcattcttagcgttcttggcgatcgtctggtcgaggtgtatatgcatatgaccgacgctaaggagttgtgggatgcactgaatactaaattcggtgctactgatgctagcaatgatctgtatatcatggagcagtttcatgactacaaaatggctgacaaccgttctgtagtcgaacaggctcatgagatacaaaccatggctaaggaactcgaactccttaagtgtgtcttacccgacaaatttgtggccgggtgcattattgcaaaactacctccatcttggagaagtttcggtactgcactcaaacacaagagacaggaatactccgttgaggggttgatagcgtctcttgatgttgaggagaaagctcgggaaaaagatgccgcgtctaagggcgatggtgggcagtccagtgccaatgttgtgcacaaggcccagaacaagagcaaggggaaatacaaagctcagcagaccaccaacttcaagaagcagaagaagaacaacaacaatcctaatcaggatgagaggacttgctttgtgtgtggccaagttggtcatctggctaggaagtgtccacagcgcaaggggatgaaggcacctgcagggcagacttctaagtctgctaatgtgaccattggcaacactggagatggaagcgggtatggtaatttacctactgttttctcagttaatcaatctactaattggtgggttgatactggggccaatgtacatgtttgtgctgacatctcattgttttcttcttatcaggtcgcacggggttccaccgtcctaatggggaatgggtcacatgcttctgttcatggtgttggcatggtagatctgaagtttacttcgggaaagatcgtgcagctgaagaacgtgcagcatgtcccttctatcgacaggaatcttgttagtggctcccgtctgactagagacggatttaagttggtttttgagtctaataaagtagtcgtgtctaaacatggatattttattggtaaaggttatgagtgcggaggcctgttccgcttttccctttctgatttctgcaataagtctgtgaaccatatttgtggcaaagttgaaaatcaacttgacagaaagataaaaaggcttaggtctgatcgtggtggagagtttttctcgaacgagtttgacttattctgtgaggaacatggcatcatacatgagaggacgcctccctattctcccgagtctaatgggattgctgaaaggaagaatcgcacactgactgacttggtgaatgccatgttggacaccgcgggactgcctaaggcatgtgaagctcctcgaaggagtaagagacaaaggacggctaagtcttttggtgatgatttcactgtgtacctcgtggatgacactcctaagtcaatttcagaagcatatgcatctcctgatgcagactactggaaggaggctgtccgtagtgaaatggattccattatcgctaacgggacttgggaggtgacagagcgaccctatgggtgtaaacctgtggggtgcaagtgggtgttcaagaagaagcttaggcctgacggtactattgaaaagtacaaggctcggcttgttgctaagggctatactcagaaagaaggcgaagatttctttgacacttactcacctgttgctagattgaccacaattcgtgtgctactttccctagcagcctcacatggtcttctcgttcatcaaatggacgttaagacagcttttcttaatagagagctggatgaggagatctatatggatcaacctgatgggtttgtagttgaaggtcaagaaggcaaagtgtgcaaattgttgaagtctttgtatggtctgaaacaagctcctaagcaatgtcatgagaaatttgacaaaacattgacatctgcaggctttgcagtcaatgaggcagataaatgtgtgtactatcgccatggtggggatgagggagttattttgtgcttgtatgttgacgacatactgatatttgggacaaaccttgaggtgataaatgaggctaaatcattcttgtctcaaaattttgatatgaaagatttgggagtagctgatgttatcttaaacattaagctaattagaggtgagaatgggattacactcttgcagtcccattatgtggagaagatcttgaatcgctttggctacattgatagtaagccttctccaacaccttatgatcctagcttgttgcttcgcaagaacaagagaattgctaggaatcaactggaatactcccaaatcattggctcgttgatgtacctggctagtgcaactaggcctgatatctcctttgctgtgagcaagttgagccgatttacctctaatccgggagatgatcactggcgtgcgcttgagcgagtaatgcgctatctgaaaggtactgtggaattggggcttcactatactgggtatcctgcggtactggagggttatagtgattctaactggatctctgatgtggatgagatcaaagccactagtggatatgttttcacactgggtggtggtgctgtttcatggaggtcttgcaaacagacaattttgacgaggtcaatcatggaagcagagctaacggcactggatactgctactgttgaggcagaatggctgcgtgatctattaatggatctgcctgttgttgaaaaaccggtgccggctatccttatgaactgtgacaatcaaacgacatgtgaaaagacgattgaagtctgtcaggaaattaagaaactccggagttataacgttggattacatccaaacagcgagaaacctggcagatcccttcacgaagggactatcacgaaatgtgatagacaatgcatcgaaggagatgggtttgagacccatattaaatcattatatgtctataatctcaacaggtcatcgcttgttactcttagaagttgccgcctactagacggcttggaggagttgcctagtgacctctctgagaagattgtggagaaggcctag

SEQ ID NO: 23292 - DNA, 4311 bp, Oryza sativa
  Clone ID: TF_OsC1528_2345
atgtgtatgaaacaagtgtatgtacattcgagtgacaaaaaccacatcctaatgcaacgatgtgaacatccaagggcagtataaaaggaggtgcagctgcgaggcattgacctgcactcccttcctcctagctcgaagtgagcaatcactcttgtgaaacttttgcagacgccagccatggcgatcaggggcatcccgtcctctcgcgagatgaccgtggacgacttcaagaactggctgaagcagttcgacaccgacaacgacggccggataagccggggcgagctccgggaggccatccgccgccgcggcggctggttctccggcctgaaagccggccgcgccgtccgccacgccgacagggacaacagcggcttcgtggacgagtccgagatcgagaacctcgtcgccttcgcccagaaaactctgggcatgaaggttactgcctggcactgtgattttactatggctgattttgccgatgcactgaggccggataaattcaccggtgtgcattttaagagatggcagatcagggtcactctgtggctgacagctatgaaatgcttctgggtgagtactggcaaacctgaaggagttcttactgctgaacagcagaagcaattcgaggaagccactactctctttgtgggatgcattcttagcgttcttggcgatcgtctggtcgaggtgtatatgcatatgaccgacgctaaggagttgtgggatgcactgaatactaaattcggtgctactgatgctagcaatgatctgtatatcatggagcagtttcatgactacaaaatggctgacaaccgttctgtagtcgaacaggctcatgagatacaaaccatggctaaggaactcgaactccttaagtgtgtcttacccgacaaatttgtggccaggtgcattattgcaaaactacctccatcttggaggagtttcggtactgcactcaaacacaagagacaggaatactccgttgaggggttgattgcgtctcttgatgttgaggagaaagctcgggaaaaagatgccgcgtctaagggcgatggtgggcagtccagtgccaatgttgtgcacaaggcccagaacaagagcaaggggaaatacaaagctcagcagaccaccaacttcaagaagcagaagaagaacaacaacaatcctaatcaggatgagaggacttgctttgtgtgtggccaagttggtcatctggctaggaagtgtccacaacgcaaggggatgaaggcacctgcagggcagacttctaagtctgctaatgtgaccattggcaacactggagatggaagcgggtatggtaatttacctactgttttttcagttaatcaatctactaattggtgggttgatactggggccaatgtcgcacggggttccaccgtcctaatggggaatgggtcacatgcttctgttcatggtgttggcacggtagatctgaagtttacttcgggaaagatcgtgcagctgaagaacgtgcagcatgtcccttctatcgacaggaatcttgttagtggctcccgtctgactagagacggatttaagttggtttttgagtctaataaagtagtcgtgtctaaacatggatattttattggtaaaggttatgagtgcggaggcctgttccgcttttccctttctgatttctgcaataagtctgtgaaccatatttgtggcagtgtggatgatgaggctaatgtttggcattcacgtttatgtcatattaattttggcttgatgtctcggctttccagcatgtgtttaattcctaagttttccattgtcaaaggttctaagtgccatagttgtgtgcaatcgaagcaacctcgcaagcctcacaaggctgccgaggagagaaacttggcaccactagaactcctacattcagatctttgtgaaatgaatggggtgttgacgaagggtggaaaacgatatttcatgacattgattgatgatgctactagattttgctatgtgtacttgttgaaaacgaaagacgaggctctagactattttaaaatttataaggcagaggttgaaaatcaacttgacagaaagataaaaaggcttaggtctgatcgtggtggagagtttttctcgaacgagtttgacttattctgtgaggaacatggcatcatacatgagaggacgcctccctattctcccgagtctaatgggattgctgaaaggaagaaccgcacactgactgacttggtgaatgccatgttggacaccgcgggactgcctaaggcatggtggggggaggcattgttgacctcaaatcatgtgttaaacagagttcctaacagaaataaggacaaaacaccatatgagatatggattggtagaaaaccatcactttcttatttgcgcacatgggggtgcttggcgaaagtcaatgtaccaataacgaagaagcgcaaacttggacctaagactgtggactgtgtttttctgggatatgctcatcatagcattgcctatagatttttaatagttaaatccgaggatacacatagtggttcgaaccaaccctctgaaataattcccagttcaatcacaccaccagaacaaactgaacatacacatgaacttgtctctgaggaggatgtcagtgaagctcctcgaaggagtaagagacaaaggacggctaagtcttttggtgatgatttcactgtgtacctcgtggatgacactcctaagtcaatttcagaagcatatgcatctcctgatgcagactactggaaggaggttgtccgtagtgaaatggattccattatcgctaacgggacttgggaggtgacagagcgaccctatgggtgtaaacctgtggggtgcaagtgggtgttcaagaagaagcttaggcctgacggtactattgaaaagtacaaggctcggcttgttgctaagggctatactcagaaagaaggcgaagatttctttgacacttactcacctgttgctagattgaccacaattcgtgtgctactttccctagcagcctcacatggtcttctcgttcatcaaatggacgttaagacagcttttcttaatggagagctggatgaggagatctatatggatcaacctgatgggtttgtacttgaaggtcaagaaggcaaagtgtgcaaattgttgaagtctttgtatggtctgaaacaagctcctaagcaatggcatgagaaatttgacaaaacattgacatctgcaggctttgcagtcaatgaggcagataaatgtgtgtactatcgccatggtgggggtgagggagttattttgtgcttgtatgttgacgacatactgatatttgggacaaaccttgaggtgataaatgaggttaaatcattcttgtctcaaaattttgatatgaaagatttgggagtagctgatgttattttaaacattaagctaattagaggtgagaatgggattacactcttgcagtctcattatgtggagaagatcttgaatcgctttggctacattgatagtaagccttctccaacaccttatgatcctagcttgtcgcttcgcaagaacaagagaattgctaggaatcaactggaatactcccaaatcattggctcgttgatgtacctggctagtgcaactaggcctgatatctcctttgctgtgagcaagttgagccgatttacctctaatccgggagatgatcactggcgtgcgcttgagcgagtaatgcgctatctgaaaggtactgtggaattggggcttcactatactgggtatcctgcggtactggagggttatagtgattctaactggatctctgatgtggatgagatcaaagccactagtggatatgttttcacactgggtggtggtgctgtttcatggaggtcttgcaaacagacaattttgacgaggtcaaccatggaagcagagctaacggcactggatactgctactgttgaggcagaatggttgcgtgatctattaatggatctgcctgttgttgaaaaaccggtgccggctatccttatgaactgtgacaatcaaacgacatgtgaaaagacgattgaagtctgtcaggaaattaagaaactccggagttataacgttggattacatccaaacagcgagaaacctggcagatcccttcacgaagggactatcacgaaatgtgatagacaatgcatcgaaggagatgggtttgagacccatagcattcttgaaggaactcacctttgtgagcttgactgttggtcgcagtccatgaagattttgggtgaatcttctaggaagcttactaaagacctaggagtatga

SEQ ID NO: 23293 - DNA, 6770 bp, Oryza sativa
  Clone ID: TF_OsC1528_2357
atggcggattcgacggcgaggacggtgaaggacgtgaaccctcatgagttcgtcaaggcctactccgcccacctcaagcgctccggcaagatggagctccctgagtgggttgacatcgtgaagactgcgaggttcaaggagctccctccttatgatccggactggtactacacgagggctgcctcgattgcaaggaagatctacctgaggcagggtattggtgtaggtggcttccagaagatctatggtggccgccagaggaacggctcacgccccccgcacttctgcaagagcagcggcgctatctcacgcaacatccttcagcagctgcagaagatgggcatcattgatgtcgacccgaagggtggaagactcatcacctcccagggaaggcgtgatctggaccaagtggccggaagagttgatgaatcaatcagagacaggaaagttgaagcaactggccagcaatcccagacgttagattcaacttggacggccaagatgcaccctaacgccctaccatctaatgatgcgttcatgctagttttcatctgtaatgtcatgatttatttatggaataaattaaatcattatatgcccataatctcaacaatccaaaaaccttattataggcactgtgattttactatggctggttttgccgatgcactgaggccggataaattcaccggtgtgcattttaagagatggcagatcagggtcactctgtggctgacagctatgaaatgcttctgggtgagtactggcaaacctgaaggagttcttactgctgaacagcagaagcaattcgaggaagccactactctctttgtgggatgcattcttagcgttcttggcgatcgtctggtcgaggtgtatatgcatatgaccgacgctaaggagttgtgggatgcactgaatactaaattcggtgctactgatgctagcaatgatctgtatatcatggagcagtttcatgactacaaaatggctgacaaccgttctgtagtcgaacaggctcatgagatacaaaccatggctaaggaactcgaactccttaagtgtgtcttacccgacaaatttgtggccgggtgcattattgcaaaactacctccatcttggaggagtttcggtactgcactcaaacacaagagacaggaatactccgttgaggggttgattgcgtctcttgatgttgaggagaaagctcgggaaaaagatgccgcgtctaagggcgatggtgggcagtccagtgccaatgttgtgcacaaggcccagaacaagagcaaggggaaatacaaagctcagcagaccaccaacttcaagaagcagaagaagaacaacaacaatcctaatcaggatgagaggacttgctttgtgtgtggccaagttggtcatctggctaggaagtgtccacaacgcaaggggatgaaggcacctgcagggcagacttctaagtctgctaatgtgaccattggcaacactggagatggaagcgggtatggtaatttacctactgttttttcagttaatcaatctactaattggtgggttgatactggggccaatgtacatgtttgtgctgacatctcattgttttcttcttatcaggtcgcacggggttccaccgtcctaatggggaatgggtcacatgcttctgttcatggtgttggcacggtagatctgaagtttacttcgggaaagatcgtgcagctgaagaacgtgcagcatgtcccttctatcgacaggaatcttgttagtggctcccgtctgactagagacggatttaagttggtttttgagtctaataaagtagtcgtgtctaaacatggatattttattggtaaaggttatgagtgcggaggcctgttccgcttttccctttctgatttctgcaataagtctgtgaaccatatttgtggcagtgtggatgatgaggctaatgtttggcattcacgtttatgtcatattaattttggcttgatgtctcggctttccagcatgtgtttaattcctaagttttccattgtcaaaggttctaagtgccatagttgtgtgcaatcgaagcaacctcgcaagcctcacaaggctgccgaggagagaaacttggcaccactagaactcctacattcagatctttgtgaaatgaatggggtgttgacgaagggtggaaaacgatatttcatgacattgattgatgatgctactagattttgctatgtgtacttgttgaaaacgaaagacgaggctctagactattttaaaatttataaggcagaagttgaaaatcaacttgacagaaagataaaaaggcttaggtctgatcgtggtggagagtttttctcgaacgagtttgacttattctgtgaggaacatggcatcatacatgagaggacgcctccctattctcccgagtctaatgggattgctgaaaggaagaaccgcacactgactgacttggtgaatgccatgttggacaccgcgggactgcctaaggcatggtggggggaggcattgttgacctcaaatcatgtgttaaacagagttcctaacagaaataaggacaaaacaccatatgagatatggattggtagaaaaccatcactttcttatttgcgcacatgggggtgcttggcgaaagtcaatgtaccaataacgaagaagcgcaaacttggacctaagactgtggactgtgtttttctgggatatgctcatcatagcattgcctatagatttttaatagttaaatccgaggtaccggacatgcatgttggtacaattatggagtctcgtgatgctaccttctttgagagctttttcccaatgaaggatacacatagtggttcgaaccaaccctctgaaataattcccagttcaatcacaccaccagaacaaactgaacatacacatgaacttgtctctgaggaggatgtcagtgaagctcctcgaaggagtaagagacaaaggacggctaagtcttttggtgatgatttcactgtgtacctcgtggatgacactcctaagtcaatttcagaagcatatgcatctcctgatgcagactactggaaggaggctgtccgtagtgaaatggattccattatcgctaacgggacttgggaggtgacagagcgaccctatgggtgtaaacctgtggggtgcaagtgggtgttcaagaagaagcttaggcctgacggtactattgaaaagtacaaggctcggcttgttgctaagggctatactcagaaagaaggcgaagatttctttgacacttactcacctgttgctagattgaccacaattcgtgtgctactttccctagcagcctcacatggtcttctcgttcatcaaatggacgttaagacagcttttcttaatggagagctggatgaggagatctatatggatcaacctgatgggtttgtagttgaaggtcaagaaggcaaagtgtgcaaattgttgaagtctttgtatggtctgaaacaagctcctaagcaatggcatgagaaatttgacaaaacattgacatctgcaggctttgcagtcaatgaggcagataaatgtgtgtactatcgccatggtgggggtgagggagttattttgtgcttgtatgttgacgacatactgatatttgggacaaaccttgaggtgataaatgaggttaaatcattcttgtctcaaaattttgatatgaaagatttgggagtagctgatgttatcttaaacattaagctaattagaggtgagaatgggattacactcttgcagtcccattatgtggagaagatcttgaatcgctttggctacattgatagtaagccttctccaacaccttatgatcctagcttgttgcttcgcaagaacaagagaattgctaggaatcaactggaatactcccaaatcattggctcgttgatgtacctggctagtgcaactaggcctgatatctcctttgctgtgagcaagttgagccgatttacttctaatccgggagatgatcactggcgtgcgcttgagcgagtaatgcgctatctgaaaggtactgtggaattggggcttcactatactgggtatcctgcggtactggagggttatagtgattctaactggatctctgatgtggatgagatcaaagccactagtggatatgttttcacactgggtggtggtgctgtttcatggaggtcttgcaaacagacaattttgacgaggtcaaccatggaagcagagctaacggcactggatactgctactgttgaggcagaatggctgcgtgatctattaatggatctgcctgttgttgaaaaaccggtgccggctatccttatgaactgtgacaatcaaacggtaattgtcaaagtgaatagttctaaggataatatgaaatcgtctagacatgtgaaaagacgattgaagtctgtcaggaaattaagaaactccggagttataacgttggattacatccaaacagcgagaaacctggcagatcccttcacgaagggactatcacgaaatgtgatagacaatgcatcgaaggagatgggtttgagacccatatctaatgatgcgttcatgctagttttcatctgtaatgtcatgacttatttatggaataaattaaatcattatatgcccataatctcaacagttctttcacatgacaaaacttgtggttatcaaagctctggacatctacagaagaacaaggaatctggcgatactgaaacagatccattgatgcctatccctgctgatatcgatttgccaatcttggaaaatatgccgaaaactaagaggggtggtgatgatctcgctagaagcttgcataagaacagaaaaacttgcaatggtggaagaactgactcattggcctcaggttgcttgcatggggaccctaatgaggatgtctggactgagctcaatgatgtggttaaatctaatttgtctaaaagtgtcgcgtcgcttagtttgcgcaatggtgtagctgtagaccgccaggggcgtcttacaaagttcctcacttctgcaagtttggtagagcttttggttagagctctcaatgatacaaacaaaaaccatggtgacttagagctcgaagtgtaccatgaaggcaatgaagtatgccagggttatttgactgattttgatttggatcacaatctggccatcgtcgaaatctggactgactttgatgttcatgttggacttctccaacatgcggtggaatttctgccccattgtaaggtaatagctatagggcgtgaaatcactggcaaactgatggccaggagggtgcagttaatggatgatttaagtgtatctgaagatagtgaagatcttgactgtaaaatcaaagaggcttgggaaggtgcaccacttttttcttttgatgggaactttgttggcatgaacctttttttggctatgggaagagcctttttcctgccatggggcactattcagaagcattgggcatccctgcaaaacaagacgggacttccagagtcaaacagtttgaaggtttataggtttggaacaagttccacagctgagaaatctaacagccatccagaagtaaacaacgatattctcgacccggagcagattcatatagactctatgggctatccaaagtttccaacacacatgtttgctgctttctgcaccactaacaactacgctataatgtatctatcaccagatgggatgattttggttaatactttcgaagagactttcggcgatctacgtggtgaaggtgtatggagtaaactcagtaaaaaatcttgttctaacatagaccgcagtgttgtcgcactagcttcattcagtggagagagaaggttttttgcatgcacaggcttttttgttgaatggaatggttctacagttattttgacatcagcaagcttggttagaagttctggcgatgagaacaagattgttgacaacttgaggattgaagtgttgcttccaaacaaacaacgcgtagaagggatgttacagcattgtaatcttcattacaatgttgctctagtcagtgtgggttaccgtgctcttcgcccagcacatggtcagcttgattggtggggcaagagtagtaaggtagtggctgtagggcgttgcttcaagtcaggtgcattgatggctgcaagtggaacggtaaccccctggacaggcacactcgattgcgacttcctcgaacgttcgtcatgtaaaatcacaaaggctgggattggaggccctgttgttactcttgatggggattgtattggtatgaacttctatgatacgagaataggaacccctttcctgtcgtgggaggtgattgttgatattgtagcatcctttgaggaaaaaaggtggccagtgcctatgccatattgatgccacccggactgtgtgtaggatgagtctgaagatgatgaagagttggggttttcatccacatttggctgcaagctgaagtacaattacataaatggagagaaaagcgtgttcttttagttgctgttagatgtagaagaaacctaacctgaacttgttgtcaatctcactatatcctaaagcctgaacttttatataggaaaaacaagtgaagccagaacttgttgtcaatctcactatatcctaaagcctgaacttttatgtaggaaaaaaaaaagttaagccagaacttgttgtcaatctcactatttacctgaacaacctttgtttgtaggcaacaatcagaaaaattccaagcaaaaagtatctctttgacaaggttcccc

SEQ ID NO: 23294 - DNA, 5703 bp, Oryza sativa
  Clone ID: TF_OsC1528_2368
atgcgcctcctcgttctcatgtgtctggtcatcgcggccgccatgcagatgcaggctgcatcaggagcgcctcccacggccgccaagcttgctcactgcctcaaatcctgcgggggcgccaacatctcctatccttacggcgttggggccggctgtttccgccccggcttcgagctcacttgcgaccattccaccaaacccccaaagctcctcttattgggtgttgccaccaacactaacaccaccaccaccaagatcgtggatcaatatagagatgggtatgttcaagcctatgtttctttcaacatagccaccacaccgggtgtgctcggcacctacaacaggacatgggagtccccagggagaatccttagcatcgggccggattattatgctttggtggctgtcggttgcggaattgaggtctacttggtcgaccctgatacggaagatatgctgggctattgcttcagcatgtgtactgacatggcgatgatgcacaaggaagcagaggggaaagcttgcagtggcatgggctgctgcgtcgtcaccttccggagacctgtccgggctttcagagtttccatcactcagagagaagcaacgcagcctttccaagttgctaatgctagtactatcaaggttttcttatcagaagagagtacgacctaccattacaattttacaataggagatctcctctccgatgagataaatgaaaccactgttgcatctacttcggcgtacctatcaacctttatcgcagaccaaccaaactgtacaatagcgcagaaggatcctgagcggtatgcttgtggtgataacaaatgtttggatgcggatgacgaaaatggaggctaccgttgtgcatgcatcaaatatactaatagcaatccctacctcgacggtgactgcgaccaagactactccatcccgctcgccggcgtgcaccagcgatcgggagagcaggtctccggaacctctgcctttgacgtcctgcaccgggagaaggcggcaataagatctaatgatgcgttcatgctagttttcatctgtaatgtcatgacttatttatggaataaattaaatcattatatgcccataatctcaacaatccaaaaaccttattataggcactgtgattttactatggctggttttgccgatgcactgaggccggataaattcaccggtgtgcattttaagagatggcagatcagggtcactctgtggctgacagctatgaaatgcttctgggtgagtactggcaaacctgaaggagttcttactgctgaacagcagaagcaattcgaggaagccactactctctttgtgggatgcattcttagcgttcttggcgatcgtctggtcgaggtgtatatgcatatgaccgacgctaaggagttgtgggatgcactgaatactaaattcggtgctactgatgctagcaatgatctgtatatcatggagcagtttcatgactacaaaatggctgacaaccgttctgtagtcgaacaggctcatgagatacaaaccatggctaaggaactcgaactccttaagtgtgtcttacccgacaaatttgtggccgggtgcattattgcaaaactacctccatcttggaggagtttcggtactgcactcaaacacaagagacaggaatactccgttgaggggttgattgcgtctcttgatgttgaggagaaagctcgggaaaaagatgccgcgtctaagggcgatggtgggcagtccagtgccaatgttgtgcacaaggcccagaacaagagcaaggggaaatacaaagctcagcagaccaccaacttcaagaagcagaagaagaacaacaacaatcctaatcaggatgagaggacttgctttgtgtgtggccaagttggtcatctggctaggaagtgtccacaacgcaaggggatgaaggcacctgcagggcagacttctaagtctgctaatgtgaccattggcaacactggagatggaagcgggtatggtaatttacctactgttttttcagttaatcaatctactaattggtgggttgatactggggccaatgtacatgtttgtgctgacatctcattgttttcttcttatcaggtcgcacggggttccaccgtcctaatggggaatgggtcacatgcttctgttcatggtgttggcacggtagatctgaagtttacttcggaaaagatcgtgcagctgaagaacgtgcagcatgtcccttctatcgacaggaatcttgttagtggctcccgtctgactagagacggatttaagttggtttttgagtctaataaagtagtcgtgtctaaacatggatattttattggtaaaggttatgagtgcggaggcctgttccgcttttccctttctgatttctgcaataagtctgtgaaccatatttgtggcagtgtggatgatgaggctaatgtttggcattcacgtttatgtcatattaattttggcttgatgtctcggctttccagcatgtgtttaattcctaagttttccattgtcaaaggttctaagtgccatagttgtgtgcaatcgaagcaacctcgcaagcctcacaaggctgccgaggagagaaacttggcaccactagaactcctacattcagatctttgtgaaatgaatggggtgttgacgaagggtggaaaacgatatttcatgacattgattgatgatgctactagattttgctatgtgtacttgttgaaaacgaaagacgaggctctagactattttaaaatttataaggcagaagttgaaaatcaacttgacagaaagataaaaaggcttaggtctgatcgtggtggagagtttttctcgaacgagtttgacttattctgtgaggaacatggcatcatacatgagaggacgcctccctattctcccgagtctaatgggattgctgaaaggaagaaccgcacactgactgacttggtgaatgccatgttggacaccgcgggactgcctaaggcatggtggggggaggcattgttgacctcaaatcatgtgttaaacagagttcctaacagaaataaggacaaaacaccatatgagatatggattggtagaaaaccatcactttcttatttgcgcacatgggggtgcttggcgaaagtcaatgtaccaataacgaagaagcgcaaacttggacctaagactgtggactgtgtttttctgggatatgctcatcatagcattgcctatagatttttaatagttaaatccgaggtaccggacatgcatgttggtacaattatggagtctcgtgatgctaccttctttgagagctttttcccaatgaaggatacacatagtggttcgaaccaaccctctgaaataattcccagttcaatcacaccaccagaacaaactgaacatacacatgaacttgtctctgaggaggatgtcagtgaagctcctcgaaggagtaagagacaaaggacggctaagtcttttggtgatgatttcactgtgtacctcgtggatgacactcctaagtcaatttcagaagcatatgcatctcctgatgcagactactggaaggaggctgtccgtagtgaaatggattccattatcgctaacgggacttgggaggtgacagagcgaccctatgggtgtaaacctgtggggtgcaagtgggtgttcaagaagaagcttaggcctgacggtactattgaaaagtacaaggctcggcttgttgctaagggctatactcagaaagaaggcgaagatttctttgacacttactcacctgttgctagattgaccacaattcgtgtgctactttccctagcagcctcacatggtcttctcgttcatcaaatggacgttaagacagcttttcttaatggagagctggatgaggagatctatatggatcaacctgatgggtttgtagttgaaggtcaagaaggcaaagtgtgcaaattgttgaagtctttgtatggtctgaaacaagctcctaagcaatggcatgagaaatttgacaaaacattgacatctgcaggctttgcagtcaatgaggcagataaatgtgtgtactatcgccatggtgggggtgagggagttattttgtgcttgtatgttgacgacatactgatatttgggacaaacattgaggtgataaatgaggttaaatcattcttgtctcaaaattttgatatgaaagatttgggagtagctgatgttattttaaacattaagctaattagaggtgagaatgggattacactcttgcagtctcattatgtggagaagatcttgaatcgctttggctacattgatagtaagccttctccaacaccttatgatcctagcttgtcgcttcgcaagaacaagagaattgctaggaatcaactggaatactcccaaatcattggctcgttgatgtacctggctagtgcaactaggcctgatatctcctttgctgtgagcaagttgagccgatttacctctaatccgggagatgatcactggcgtgcgcttgagcgagtaatgcgctatctgaaaggtactgtggaattggggcttcactatactgggtatcctgcggtactggagggttatagtgattctaactggatctctgatgtggatgagatcaaagccactagtggatatgttttcacactgggtggtggtgctgtttcatggaggtcttgcaaacagacaattttgacgaggtcaaccatggaagcagagctaacggcactggatactgctactgttgaggcagaatggttgcgtgatctattaatggatctgcctgttgttgaaaaaccggtgccggctatccttatgaactgtgacaatcaaacgacatgtgaaaagacgattgaagtctgtcaggaaattaagaaactccggagttataacgttggattacatccaaacagcgagaaacctggcagatcccttcacgaagggactatcacgaaatgtgatagacaatgcatcgaaggagatgggtttgagacccatagcattcttgaaggaactcacctttgtgagcttgactgttggtcgcagtccatgaagattttgggtgaatcttctaggaagcttactaaagacctaggacgacagcatcaaccacgaatcgagcagcaacaatccaatcaacaacgcagcaagcagcagtggtggtggcggccggcgggaggggacggattcggcggtggctcaagcaaatccgccgccggtggcaggttcggctgcggctcagcgcggaacagcgcaaggacgcctggtggtggtgaagactcgaagacggcggtgagatccatccccatccttctcgaagacgacgatggcggtggcacggattcggtggtggctcaagcaaatccgccgccggtggtagtctggcagtcgagggagcacattcaatggtggcggcgaggtcgtggtgagctcatcgcagcggtggacggcgggtccggctgcggctcggcgcggagcagcgcgaggatgcccagtggcggtgaagattcaaagacgcggtgagatccatccccattcttctcgaaaacgatgacggcggcgacacgaacaagactcgaagacctgttgtcgtcctcctcgagctcctgcgcacgactcggcctcgtcaagcttcctaaaccgatgccgttgccgtcgagctccagtcgccgtcctcgcagagatagagaaggg

SEQ ID NO: 23295 - DNA, 3474 bp, Oryza sativa; identical to SEQ ID NO: 15049
  Clone ID: TF_OsC1528_2073

SEQ ID NO: 23296 - DNA, 1983 bp, Oryza sativa; identical to SEQ ID NO: 15050
  Clone ID: TF_OsC359_7340

SEQ ID NO: 23297 - DNA, 1833 bp, Oryza sativa
  Clone ID: TF_OsC1713_4956
ttgcttctgactagcgctaggcttaacaggtaccgcatttgctccagtgaccacttggcgattggcatgtctgcttccttaacaggtactacagttgtaacagacaataactttcttacgctcgggttcttcatcttgtacttgatttcttggctgctgtgctggaacatccaaaggtacaatgccgatactggcctctgtcttgtcaactgatggctagggctgaaattgagcattgacaccttgtggtaatgcactcgctggagttggagctgttgcaacgcgggctataggattgcttcgggatgcatggatgacaattcgctgaggagcaagcttctgattgcagggagttgcgtggactgacgtgctggcagctatgtttctcggttttgggcacttgtcggcgaaatgacccattccttgacaattgaagcaacagatatcttcccggactcggcattttcttttctcattttgattcctctgtcctggcactggagttaggctgaaactgaaatcttggcgaggatttgtgttgccttgatgcttctctccattggaactggcgggttggttggccatcttcttcgtcagcagaaaactgaattgacaatcttttggtacatgatcagttccttcacaaaagaaacaagtgatcctgctcgttggacacctgtcgggtggatggtcttcctcacaatgaatgcatgtagtggcacacgagctggcaacatgaccgatttctccacaacgagagcatgccttacgtccatttcatcttcatcatctgaggagacttgatctgaatcttcactatcagacactctacctccattagctaaaagatgctctgtcaactgtggtgcacctcggaaggtatttcttctctgacgttttgtcattcctggtggaggccattctgtgctggtaatgatcatcttacggacttcatcttcggttcgcattgatgtttttcttttctgctgaggacactcccttgcatagtgcccttgctcatcacacataaaacaaatgatacttgcttcttttgagtcaacatgtggcacgtcaccctgggtccttcgggatgctggcggcatgctgacttgtggtgtgagtgcttggactgcctccaactgcacttgaggttgtatttgactcaggttcagaattggcgtctgatgctgctgtagtatctctataagcaatcggttctggttaatcaggtgttggactagtgtcacacaactggtgtctggtgcttcattcactcgggagcttgaggtaccaatgtcctgacttctgaccttattgcctttctcattgtcagccatctgttgcaaaggtttggagagggagagagggaaaacaaaggggagagacagattagaaactaaggataggaccttaacagatctaagtcttttgtcctgcttcacagctggcttcactgcttcctccacttcgctagcggatcctgcagtcttccggagcttcggcaaacaactgacgatgtcttcttcttcactgacctgaccatctagtacagcttgtcgcgaccgggaaaattgccttttcccgaacgctagtgtattaatccccgtcccaggaaaagccggggtacaccacacaaacatgatacaaaaggcacatctttattatgtcgataatatttacattattacaaaggcacttgaggcctacggccggaacctccgggacaggtcggtaggactgagcccctagcagcagggcaccaaccctgtgccatgacatctcgactaccgggccacagctcgtgtagccttcatttgtcctagagatgtccat

SEQ ID NO: 23298 - DNA, 3570 bp, Oryza sativa
  Clone ID: TF_OsC359_6495
agaaatacaatccccgaaatcaccgacgcttctgtaattcgcgccttcaagtccgtagcgccgccgccgccgcggattccgccgcatcccgtcgtctccgcgcgcattaaagagaggggaatcactccccgtgattccctctcccgtttcccccgattccccctctctctctccctcggattcgttcgaatcgtgcccgcattcgtcgccggcgcaatcaatggcggccgaaatccccgcggccggtttccttcctcctcggccgccttctctcccttccgacgctataaaatcgttgcccgagctccgctcttccgtttccgccgctcgccgctcgctctcgccgtcggatccgtgctcgcgccgtgctccgctctctccgccatcgccgccgagctccgttccgccgccgccgccgctccggacttcctccttactcggcgacccctccgtccgcttcgccgcgtcgccgtcgaccccgtccgccgctccgcttcgcccgtcgaccgtcggagcgccgccgtcatcgtcatcccgaaccgcgccgccgtcttcttccgctccggccgccgttctcgtcgtcgtcgttgtcccggggtgagccgaagaccgccgttcgctttcccccttccctcctctctctcgggcgccgctccgccgcgccggtggtcgccggcggtgaccatcggggcgcgggcgcgccgctcccgtcggccgtgccggcgaggccgcccttgggcgcgccctcgcggctgccaagtgggcccggccgtcagccgcccgcgcccgcgggtgcggctgacgcgcgggacccacggcgccgaccgccgccagccgcgtgcgcccggtccaccgtggaccgagcggctgacgcgtgggccccacccccgtggacccgggcaaatgaaggctacacgagctgcggcccgatggctgacaatgagaaaggcaataaggtcagaagtcaggacattggtacctcaagctcccgagtgaatgaagcaccagacaccagttgtgtgacactagtccaacacctgattaaccagaaccgattgcttatagagatactacagcaacaccagacgccaattctgaatttgagtcaaatacaacctcaagtgcagttggaggcagtccaagcactcacaccacaagtcagcgcaccgccaacatcccagaaggcccctcatgccatgccacatgttgacccaaaagaagcaagtatcatctgttttatgtgtgatgagcaagggcactatgcaaggaactgtcctcagcagaaaagaaaagcaccaatgcgaaccgaagatgaagtccgtaagatggtcattaccagcacagaatggcctccaccaggaatgacaaaacgtcagagaaggaattccttccgaggtgcacaacagttgacagagcatcttttagctaatggaggtagagtgtctggtagtgaagattcagatcaagtctcctcagatgaggaagatgagaaagaacttaaggcatgctctcgttgtggagaaatcggtcatgttgccagctcgtgtgcctctacatgcgttcattgtgaggaagaccatccacccaataggtgtccaacgagcaggatcacttgtttcttttgtgaaggaactgatcatgtaccaaaagattgtcgattcagttttctgctgacgaagaagatggccaaccaacacgcccgttccaacggagagaagcatcaaggaaacacaaatcctcgccaagattacagtttcagcctaactccagtgccaggacagaggaaacaaaatgagaaaagaaaatgccgagtccgggaagacatctgttgcttcaattgtcaaggaatgggtcatttcgccgacaagtgcccaaaaccgagaaacatagctgccggcacgtcagtccacgcgactccctgcaaccagaagcttgctcctcaacgaattgtcatccatacatcccgaagcagtcctatagcccgcgttgcaacagctccaactccaatgagtgcactaccacaaggtgtcaatgctcaatttcagccccagcaaagaattgtcgtagatggaagaagttgtgtctctccccgacctactccaggccgagccaagggcaatcaacatccggagggcgataccaagcagaagaccgtcatccgcttcaaccagcaatcagaaggaagcttctcctgcgggcccgcccgccgccctcgctgacgggtggggcccacctgtcatcgccttcctcccgccgctcccgccgctcgcccgtgccctagcgccgccgccgccgcggattccgccgcatcccgccgtccccgcgcgccataatgaggggggaatcattccccgcgattccctctctctttccccccgtttttccctctctctctccctcggattcgtccggaatcgctcccgcaaacctcgccggcgccatcaatggcggccgagatctccgcgcccgtttcctccctctccggccgcgctctccccctcccgacgctatataagcgttccccgtgctctccccctccgtttccgccactcgccgtctctcctccccgtcggaatcgagcccgcaccgtcgcaccttctctccgccgtcgccgccgagctccggttcgccgccgtcgtcgctccggacctcctccccactcggcgtcacctccatcggctttgccgcgtccccgtcgacctcggccacccctccgcttcgctcgccgaccgccagagcaccgtcgcccacgccgtcccgaaccgcgccgccgccttcctccgcttcggccgccgttcccgtcgtcgccgtcgacccggggtgagccgaagaccgccctttcgcttccctctcctctccgctctctcgggcgccgctccgccgcgccggtggtcgccggcggtgaccatcggggcgcggtcgtgccgcctcccgtcggccgtgccggcgaggccgccttcgggcgcgccctcgcggctgccaagtgggcccggccgtcagccgcccgcgcccgcgggtgcggctgacgcgtgggacccacggcgccgaccgccgccagccgcgtgctcccggtccaccgtggaccgagaggctgacgcgtgggccccactcccgtggacccggctagtcctgaacaaaaggacacggatagagatggatgaagtcgttgcgacgatggatatctctgaggcaaatgaaggctacgcgagctgcggctcgatcacgtttgatgtcattgagtttgacatagcatacaatgccatcattgggagaactgcactcgcgaagttcatggccgcatctcactatgcatatcaagtactcaagatgcccgagccgaagggaacaatcactattcaagggaacgcaaagctggcgctccaattcgacaagtggagccttgacatggtcgagcacactcctagcccacccgccacagctgagccacccaagaaagtgagcaaaacaaccaagacgccgaaaccagacggcgcaatcaaaattgttccactctccagcgccaaccccaacaagacagtcaagatcggggcatcactgaacaagaaatag

SEQ ID NO: 23299 - DNA, 3623 bp, Oryza sativa
  Clone ID: TF_OsC359_8282
ctcccgtgcccggctagctcccctccgctataaaatgggatccccttccaccgttctctcgttttagcctcctcccgcgtctccccgtggtcgcaccgcctcttcccaccgccctcctctctctcccgtgccgccggccacttccagccgcctccccctcatcgcccgtgcaccggtaggccgtgtcgtcgccatcctcggcatcgcaaccgcctcctctcccccagcctgccctccgtttcgcacggtgaccaccggaggcgcgtcctcgtcgacgtccagtggcgtcgccgccactacaccgcctccggccgcctcggctgccgcgcctgagcctcggtcggccgtgccgtcgcctccctcagctccgcggcgtcgtcctcatccccggccttaccatctcctcgcccgaatttcgcccgaacgccgtcgtccgcgccgcccctccctcgttctcgtcggcacccactccggcagccccttccgcctagccagtgcgccggccgacgtcgccgtctccaccttcgcgtcctcgccaacgtctcctccggtcggccgttcctctccgtcggctcgtcgtcccatggcgccgcctccgtcgtcggcaatgcagtggcgcgttccacgccgttctcgtctccgtgcagctgctgccggctgcccttgtcgtcctctcgtcgttcccgctcgtcgtcggccctcccttcgtcaagccgtgctcgttcgtcgcccgcgtttcgtcaagagtgcgtcgcagccctgtcgccgtcttcgtccttggctccgcgtcgtcaagcgttgcgccggctgcgtctcgcccatgtatcggtgtcggtagtcgttcgtatgtgcgtgtggtgaccgtgttagtgtgcccgctcggtagccgcgtggtttccacgtgtgcagcccgcgtggtgtctagtggagtacgtttgtcggccactcacctcggttgacacacggggtccgcttctgttgacccgtggaccgtctctgtgtacccggttttctttttatatactgttattgcttctttataggcttgtagctttgcttgtgtgcttcgtgtagcttctttcgttccggaggttcccgaagcgtggctcgtggtcgtcgccgaaggttcagaaggccgttctctctctccccctctattcaaactcctaaatggttgtaggctgggctcgaggtgcatggttttgctaggagcacctcggccaccataaggaccggtcttcgggcctctgttgcaaagcactaccgtactaaccatatgtctaatgggtaaggcttaactcggtgctcagtctagtcctgaacaaaaggacacggatagagatggatgaagtcgttgcgacgatggatatctctgaggcaaatgaaggctacgcgagctgcggctcggtaatcgagatgtctaggcaaatgaagactacacgggtcggtgcccgggctcaaccctggcctgcctgtcccgggataccggccgtaggcagggttgggtcggtacttttgttcacggctaggatgggtgaatggttatgtcacatctttacgacgggttccaaggccatggaatgcggagtaaagatgtgtcttgtgggttggcctgggttggcttgggacgagctgggacccaggtcgggttgccagttcggtccgaatcatcgtaggccttgggttaaggcagtactagatggtcaggtcagtgaagaagaagacatcgtcagttgttcgccgaagctccggaagactgcaggatctgctagtgaagtggaggaagcagtgaagccagctgtgaagcaggacaaaagacttagatctgttaaggtcctatccttagtttctaatctgtctctcccctttgttttccctctctccctatccaaacctttgcaacagatggctgacaatgagaaaggcaataaggtcagaagtcaggacattggtacctcaagctctcgagtgaatgaagcaccagacaccagttgtgtggcagtggtccaacacctgattaaccagaacaaattgcttatagagatactacagcagcatcggatgccaattttgaacccgagtcagatacaacctcaagtgcagttggaggcagtccaagcactcacaccacaagtcagcgcaccgccaacatcccagaaggcccctcatgccatgccacatgttgacccaaaagaagcaagtatcatctgttttatgtgtgatgagcaagggcactatgcaaggaactgtcctcagcagaaaagaaaagcaccaatgcgaaccgaagatgaagtccgtaagatgatcattaccagcacagaatggcctccaccaggaatgacaaaatgtcagagaagaaattcctcccgaggtgcacaacagttgacagagcatcttttagctaatggaggtagagtgtctggtagtgaagattcagatcaagtctcctcagatgatgaagatgagaagtctccccaaggttttaaccagaataaaatagaacttaaggcatgctctcgttgtggagaaatcggtcatgttgccagctcgtgtgcctctacatgcgttcattgtgaggaagaccatccacccgataggtgtccaacgagcaggatcacttgtttcttttgtgaaggaactgatcatgtaccaaaagattgtcgattcagttttctgctgacgaagaagatggccaaccaacccgtcagttccaacggagagaagcatcaaggaaacacaaatcctcgccaagattacagtttcagcctaactccagtgccaggacagaggaaacaaaatgagaaaagaaaatgccgagtccgggaagatatctgttgcttcaattgtcaaggaatgggtcatttcgccgacaagtgcccaaaaccgagaaacgtagctgccagcacgtcagtccacgcaaacccccgcaatcagaagcttgctcctcaacgaattgtcatccatgcatcccgaagcagtcctatagcccgcgttgcaacagctccaattccaatgagtgcactaccacaaggtgtcaatgctcaatttcagccccagccaccagctgacaagacagaggccagtatctgcgttgtacctttggaagttccaatacagcagctgagaaatcaagtacaagatgaagaacccgagtgtaagaaagttattgtttgttacaactgcactgaagaagggcattactccaaaaactgtccccaaccaaggcaaaatcgacctccacattaccgccaatttacacgaagcagacattccaatcgtattgtggtcactggagcaaacgccgtaccaaagagtgaaatcttcaactcggtatcagatgctacacggagtgaaaagtgcaagcaccggttaccaggttgacgccaaagatatgaatgataagaagttctagaaccgaagccccatcctcaaccaccgcagcctagtctgggtcagttagaagttcaaccagggacaagtcgggtgaagagaagattccatctgcaacaggagatcgagccaagcgttccagagtggagaagttttgttaggcaagttggttatagaagacggagcggaagaagtcagacaagaagagaagaccgcccaacctatcttcatgc

SEQ ID NO: 23300 - DNA, 2258 bp, Oryza sativa
  Clone ID: TF_OsC359_7790
agctttcccatcacgaacatgtttaactccttgatcacagtctgcgtcctgataatgcttgtgctcttcttgtaaggccatgacccgatccggtttagcatttgcaccatcttccttcacttgtaccgaaagtatgttcttcatagtcaattgcggcaggttgaattgagttgattgaggttgatcaagtagtccaccttggtcatcatgggcttcttgtggtctcacccgtgattcttgcacggaaggataacctttaagtatgcatgttcttgtgagcttggagccttcggcctagatccttcgggtaaccaaggaatcttcctggagtctccgaggtatccacccagagccttcgggctcgatggcatggtgatagatgagcttgattacaaatcgagcggtcttatcaaagcctttgattccacaataaaattttagcacattttggtccccaacaacattgggtccataaaggttagtcacaagagacttagacaccgaaatggcctttgtgctagtgtgtggcgaacaaatcaccctagtagcacaaatatcatttttggcattcctaagcaaattatgatcaaatgagagacttggcttaggaatgttacccatgggacaatttttaccaatatgtccctttgcccggcaattttatcaaagtcgacttttgcttctatattgcttttcggtttgtttgttgccggtttgcctctcacttgatgttttgcattgttcatccaatgtgcaaggagaccttgaggcaaagtgtcccgcttcagtgcacttgaagcacttgatgtgaggaatgtccttcttcttgctcaacttatttcctttcttccaagggcaatctctaacatgatgtcccactttcttgcacttgaagcaagtaatggaactcttgatcatcttttgatttcgttccctggtatgatcattgatggacttgatatccctttgatggatcttggtgcacgctacggttgatccctttctcaagcttattcaccaggccctcacggttttcttgagaaggtttgagcaatacacacaagtccatgatccatttgcttctcccttttgcctacacaatccaagtcacatatagtgctcagggacatgtttgcttgggggaaacaagggttagcacaagtgagattaacttgaacatgaggctcataggattttaccgttgcaattatcacctcatgagatacctctagcatagcatgagaatccacaagattcacatgagaacacaaaagttcatcatgtctttcttgtaaatccacatacttgttagtgatctcatcaagttgaaatttgagctcttgattttgcttcttcaaagatgctacacaagcaatagaattagtggcacaagcaaattcattttccaatttttcatacctcatagtcaatgaagaatgaaaatccttaagtttcttgtgttcttcggttagactcatgatttcttcattcttcttgatagtgcatgcttgttgcttttgaatggcttccatgaacttgatcaccattgttacatccttcttgctcaagtgatcaaactcggagtcaccatctacacccataaagcaagcataatcttcggaaatagaagatgagcatcttggtgaggtggattcttcacttgtccattagcgctcatttacttcttcctttaaaaggttagttccacatgtactataggaggtagagcatttatccatatcatcctcacacatatacttggggctaggtgagatgcatgagtcaacaacacaatgcaatatgacaatttcattatcggtgttgttggaatccaatgggagaattggatgatcgtcaaccttactcaccaattcattaccttcaatgtagtcatgtgttgatgataaggtggttgtgggatgattatcttgatcatcgaaggtagttacttgaggttcttcgcaatttggcgatgaagttgaacacttctcaaatggttcttccaaaaagagtacatcatcacatttggaatcatcacatttggacttgtcgtatctctccttgagagtggtccaaatgagatgagcatcttcaaacggcatgacggttttaaatacatcttcacttaaaacaccaaataaaacaatagtagcttgagcattgatatgcatgcatttctcttcctcttcaaatgatagctctttatcattaggaggagaaatgctcacatctacaactcgctctatttaaggacccat

SEQ ID NO: 23301 - DNA, 1167 bp, Oryza sativa
  Clone ID: TF_OsC12782_3
gaaaactgaaaaggtcagaatgttggtgattctaccagtgactctccaatggtgaagctgccaaaagcctgttgactcacagcacgaaaaaggaaagacaatcgaaaagcctgctaatcctaaagtaagtcgtggacagaagggcaagcttaagaagataaagagaagtatggagagcaggatgaagaagaaagagaaatccggatggctttacttgcgttctctggaagggcctcacaaaaggataaaccttcataagatgtagatggagccactgcagcttaatcaaaaccatcgactggtgaagatgacagatcaaaaatttgttataaatgcaaaaaatctggacatctttctcgtgattgccctgaaagtacatctgaggtggatcctgctgatgtcaatgttggtagagccaaagatggtatggatagaagcagcgcccctgctggtagcagcgttaccatggatgaagatgacatccatgagctcggtgatgaagagaaagagaagttaattgatttggactacctaactggaaatccactgccaagtgatattttgctatatgctgtaccagtttgtgccccttacaacgcattgcaggcatacaaatatcgtgtgaagattaccccgggaactgcaaagaaaggaaaagctgccaaaactgcaatgagtttgttcctgcacactgctgacgccacaaaccgtgagaaggagctaatgaaggcatgcacggaccctgaattggttgctgccattgtagggaatgccaagatcaccgcacctggcctcactcaactgaagcagaagcagaaacagaaggggaaaaaatctgcaaaagaaaactagttcaaagctatcagagaccaccccgttttgtcaagaaaagtatttttctctgcagaaacaatgcaaatgttttggtatgttgtcaggcgcatttggatggaggtgtcacatggattggccctcattcttgtaaagtttaaacatctctttggcattcatagccataggacaggatataatgtaaacagatacggcagaacattggaaccgattgacaagcttcatacgcttacaaagggacgctgagtccccttttggtgtgtcttgtgatgtatgaaagctacaaaaaaaaaatcatagatttcactttagcac

SEQ ID NO: 23302 - DNA, 2861 bp, Oryza sativa
  Clone ID: TF_OsC1713_5550
ctagagaagggtgaagttgttcctaagacttgcatctggcatttgtaactcattgatcctacgtccgcttgaacgggtccatcctgtaacagcttccaaggttagggagttcccaagagtctcgggaacgttgctctgcttgttgatcttcgatggtggaggggcaactatcttgtcagctgtaacgggtaggatcttcttgcccgtggggttaccgagcggtgatttgtcgatgggcctccagattggagcaataccaggtgcattgctagaactgacaacagttgggcgacccggtgctgacaacacttgctgcgggtgctgacgaaggagcgtaccgcctctttgtagctgtagcgagctgttgttctcctggcattgcttaccctgctggcgttggtgttgtaggcttgaaacgattgccggtggaacaatgcgacctttgacggtgcccttgacgataatccgttggggcggaggttgcacattcaggtgtcgtttggtgtcgtgggcagtgctggtaacttgtgaatcacgacgaactgcctttgctgctcttggaagaggacaatcactgaaacgatgtcctggcttacgacagttgcgacataatcgacttgcttggtcttggggtgcaggcttctgattatgcactttggcagctgaaacgggaacaagcagaggcttatgaacatccttggtgacgttgcttcttccatggttggcttccactggagctggagttagagaaagagcagaaggattgtgaccgctgttgtcgattgtcattggttgacgaatgggttgcacggttgtcccttgttctttcttggtcttagctatgaccgcgttcaactgacagtccttaggcacatgatcacagcggcaggtggggaggcataaactagcagtgtgtccgactatcccacatctagcacatgctttgaacttcaactctctttccctgaaactgtcaagggtcgcatcatcattgtcatcattatcatcatcgttgtcgtcatcgtcgtcagcagaaaaccgttctcgcttgggtatccttgctgcatcttcaggagtaaattctgaactggtgatgatgatggtcctgccattatccatcttccatatcactgtcctattcgctccagagttgcgctgcaaagtaccatccttcttgtcggtagactgacttggagcttggttactccctgggcactgcttctcgtctttttcaggtgacctggcgaacaccttccatggacagttccttacataatgaccttgctcaccacagtcataacaggtagcacttactttcctttggtctgacgttgacttggctgtcgttatcttcggggatcttgaccgcattttgacaggggtcttcggtgccgatattgggaactcttgatcatcgcggaacgacgactttgaactgatcttctcgctccttgcacgaagcttgcatgcctgcaggtcgactctagaggatccccttagctccaatcaaagagagatctcgtacagcattcgagtttgacggcaaacatgatccaaaccgtgaagacccagattctctggactttaagatcatgaaggagaggatgtacaagatattctcaaatgccattgtcgtcagttattcgcatctgctgccagtcgtgccatataatgcattcaatcctcctccgctggtcaatccaagcgaccagcccccgactggaaaccagtcggcagaagcagaaaccgcaacaaaccaagagcccccgactggcaatcagtcggaagtaggtccagatcaagaaattcctgaagttgaagttcaggctacaacttcccagagaccggacgctggtaacgacccaacgcctgggtctccagataaagggcaaggatcacctcacgctcaaccggaaatcacctcaggaccactaggcggtgacagagatgaaatccctcgcataaaggcagctgctgactctcgtccccccatcttaatcaaatggtgggacgagaacttgcaacctgcaggcattgtcataaatcgacagaaagaagacgaagaggtgcgccagttgaagaaagcactcggagaagctacccgcattgtaaatagaatccatctccgtaatgaggccaaaaccacaactttagaaaagctggttcctcatttagggacccttgaagcggttagggatcagctacacgaagccaaagagcttgccaaaaagacagagcatgatctaagggaccggattacccaactccaggattcgaactttgaactaagtggctcatcaaaagtgcaagctgccaagatagctcaactggagaaacgaattcaagccttagaaaataacaaggcagaattggctgcacaaagggactcggctttgaaggaggttgaagaccgcaagatcaagtcccaagcccagttcgacgtcctggttggcaagatcaaaagacttgaaggagccagggatgaggtcgccaatgctgctaccccgcttgtccaggcaatgttctataataacaatggcccgagtagattcgatgcttccgaagtgtttgacaagctgagaatcgcttcggacacctatttcaagaacattagagaagccggaagcatgggagcaggtttagcgttagcaatgaccaaatccctgtaccctaagatcgatattgatactgttgatggttttgcggacgggacaagcgaagaggctgcccttgatcttatcaacgacgctcaaaaagcagccgacaagattgctggtgacgtcgtagatcggtttcaggataccgaccttaggccgactggtaacaataactctgatgatgagaagactgatactgattaa

SEQ ID NO: 23303 - DNA, 6097 bp, Oryza sativa
  Clone ID: TF_OsC359_8424
gtcgctcacccagggatctcgctctgtcacggagtatctgcatgagttcaattgtctggctcgttatgctccagaagatgtgcgcaatgatgaagagtgccaggagaagttcttggaaggacttaatgatgagctttcttatccactcatggctggagattatcctgatttccagaagttagtggataaggctattcgtcaggaggacaaatacaatcgcatggaacagaagaaacgccggattgctcaattcaagacacaaccgggaaataatcaaaggccgcgtcttactttaggaccccagtccatgccacatggaggttcttcgtctgttgttcgtccgcggcgtcagttcttcaacaacaatgctggcaacaacatccgcaatctagctccacgccctgttgcagtttcgacacagcaacagcctgccaagagggagcaaggcagcaagcccgtagtgtgcttcaactgtggagacccaggacattatgctgacaagtgtccgaagccccgacgcgtgaaggttgtccctgcccagagcaactctaccgcaccagcatcaaaggcccgtatcaatcatgttgctgctgcagaagctcaagacgctccagatgtgattttggtccgggagtatcccgatgtgttcccagatgatttacctgaaaggatacatcagaccgagttcatcaccatggggagctccggatattaccggaggtttatagagaatttttccaagattgctaagcccatgacacgactgcttcagaaagatgtgaagtacaagtggtcggaagaatgtgagcagagttttcaagagttgaaaagtcgcttgatatcagctcctattttgattttacctgatccaaagaagggtttccaagtgtattgcgatgcatccaaacttgggttaggttgtcttctaatgcaagatggaaaggtggttgcctatgcatctcgtcagttacgtccgcatgagaagaactaccctactcatgatcttgagttagctgtagtagttcatgcgttgaaaatttggcgtcattatcttttcggtactcgtacagaggtatataccgatcacaagagtttaaagtatatctttactcagccggatctgaacatgagacaacggagatggttggaactaattaaggattatgacataggaattcattatcacccgggaaaggctaatgttgtagcagacgctcttagtagaaaaggctattgcaatgctacggaaggacgacagctgccattggaattatgcaaggaatttgaaagattaaatttgggaattgtcagtagaggtttcgttgcagccttagaagcgaagcccactctaattgatcaagttagagaagcccaaattaatgatcctgatattcaagagatcaagaaaaatatgagaagaggaaaagctatcggtttcttggaggatgagcacggaactgtatggttgggtgagagaatctgtgtccccgacaacaaagatttaaaagatgcaattctgaaagaagctcatgatactttatactccattcaccctggtagtactaagatgtaccaggatctcaaggaaagattttggtgggcaagtatgaagcgtgaaatcgcagaatacgtagcagtatgtgatgtttgtcagcgagtcaaggcagaacatcagaaacccgccggtttgttgcagcctttgaagattcctgaatggaagtgggaagaaatcggtatggattttatcactggtttacccagaacgtcatcagagacaacctattccggaagtcgcttagcggaattgtacatggcaaggattgtgtgtttgcatggcgtccctaagaaaatagtgtctgatcgaggcagtcagtttacctcaaatttttggaagaaacttcaggaagagatgggttctaagctgaactttagtactgcttatcatccgcagacagacggacaaaccgaaagggtgaatcagattttagaagacatgttgagagcttgtgctttagatttcgatggaagttgggataagaatctaccttatgcagaattttcgtacaacaacagttatcaagctagtcttcagatggctccttacgaagcactgtatggtcggaagtgtcgcactccgcttttgtgggatcaaacgggagaacgtcaggttttcgggacggatatcctaagggaagcagaagaaaaggtaaagatcattcaagaaagattgcgagtggctcaatctcgtcataagagttatgccgacaatcgccgcagagatctaagttttgaaggagattatgtgtatcttcgtgtcacgcctcttagaggagttcatcgtttccacaccaaaggaaaattggcaccgcgttttgtgggaccttataagattgtcagtaaaagaggagaggttgcttatcagttggagttacctcaatctttggcaggagtccataatgtgttccatgtgtcgcaattgaaaaagtgtttaagggtacctaccgaagaagctaatctcgaacagatagaagtccaagaggatctgacctatgttgagaaaccaatcctcgctccagccgtgcgccgccgccgttccagacgtcgccgtcgctcgggaagaccgccgtcgtggtcgccaagtatgccgcgctacaagcctgagtacttgtttggtgttgagggttttgtccaggagttgcgtacaatgtcctttgtcattggatttgggactgcccctttttatgcccagattcctcatgatcgtcatgaagagaagtgccgagtcaaagtcaccttgaacagtaatagtgaagatatcccctcagtgatgttcaaagctggaggaagaaactacatccatgcatgtcaggaagtggcaaggatcgccataggagagcttcgcgatcgctacagtgatcaattggccgacactgagtatcgctaccatcctcgtcaaccacagggaagtgaccgtggcagttaccttgagactgaaggaattgagaatgatgctaccacaaggcatttggtggagatgctgtgggctatggatgaaagtcgtgcggagattgtgttagcagctcaagatcgtgaagaccggaatcgtggtaagatttgcaagctagaagacaaagtggatcgtttggagaaggaactagctgtattgaagggagaagcaccaccgcagaaggccaggattcgtctcaccgcaaggaagagagctctatttgtccctcgctatcaattggcgccaaaggttcgtgtggtggagaaagaagttgccccaaccctagcagatcctccggtcatcatcatggtgaacactcgcagcaacgggaatggccccagtaacaataacaacggagagaatcccactcttgctcaagttcttgctcaacagacacagctaatgaacatgatgatgcagcaactccagaaccagcaaaaccaaggaaataaccatgcacctccccagaacaagttagcagaatttcttcgtgtgaggccgcctgttttctctagcaccactaatcctgttgaagctggtgattggctgcatgccatagagaagaagttggatttgcttcagtgcactgatcaggagaaggtctcatttgcatcacatcagttgcatggccctgcctctgaatggtgggatcacttccgtctgaacaggactactgctgaacctatcacttggcttgaattcaccgctgctttccggaagacgcatataccatcgggagtggtgtctctcaagaagaaggaattcaggtcgctcactcagggatctcgctctgttacggagtatttgcacgagttcaatcgtcttgctcgttatgctccggaagatgtgcgcaatgatgaagagcgccaggagaagttcttggaaggacttaatgatgagctttcttacccactcatgactggggattatcatgatttccagaagttagtggataaagctattcgccaggaggaaaatgctggcaacaacatccgtaatcaagctccacatcctgttgcagctccagcacagcaacaacctgccaagagggagcaaggcagcaagcccgtggtgtgtttcaactgtggagacccaggacattatgctaacaagtgtccgaagccccgacgcgtgaaagttgtccctgtccagagcaactctactgtaccagcatcaaaggcccgtgttaatcatgttgctgctgcagaagctcaagatgctccagatgtgattttgggtacgttccttgttaacttagttcctgcaacagtgcttttcgattctggtgctacacattcattcttatctatgagttttgcgggaaatcatgggatggaagtagaagatcttagacgtcctttgatggttagtaccccaagtaatcaagcactctctttgcaacgtagcccctctgtcagaatagaaattcaaggagtaccattcctggccaatcttatcttgttagaatccaaagaccttgatgtcatcctagggatggactggttagccagacataaaggtgtgatagactgtgctaacagaaaagtaactctcaccagcaatgatggtcgagttgtaactgttcatgcattgtcttctgagtctttaaggtcaagactgaaccagataactttggaagagatttctatagtccgggagtatcccgatgtgttcccatatgatttacctggggatcctctagagtcgacctgcaggcatgcaagcttggatgactgtcagtatggacttcatagagggactgcctaagtcaggcaaatatgacacaatcatggtagtcgtggacaaattttccaagtttgctaaatttatccctcttgcacacccttttactgcttatacagttgcttaggcatttatccagcaggtgtatgatgtctttgggatgcctcaggttatcatttctgtcagagacaggatttttactagtgctttctagcaggagctgttcaaactagcggatgtcaaacttaacatgagctcttcttaccatccacaaaccgatggacaaactgagcgcttaaccagtgtttggaaggtttcctcagatgcacagttcactttgctccatctaaatggtccagttggctgtcccaggctcaacactggtataacacctcctaccacaatgtgctgaataaatctccatatgaggtcttgtttgccagaaagcctacacattttggccttgtggatgtgggtgcaagtacagtgccggatgtgcagctttggctccaagagagagctcatatgaatgaacttttacatcaacaattactaagggctcaacagaggatgaaaagtcaggctgataagaagcgttctgagaggcaatttgctgttggagatcgagtttatctgaaattgcaaccatttgtacagatgtctgttgcccgaagatcttgtcagaaactgagctttcggtattttggaccgtatacagtgttggaaagggttggcgctgttgcttaccgcttggatttacctgctactagtcagatacatccggtggtgcatgtttccttactcaaggcggcaatcaaaccaggcacccaggtcagttctgatctccctctcaactattctgacgaacaatctaccattcagcctgaagcggttcttcgtcgaagtctgattaaacgtggcaagagtgttgttccctgtgggctgatcaagtggattggcatgcctgaggagctggctacttgggagaaccttgtggactatggtgaacttgtggggttcgtcggccgggaagaagggcgcaaagatgcaatccttggtgcaccgccgccgcagcagcttgcacgacgcgcacggcgacccagtggcggcggcggcggcaacgacaacgtgggagaaggagacgcgcctctgctgtggggatcggctccgacggcggattgctacctctccgcccgctgccgcgctgctccgcccctttggcttcgagcgccgtcgctccacccgccgccacccaatccgcccctttggcttcgcgcgtcgttgctccgccctgctggctttcgccagcctgcgccgtcgccccgccggctttgggcgcatcgccat

SEQ ID NO: 23304 - DNA, 720 bp, Oryza sativa
  Clone ID: TF_OsC1713_4880
gtcgcttcggtctcgactcctcgtctcctcggccgccgccgccgccgccgccgccgagcagaggcgatctccacccgcgagcagcggcgccgtcgccggtgtgctgcttctcccgtcggaccctcgccggtgagcacacttcaagatgcctcgctatgatgaccgtgatcgctacgatgaccgttacggcggcaacacgaggctgtacgtaggtcgtctttcctcgcgcacccggacccgggaccttgaagaccttttcggcagatatgggagagtgcgatatgtggatatgaagcacgagtttgcatttgttgaatttagtgatgctcgggatgctgatgaggcaaggtacaacctggatggtcgggactttgatggaagccgcatgattgttgagtttgctaaaggggttccacgtggccctggaggatcacgtgaatatatgggcagaggaccaccacctggttctggccgctgctttaactgtgggattgatgggcactgggcccgtgactgcaaagctggagactggaaaaacagatgctatcggtgtggagacaggggccatatagaaagggactgccgggaaacagcccttaagaaatctccaaagcgttgggaaagaagcttactcaagaatcccccatcccccctccgttcccgttgggggtaaggaaaccccgttgggtttggaacccttcccggccagggaaccccgtt

SEQ ID NO: 23305 - DNA, 1632 bp, Oryza sativa; identical to SEQ ID NO: 14895
  Clone ID: TF_OsC359_7855

SEQ ID NO: 23306 - DNA, 469 bp, Oryza sativa
  Clone ID: TF_uC-osflcyp173f05b1
gagagtcatccatggcttccaccgtcgccctcaagggccgcccgctcgccaccctcctcaggcagctcctcgccgccgacgcgccgcccgccgccaccgggaggcccgtcgccgccgctcccgccgcctccgggaagcccgtgaccgcccccgccgccgcgaccgccaccaacgccgcctcccgccgcctgtacaacaccgagggcgcgccgctccgccgctacgacgtcgtcgacgagtccggcaccgacagcggcgacgagtacgacgccaccgctacggcggtgaccgcggctacggcggcggcggcggcggctacggcgggggcgaccgcggctacggaggcggcggcgggtacggcggcggcggcggaggcagccgcgcgtgctacatgtgcggcgaggagggccacatggccagggactgctcccagggaggaggcggcggcggtggctaccgtggtggtggc

SEQ ID NO: 23307 - DNA, 4692 bp, Oryza sativa; identical to SEQ ID NO: 15217
  Clone ID: TF_OsC359_6303

SEQ ID NO: 23308 - DNA, 3186 bp, Oryza sativa; identical to SEQ ID NO: 15216
  Clone ID: TF_OsC359_6670

SEQ ID NO: 23309 - DNA, 2241 bp, Oryza sativa
  Clone ID: TF_OsC359_6534
ttaagctttctcatcatgaacatgtttaactccttgatcacagtctacgtcctgatagtgcttgtgctcttcttgtaaggccatgacccgatctggtttagcatttacaccatcttccttcggaagcatgttcttcatgttcttcatagtcaattgcggcaggttgacttgagttgattgaggttgatcgagtagtccaccttggtcatcatggacttcttgtggtctcacccgtgattcttgcacagaaggataacctttaagtatgcatgttcttgtgagcttggagccttcggccttgatccttcgggtgaccaaggaatcttcctggagtcttcggggtatccacctagagcctccgggctcgatggcatggtgatagatgagcttgattgcaaatcgagcggtcttaccgaagcctttggttccacaataaaattttagcacattttggtccccaacaacattgggtccataaaggttagtcacaagagacttaggcacccaaatggcctgtgggctagtgtgtggtgaacaaatcaccctagtagcacaaatgtcatttttggcattcctaagcaaattataatcaaatgagagacttggcttaggaatgttacccttgggacaatttttaccaatatgtccctttgcccagcaattatagcaaagtcgacttttgcttctatattgcttttcggtttgcttgttgccggtttgcctctcacttgatgttttgcattgttcatccaatgtgcaaggagaccttgaggcaaagtgtcccgcttcggtgcacttgaagcacttgatgcgaggaatgtccttcttgctcaacttatttcctttcttccaagggcaatctctaacatgatgtcccactttcttgtacttgaagcaagtaatggaactcttgatcatcttttgatttcgtcccttggtatgagcattgatggacttgatatccctttgatggatcttggtgcacaccacggttgatcccttctcaagcttattcaccatgccctcacggttatcttgagaaggttgagcaatgcacacaagtccataatacatttgcttctcccctttgcctacacaatccaagtcacatgtagtgctcggggaaagattttctttggagcaacaagtgttagtacaagtaataagatcaacttgaacatgaggctcataggatttcaccgttgtaattatcgcctcatgagctacctctagcatggcatgagaatctacaagattatcatgagaacacaaaagttcatcatgtctttcttgtaaatccacatacttgatagtgatctcctcaagttgagatttaagctcttgattttgcttctccaaagatgctacacacacaatagaattagtggcacaagcaaattcactttccaattttttatacctcataatcaatgaagaacgaaaatccttaagtttcttgtgttctttggttagactcatgatttcttcattcttcttaatgaggcatgcttgttgcttcttaatgatctccatgagctttatcacaattgttatgtccttcttgctcaagtgatcaaactcgaagtcaccatcttttcccataaagaaagcatgatctttggaaatagaagatgagcatcttggtgaggtggattcttcacttgtccattggggctcatttacttctcccttcaaaaggttagttccacaagtactataggaagtagagcatttatccatatcatcctcacacatatacttggggctaggtgagatgcatgagtcaacaacacaatgcaatatgacaatttcattatcagtgttgttggaatccaatgggagaattggacgatcgtcaaccttactcaccaattcattgccttcaatgtagtcatgtgttgataaggtggacgtgggatgattatctggatcatcgaaggtagtcacttgaggttcttcgcaatttggtgatgaagttgaacattcctcaaatggttcttccaaaaagagtacatcatcacatttggacttgtcatatctctccttgagtgtggtccaaatgagatgagcatctttaagcggcatgatggttttaaatacatcttcactcaaaacactaaataaaacattagtagcttgagcattgagatgtatgcatttctcttcctcttcagatgatagctctttatcattaggaggagaaacgctcacatctacaactcgctctatttgaggacccat

SEQ ID NO: 23310 - DNA, 1967 bp, Oryza sativa
  Clone ID: TF_OsC359_7816
atggatgaagtcgggcgtcgatggacattctccagggcaaatgaaggctacacgagctgcggcccggtagtcgagatgtcatacggcggagggttggtgcccaatgctaggggctcatttctacctgcctgtcccgggtatcccggccgtaggtaggattgggtcggtacttttgttcacggctaggatgggtgaagggttatgtcacatgtttacgatgggtttcaaggccatggaatgcggagtaaagatgtgttttgtgggttggcctgggttggcttgggacgagctgggacccaggtcgggttgccagttcggtccgaatcatcgtaggccttgggttaaggcagtactaggtggtcagctttgcgaagaagaagatgtcgtcagttgtttgccgaagctccggaagactgcaggatccgctagcgaagcgaaggaagcagtgaagccagctgtgaagcaggacaaaagacttagatctgttaaggtcctatccttagtttctaatctggctctcccctttgttttccctctctccctctccaaacctttgcaacagatggctgacaatgagaaaggcaataaggtcagaagtcaggatattggtacctcaagctcccgagtgaatgaagcaccagacaccagtcgtgtgacactggtccaacacctgattaaccagaaccgattgcttatagagatactacagcagcatcagacgccaatgctgaacctgaatcaaatacaacctcaagtgcagttggaggcagtccaagcactcaccccacaagtcagcatgccgccagcatcccgaaggacccatgatgacgtgccacctgttgacccaaaagaagcaagtaacatttgctttacgtgtgatgagcaagtgcactatgcaagggagcgtcctcagcagaaaagaaaaacaccaatgcgaaccgaagatgaagtccgtaagatgatcattaccagcacagaatggcctccaccaggaatgacaagacgtcagagaagaaataccttccgaggtgcaccacagttgacagagcatcttttagctaatggaggtagagtatctgatagtgaagattcagatcaagtctcctcagatgatgaagatgaaatggaacgtaaggcatgctctcgttgtggagaaatcggtcatgtcgccagctcgtgtgccactatatgcgttcattgcgaggaagaccatccacccgacaggtgtccaacgagcaggatcacttgtttcttttgtgaaggaactgatcatgtaccaaaagattgtcaattcagttttctgctgacgaagaagatggctaaccaacccgccagttccaacggagagaagcatcaaggcaacaccaatcctcgccaagattacagtttcagcctaactccagtgccaggacagaggaatcgaaatgagaaaagaaaatgccgagtccgggaagacatctgttgcttcaattgtcaaggaatgggtcatttcgccgacaagtgcccaaaaccgagaaacatagctgccggcacgtcagtccacgcaactccctgcaatcagaagcttgctcctcaacgaattgtcatccatgcatccccgaagcagtcctatagcccgcgttgcaacagctccaattccaatgaatgcactaccacaaggtgtcaatgctcaatttcagccccagccaccagctgacaagacagaggccagtatctgcgttgtacctttggaaattccaatacagcagctgagaaatcaagtacaagatgaagaacccgagtgtaagaaagttattgtttgttacaactgcagtgaagaagggcattactccgaaaactgtccccaaccaaggcaaaatcgacctccacattaccgccaatttacacgaagcagacattccaatcgtattgtggtcactggagcaaacgccgtacccgtaaggcctcgtgataatcagaacccatag

SEQ ID NO: 23311 - DNA, 3360 bp, Oryza sativa
  Clone ID: TF_OsC30033_1
cccgggctgcaggaatcgcacgaggccccccctcctttttttttttttttttttttttttttttttttttttttttttgggagtttttttttttttttttttttacaagattgcagacaaggacaatatactttttaaggtagcgatacaaagtccagatcacaaggttccctgcccagtggacattggaggtaataaaggcataaacataaggcaggtttaacaactatacacgatacaccgatgccatccaagatgaacaaaatcaagatgctgctgctgctgctgcttcttcccttgcaaaatacttcagtagccaccaacaaaggattgcctattgtaaccccttgatgctgcaacattattcccatatgtctggtgctgggcgccagtagactgccctggacaatctctagcgaagtgcccaggctgtttacatttgaaacactccgagccaccagtagactgcactggacagtctctagaaaagtgcccaggctgtttacatttgaaacactccaagccaccagtggactgccctggacagtctctagcatagtgcccgggctgtttacatttgtaacactccgagctgccgttgccagcgatggagttgtagttacccatggagcttccaccggctgatgtttcctgcatatccatatctgcacccacatggcagatctgggcgctgtgcccatttgctccacaaatgctgcatgtctgcaagtttcgtgttgctgctagtggagtagacatcccggcgcttatactcgcttgctgcccaaactgattcacgccaccagtattcatggcataggcattgctagatgtaggcgcaccgtgaccgcctaccggatcggtgaaaccagcattaggggcaagatcactttgcccctttgggtccagtaaaaggttgtcaatcgctccaagtaggacgttgctctcttttgatgggtccagtttttcaaccttgacagcggtgcatttcaagctttgctcatcattgtaggtttcttccttgaccttcagtttgaatagatatagatgccaccggaccccttctatgatctctgcaaattgtgcatcatcttggtcgacatttcttatcgagaaaagttctcctgccttgcgaccaaaaatctgctcacctgcctcatcgaacgcactagcataggtactaccagtgtggtcttggatctggaacctaagcatgtacctatattcaggattttgaaaactctcatcacatcggtcacaatgccacatcccatcaccattatttattgcctttttattacactgcctcccgacgggcaagagctttgggcaagctggataacaaaaactctcagtagtcacatgggagattgcagccttaacagtgatccagtctggcttctctaatcgtcccaaattttcatccttgatctgtgcaattgttttgcgggcatcagtccggcccatattaagcatttctcgagataaagaaatgcaaggagcagtttttccttctgtcatgtaccactgcctcagcctttccacctcaggaaagtctggatttataattaactgggttgaaccaattgtgctcactgatttgccattaaaatcacccacacgggcacctttaaaagcaattatagggttcgaaccagaatcacactgcaactgcaactgctgaccctcagcatcacagaagtttccccataatgttacttcaatgctccggccagacaagtccttcagttgaatagaccttttccgggtttcagtgccgatcttcctcattattgttgcagaagggctaactgatgtaacaacaccaagtaaatcaacaatggtctcgttagccatattctctagttcgctgatctgccggaaattgtactgcagcctggggatgctgttatcatcatcagagcaaacctcgacagttgataacccgatatccagagttatttcataatcatggttcaaagtgttatacttcttctgggcgggcttcagtgatcctctagatatcaaatacaccctaccaacctcaatttggccaaaaaacttatcagccgattctttccagcattgtgcacgaatttctccaccttgtgcatcaagaagatcaaacgagaaaactgttcctgaactcctggcattgctccaatgcctgatatcagactttgctgtcacccttgccttgattgtccacttaggctggtatggattcaacgcggtaattgggatgatacgagttgcagagtcattcctagaggcaggccctctattcatatacactggaggtggctgctgatatgaaggacgtgaaggctgcccataagcattgccaggagggccaaagactccacccgaagcaggagctgcaaacctttggttttgattagggttcaacgaggacagctgagatgtaggctgcatcgtgttggcattcattgtgttcagctgagatgtaggctgcatcgtgttggcattcattatgttcagctgagatgtaggctgcatcatgttggcattcgttgtgttctgtgctgatattgcaccgtaagagccaacagcagaaacatttgcaggaccaggttcaactgtcctgccaatagaagaacccaacattccttgagcactattataaggtccaccatatgaactgttgctagcagcctgctctgcccttggcgcaacggaggggcccagcatgcttgcgccaccagaataggttccattattggtttgagccacactggcctgtaagttagggtcttgctccttagttagactctttggttcatagtgtttagggttcccaattacaatgcagtcattttgcagaacatcaagtttcacaacaataataatcctagccagcaaattagttgcaagttgaaacatatttgcaggttgaatatttgtcgacattggacaactgctaacaatagaaccccaaagtgataaaatctcgttggatgaaacatgacaaagataaaagcgcatcttccttagaaccttctcactgtcccccatgttgacataaagactactgtgcgaattagatcttttaccctggatggtgttgcacatgaagtcggtgagctggacgacggtgccggggcggagcgtggcgtccttgacgagggggttgagggcggtggcgagcatggactgctgcgtgttgacgccgtcggagagcatcatccggaagcgctcggcgggcttgggcgtgggcggcgcgttcttggtggtgacgggccgcacgtccaccacctgcagcaccggctggatcgtccccgtcccgtccgggtgctccgctatcgcctgcaccgcccccggcgtcagctgcggctccat

SEQ ID NO: 23312 - DNA, 1890 bp, Oryza sativa
  unsure (1)..(1890): unsure at all n locations
  Clone ID: TF_OsC1528_1764
atgtcgatcgaggaggcgttaggtcgcctcaaggtcgtcgatggtgatgagccacggcctctctcggggcccatcaccatcggcgggaagctccatctcactcgggagcagtgggaggcctctcanggtgacgggaggaagggggagtcatcttccccgacaggcggccataagccgcgcaaggcgcggggaggtgtccagctacgaggcgcccagggcgttgccaccggcaaccacaagccggcacgagatgacacctgccgcaactgtggcaagcttggccattgggccaaagactgtcgacagccacgacgcggccaggcccacgtcgcacgggtggaggaggaagagccggctctgctcctagctcacgcaagcatcgagctacctccagcggcaccggccgcagcggctttcctccaccttgatgagccgaaggtactcgtctccctctgcgacggctccagcaacgacaaggctgatgggtggtacctcgacaccggcgccacccatcacatgaccggccgacgggagttcttcaccgagttcgactccagcgtccgaggcaccgtcaagttcggggacgcctccggcgtggagatcaagggtgttggctccgtcaccttcaccgccaagtccggtgagcacaggctgctcaccggagtctactacatccccgcgttgaggaattctatcatcagcgtgggacagctggatgagaacggctcacgcgtgttggtcgaggacggactcatgaggatttgggatcgccgtcgtcgccttcttgccaaggtaaccagaggcactaatcgactctacatctgttgatnnnnnnnnnnnnnnnnnnnnnnnnnnnnnnnnnnnnnnnnnnnnnnnnnnagatcccaccacggcgcggagggagaagaccggggcgccctggtccgcgtcgctaacggcgggctcctcgtccgcgagctcgatgccgtcgatgaagaagatgcggcggcagacccggttatggcccctggagtagggttcgttgcagttgtagcagaggccgaggcgacgacgttcggcctgttccgccggcgagaggcgcttggcctggttgggcgcaccccgcggaggtggagccgggagcgcggccacgggcggcgcaggcagcgccaggggagccggtgccgcaggcaggggcgcgcgcgccgccgggggaggcagtggtgcgcgctgtgcggcctggagcaggggcggctgggggcgctccaactccatcaactctacctggcgggcgagactcatcgcggcggcgagggactccgggttgtggagacggacggcgtggctgagcggagcgaggaggccgccggtgaagagttgcacgcgctgagattcatccagccgtcccgcgcgaggcaagagcgcctggaatcggttggcgtactcctccacggtcccggtacggcggcactcagagagctcgaacagcggtgcggaacggaggggaggcccgaaccggaggttcaggagctcctttaagcgcccccaggtgggagtgccctcgtcctcctggagctggttgaaccagagttgcgcgacctcgtccaggttgtaggacgccatccacacgcgctcctccgccatggtgcgatgttggcggaagtacgagtcgcacttgttcaggaagagcatcggatcggtggtgccatcgaaacggggaaagtcccacttcttgtgcttcgggggctgatcaaaatcccgcgcgccgtctggccgagggccgccgccgccggtgcccgacgacgaagcagacttctccttcagggccgccatatcagcttccatggcggacatcttcgtggagatggacttcagggactccaggacgtcggcgattgttggttcagtcat

SEQ ID NO: 23313 - DNA, 4915 bp, Oryza sativa
  Clone ID: TF_OsC1528_2096
tcagagccacactttcctgtaggctaaacatctcttgttccaccccttcccaagctcggttgagctctcagccagcagcagcagcagcaccggttgctcctccttcccctttcccttccccctctccacacagcagccccccggaggtgcgccatgtccgacgctcggtctcagcgttcggtcgcctcgagcactcggcgtcagcaggacgccaagctcgccgcagcagaagagcgcaggcgagcaacggctcagaccgctgcagcagcagcgaaggcggccagactggcggcagcggagttggcagcagccagggcggaggcggaggcggaggcggcggaagatgcggcacgtgcggcggaggtagaggttgagaccttgcgcagcagcatcaacggctccatcgccggcgacatcaccgctgacagggagcttgaggagctggcaagaggaagggcacgggagcgagcagagcggtgggcagcagcccacctccacggcggcggcggcggcccaagggaccgcgcgcccgccgacgggaacccagacgggcgcgggcgtgccggcggcagcccggagcccgcacgcggccctcgcaggcggcacggctccctctcccctgaccggcgccatggtcaccacggcgtccagacggtggtcagggattttggtcccggcggtgggtgggcctaccctcaccaaaaccaactacatcgagtgggccgcggtgatgagggtgaggctccaggtgcggcacatgtgggaggcagtccggtacggtgacgtcgactacgacgaggatcggcgggcactggatgccctcatcgctgcagttccgcccgagatgcagttctcgctttcccagaagcggactgccaaggaggcctgggacgccatcgctgcggcacgcatcggcagcgaccgcgcccgcaagtccacactgcaggcactccgcaaggagtgggagaacctggccttcaagccaggtgaggatgttgatgactttgctctccgtctcaacactctcttgcaaaaaatggtgcagtacggcgacgacacctacgacgaggagagagctgtcgagaagctcttccgctgcgtccctgagaagtacaggcagatcgctcgctcgattgaatctctgctggacctctccacgatgtcgatcgaggaggcgttaggtcgcctcaaggtcgtcgatggtgatgagccacggcctctctcggggcccatcaccatcggcgggaagctccatctcactcgggagcagtgggaggcctctcagggtgacgggaggaagggggagtcatcttccccgacaggcggccgtaagccgcgcaaggcgcggggaggtgtccagctacggtgggcgcgaagacgtgccgagggtggcgcccgcagaggcgcccagggcgttgccaccggcaaccacaagccggcacgagacgacacctgccgcaactgtggcaagcttggccattgggccaaagactgtcgacagccacgacgcggccaggcccacgtcgcacgggtggaggaggaagagccggctctgctcctagctcacgcaagcatcgagctacctccagcggcaccggccgcagcggctttcctccaccttgatgagccgaaggtactcgtctccctctgcgacggctccagcaacgacaaggctgatgggtggtacctcgacaccggcgccacccatcacatgaccggccgacgggagttcttcaccgagttcgactccagcgtccgaggcaccgtcaagttcggggacgcctccggcgtggagatcaagggtgttggctccgtcaccttcaccgccaagtccggtgagcacaggctgctcaccggagtctactacatccccgcgttgaggaattctatcatcagtgtgggacagctggatgagaacggctcacgcgtgttggtcgaggacggactcatgaggatttgggatcgccgtcgtcgccttcttgccaaggtaaccagaggcactaatcgactctacatcctcagcgcgcaagtcgcacatccagtttgcctcgccgctcgtcgggacgacgaggcgtggcagtggcacgagcgcttcgggcacctccactttgaggccctgaagcagctcagtgccaaggagatggtgcgaggcatgccgtgccttgaccacgtggagcagctctgcgacgtctgcgtggtgacaaagcagcggcggctcccctttccccagcagacgagcttccgagccaaggagcggctcgggctcgtgcacggggacttgtgtggcccagtgacaccggccacaccaggaggacgacgttatttcctgctgctcgtcgacgacctctcccgctacatgtgggtgatggtcctcggcagcaagggagaggctgcggacgccatcaggcatgcgcaggctgcagcagaggcggagtgcggccgcaagctgcgcgtgctgcgcaccgacaacggcggcgaattcacggcggctgaattcgcgtcgtactgcgctgatgagggcattcagcgccactacaccgcgccgtacagcccacagcagaacggcgtcgtcgagcggcgcaaccagacggttgtggggatggctcgggccctcctcaagcagagggggatgccggccatcttctggggggaggcggtggtgacggccgcctacatcctcaaccgctcgcctaccaaggccctcgatggcaggacaccgtacgaggcttggcatgggcgcaagccggcggtctcccacctgcgggtcttcggctgcctcgcgttcgccaaggagcttggccacatcggcaagctcgacgacaggagcaccccaggggtgttcatcggctacgcggagggctcgaaggcctaccgcatcctcgacccggagacacagcgtgtgcgcattacgcgcgatgttgtgttcgacgaagggcgagggtgggtatgggacaaggcggtggatgatggttcgactccgacgtacgacgacttcaccatcgagtacgtccacttcgagggagctgggggagtaggcagctcttcttcaccgagcgtgtctaccccagtccccgagcctccaccgactccaacaccaacacaccctcgggccacgacttcgactacgacgagctcttcgtcgacaccaccccagccggtgtccccacacgctccagcaccaacagccactcctccgggcacgtctactccgacgccagctcgtgttgagcgcagcccggtggagttcgttactccgctctcccacgacggggagcgcatcgacgcgtaccatgacggcgagcagctacggtaccgtacgatggaggatcttctcggcgaccagccggtgccgggactggtgcctcgcaacctggaggcgcagttgcaccttgcgtgcgacgacggtgagcctcggtcttttgcagaggccgagaaacacgcggcatggcgtgccgcgatgcagtcggagatggacgcggttcaggagaaccgcacctgggagcttgctgacctccctcgtggtcaccgcgcgatcacccttaagtgggtgttcaagctgaagagggatgaagccggagccatcgtcaagcacaaggctcgcttggtggcacgcggtttcgtgcagcaggaggggatcgactacgacgatgccttcgctcccgtggcacggatggagtccgtgcgactccttgcgctggctgctcaggaaggctggggcgtccatcacatggacgtcaagtcggcgtttctaaacggcgacttgaaggaggaggtctacgtgcaccagccgccgggatttgtgatccccggcaaggagggcaaggtgctacgcctgcacaaggccctctacggcttgcggcaggcaccgagggcgtggaatgccaagttggattccacgctcaaggggatgggcttcgagcaaagcccgcacgaggcggccatctaccggcggggcaatggaggaaatgccttgctggtgggtgtctacgtcgacgacttagtgatcaccggcaccaaggatgcagaggtcgcggcgttcaaggaggagatgaaggccaccttccagatgagtgatctggggcctctctccttctacctggggatcgaagtgcaccaggacaactccgggatcacgcttcgacagaccgcctacgccaagcgcgtcgttgagctggctgggctcaccgattgcaacccagctctcactccgatggaggagagactgaagctgagccgcgacagcacagcggaggaggtggatgctacacagtaccgacgtcttgtggggagccttcgctacctcacccacacacggccggacttggccttctccgtcggctacgctgtgaagaggatcatccgctacgttgcggggactctcgaccacggtctctactacccgaggtgtcctggcaaggcacacttcgtcgggtacagcgacagcgaccacgccggcgacatcgacaccagcaagagcacgagcgggattctcttcttcctcggcgagtgcctcgttagctggcagtcaatcaagcagcaggtggtggccctgtccagctgcgaggccgagtacatggcggcatccgccgcttcgacccaggcgctctggcttgctcgactgcttagtgatctcctcggcagagatactggagcggtggagctcagggtggatagcaagtccgctctggccctggcaaaaaaccccgtttttcacgaacggagcaagcacatccgagtgaggtatcatttcatccgaagctacttggaggaagggagcatcaaggcgagctacatcaacaccaaggaccagcttgcggatttgctcaccaaaccccttaggaggatcaagttccttgagctttgctcccggatcgggatggctcaactctcccacaagacagcgcacaagacttag

SEQ ID NO: 23314 - DNA, 5481 bp, Oryza sativa
  Clone ID: TF_OsC1528_2299
cttttttttttttttttttttttttttttttttttttttttttaaacaggtaatggtatagattcatggaactcgacaaggcggaacaatcatatccatagttccatacaacggatggacctctgcactctcttcactatacagaggatttctactgcttaacaactctcagttacccaatcctccaaaatggatatgggatcatcagcttatagcagcatgagtccactcgaatgcgatctttccttcaagcagctcgcctaagccgactatgtctaaatgacaggtttcctcttttggtgtatcaacagctatcaaggacccaaaacaaaccgctacaagggttcaaagggtagggagtaaaaaagaaaaagaagatgtcaacctatcaagtatcatatcaaccagtaagagctcagttttccttccatttgttgacatacttgaggaataacatcgaagggttatcccttggttgggcctgtacacgagaggatcgccgcagtgcagcctcttggagtagcattttctgggtgacgtccttcgttcttttttccaaagcattgcttatcgtattataaaacttatcaagctgccgtttcagggctctctcccttatgcctttaacatttaacgatccaataagcgcatcaagctcttccttagtgctgtagtaaccccattctttggaatctgcactttcgacaaaaagtcgtccttcatgcatctcttgttccaccccttcccaagctcggttgagctctcagccagcagcagcagcagcagcaccggttgcccctccttcccctttcccttccccctctccacacagcagccccccggaggtgcgccatgtccgacgctcggtctcggcgttcggtcgcctcgagcactcggcgtcagcaggacgccgagctcgccgcagcagaagagcgcaggcgagcaacggctcagaccgctgcagcagcagcgagggcggccagactggcggcagcggagttggcagcagccagggcggaggcggaggcggaggcggcggaagatgcggcacgtgcggcggaggtagaggttgagaccttgcgcagcagcatcaacggctccatcgccggcgacatcaccgctgacagggagcttgaggagctggcaagaggaagggcacgggagcgagcagagcggtgggcagcagcccacctccacggcggcggcggcggcccaagggatcgtgcgcccgccgacgggaacccagacgggcgcgggcgtgccggcggcagcccggagcccgcacgcggccctcgcaggcggcacggctccctctcccctgaccggcgctatggtcaccacggcgtccagacggtggtcagggactttggtcccggcggtgggtggcctaccctcaccaaaaccaactacatcgagtgggccgcggtgatgagggtgaggctccaggtgcggcacatgtgggaggcagtccggtacggcgacgtcgactacgacgaggatcggcgggcactggatgccctcatcgttgcagtcccgcccgagatgcagttctcgctttcccagaagcggactgccaaggaggcctgggacgccatcgctgcggcacgcatcggcagcgaccgcgcccgcaagtccacactgcaggcactccgcaaggagtgggagaacctggccttcaagccaggtgaggatgttgatgactttgctctccgtctcaacactctcttgcagaagatggtgcagtacggcgacgacacctacgacgaggagagagctgtcgagaagctcttccgctgcgtccctgagaagtacagacggatcgctcgctcgatcgaatctctgctggacctctccacgatgtcgatcgaggaggcgttaggtcgcctcaaggtcgtcgatggtgatgagccacagcctctctcggggcccatcaccatcggcgggaagctccacctcactcgggagcagtgggaggcctctcagggtgacgggaggaagggggagtcatcttccccgacaggcggccgtaagccgcgcaaggcgcggggaggtgtccagctacggtgggcgcgaagacgtgccgagggtggcgcccgcagaggcgcccagggcgttgccaccggcaaccacaagccggcacgagacgacacctgccgcaactgtggcaagcttggccattgggccaaagactgtcgacagccacgacgcggccaggcccacgtcgcacgggtggaggaggaagagccggctctgctcctagctcacgcaagcatcgagctacctccagcggcaccggccgcagcggctttcctccaccttgatgagccgaaggtactcgtctccctctgcgacggctccagcaacgacaaggctgatgggtggtacctcgacaccggcgccacccatcacatgaccggccgacgggagttcttcaccgagttcgactccagcgtccgaggctccgtcaagttcggggacacctccggcgtggagatcaagggtgttggctccgtcaccttcaccgccaagtccggtgagcacaggctgctcaccagagtctactacatccccgcgttgaggaattctatcatcagcgtgggacagctggatgagaacggctcacgcgtgttggtcgaggacggactcatgaggatttgggatcgccgccgtcgccttcttgccaaggtaaccagaggcactaatcgactctacatcctcagcgcgcaggtcgcacaaccagtttgcctcgccgctcgtcgggacgacgaggcgtggcagtggcacgagcgcttcgggcacctccacttcgaggccctgaagcagctcagtgccaaggagatggtgcgaggcatgccgtgcctcgaccacgtggagcagctctgcgacgtctgcgtggtgacgaagcagcggcggctcccctttccccagcagacgagcttccgagccaaggagcggctcgagctcgtgcacggggacttgtgtggcccagtgacaccggccacaccaggaggacgacgttacttcctgctgctcgtcgacgacctctcccgctacatgtgggtgatggtcctcggcagcaagggagaggctgcggacgccatcaggcatgcgcaggctgctgcagaggcggagtgcggccgcaagctgcgcgtgctgcgcaccgacaacggcggcgaattcacggcggctgaattcgtgtcgtactgcgctgatgagggcattcagcgccactacaccgcgccgtacagcccacagcagaacggcgtcgtcgagcggcgcaaccagacggttgtggggatggctcgggccctcctcaagcagagggggatgctggccatcttctggggggaggcggtggacaccgtacgaggcttggcatggcgcaagccggcggtctcccacctgcgggtcttcggctgcctcgcgttcgccaaggagcttggccacatcggcaagctcgacgacaggagcaccccaggggtgttcatcggctacgcggagggctcgaagacctaccgcatcctcgacccggagacacagcgtgtgcgcattgcgcgcgatgttgtgttcgacgaagggcgagggtgggtatgggacaaggcggtggatgatggttcgactccgacgtacgacgacttcaccatcgagtacgtccacttcgagggagctgggggaccggtgtccccacacgctccagcaccaacagccactcctccgggcacgtctactccgacgccagctcgtgttgagcgcagcccggtggggttcgttactccgctctcccacgacgaggagcgcatcgacgcgtaccatgatggcgagcagctacggtaccgtacgatggaggatcttctcggcgaccagccggtgccgggactggtgcctcgcaacctggaggcgcagttgcaccttgcgtgcgacgacggtgagcctcggtcctttgcaaaggccgagaaacacgcggcatggcgtgccacgatgcagtcggagatggacgcggttcaggagaaccgcacctgggagcttgctgacctccctcgtggtcaccgcgcgatcacccttaagtgggtgttcaagctgaagagggatgaagccggagccatcgtcaagcacaaggctcgcttggtggcacgcggtttcgtgcagcaggaggggatcgactacgacgatgccttcgctcccgtggcacggatggagtctgtgcgactcctccttgcgctggctgctcaggaaggctggggcgtccatcacatggacgtcaagtcggcgttcctaaacggcgacttgaaggaggaggtctacgtgcaccagccgccgggatttgtgattctcggcaaggagggcaaggtgctacgcctgcacaaggccctctacggcttgcggcaggcaccgagggcgtggaatgccaagttggattccacgctcaaggggatgggcttcgagcaaagcccgcacgaggcggccatctaccggcggggcaatggaggaaatgccttgctggtgggtgtctacgtcgacgacttagtgatcaccggcaccaaggatgcagaggtcgcggcattcaaggaggagatgaaggccaccttccagatgagtgatctggggcctctctccttctacctggggatcgaagtgcaccaggacaactccgggatcacgcttcgacagaccgcctacgccaagcgcgtcgttgagctggctgggctcaccgattgcaacccagctctcactccgatggaggagagactgaagctgagccgcgacagcacggcggaggaagtggatgctacacagtaccggcgtcttgtggggagccttcgctacctcacccacacacggccggacttggccttctccgtcggctacgtcagtcggttcatgcagcgaccgacgacggagcaccagcaggctgtgaagaggatcatccgctacgttgcggggactctcgaccacggtctctactacccgaggtgtcctgacaaggcacacttcgtcgggtacagcgacagcgaccacgccggcgacattgacaccagcaagagcacgagcgggattctcttcttcctcggcgagtgcctcgttagctggcagtcaatcaagcagcaagtggtggccctgtccagctgcgaggccgagtacatggcggcatccgccgcttcgacccaggcgctatggcttgctcgactgcttagtgatctcctcggcagagatactggagcggtggagctcagggtggataacaagtccgctctggccctggcaaagaaccccgtttttcacgaacggagcaagcacatccgggtgaggtaccatttcatccgaagctacctggaggaagggagcatcaaggcgagctacatcaacaccaaggaccagcttgcggatttgctcaccaaaccccttgggaggatcaagttccttgagctttgctcccggatcgggatggctcaactttcccacaagacggcgcacaagacttag

SEQ ID NO: 23315 - DNA, 6053 bp, Oryza sativa
  Clone ID: TF_OsC1528_2355
atggacaacctgtcagagccactgctcgcagagatcatcaagaggattgccaagacaagtgatcgtaactctctttcccttgtgtcgaagcagctctacactatcgacgcggagcaaagggatgctatccatgttggctgtggtcttcacccggcaactgaagctttggcatcactatgctcccggttccctaatttgtggaaagtagtgattgattactctggttggatatctatccacgggaagcagttggacaaccaagggctccttgtgctttcgtctcactgctcttcactgaccgatctcacattaaacttctgctcctatatcgatgattctggtattggctatctggcttattgcaagaaactaaggtctttcaggctgaactttgcaccagcaataagttcaagagggcttctctcggtggcagttggttgcaagagtctttgtactttccaccttgttgattgcatgaaagtaggaagtgtggagtggctggagtaccttggcagggccggatcattggaagaacttgtggtaaaggattcagccccccggaggtgcgccatgtccgacgctcggtctcggcgttcggtcgcctcgagcactcggcgtcagcaggacgccgagctcgccgcagcagaagagcgcaggcgagcaacggctcagaccgctgcagcagcagcgagggcggccagactggcggcagcggagttggcagcagccagggcggaggcggaggcggaggcggcggaagatgcggcacgtgcggcggaggtagaggttgagaccttgcgcagcagcatcaacggctccatcgccggcgacatcaccgctgacagggagcttgaggagctggcaagaggaagggcacgggagcgagcagagcggtgggcagcagcccacctccacggcggcggcggcggcccaagggatcgtgcgcccgccgacgggaacccagacgggcgcgggcgtgccggcggcagcccggagcccgcacgcggccctcgcaggcggcacggctccctctcccctgaccggcgccatggtcaccacggcgtccagacggtggtcagggattttggtcccggcggtgggtggcctaccctcaccaaaaccaactacatcgagtgggccgcggtgatgagggtgaggctccaggtgcggcacatgtgggaggcagtccggtacggtgacgtcgactacgacgaggatcggcgggcactggatgccctcatcgctgcagttccgcccgagatgcagttctcgctttcccagaagcggactgccaaggaggcctgggacgccatcgctgcggcacgcatcggcagcgaccgcgcccgcaagtccacactgcaggcactccgcaaggagtgggagaacctggccttcaagccaggtgaggatgttgatgactttgctctccgtctcaacactctcttgcagaaaatggtgcagtacggcgacgacacctacgacgaggagagagctgtcgagaagctcttccgctgcgtccctgagaagtacaggcagatcgctcgctcgattgaatctctgctggacctctccacgatgtcgatcgaggaggcgttaggtcgcctcaaggtcgtcgatggtgatgagccacggcctctctcggggcccatcaccatcggcgggaagctccatctcactcgggagcagtgggaggcctctcagggtgacaggaggaagggggagtcatcttccccgacaggcggccataagccgcgcaaggcgcggggaggtgtccagctacggtgggcgcgaagacgtgccgagggtggcgcccgcagaggcgcccagggcgttgccaccggcaaccacaagccggcacgagacgacacctgccgcaactgtggcaagcttggccattgggccaaagactgtcgacagccacgacgcggccaggcccacgtcgcacgggtggaggaggaagagccggctctgctcctagctcacgcaagcatcgagctacctccagcggcaccggccgcagcggctttcctccaccttgatgagccgaaggtactcgtctccctctgtgacggctccagcaacgacaaggctgatgggtggtacctcgacaccggcgccacccatcacatgaccggccgacgggagttcttcaccgagttcgactccagcgtccgaggcaccgtcaagttcggggacgcctccggcgtggagatcaagggtgttggctccgtcaccttcaccgccaagtccggtgagcacaggctgctcaccggagtctactacatccccgcgttgaggaattctatcatcagcgtgggacagctggatgagaacggctcacgcgtgttggtcgaggacggactcatgaggatttgggatcgccgtcgtcgccttcttgccaaggtaaccagaggcactaatcgactctacatcctcagcgcgcaggtcgcacatccagtttgcctcgccgctcgtcgggacgacgaggcgtggcagtggcacgagcgcttcgggcacctccacttcgaggccctgaagcagctcagtgccaaggagatggtgcgaggcatgccgtgccttgaccacgtggagcagctctgcgacgtctgcgtggtgacaaagcagcggcggctcccctttccccagcagacgagcttccgagccaaggagcggctcgggctcgtgcacggggacttgtgtggcccagtgacaccggccacaccaggaggacgacgttatttcctgctgctcgtcgacgacctctcccgctacatgtgggtgatggtcctcggcagcaagggagaggctgcggacgccatcaggcatgcgcaggctgctgcagaggcggagtgcggccgcaagctgcgcgtgctgcgcaccgacaacggcggcgaattcacggcagctgaattcgcgtcgtactgcgctgatgagggcattcagcgccactacaccgcgccgtacagcccacagcagaacggcgtcgtcgagcggcgcaaccagacggttgtggggatggctcgggccctcctcaagcagagggggatgccggccatcttctggggggaggcggtggtgacggccgcctacatcctcaaccgctcgcctaccaaggccctcgatggcaggacaccgtacgaggcttggcatgggcgcaagccggcggtctcccacctgcgggtcttcggctgcctcgcgttcgccaaggagcttggccacatcggcaagctcgacgacaggagcaccccaggggtgttcatcggctacgcggagggctcgaaggcctaccgcatcctcgacccggagacacagcgtgtgcgcattacgcgcgatgttgtgttcgacgaagggcgagggtgggtatgggacaaggcggtggatgatggttcgactccgacgtacgacgacttcaccatcgagtacgtccacttcgagggagctgggggagtaggcagctcttcttcaccgagcgtgtctaccccagtccccgagcctccaccgactccaacaccaacacaccctcgggccacgacttcgactacgacgagctcttcgtcgacaccaccccagccggtgtccccacacgctccagcaccaacagccactcctccgggcacgtctactccgacgccagctcgtgttgagcgcagcccggtggagttcgttactccgctctcccacgacggggagcgcatcgacgcgtaccatgacggcgagcagctacggtaccgtacgatggaggatcttctcggcgaccagccggtgccgggactggtgcctcgcaacctggaggcgcagttgcaccttgcgtgcgacgacggtgagcctcggtcttttgcagaggccgagaaacacgcggcatggcgtgccgcgatgcagtcggagatggacgcggttcaggagaaccgcacctgggagcttgctgacctccctcgtggtcaccgcgcgatcacccttaagtgggtgttcaagctgaagagggatgaagccggagccatcgtcaagcacaaggctcgcttggtggcacgcggtttcgtgcagcaggaggggatcgactacgacgatgccttcgctcccgtggcacggatggagtccgtgcgactccttcttgcgctggctgctcaggaaggctggggcgtccatcacatggacgtcaagtcggcgtttctaaacggcgacttgaaggaggaggtctacgtgcaccagccgccgggatttgtgatccccggcaaggagggcaaggtgctacgcctgcacaaggccctctacggcttgcggcaggcaccgagggcgtggaatgccaagttggattccacgctcaaggggatgggcttcgagcaaagcccgcacgaggcggccatctaccggcggggcaatggaggaaatgccttgctggtgggtgtctacgtcgacgacttagtgatcaccggcaccaaggatgcagaggtcgcggcgttcaaggaggagatgaaggccaccttccagatgagtgatctggggcctctctccttctacctggggatcgaagtgcaccaggacaactccgggatcacgcttcgacagaccgcctacgccaagcgcgtcgttgagctggctgggctcaccgattgcaacccagctctcactccgatggaggagagactgaagctgagccgcgacagcacagcggaggaggtggatgctacacagtaccgacgtcttgtggggagccttcgctacctcacccacacacggccggacttggccttctccgtcggctacgtcagtcggttcatgcagcgaccgacgacggagcaccagcaggctgtgaagaggatcatccgctacgttgcggggactctcgaccacggtctctactacccgaggtgtcctggcaaggcacacttcgtcgggtacagcgacagcgaccacgccggcgacatcgacaccagcaagagcacgagcgggattctctttttcctcggcgagtgcctcgttagctggcagtcaatcaagcagcaggtggtggccctgtccagctgcgaggccgagtacatggcagcatccgccgcttcgacccaggcgctctggcttgctcgactgcttagtgatctcctcggcagagatactggagcggtggagctcagggtggatagcaagtccgctctggccctggcaaaaaaccccgtttttcacgaacggagcaagcacatccgagtgaggttgatgtcattacatacagtacactcatcgatggatattgcttggcaggtaagatggatgaagcaatgaagttactttctgacatggtctcagttgggttgaaacctgatactgttacttatagcactttgattaatggctactgtaaaattagtaggatggagaatgcattatctcttttcaggcagatggtgtgcaatggtgttagtcctaatattatcacgtataacatagttcttcaaggtttatttcagactggacaaactcgtgctgctaaagaaatctatgtcaggattatcaaaaggggaatacagcttgaaattagcacatgcaacatagtccttcaaggactttgcaaaaataatctcactggtgaggcacttcagatgtttcagaatctatgtttgatggatgtaaagcttgagactagaactttcaatataatgattggttccttgcttagaagtggcagaaaggatgaatcaaaggatttgtttgctgctctctcggcaaatggtttagcaccggatgttgtgacctataccttaatgattgaaaatctcatagaagatggcttgctcgaagagtctgataatctatttctttcaatggagaagaatggctgtgttcctaactcccgtatgcttaattgcatcgtcagaaagttacttcagaaaggggagataggcagggctggtgtttatctgtccaaaattgataaaaatgacttctcccttgaagcttccactgctgagttactgattttgctggtttcaagtgggaagtacaatcaacatatgaagggtctccctgagaagtaccactcctttgtgaaatccagggctgtttga

SEQ ID NO: 23316 - DNA, 4458 bp, Oryza sativa
  Clone ID: TF_OsC359_8265
atggccggagagagaaaggagaaggttggcttcggcggttatgcctcaaatagcaaggcataccgggtctacaataagaacaaaggtattgtggaagaaaccgccgatgttcaatttgatgagactaatggctcccaagaggggcacgagaatttggatgatgtaggtgatgaaggcttgatgagagctatgaagaacatgtctattggagatgtcaagcctattgaagtggaagacaagccatccacctccactcaagatgagccatctacttccgctacgccaagtcaagctcaagttgaggtggaggaggagaaggcacaaaatccacctatgccaccaaggatacacaccgctctttccaaggatcacccaattgaccaagtgttgggtgacattagtaagggtgttcaaactcgatctcgtgtcgcttcgatttgtgaacattactcgtttgtttcttgtcttgagcaaaaacaagtagatgaagctctttgtgatccggattggatgaatgctatgcatgaagagctcaacaactttgcaagaaacaaggtgtggactttggttgaaagacctagagaccacaatgtcatagggacaaagtgggtctttaggaacaaacaagatgagaacgggttggtggtgagaaacaaggcaaggttggtggcacaaggtttcacacaagttgaaggtttggactttggtgaaacttttgcccccgtggcaagacttgaggctattcgcatccttcttgcatttgcatcatgctttgatataaaactatttcaaatggatgtgaaaagtgcttttctaaatggtgaaattgccgaacttgtctttgttgaacaacttcccggttttgaagatcctaaaaatcctaaccacgtttacaaactctcaaaagctctttatggtttaaaacaagctcctagggcttggtatgaaagattgagagattttcttttgtcaaaggttttcaaaattggaaaagttgacaccaccctttttacaaagatcattggtgatgatttctttgtgtgtcaaatttatgttgatgacatcatattcggttttactaatgaggtattttgcaagaaatttggtgatatgatgtctaggaaatttgagatgtccatgattggagagttgagcttcttccttggacttcaaatcaagcaactcaaggatgggacgttcgtgagccaaaccaagtacatcaaggatctacttaaaaggtttagcttggaggatgcgaagcccatcaagacacctatgacaaccaatgggcatctcgaccttcatgagggagctatgcctccccgcactcgtcgtgatcgtcgtgagcccacgcccgatcccgtcagtgagaatgaggaatcaagcggagatgagtatgttcaaagtgaggatgaaaatatggaaaatgttgagggggatgaggtggaagagcaacaacaattcaagcggaagaaggccacgctaagcctacccgaccgtcgggagcgcaaccgcctgtgccgcctcgaccgtgcgccggccggccgcgccgtcgcctcctccagcgtcgccgctaccccctccaccccggcctgccctccgtttcccgcggagacccccggagctacgtttccgccgtcgcccttccctttcctccgcaccggccgcctccagccgcctctatctccctgcctgagcgccggtcaacgtcgccaccacctccctcggctccgcgacgccgccctcatccccggcatcacctcctcctcgcccgaagctcgccggagtggcctcctcgccggcgtccagtggcgtcgccaccacttctccgtctccggccggctgctgttcgtcgccggtacgccgaccgacgtcgccgtctcctccgttgacgtcgcagcgtcgccctccaccccggcctgccctcggtttcaccggaacgtcgccgcgaacatctccgtccgcctcgccggagttgtttggccgcccgtccctcctcgcccgtgcaccggtcggccacacctccaccacctccggcatcgcagcggcaaggtcgtcctcggcatcgtttcccctccatccaaacccctccgcggtccatcatcgtcgtctccgatcgttctcgtcgtcgacgtcccatcggtcgcccggctcgtcgtctcgcggcgccgcctccgtcgtcggcaccgcagcggcgtggtcctcgccgtcctcgtccccgtgcagccgctgccggctgtcctcgtcgcctcctcgccggtcccggtcgtcgtcgtcgtcgtcgtcctctcgtcgttcccggtcgtcgtggcccccatcatcgtcttcgtcctcggctccgcgtcgtcaagtctcgtgccggccgtgtctcgccttcgttcaaggatcgccgccgaagtcgttccctcgccgtccgtctccgccgcgccgttcgtcgttgtcgttcccacgcctcgtcgcgtggtgctttcgtcgttccggaggttcccgaagcgtggtttgcggtcgtcgccgaaggttcggaaggccgttctctctgagcaaggcaaggcaaatgaaggctacacgagctgcggcccggtagtcgagatgtcatggcagagggttggtgccctgctgctaggggctcagtcctgcctgcctgtcccggaggttccggccgtaggtgggattgggtcggtactcttgtttatggctaggatgggttgggaactatgtcacgtcttccgtccgtataccgtggtgaataagcctaacatacatcataacagcaaaagacttagatctgttaaggtcctatccttagtttctaatctgtctctcccctttgctttccctctctccctctccaaacctttgcaacagatggctgacaatgagaaagacaataaggtcagaagtcaggacattggtacctcaagcccccgagtgaatgaagcaccagacaccagttgtgtgacactggttcaacacctgattaaccagaatcgattgcttatagagatactacagcagcatcagacgccaattctgaacctgagtcaaatacaacctcaagtgcagttggaggcagtccaagcactcacaccacaagtcagcatgccgccagcatcccgaaggacccatggtgacgtgccacatgttgactcaaaagaagcaagtatcatttgttttaggtgtgatgagcaagggcactatgcaagggagtgtcctcagcagaaaagaaaaacacccatgcgaaccgaagatgaagtccgtaagatgatcattaccagcacagaatggcctccactaggaatgacaaaacgtcaaagaagaaataccttccgaggtgcaccacagttgacagagcatcttttagctaatggaggtagagtgtctgatagtgaagattcagatcaagtctcctcagatgatgaagatgaaatggaacgtaaggcatgctctcgttgtggagaaatcggtcatgttgccagctcgtgtgccactacatgcgttcattgtgaggaagaccatccacccgacaggtgtccaacgagcaggatcacttgtttcttttgtgaaggaactgatcatgtaccaaaagattgtcaattcagttttctgctgacgaagaagatggccaaccaacccgccagttccaatggagagaagcatcaaggcaacacaaatcctcgccaagattacagtttcagcctaactccagtgccaggacagaggaatcaaaatgagaaaagaaaatgccgagtccgggaagatatctgttgcttcaattgtcaaggaatgggtcatttcgccgacaagtgcccaaaaccgagaaacatagctgccggcacgtcagtccacgcaactccctgcaatcagaagcttgctcctcagcgaattgtcatccatgtatcccgaagcagtcctatagcccgcgttgcaacagctccaactccagcgagtgcattaccacaaggtgtcaatgctcaatttcagccccagccatcagttgacaagacagaggccagtatcggcattgtacctttggatgctccagcacagcagccaaggaatcaagtacaagatgaagaacctgagcgtgagaaagttattgtctgttacaacgcactaacccttctctgcaccgacggcctcagcaaagaattgtcgtcgatggaagaagttgtgtctctccccgacctactccaggccaagcgaagggcaatcaacctccggagggcgataccaagcagaagaccgttattcgcctcaaacagcactcagaaggaagcttctccggtgaataatagcaatatgcagtcctatcacatcatcacagaaccaatcaaggatgatgcagtcactagaacaatgcccgctatatctctccagaatcaaaatgagcagccacgcttgtggttttcagttcgctacctatcattgtgcagtcgaaagtttgcagcaatcatgtaa

SEQ ID NO: 23317 - DNA, 2996 bp, Oryza sativa
  Clone ID: TF_OsC359_7197
atgtcgtggcagagggttggtgccctgctgcttggggctcagtcctgcctgcctgtcccggaggttccggccgtaggcgggattgggtcggtactcttgtctatggctaggatgggttggaaactatgtcacgtcgtccgtctgtataccgtggtgaataagcctaacatacatcataacagcaaaagacttagatctgttaaggtcctatccttagttcctaatctgtctctcccctttgttttccctctctccctctccaaacctttgcaacagatggctgacaatgagaaaggcaataaggtcagaagtcaggacattggtacctcaagctcccgagtgaatgaagcaccagacaccagttgtgtgacactggtccaacacctgattaaccagaaccgattgcttatagagatactacagcagcatcagacgccaattctgaacctgagtcagatacaacctcaagtgcagttggaggcagtccaagcactcacaccacaagtcagcatgccgccagcatcccgaaggacccatggtgacgtgccacatgttgactcaaaagaagcaagtatcatttgttttatgtgtgatgagcaagggcactatgcaagggagtgtcctcagcagaaaagaaaaacaccaatgcgaaccgaagatgaagtccgtaagatgatcattaccagcacagaatggcctccaccaggaatgacaaaacgtcagagaagaaataccttccgaggtgcaccacagttgacagagcatcttttagctaatggaggtagagtgtctgatagtgaagattcagatcaagtctcctcggatgatgaagatgagaagtctccccaaggtttcaaccagaataaaatggaacgtaaggcatgctctcgttgtggagaaatcggaactgatcatgtaccaaaagattgtcaattcagttttctgctgacgaagaagatggccaaccaacccgccagttccaacggagagaagcatcaaggcaacacaaatcctcgccaagattacagtttcagcctaactccagtgccaggacagaggaatcaaaatgagaaaagaaaatgccgagtccgggaagatatctgttgcttcaattgtcaaggaatgggtcatttcgccgacaagtgcccaaaaccgagaaacatagctgccagcacgtcagtccacgcaactccctgcaatcagaagcttgctcctcagcgaattgtcatccatgcatcccgaagcagtcctatagcccgcgttgcaatagctcaaactccagcgagtgcattaccacaaggtgtcaatgctcaatttcagccccagccaccagttgacaagatagaggccaatatcggcattgtacctttggatgttccagcacagcagccaagaaatcaaaattggaaccacccagcaggggcaaccaacgttcaagtacctacagtccagcaacagtgcaagttatcagaatttctcaaaactgagcctccaacctttgccattgccgtcgatcctatggaagccagtgattggttgcgcatagtcgagaagaagctggggttgattcagtgcacagaccaggagcgggttgtcttcgcaactcatcagttggttgcactggcttcagaatggtgggatagctacgaagcatcacggccagaaggacataccatcacctgggacgagttttcatctgtattcaagagatcacatgttcccgcaggaatgatcacactgagaaaacgagagttccgctacctgaagcaagaagatttgaccgtcacagagtacctgcacgagttccatcgtttggctcactatgcaccagaagatgtggaaaatgatgaagaccaacaagagaagtttctccaggggttaaaagatgagatcgcagtgcaactactcctagaggaatatgaagattttgagaaacttgtggacaaagccatacaactcgaaagtgagcataatcggatgaagaactgtaagagaaggattgtcagcatcccagtatttccatgtggtaaccaaagacagcgcactgagccacttcagatcaccggatcttctattgcgcatcaagagtttccgccccaagaagatggacccaatgcagacaacaacattagcaatactaatgatgatgatgataccaccaacaaccatgcttcttgccccattagtgaccactcgaatcgagcgtgcaatgtcaacatcattcaccaagatgtcgacgatagtatcaatgatggcacccaaaatgacaaccctagcagttgtgactctgagaaagactccgatggtgatagcaactatggtaccactgatgccaatgttagcaaggatttccagccaccaattccaactccaagtcagaatgatcgtccccagacggatagctcagcaaagaagacgttgatttgctacaattgcaaagaactagggcattactcgagggactgcctgcaaccaaggcaaagtcgacctccacattaccgccaatttacacgaagcagacatcccaatcgtattgtggtcactggagcaaacgccgtacccgtgaggcctcgtgcaacaaccgtcagtctagcttttgatgaaccacttgaaggttctctgaaaggcagcaggctcaagtaccacattgtcaccagaagcatccacaactcttggagtgaagagtacttggttgacaaagttcaaaaggtgattgatagaagataccagcaaagcgaccatcggggcgcgggcgcgccgcctcccatcggctgtgccggcgtggccgccttcgggcgcgccctgcggctgccatgtggggcccggccgtcagccgcccgcgccctcgggtgcggctgacgcgtgggacccacggcgccggccggtgtgagccgggtggacccggtccaccgtgggccgtgaggctgccgcgtgggccccactcccgtggacccggtccgcgcgcccctccccttcggctgacgcaataaatccat

SEQ ID NO: 23318 - DNA, 2169 bp, Oryza sativa
  Clone ID: TF_OsC359_8051
tttttatgtattgttattgcttctttatagggtttagctttgcttgtgtgcttcgcgtagctcctgtcgttccggaggttcccaaagcgtggttcgtggtcgtcgccgaaggatcggaaggccgttctctctaagcaaggcaatctagtcctgaacaaaaggacacggatagagatggatgaagtcgttgcgacgatggatatctctgaggcaaatgaaggctacgcgagctgcggctcggtaatcgagatgtctaggcaaatgaagactacacgggtcggtgcccgggctcaaccctggcctgcctgtcccgggataccggccgtaggcagggttgggtcggtacttttgttcacggctaggatgggtgaagggttatgtcacatctttacgacgggttccaaggccatggaatgcggagtaaagatgtgtcttgtgggttggcctgggttggcttgggacgagctggaacccaggtcgggttgccagttcggtccaaactatcgtaggccttgggttaaggcagtactagatggtcagctttgcgaagaagaagatgtcgtcagtcgtttgccgaagctccggaagactgcaggatccgctagcgaagcgaaggaagcagtgaagccagctgtgaagcaggacaaaagacttagatctgttaaggtcctatccttagtttctaatctgtctctcccctttgttttccctctctccctctccaaacctttgcaacagatggctgacaatgagaaaggcaataaggtcagaagtcaggacattggtacctcaagctcccgagtgaatgaagcaccagacaccagttgtgtgacactagtccaacacctgattaaccagaaccgattgcttatagagatactacagcagcaccagacgccaattctgaacttgagtcaaatacaacctcaagtacagttggaggcagtccaagcactcacaccacaagtcagcgcaccgccaacatcccagaaggcccctcatgccatgccacatgttgacccaaaagaagcaagtatcatctgttttatgtgtgatgagcaagggcactacgcaaggaactgtcctcagcagaaaagaaaagcaccaatgcgaaccgaagatgaagtccgtaagatgatcattaccagcacagaatggcctccaccaggaatgacaaaacatcagagaagaaattccttccgaggtgcacaacagttgacagagcatcttttagctaatggaggtagagtgtctgatagtgaagattcagatcaagtctcctcagatgatgaagatgcgaagtctccccaagattttaaccagaataaaatagaacttaaggcatgctctcgttgtggagaaatcggtcatgttgccagctcgtgtgcctttacatgcgttcgttgtgaggaagaccatccacccgataggtgccctatgagcaggatcacttgtttcttgtgtgaaggaactgatcatgtaccaaaagattgtcaactcagttttctgctgacgaagaagatggccgaccaacacgcccattctaatggagagaagcatcaaggaagcacaaatcctcgccaagattacagtttcagcctaactccagtgccaggacagaggaaacaaaatgagaaaagaaaatgccgagtccgggaagatatccgttgcttcaattgtcaaggaatgggtcatttcgccgacaagtgcccaaaaccgagaaacatagctgccggcacgtcagtccacgcaactccctgcaatcagcagcttgctcctcaacgaattgtcatccatgcatcccgaagcagtcctttagcccgcgttgcaacaactccaattccaatgagtgcactaccacaaggtgtcaatgctcaatttcagccccagccaccagctgacaagacagaggccagtatctgcgttgtacctttggaagttccaatacagcagctgagaaatcaagtacaagatgaagaacccgagtgtaagaaagttattgtttgttacaactgcagtgaagaagggcattactccaaaaactgtccccaaccaaggcaaaatcgacctccacattaccgccaatttacacgaagcagacattccaatcgtattgtggtcacgggagcaaacgccgtacccgtaaggcctcgtgttaatcagaaccca

SEQ ID NO: 23319 - DNA, 5976 bp, Oryza sativa; identical to SEQ ID NO: 15258
  Clone ID: TF_OsC359_5604

SEQ ID NO: 23320 - DNA, 1470 bp, Oryza sativa
  Clone ID: TF_OsC46300_1
atgagcaacagcgccgccacctccacctacgcggagagcgtcgcgtcctgccgcgctcccgctcccgccacccccagggcccccccacgccgccgtgaggcgccacttcgacttcgccgccggcgacggcgttatatgttggattttctggatgcatgtgtatattttctcaagcatgcgagagtacatgaggaaagaaatgcaaatattctgtttggtgtggagaagctgatatttgtccaaatgccacagcctgcttatatgagccatcctaaaccaaatcctcatgtttttagcagcccatgcagtcctgttgtgttcaacagtcctagcaatcatttagctggttctacaactcctacaccgaacaatctccaagtttttaatggtccaagaaaccctcatgtgtccaacagtcctagcaatcatttagctggttctacaactcctacaccaaacaatctccaagtttttaatgctccaggaaaccttcatgtgtcccacagtccaaacaatcatcgatctggtgctacaactccagttaacgctaatccccctgcagcccgtgtagtgttcaacagtcctagcaatcatttagctggttctacaactccatagacggaacaatctccaagtttttaatggtccaagaaaccctcatgtgtccaacagtcctagcaatcatttagctggttctacaactcctacaccaaataatctccaagtttttaatgctccaggaaaccttcatgtgtccaacagtccagacaatcatcgatctggtgctacaactccagttaacgctaatccccgtggttacctgaatacgatgagtggccatttgacatcgtcaacaatgatgttgtatgcagtggcttcttgccaactgctgagcctacactaagagatggtatagttgctggggaatcaccaagtacgcagcacctgtcaaatgctacgactgaagcgaaaacaccaacaaaatcgcccattatgccgccacctcatggtagcgggagccccttcactcctcggtcgaacccctgctaccgatgtggtgaagacgggcactggtccaggaactgccctaagccggcttcgagcccacttaactctccttgctacaactgcggcaagcttgggcactggagagcaagaggtgggctcctacggtgtttgtccatcatctgctttgttaatcacttcttacatgaatgcaaagtgcagacctgttactgctacaactgctactttgctcctttcttcttcagtatgatgaactggaaggcgatcggctgccgttctctgaatctttctctgaaatttttcctcgagagtttctttcagagatggtccagccctctgccgttcattcggtcagaaactgaaacctgggatgatgatcgttgcagagacttgaccaggacatacgaggacaagaagaagaacaccaatcgatggatggattga

SEQ ID NO: 23321 - DNA, 5382 bp, Oryza sativa
  Clone ID: TF_OsC1528_1763
atgaagaccctgcagggattaattccccactactccatcccgctcgccggcgtgcaccggcgatcgggagagcaggtctctggaacctctgccttcgacgtactgcattgggagaaggcggcaataaggtttttgggaagcgcttcgcgcgactgctccctgttcgtccgcgacggctcgccttcctctccgctcgcgtgcttcgcgccttcgtcgacgctcgcaaccgcgagtagttcctgccgagcaaccggtctttccgccacctcgaagcaattcgaggaagccactactctctttgtgagatgcattcttagcgttcttggcgatcgtctggtcgaggtgtatatgcatatgatcgacgttaaggagttgtgggatgcactaaatactaaatttggtgctactgatgctagcaatgatctgtatatcatagagcagtttcatgactacaagatggctgacaaccgttctgtagtcgaacaggctcatgagatacaaaccatggctaagaaactcgaactccttaagtgtgtcttacctgacaaatttgtggccgggtgcattattgcgaaactacctccatcgtggagaagtttcggtacggcactcaaacacaagagacatgaatactccgttgaggggttgatagcgtctcttgatgttgaggagaaagctcgggaaaaagacgccgcgtctaagggcgatggtgggcagtccagtgccaatgttgtgcacaaggcccagaacaagagcaaggagaaatacaaaactcaacagaccaccaacttcaagaagcagaagaagaacaacaacaatcctaaccaggatgagaggacttgctttgtgtgtgggcaacctggttatctggctaggaagtttccacggcgcaaggggatgaaggcacctgcagggcagacttctaagtctgctaatgtgaccattggcaacactggagatggaagcgggtatggtaatttacctactgtcgcacggggttccaccgtcctaatggggaatgggtcacatgcttctgctcatggtgttggcacggtagatctgaagtttacttcgggaaagatcgtgcagctgaagaacgtgcagcatgtcccttctatcgacaggaatcttattagtggctcccgtctgactagagacggatttaagttggtttttgagtctaataaattagtcgtgtctaaacatggatattttattggtaaaggttatgagtgcggaggcatgttccgcttttccctttctgatttctgcaataagtctgtgaaccatatttgtggcagtgtggatgatgaggctaatgattggcactcacactactggaaagaggctgtccgtagtgaaatggattccattatcgctaacgggacttgggaggtgacagagcgaccctatgggtgtaaacctgtggggtgcaagtgggtgttcaagaagaagcttaggcctgacgcctcatatggtcttctcgttcatcaaatgtacgttaagacaacttttcttaatggagagctggatgaggagatctatatggatcaacctgatgggtttgtagttgaaggctttgcagtcaatgaggcaaataaatgtgtgtactatcgccatggtgggggtgagggagttattctgtacttggatgttgatgacatactgatatttgggacaaaccttgaggtgataaatgagtcccattatgtggagaagatcttgaatcgctttggctacattgataactactccatcccgctcgccggcgtgcaccggcgatcgggagagcaggtctccggaacctctgccttcgacgtcctgcaccgggagaaggcggcaataagggtcactctgtggctgacagctatgaaatgcttctgggtgagtactggcaaacctgaaggagttcttactgctgaacagcagaagcaattcgaggaagccactactctctttgtgggatgcattcttagcgttcttggcgatcgtctggtcgaggtgtatatgcatatgaccgacgctaaggagttgtgggatgcactgaatactaaattcggtactactgatgctagtaatgatttgtatatcatggagcagtttcatgactacaagatggctgacaaccgttctgtagtcgaacaggctcatgagatacaaaccatggctaaggaactcgaactccttaagtgtgtcttacccgacaaatttgtggctgggtgcattattgcaaaactacctccatcttggagaagttttggtactgcactcaaacacaagagacaggaatactccgttgaggggttgattgcgtctcttgatgttgaggagaaagctcgggaaaaagatgccgcgtctaagggcgatggtgggcagtccagtgccaatgttgtgcacaaggcccagaacaagagcaaggggaaatacaaagctcagcagaccaccaacttcaagaagcagaagaagaacaacaacaatcctaatcaggatgagaggacttgctttgtgtgtggccaagttggtcatctggctaggaagtgtccacagcgcaaggggatgaaggcacctgcagggcagacttctaagtctgctaatgtgaccattggcaacactggagatggaagcgggtatggtaatttacctactgtcgcacggggttccaccgtcctaatggggaatgggtcacatgcttctgttcatggtgttggcacggtagatctgaagtttacttcggaaaagatcgtgcagctgaagaacatgcagcatgtcccttctatcgacaggaatcttgttagtggctcccgtctgactagagacggatttaagttggtttttgagtctaataaagtagtcgtgtctaaacatggatattttattggtaaaggttatgagtgcggaggcctgttccgcttttccctttctgatttctgcaataagtctgtgaaccatatttgtggcagtgtggatgatgaggctaatgtttggcattcacaagttgaaaatcaacttgacagaaagataaaaaggcttaggtctgatcgtggtggagagtttttctcgaacgagtttgacttattctgtgaggaacatggcatcatacatgagaggacgcctccctattctcccaagtctaatgggattgctgaaaggaagaaccgcacactgactgacttggtgaatgccatgttggacaccgcgggactgcctaaggcatgtgaagctcctcgaaggagtaagagacaaaggacggctaagtcttttggtgatgatttcactgtgtacctcgtggatgacactcctaagtcaatttcagaagcatatgcatctcctgatgcagactactggaaggaggctgtccgtagtgaaatggattccattatcgctaacgggacttgggaggtgacagagcgaccctatgggtgtaaacctgtggggtgcaagtgggtgttcaagaagaagcttaggcctgacgcctcacatggtcttctcgttcatcaaatggacgttaagacagcttttcttaatggagagctggatgaggagatctatatgtatcaacctgatgggtttgtagttgaaggctttgcagtcaatgaggcagataaatgtgtgtactatcgccatggtgggggtgagggagttattttgtgcttgtatgttgacgacatactgatatttgggacaaaccttgaggtgataaatgagtcccattatgtggagaagatcttgaatcgttttggctacattgataataagccttctccaacaccttatgatcctagcttgttgcttcgcaagaacaagagaattgctaggaatcaactggaatactcccaaatcattggcttgttgatgtacctggctagtgcaactaggcctgatatctcctttgctgtgagcaagttaagccgatttacctctaatccgggagatgatcattggcgtgcgcttgagcgagtaatgcgctatctgaaaggtactgtggaattggggcttcactatactgggtatcctgcggtactggagggttatagtgattctaactggatctctgatgtggatgagatcaaagccactagtggatatgttttcacactgggtggtggtgctgtttcatggagctcccagcgacgacagcgcttggtcctggcgagccgtcgccatcgcgcctgtacctgcttcctgccgctccggctcccggcgccgacacgttcctcccgcctcgccgccatcaacaagccgacgccgacgccggccttcccgcgcctccccgccgtcatggcaccggtcctcgagcgccctcatggcgtcgccgtcctcaccgcgttcctcccgcctcgccgccaccgccaagccgacgtcggatttgtacttgggaggagctcgccggcctccccgcgcctctgccatgcttccccactgcggcggcggcggccgccaccgccgccgctgtcgcggcgccgcccccctcctctcccgtctcgcgtcggctaccttgcagataagcggatctaccatgggggctatagggtctcgagcctccacttccggtattcccctcctactagttcttcttggatttgccaggcggtgacgtggtcgccccgtcgctggatggcggagcaaactatgaacaaagcacttttaggcggcgactcgttgaggacagcctcgcggatgagcaagggcaggatggacaacggcggcgacgacagcgcgtcaaccggcaaactctctcctcgccgcctccatccccacctccctcccgttgccgcggtctctgtcttccgctcctccctcgccctggatgggagtttcgtcgaagcggcgccctcttcctccacctcgccaccaccgttcccctccagctcccccttcgctctgcccctatggtcctgccaccgacgcccctccccgctcgcgtgtgccgacctcgtcgaccggggtgacttcaacagggcacaccacgtcgcggcgtgccgtgctcgccgccgccgacccttggggagaggatacaaggaaggccatagcggcgacgaaggcatgacgaagacaaaagaggccatggcggcgcccgaccgcgattctgacatgtgcgacacatgcgggtcccacgccgagtcagctgttacgtcggacaataccggggtcaaaaccaccgaatggcctaaagtgaacggcgctgcagcggcggcgcacttcgctagagggcggagcgaagaggcacacggacgggcattcggcgagtgggcataccgctgcagggttcaggagctcaaggctcctcttggatcgttggtggtggctttgaaatcgagcaacgagagcacgtccgtgctgttcccagcgatcgtcgtgcaacgaatgcttccagttccatag

SEQ ID NO: 23322 - DNA, 7920 bp, Oryza sativa
  Clone ID: TF_OsC1713_5306
atgtctggagttgccgccgccgctgctggaggagatggcggaggtggtgcgccgccgacaggagccggagctggtgcgccaggaggtgccgtgaacgacaacaacaacggaggcaattctgcctcaccatccagcggagagccattctcggggacattttcggtagttggctttgctgctgcactgaaaccacatgcttttgatggttcaaactataagagatggaaagcacgtgcactattgtggttgacagcgatgcagtgcttctatgtttcacggggcaaacgaagtgaaccacctctttctcctgaggaagaggctaagttcgaggcttcggattgcctgttccgtggagcattgatcagtgtactcgctgacaacatagtggacgtgtacatgcacatgccttctgggaaggacatgtgggatgcacttgaggccaagttcggagtttctgacgccggcagtgagttgtatgtcatggagcagttctatgactataaaatggtcgatgaccgttctgtagtagaacaagctcatgagattcagatgctggctaaggaacttgagaacaacaactgtgaattgccggacaagtttgtggcgggtggcattattgccaaactaccaccttcttggtcggactttgccacttctctaaagcacaagagacaagagttcagtgtttctgatctcattggctctttgggtgttgaggagaaggcgagggcaaaagacgtccggggcaaaaaggttgagggaggttctagtgccaatatggtacagaagaagaaccctcatgcatcccacaacaacaagaaagtcaagcttgatgtcaaacccaaggctgcaaccaattttaagaagaaaggcaagggaaaggcaaagggagactgctttgtgtgtggcaagtctgagcattgggccaaggactgtccagagcgcaaagacaggaagtctgccaacatggtcattagcgagggcggaggaacatcggggtatggtaaaatattacctacagttctctctgtttttcattcacctgattggtgggtggacactggtgctaatattcatgtcgggagaggttcctccttgttgatgggaaatgggtcgcttgcggctgttcatggtgttggtacggtcgatctgaagtttacttcgggaaagaccgtgcagctgaagaacgtgcagcatgtcccttcaataaagaagaatctagttagcggctctctattgtgtagagaaggttttagacttgtgtttgagtccaataaatgtgtcgtatctaaatatgggacttttgttggaaaaggttatgacagcggaggcttgttccgcttttctttgaatgacatgtgtaataatcataatgctgtgaaccatattagcgagaatgatgagtctaatgtgtggcattcacgactctgtcatatgaatttcggttgtatgacgcgcttagctaacatgagtttaattccaaaattcactttggtcaaaggttccaagtgccatacttgcgttcaatcgaaacaacctcgcaagcctcacaaggcatctgaggcgaggaatttggcacctctagaacttgttcattccgatttgtgcgaaatgaacggcgtgttgactaaagggggaaagaaatatttcatgacactgatagatgattgcactagattttgctatgtgtatctattgaaaacaaaggatgaggcattgcattactttaaaatctataaagctgaggtagaaaaccaacttgaaaggaaaatcaaacggttgaggtctgatagaggtggggagtatttttccaatgagtttgcatccttttgcaaagagtttggaattattcatgagaggacgcctccctattcaccccaatcaaatggggtggccgaaagaaagaaccgtactctaactgagatggtgaatgccatgttagacactgcggggctttccaaggaatggtggggtgaggcagttttgactgcgtgtcatgtcctgaataaaattccaatgaagtataaggaagtaacaccattcgaggaatgggaaaggaagaaattaaatctctcatacctacgaacatggggctgtttggccaaggtaaatatacctatagccaaaaagcggaaacttggaccaaatactgttgattgtgtgtcccttggttatgctatccacagtgtgggttatagattcttaatagtaaactctggagtacccgacatgcatgttggtacaattcttgagtccagagatgctacattctttgagaatgaatttcctatgaaacatacacctagcacttctagtaaagaaactgtcatgccccatgagcactttgcaccgatagaacacaatgatcaaacgcctgaggaaaatcctgaggaggacaacattgtagatactcgcaagagtaagagacaaagggttgcaaaatcctttggagatgactacattgtatacctcgtggatgacactccaagaaccatagaagaggcatattcatctcctgacgctgactactggaaggaagcagtacgcagtgaaatggactcgattatgtctaatggtacttgggaagtcgttgagcgtccatatgggtgcaagcccgtaggatgcaaatgggttttcaagaaaaagcttaggcctgatggtacaatcgaaaagtacaaggcaaggcttgtggccaagggttatacccaaaaggaaggcgaggacttcttcgacacatactcaccaattgctcgcttgaccacgattcgagtactacttgctctggcagcctctcatggtcttctcgtccatcagatggacgttaagacagctttcttaaacggagagctggaggaggagatctatatggatcaaccagacgggtatgtactagaatgtcaggagggaatggtgtgtaaactgttgaaatccttgtatggcctcaagcaagcacctaagcaatggcatgagaagtttgacaccacgcttacatctgcaggctttgttgtgaacgaagctgacaaatgtgtatactatcgctatggtgggggagaaggggtgatcttgtgcttatatgtcgatgacatattgatctttgggaccagccttaatgtgattgaggaggtcaaagactatctgtccaagagttttgaaatgaaggatttgggagaggctgatgttattcttaacatcaaactacaaagaggagatgagggtgggattacacttgtgcaatcccactatgtggacaaggttttgagtcgctttggatatagtgactgcaagccagctcctactccttatgatcccagcgtgctattaaggaaaacccgaagaatagcaagggatcaactgagatactctcaaatcattggttcattgatgtacttggctagcacaacgaggcctgacatctcatttgttgtaagcaagctgagccggtttgtctcaaatctgggagatgatcattggcaggctctagaaagagtaatgcgctatctaaagggcactatgagctatggaattcattataccgggtatccaaaagtactagaagggtatagtgactcaaactggatatctgatgctgatgagataaaagccacaagtggatatgtgttcacacttggaggtggcgctgtttcagcactagatactgcgacagttgaggccgagtggcttcgtgaactcctgatggatttgccggtggttgaaaaaccagtgccagctatcctaatgaaggcagtccagtaccagtcaaggttctgagtgaaacctaaatagggagttattggaggctccctgttgactggttgaggtgggggtcggaatgctacacgcgcgcgcgtgcgcgccgggctgaggccgagggcgtgggcgtgggcgaaggcgaggcgaggcgtggctggctggcggcggcgtgcgtgcgtcacgtcggttcccacgactgcctctctctcctgatagataaggaggccgcgagtccgatctattctgatcgcttgcttctttcccggtgttagttcctcctcctccgcgcctgtactgttctcgcttcctcgcttctgatctcttgcacgcacgagagattggaagtagcagtgcctccgaaaccacaccttcgcctgagatctacaccgggtaagcgggtgatcaggtttttggggagtacctcccgcacgactgctcgccatgtctggagttgccgccaccgctgctggaggagatggcggaggtggtgcgccgccgccgggagctggagccggaggtggtgcgccaggaggtgccgcgaacgacaacatcaacggaggcaattctgcctcacaatccagcggagggccattctcgggtgtactcgctgacaacatagtagacgtgtacatgcacatgccttctgggaaggacatgtgggatacacttgaggccaagttcggagtttctgacgccggcagtgagctgtatgtcatggagcagttctatgactacaagatggtcgatgaccgttctgtagtagaacaagctcatgagattcagatgctggctaaggaacttgagaacaacaactgtgcgttgccggacaagtttgtggcgggtggcattattgccaaactaccaccttcttggtcgaactttgccacttctctaaagcacaagagacaagagttcagtgtttctgatctcattggctctttgggtgttgaggagaaggcgagggcaaaggacgtccggggcaaaaaggttgagggaggttctagtgccaatatggtacagaataagaaccctcatgcatcccacaacaacaagaaagtcaagcctgatgtcaaacccaaggctgcaaccaactttaagaagaaaggcaagggaaaggcaaagggagactgctttgtgtgtggcaagtctgggcattgggccaaggactgtcctgagcgcaaagacaggaagtctgccaacatagtcattagcgagggcggaggaacatcggggtacggtaaaatattacctacagttctctctgtttttcactcacctgattggtcgcttgcgtcttttcatggtgttggtacggtcgatctgaagtttacttcgggaaagaccgtgcagctgaagaacgtgcagcatgtcccttcaataaagaagaatctagttagcggctctctattgtatagagaaggttttagacttgtgtttgagtccaataaatgtgtcgtatctaaatatgggacttttgttggaaaaggttatgacagcggaggcttgttccgcttttctttgaatgacatgtgtaataatcataatgctgtgaaccatattagcgagaatgatgagtctaatgtgtggcattcgcgactctgtcatgtgaatttcggttgtatgacgcgcttagctaacatgagtttaattccaaaattcactttggtcaaaggttccaagtgctatacttgcgttcaatcgaaacaacctcgcaagcctcacaaggcatctgaggcgaggaatttggcacctctagaacttgttcattccgatttgtgcgaaatgaacggcgtgttgactaaagggggaaagaaatatttcatgacactgatagatgattgcactagattttgctatgtgtatctattgaaaacaaaggatgaggcattgcattactttaaaatctataaagctgaggtagaaaaccaacttgaaaggaaaatcaaacggttgaggtctgatagaggtgggcagtatttttccaatgagtttgcatccttttgcgaagagtttggaattattcatgagaggacgcctccctattcaccccaatcaaatggggtggccgaaagaaagaaccgtactctaactgagatgatgaatgccatgttagacactgcggggctttccaaggaatggtggggtgaggcagttttgactgcgtgtcatgtcctgaataaaattccaatgaagcataaggaagtagcaccattcgaggaatgggaaaggaagaaattaaatctctcatacctacgaacatggggctgtttggccaaggtaaatgtacctataaccaaaaagcggaaacttggaccaaatactgttgattgtgtgttccttggttatgctattcacagtgtgggttatagattcttaatagtaaactctggagtacccgacatgcatgttggtacaattcttgagtccagagatgctacattctttgagaatgaatttcccatgaaacatacacctagcacttctagtaaagaaactgtcatgccccatgagcactttgcaccgacagaacacaatgatcaaacgcctgaggaaaatcctgaggaggacaacattatagatactcgcaagagtaagagacaaagggttgcaaaatcctttggagatgactacattgtatacctcgtggatgacaccccaagaaccatagaagaagcatattcatctcctgacgctgactactggaaggaagcagtatgcagtgaaatggactcgattatgtctaatggtacttgggaagtcgttgagcgtccatatgggtgcaagcccgtaggatgcaaatgggttttcaagaaaaagcttaggcctgatggtacaatcgaaaagtacaaggcaaggcttgtggccaagggttatacccaaaaggaaggcgaggacttcttcgacacatactcaccagttgctcgcttgaccacgattcgagtactacttgctctggcagcctctcatggtcttctcatccatcagatggacgttaagacagctttcctaaacggagagctggaggaggagatctatatggatcaaccagacgggtatgtactagaaggtcaggagggaatggcgtgtaaactgttgaaatccttgtatggcctcaagcaagcacctaagcaatggcatgagaagtttgacaccatgcttacatttgcaggctttgttgtgaacgaagctgacaaatgtgtatactatcgctatggtgggggagaaggggtgatcttgtgcttatatgtcgatgacatattgatctttgggaccagccttaatgtgattgaggaggtcaaggactatctgtccaagagttttgaaatgaaggatttgggagaggctgatgttatttttaacatcaaactacaaagaggagatgagggtgggattacacttgtgcaatcccactatgtggacaaggttttgagtcgctttggatatagtgactgcaagccagctcctactccttatgatcctagcgtgctattaaggaaaaaccgaagaatagcaagggatcaactgagatactctcaaatcattggttcattgatgtacttggctagcgcaacgaggcttgacatctcatttgctgcaagcaagctgagccggtttgtctcaaatccgggagatgatcattggcaggctctggaaagagtaatgcgctatctaaagggcactatgagctatggaattcactataccgggtatccaaaagtactagaagggtatagtgactcaaactggatatctaatgctgatgagataaaagccacaagtggatatgtgttcacacttggaggtggcgctgtttcctggaattcttgcaagcagaccatcttaacgaggtcaacaatggaagcagaacttacagcactagatactgcgacagttgaggccgagtggcttcgtgaactcctgatggatttgccagtggttgaaaaaccagtgccagctatcctaatgaactgtaataatcaaacagtgattattaaaatgaacagttcaaaggacaacatgaagtcatctaggcacatcaagagaagactgaaatccgtcagaaagcagaaaaactccggagtgatagcattggactatgtccaaactgctagaaatctggcagatcagtttaccaaggggctaccacgtaatgtgatagaaagtgcatag

SEQ ID NO: 23323 - DNA, 1218 bp, Oryza sativa
  Clone ID: TF_OsC10527_1
tcacaggtaccggctatcagtatctgtggctgttccatgagcccaaagtagaagaggacttgacatggctggagacggtactagaaccacaatttgcggtggggcaatcacgggaccagtgcccgctcttaccacacttgaaacacgcatcgggagagcttgcagaagtaaatgttctcccacctttgtcaggataaggatctgaagattgatttgggcagtcctttgcccaatggttctcttgcccgcatttgaagcaggcggaggagctcctcttgctgggaatttggccacttgaagcaacatcagtatgatattgtgttgaagcttgcagtggagcagctgtcctaagctgttgttcatcacaccacttgaaatagccacaagagctacctccctggagatatgtcccgatcgtacattaagaaagagatatgaaatgccctgattagctgggcaacgataaaactgccttccaacattctttcctgtctttgtggtgagaattaagcaagctccagcaccacaggggcaaagcatatgcgcaactgatgtatctgactgaaaaacagtattgccactgacatttgcaggacctggagatgggttatcacaccactcaaagtagttgcaacctccattgtcccgcatggggcacctgtagaacttgcggcccggattcctgggcgtgttggatgtgagcactaggcaactcccggcgccgcaggggcaagccttctcctccaccgccccacccgcgtccccatacccaccaccccctcctccgcttccaccaaaggccccgcctcctcctccgccgccagtagctggcacggattgcgggcattctcttgcccagtggcaagagtccccgcacttgaagcacgcgccgcccctcgcgacctgcgcgccgccgctgccgctgccgctacctggggtggctagggtttgggacccaccgggacgcttgcgcgcctggctcagcgtctcctgctgctgcttccaggcggagctgtggcttcccttgagcgcggccaggtagggcccctcggggacggcggcggggggaggagtggccgaagtcggtgacgaggaggtcgacgaggtcatggagaggcggcggcgcttggaggagtcggaggaggccagcgccgcttcctccgtggccgctacggcgaggaggaaggcctcgtcctcctcctcgtcggggaaggacat

SEQ ID NO: 23324 - DNA, 1185 bp, Oryza sativa
  Clone ID: TF_OsC1713_3594
ctactgctgctttgaaactggtggctgagctgtatcccttgagaacgcaactcttgaagacgcaactggcactgcattggctcctgtgacgacaatgttgttgacctgaccttgcggctgctgatgctttgacttcggacactctcttgcaaagtgacctggcttgtaacagttgaaacatacctgctgctcccttccactactgttattctcttgagactgatcctgctgaactggcaccggttgattagcttgctcgatgtttacttcattgctttcattagtctctgattcgatctcaccaccgatgttcaactgttgcgactgtccttgaccagcggaaaaagattcaccaatttggagtggctcgatacgctgtctctggcgactaccttgtgcctcctggaaaacagtcattttccttttacggttatccatcctgttcttcttgtcttccagtcgaattgctttgtcaaccaactcctgaaaatcctcatagtcatgagagatcaacataactgacagctcatcctttaagccttccaagaacttctcctgcctttcctcgtcagtacgcacatcttctggagcatagcgagctagacgattgaactcatgaagatattccgtcacggtacgatccttttgcttaagtgcccggaactcacgcttcttcaaagcaacaacacctgcaggtatatgtgtcttcttgaatgcttcagtgaactccgcccaagtgattggttgtccttctgctctgttcatccggaaatgatcccaccattccgaagcagatccttgcaactgatgtgaagcgaaaacaactttctcctgatccgtgcactggagcaattccaacttcttctcaacagcgtgcaaccaatcacctgcttccactgggttggtagtgctagagaaggtaggtggcttcacacgaagaaaatcaactaacttgttctggggcggcggaggattgacattgttgttcccttgctggttctgcatttgttgcactaacaggttgatcaattgggtctgttgagccagcacttgagcaaaggttgggttctcttcattgttattgtttccacttccactggcgcgagtgttcaccatcttaaccaggttaccactgatctggtgtgtgtagttcattatattgttcaagttgattaagcaagcaac

SEQ ID NO: 23325 - DNA, 1116 bp, Oryza sativa
  Clone ID: TF_OsC1713_4029
ctactgccgctttgaaactggtggctgagttgtaacacttgaagacacaactcttgaagacgcaactggcactgcattggctcctgtgacaacaatgttgttaacctgaccttgcggctgctgatgcttcggcttcggacactctcttgcaaagtggcctggcttgtaacagttgaaacatacctgctgctcccttccactactgttattctcttgagactgaccttgctgaactagcaccggctgattagcttgctcgatgttaacttctttgctttcattagtctctaatttgatctcaccaccgatgttcaactgttgcgactgtcctggaccagcgggaaaagattcaccaatttggagtggcttgatacgctgcctctggctactaccttgtgcctcctggaatacagtcattttccttttacggttatccatcctattcttcttgtcttcaagtcgaattgctttgtcaaccaactgctgaaaatccacatagtcatgggagattaacgtaactgacagttcatccttcaaaccttccaaaaacttctcctgcctttcctcgtcagtgcgcacatcttctggagcataacgtgccagacgattgaactcatgaagatactctgccacggtatgatccttttgcttcaaagccctaaactcacgcttcttcaaagcaacaactcctacaggtatgtgtgttttcttgaatccttcagtaaactcttcccaagtgattggttgtccttctgctctgttcatccggaaatgatcccaccattctgatgcaggtccttgcaactgatgtgaagcgaacacgactttctcctgatctgtgcactggagcagttccaacttcttctcaatagtgtgcaaccaatcacctgcttccactgggttggtagtgctagaaaaggtaggtggcctcacaagaagaaaatcagctaacttgttctgcggcagtggagcattgttgttcccttggttaagctggttctgcatctgctgtatcatcatattcattaactgagtctgttgagccagaacttgagcaagagttgggttcccttcattgttattgttttcacttccactggcgcgagtgttcaccat

SEQ ID NO: 23326 - DNA, 1536 bp, Oryza sativa
  Clone ID: TF_OsC1713_4126
ctactgctgccttgaaactggtggctgagttgtaacacttgaagacacaactcttgaagacgcaactggcactgcattggctcctgtgacaacaatgttgttgacctgaccttgcggctgctgatgctttggcttcggacactctctagcaaagtggcctggcttgtaacagttgaaacatacctgctgcttccttccactactgttattctcctgagactgatcctgctgaactggcaccggctgattagcttgctcgatgttaacttcattgctttcattagtctctgatttgatctcaccaccgatgttcaactgttgcgactgtccttgaccagcggaagaagattcaccaatttggagtggcttgatacactgcctctggctactaccttgtgcctcctggaatacagtcattctccttttacggttatccatcctgttcttcttgtcttcaagtcgaattgctttgtcaaccaactcctgaaaatcctcatagtcatgagagatcaacataactgatagctcatcctttaagccttccaaaaacttctcctgcctttcctcgtcagtacgcacatcttctggagcatagcgagctagacgattgaactcatgaagatattccgtcacggtacgatccttttgcttaagtgcccggaactcacgcttcttcaaagcaacaacacctgcaggtatgtgtgtcttcttgaatgcttccgtgaactccgcccaagtgattggttgtccttctgctttgttcatccggaaatgatcccaccattctgatgcaggtccttgcaactgatgtgaagcgaaaacaactttctcctgatccgtgcactggagcagttccaacttcttctcaatagtgtgcaaccaatcacctgcttccactgggttggtagtgctagaaaaggtaggtggcctcacacgaagaaaatcagttaacttgttctgcggcggtggagcattgttgttcccttggttgagctggttctgcatctgctgtatcatcatgttcattaactgagtctgttgagccagaacttgagcaagagttgggttcccttcattgttattgtttccacttccattagcacgagtgttcaccatcggtgaccaaagaagcggcggagaagcaacggacggcgacggcgacgaggaggaagcggcggaaaccttcgggttgacgacggcgatgaagctccggcggtctccggcgacggcgaaggggcggacgaggacggcgacgaccttgcgaacccgacggcggtcttcccgagcgacggcgacggctgaaacgacggcggcgcacggctggagcggcggcggcgacggcgaagctagggcacacggcgctagagctcttccgacgacgagaggcgaaggcgagggtggcgacgggtagaggagagctcgggggtccttaaataggtgcaaggaggcggcggcgaaggcccacggcggcggagacggcgaaggaaagctcggcttggagagaggaaaaccgatccgattcgaactcgaatccat

SEQ ID NO: 23327 - DNA, 1032 bp, Oryza sativa
  Clone ID: TF_OsC1713_4695
ctactgccgctttgaaactagtggctgagctgtaacacttgaagatgcaactcttgaagacacaactggtactgcattggctcctgtgacgacaatgttgttgacctgaccttgcggctgctgatgcttcggcttcggacactctcttgcaaagtggcctggcttgtaacagttgaaacatacctgctgctcccttctactactgttattctcccgagactgatcctgctgaactggcatcggctgatttatttgctcgatgttaacttcattgctttcattagtctctgatttgatctcaccagcgatattcaactgttgcgactgtccttgaccagcggaagaagattcaccaatttggagtggcttgatacgctgcctctggctactaccttgtgcctcctggaatacaatcattttccttttacggttatccatcctgttcttcttgtcttcaagtcgaattgctttgtcaaccagctgctgaaaatcaacatagtcatgggagattaacgtaactgacagttcatcctttaagccttccaagaacttctcctgcctttcctcgtcagtacgcacatcttgcttcttcaaagcaacaactcctacaggtatgtgtgtcttcttgaatccttcagtaaactcttcccaagtgattggttgtccttctgctctgttcatccggaaatgatcccaccattctgatgcaggtccttgcaactgatgtgaagcgaaaacaactttctcctgatccgtacactggagcagttccaacttcttctcaacagcgtgtagccaatcacctgcttctactgggttggtagtgctagaaaaggtaggtggccttacacgaagaaaatcagttaacttgttctgcggcggtggagcattgttgttcccttggttgagctggttctgcatctgctgtatcatcatgttcattaactgagtctgttgagccaggacttgagcaagagttgggttcccttcattgttattgtttccacttccactggcgcgagtgttcaccat

SEQ ID NO: 23328 - DNA, 1116 bp, Oryza sativa
  Clone ID: TF_OsC1713_4813
ctactgctgctttgaaactagtggctgagctgtaacacttgaagacgcaactcttgaagacgcaactggcactgcattggctcctgtgacgacaatgttgttgacctgaccttgcggctgctgacgcttcggcttcggacactctcttgcaaagtggcctggcttgtaacagttgaaacatacctgctgctcccttccactagtgttattctcctgagactggtcctgctgaactggcaccggctgattagcttgctcgatgttaacatcattgctttcattagtctctgatttgatctcaccagcgatgttcaattgttgcgactgtccttgaccagcggaagaagattcaccaatttggagtggcctgatatgctgcctctggctactaccttgtgcctcctggaatacagtcattctccgtttacggttatccatcctgttcttcttgtcttcaagtcgaattgctttgtcaaccagctgctgaaaatcaacatagtcatgggagatcaatgtaactgacagttcatccttcaggccttccaggaacttctcctgcctttcttcgtcagtacgcacatcttctggagcataacgtgccagacgattgaactcatgaagatactctgccacggtatgatccttttgcttcaatgtcctgaactcacgcttcttcaaagaaacaactcctacaggtatgtgtgtcttcttgaatgcttccgtgaactccacccaagtgattggttgtccttctgctctgttcatccgaaaatgatcccaccattctgatgcaggtccttgcaactgatgtgaagcgaaaacaactttctcctgatccgtgcactggagcagttccaacttcttctcaatagtgtgcaaccaatcacctgcttccactgggttagtagtgctagaaaaggtaggtggcctcacacgaagaaaatcagctaacttgttctgcggcggtggagcattgttgttcccttggttgagctggttctgcatctgctgtatcatcatgttcattaactgagtctgttgagccagaacttgagcaagaattgggttcccttcattgttattgtttccacttccactggcgcgagtgttcaccat

SEQ ID NO: 23329 - DNA, 1702 bp, Oryza sativa
  Clone ID: TF_OsC1713_5276
ctaatcacgaaaaacattgctcaacccgcccataaccgcgggcacggctattcgaatagttttactctggccagaggtgtaccacattcctggatcataatcacccccctcaaaaaccagaggcatggactccccagcgactcccgtgggcttatctccgccacttctcagtctggtgctcggctcacgggagagggcgacgatgacgtcggcgatgacgtcaccaccggcggcggcggctcggcggctcggacggcgcacgctcgctggcgaacggcggcgcggtgaccaaaggagcggcggaggagcaacggacggcgacggcgacgaggttgaaacggcggcggagatcgggtcgacggcggcgatggtgctccggcgatcttcggcgatggcgaagcggcggacgaggacggcgacgacttggcgatcccgacggtggccttcccgagcgacaacgacgaccggaacggcggcggcgcacggctggagcgacggcggcgacggcggcgcgaagctgaccttgcggctgctgacgcttcggcttcggacactctcttgcaaagtggcctggcttgtaacagttgaaacatacctgctgctcccttccactactgttattctcttgagactgatcctgctgaactggcaccggctgattagcttgctcgatgttaacttcattgctttcattagtctctgatttgatctcaccaccgatgttcaactgttgcgactgtccttgaccagtagaaaaagattcaccaatttggagtggcttgatacgctgcctctggctactatcctgtgcctcctggaaaacaatccttcctctcttacgattgtccatcctgttcttcttgtcttccagtcgaattgctttgtcaaccaactcctgaaaatcctcatagtcatgagagatcaacataactgacagctcatcctttaagccttccaagaacttctcctgcctttcctcgtcagtacgcacatcttctggagcatagcgagctagacgattgaactcatgaagatactctgccacggtatgatccttttgcttcaaagccctaaactcacgtttcttcaaagcaacaacacctgcaggtatgtgtgtcttcttgaatgcctcagtgaactccgcccaagtgattggttgtccttctgctctgttcatccggatgtgatcccaccattctgaagcagatccttgcaactgatgtgaagcgaaaacaactttcttctgatccgtgcactggagcaattccaacttcttctcaacagcgtgcaaccaatcacctgcttccactgggttggtagtgctagagaaggtaggcggcctcacacgaagaaaatcagctaacttgttctgcggcggcggaggattgacattgttgttcccttgctggttctgcatttgttgcactaacatgttgatcaattgggtctgttgagccagcacttgagcaagggttgggttctcttcattgttattgtttccacttccactggcgcgagtgttcaccatctctcgccggccaaccccaaccgccattgccgcccacgtcgccgcaaaatccggcgccctcccgcacccgagctcgcatccaacgacgtgggcacgatcccctccacgtcctccaccattttccccgctcgtcccacaaaaaccggcgccgaccgagccaccaccaccccccat

SEQ ID NO: 23330 - DNA, 4571 bp, Oryza sativa
  Clone ID: TF_OsC1713_5360
ccccttttattattgccgaattcatgtttcgacagttggcgcgccaggtaggggttgcgtcgagtttcctatcaacgagcgcgatggaatcaatttcatgagtcgccgacttcgctttcgctttgggagttttcacttcaatgttgttgacctgaccttgcagctgctgatgcttcggcttcggacactctcttgcaaagtggcctggcttgtaacagttgaaacatacctgctgctcccttccactactgttattcacttgagactgatcctgctgaactggcaccagctgattagcctgctcgatgttaagttcatcattagactgcctctggctactaccttgtgcctcctggaatacagtcattctccttttacggttatccatcctgttcttcttgtcttcaagtcgaattgctttgtcaaccaactcctgaaaatcctcatagtcatgagagatcaacataactgatagctcatcctttaagccttccaaaaacttctcctgcctttcctcgtcagtacgcacatcttctggagcatagcgagctagacgattgaactcatgaagatattccatcacggtacgatccttttgcttaagtgcccggaactcacgcttcttcaaagcaacaacacctgcaggtatgtgtgtcttcttgaatgcttccgtgaactccgcccaagtgattggttgtccttctgctttcttctcaatagcgtgcagccaatcgcctgcttccactgggttggtagtgctagaaaaggtaggtggcctcacacgaagaaaatcagttaacttgttctgcggcggtggagcattgtagttcccttggttgagctggttctgcatctgctgtatcatcatgttcattaactgagtctgttgagccagaacttgagcaagagttgggttcccttcattattattgtttccacttccattagcacgagtgttcaccatctattgcagataggaggagataggaggagaggggttacctagtatagttacacactcatcaatgaactactccaatgatgggaatgcaaccatacctacacacaagcaagcaacaagcgttctaccctactaactattcttcaaagacactttggcggcataggttctaaggtaggatccaaacttcattccatcttgaccacttggcacttcggttcttcctcgatccacttgactgacctccataagtagacctcattaacatcttctagtttcaacaactagttttagaactactcaagttgaaagcaggaggggagaggatgataaaatgatttatagagaattctagagaaggaagaaaggaaaattttcacacatcatgttttcggaaaattagtccttaaggtttgaccatttggcttatcctacagtcgagatggctctgataccaacttgtcacgcccggaaattcactagtaatttccgaacttatttgtgcataaaatcctcgtccaggaatcagccgaggtacacaaattgacaatttaatatacagattcatcaaattaactaaaacgataaatacttacttatgaggcacttagtcctcaccaagaagaaaattgcagcggaaaaataaaatctagcgaagctccggctccactcccacaggcagctcaactggggtataagccaaacgtcttctccttcgcaacttgtcttcaactgaggttgattgattattgcaaggtgagcatatgacatactcagcaagccacacagcaaatatgcaacactgtacccacaagacacagccccacatcatgtcaccatgtgcctcagtaccaccacggtacctcggaaaggggctgtgacagtaccccttgcataacacaatccaccgcagcgcaccattcctggatcataatcacccccttataaaacaaggcatggactccccagcgacccccgtgggcttatgtagaggacgacgcggcgaactcaccggtgaccaaaacggcggcggaagaccaacggacggcggcggcgacgaggaggaagcggcgaagctcttcgggtcgacgacggcgacggcgctccgacggtcttcggcggcggcgaagcggtggacggggacggcgacgacttggcgaacccgatggtggcgacagcgaccgacgacggcggctgcaacggcggcgcggcgcggctgaaccgacggcaacgacggcggcgactagggctacgcggaggcggcgctagacgcgacggcaggctaaggcaaaggaggcgacggattaattatcttgatttcaaagattttggatttagaaatattccaattggtccaccaccaagaatctctgtttggaaaggcggaatgataaaagagtattcaaaaatggatgaatgcaaaacaggagattttggaaagcgaccactcattgatgacatttccacagtttgcaagtggttcacaagagaactttctgacacaacatacggaaaaaatgcacaactagctgccaaggttttggattgcgtctacatgtcaaaagcaagcctattcacacaaaaagatagcaccataacaagagaagagaagagtagagaagagaagatcaaggagggaagaaagcagggtggcagcaatgtagcacataatggtaatgccccacccctagaacaaaaccacccaaacaacactgatgtctgttcccaactaccaaagacaccacaaacaaaatcaactgtagagcatgaaacaaagtctaacatcaacaacaccagcactagcaaaggagcaccccctacagagaatgttatatgttcccaactacaaaccacaccaccatcaaaacaaactgaacaagaaaactcaaagtcaaacagcaacaaggacaacgcttgcaaagaaacgcagtatgcagataaaaaagcatccagtaaggactttgtttgtagtcagcaatcaaacaactctgtggcatccaggactagagctaagatattacattcagcatcccctttgtcggttgtatcaattagcccatcgaaaaaaaattcttctgaccaaaagattcgcaaagcagtaaggaaacagcccttaaaagcaacacaacctatcagtactcaaccagacaaggaagaatcaaacaaggatggtcttttcgtggaacctatctgtactataccagccaaaaaggaggagaagcagatagacattgttttagaaaacacctcaaattttagaaaacagatgaaactagagcatacaggcacaaacatcatggacattgaacatagcagcattcaggtgacgcagggggagaggtacatgaacacacccaaaacatgcataaacaataaagttggagttcaacatttatcagcaaacttcactgcaaacatggggaataggaggcttgagggacagcactgtgatgaaaacgagtaccaagatgacttcgcagaattcttatatgaagaggaaccatcagataacatcgatatggttgaacaacgtgcgcaaccacaaataaacaatgagcaaagtagccctcaaacaccactgcacataaacattacttctgcaaggacacctgctacaaaaaagagttcacaatcatcacctaatatagaagaaagacaatattcaatgacaagaatcatcgactcactaaatgcttctggcaactgttctggtaccagacacaatctttatcgccctaaaagaattgtacatccaagtaaatacaagagctcaccatatgacaactacacacggcaccaaaccatctcggcagctgaactcaatcactacaacaacatactcagcattggtgagacgcaacaatataaaaataaatttgcagttctaatggacaatgtaaaagtcacatggtcatcattgtctaaatatttatcaccaaggggagtggtggatacatatgtcctcaacgcgtatgccaagaagattgccaacgaccagaataacaaagaaaatgaatacatgaatttttacttcttccacagaagtagtgtttatttcttgaagaattgggaaggtgctggaaaagaggaagactatgaaaattgcgcaagacaagcgtttacacttgctaggaacaagaaacctctgcactactatgacttgcttattttcccatgcctgtatgacaatcattggtttgtgtttactgtggacatcaaggggcatcactttgtcttcctggactccatttatgatgaaaacagcaaatatcataagaaaattcaagggctactgataccaggattcattgcaatgtgggaagaattctcagatgtggagaaagactttagtaaatttgatatccaatacccacaaattactcgccaaaacaatgggcatgattgcggaatctacgctatgaagtgtatggaatggtggaacccaaggatgcacttgaaagatatgatcagaccagaatatatcccaaacatgaggaagcaaattgcaaatgacctattgttctcagaatacaattcacaagaagaagcaaaaatactagctagaagcttcaatccaacaaagcatggaaaatatgcaaggcaacagtga

SEQ ID NO: 23331 - DNA, 639 bp, Oryza sativa; identical to SEQ ID NO: 15271
  Clone ID: TF_OsC359_7027

SEQ ID NO: 23332 - DNA, 1255 bp, Oryza sativa
  Clone ID: TF_OsC8494_1
agactcggtcactgtggaacaatggcgtaaacaaccagtgctacaagcatgaagcatgtacatcagaatatcagattctttcagcaccaagcctcaagttcagcaaaacaccattgcacatgctattcaggcagtagcacaataacaacagagttgtgctgattactgtgccatgtaatacatccatcacaggggtcgacaggtgcaatgcaatgcaagggaataacaagcgaagatgcaggtaactgagttgagtatgtagctggttgcttgctagctatgccggctgcgaggcgcgagcacgcgccgctgctgccctctccaaggccctgagccggtttgcctccatgcgcgccctctgctcttcggtcagctgaatcttgcccggttggttctgcgcttctcgtggtggatcatcttgtggtttcgcttcctttggagccatggccggtgtggtttcctcggctgttcctccaacagctgggatttgtggctcatcagcttccttattgtagatttcattaaggagatcttcttgcatgggatccacatcgttgctttcgaccggtatgtctatatcttcttgcacctggtccacgccatggttttcggtcgccggaacttcagtcccaaaaattgggtcttcagctgtggctccatctggttcgccctctgggatgacttcgaccggcggttcatgcagtagggtaggatctccccctctggcaaccctgtccctcagttcagaaacgcatctcctaacacggttactagcccccactttctcgacttttcgcacaaactgatcaaaggagtaataaggaatcaagcgagagtgccagtctgtgtatagcttgatcagattaccaagatcctctacctcgtggccggggcgggcgcggggtttgaaggccttggggaagtagcggaggacgaagccaaggccgtcatcggagagcagcaagtccggagtgagcttgggccgcgtcgccctctccttcttcttcttcttaccctgcgcctggccgccactcccgtcctccccttctgccgccgccgccgccgcggcactcttcccgaacctcggcctcgggtaaggggcgaagcgggaggcgctgggtttggggttggggttagggttagggttgtcggtggatgcagcgccggcgccggcgggctcggaggggcagtcgcgggaccagtggcccggacggccgcacttgtagcagccggtgggcaccgccgccgccatcca

SEQ ID NO: 23333 - DNA, 1068 bp, Oryza sativa; identical to SEQ ID NO: 15273
  Clone ID: TF_OsC359_5800

SEQ ID NO: 23334 - DNA, 1014 bp, Oryza sativa
  Clone ID: TF_OsC338397_1
atggaccaatcgacatcgaaaaacaagaattcctccaatctacaagacccccaaaatatgggaataaaccagcccatgctactctttgaagatcctccccaagcttccaggaacaaaggacgagtccaagcctcactaaagcctgaagactacaccatcaatctgaatcacctaaagcaatattcttcgaatgaaaggtgccacctgactccagcaaaacgaaggataaatgtcacgtgttatagatgtggcgaggaaggacattgtgccttggattgccctaagaaaaagctaggaaatggacaagtaaggaatatacctcgacacccaaaaaggaaaatgagggcaggaataccaccaaaaccgatgccacattcactctatccaaaacctatgtatcagcaatttcgtagacaaggaactacaccacattggtggaagggaaaacggaaaagaaaagcgtcatcacgaataacatatgctgaacttgacctcagtaaaatgggaatagaaatcggtgatttgcctgaagatgttgaagagctacaactatggcaacgaaagagagatggctgttgtttttcttgtggacaatttggacattatgcgataggctgtactcaagacaccaatgaagaacaagaaacactgccctcacagatcggcccggaagagcatagagttccagacccatccaaagaagtttcgaagattaaggcatgtagtcgttgcggagagataggacactacggtagtaattgcattactcaatgcccctactgtgacgaagaccatccaaacggagaatgcccaacaacgaagatcacgtgcttcctctgcgaaaagacggatcatgtgccccaagattgtcaactaagtccgttgctgaccaagacggcggaagtacaaagagtgtcgcttcgcttcgcccatcgactcatgacatccagaagccacgaagacccgggatttcctacttttgatttgcatgtttgtttgtcgaacaatatttaa

SEQ ID NO: 23335 - DNA, 449 bp, Oryza sativa
  Clone ID: TF_LIB3432-017-P1-K1-C3
cggacgcgtggccgctcatcatcttttgggtctagggacagcagcaggagcttcagtggtgcttgcttcaactgtggcgaaagcgggcaccgagcatcagactgcccaaacaagtagatggtagaaacccagggcatttgcactggtcacactttaatggaccaaggattgaaaaagtggaattcagagaatccatggtctggctacaagccaatctcagttgcatggacagttgatgtgccaaatgttctcgcattcgtgaaggaactcctcatggctccatgagcgattttacgcctatttcttgtgcttttggatacacaagcaaatttgacaaatacagagttgtgattagatcctggaaaccggaagctttctattcccctatgaataagaagatattggtgttttgatttcttgagttcaagtctggtggctcaaaacaacct

SEQ ID NO: 23336 - DNA, 3590 bp, Oryza sativa
  Clone ID: TF_OsC11468_1
atggcttccctcctcacgctcccctccctctccctctccaaccctagcgcctccgccgccgccgcgggagccggagcggcgccgtctctgcgcctccgcgccgccttccgctgctgggcgctgcggcgcgcgggcggcggccggtgggcggccgcgggggccatcgcgtcgcccaactcggtgctcagcgagcacgcgttcaagcggctgcagctcagcgacgaggaggaggaggaggaggagggggcctacgggagtgacgaggagggggtcgaggcggtgggtggcggggagggggacgaggacgagctcgccattgccaggctcggcctgcccgagcagctcgtatccacgctcgagaagcgcgggattacccacctgttccccatccaggtttcggtattaggcggagacagcgagggaattggtgttagtgtaggatttgttggggggatgagttcgtggacagttagggctgtattgattccagctcttgacggccgtgacctgattgctagagcaaagacaggaaccgggaagacgctagccttcggcattcccatgatcaagcaattaatggaggaggatgatggacggagtgtgaggcgaggtcgtattcctcgtgttttggttctagcacctactagggagttagccaagcaagttgagaaggaaataaaagaatcagcacccaagctcagtacagtctgtgtttatggaggtgtctcatataatgtccagcagaacgcactctcccgtggtgttgatgttgttgtaggaacacctggtcgcattattgatttgataaatggcggaagtcttcagttgggagaagttaagtacttggtccttgatgaggctgaccaaatgcttgcagttgggtttgaggaggatgtggaaacgatattacaacagctaccagctgagaggcaaagcatgctcttctctgccaccatgcctggttgggtgaagaaattatctaggcgatacttgaacaatcctttgacaattgacttggtcggcgatcaagatgaaaaacttgctgaaggaatcaaactttatgctatcccgctcacatctacatcgaagcgcactgttcttagtgatctcattacggtgtatgcaaagggtgggaaaaccattgtgttcaccaagacgaaaagggatgcagacgaggtatcattagcactgacaaacagtattgcttcggaggcactgcatggtgatatttcacagcatcagcgtgagaggacactaaatggttttcgtcaagggaaatttactgttctcgtagcaaccgatgttgctgcccgtggtcttgatataccgaatgttgatttgattatccattatgaattgcccaatgatccagagacttttgttcatcgttctggacgcactggccgagctgggaaagcaggaactgcaatcttgatgttcacaaacagccagagaaggacagttagatcacttgagcgtgatgttggatgcagatttgacttcataagtcctccagcaattgaggatgtgctggagtcctctgctgaacatgtcatagctactttaagaggtgtgcacacggagtcgattcagtacttcattccagcagctgaaagactgcaagaagaattaggacctaatgctcttgcttctgcattggcacatctgagtggattttctcagccaccctcttcacgttctcttatcagtcatgagcagggatgggtgactttgcaactaactagagatccaggatatggaagggggttcttttctcctagatctgttactggctttctgtctgatgtttcttcagctggatatctgctgatgaagttggcaaaattttccttacagcagatgagaaggttctttcgatttacctgaggagcgtggttggcattaacataacaactcaagtctgttttacagttacgaaccttcttgcgtcaggaaactcaaaagggaagcatgcacagttcttatgtgacatgtgccagttctatagagactggcatgccgaatccgatggctttgatggaattttcctccatgatcctgtgagcttcactgccctagttcaccctgagtacttcacgttcaagaagggtgttgtgagagtagaaacccagggcatttgcactggtcacactttaatggaccaaggattgaaaaagtggaattcagagaatccatggtctggctacaagccaatctcagttgcatggacagttgatgtgccaaatgttctcgcattcgtgaaggaactcctcatggctccatgagcgattttacgcctatttcttgtgcttttggatacacaagcaaatttgacaaatacagagttgtgattagatcctggaaaccggaagctttctattcccctatgaataagaagatatggttgttttgatttcttgagttcaagtctggtggctcaaaacaacctggttccacctaagaacagaataaggactggtttgttctgggctagtaggcatcagacctgaggaccaaaacaatctgttatcttattatatgtaataggaggattagaagtttgcttcctagctacaagcaaaatatatgtagtaaattgaaattctgcatacgaaagacagcattattacaaactgtttcagacatttgtgccacagatatacatttcaaattcggaaacaaaataaaaaaaaaaaagctacctgcattacaggatgatggtcctgctactgatagttatggccgattctcaaactcggaccggggtttcaggaacagacggtccaggggtggtggctcaagaggcgggcggggtggttgggactctgatggtgaagacagatttcgccgtggtggcaggagcttcagatctgacaatgatagttggtcagatgatgactttggtggcgggagaagatcgaaccgttcgtcatcctttggtggccgcgggtcatcttacggcagtcgtagctcgtcatcctttggtggccgctcatcatcttttgggtctagggacagcagcaggagcttcagtggtgcttgcttcaactgtggcgaaagcgggcaccgagcatcagactgcccaaacaagtagatggtagaaacaacactcttccctgccgctcgggagttgctccttctgggcttgatcatttccaacaagcggctggactattcaacacatgccaaggaacaccaaagcccagtcccccttcatctgatccatacatgcccaacactattgcctgacgaagattttgcactggttagtacagctctgtgtcgtcattccgtcgtgaagattttggcacgctgaccaccaaaggagagccttctgttcatttatatgtaatacgggttttacagggacgttaaatttttgttaccacctgggagttctcaataggatgttaagattaaatgaaccgtgtgtacagctcgttcctacacgactggactggctgatgccatcagaaactgttcgcgccaattagaatcactgtccaatgtcaaacaactttacaaaaaaaaaaaaaaaaaagttggcaccggggccccaccaagaaacctgcagcccgggggatccacta

SEQ ID NO: 23337 - DNA, 3060 bp, Oryza sativa
  Clone ID: TF_OsC1713_4507
ccagagggggaacttcataaactcaacttctatcccatgatttcccgcaaaactcatggataagaatgaatgtgtagcaccagaatcgaaaagcactgttgcaggaactaagttaacaagaaacgtacccaaaatcacatctggagcatcttgagcttctgcagcagcaacatgattgacacgggcctttggcgctggtgcggtagagttgctctgggcagggacaaccttcacacgtcgaggcttcggacacttgtcagcgtaatgtcctgggtctccacagttgaaacacaccacgggcttgctgccttgctccctcttggcaggttgttgctgtgtcgaggctgcaacaggacgtggagcttgattacggatgttgttgccagcattgttgttgaagaactgacgctgcggacgaacaacagacgaagaacctccctgtggcatagactggggtcctaaagtaagacgcggcttctgattattcccctgttgtgtcttgaattgagcaatccggcgtttcttctgctccatgcgattgtatttgtcctcctggcgaatagccttatccactaacttctggaaatcatgataatctccagtcatgagtgggtaagaaagctcatcattaagtccttccaagaacttctcctggcgctcttcatcagtgcgcacatcttccggagcataacgagccagacgattgaactcgtgcagatactccgtaactgagcgagatccctgggtgagcgacctgaattccttcctcttgagagacaccactcccgatggtatatgcgtcttccggaaagcagcggtgaattcaagccaagtgataggttcagcagtagtcctattcaggcggaagtgatcccaccattcagaggcagggccatgcaattggtgtgatgcaaatgagaccttctcctgatcagtgcactgaagcaaatctaacttcttctcaatagtgtgcaaccaatcacctgcttccactgggttagtagtgctagaaaaggtaggtggcctcacacgaagaaaattagctaacttgttctgcggcggtggagcattgttgtttccttggttgagctggttctgcatctgctgtatcatcatgttcattaactgagtctgttgagccagaacttgagcaagagttgggttatcttcattattattgtttccacttccacggctcacgggagacggggacgatgacgtcagcgatgacgtcaccaccggcggcggcggctcggcggctcgacagctcggacggcgcaagctcaccggcgaacggcggtgcttcggcacgaacggagcccttttcgcctcctccgctcgttttcgccgctccccggccgccccctcgctcgttgggccgacgccgccatcaccgttgtagtggtcgtccttcccgcgtcgggatttaatacgcaaaatagtctggaaatttgggttaaatttctgggcgtgacaaagtggtatcagagccaactcgactttgttaaaccgtggaggataaaccgtcagcttcgtgtctgttcggaagtcaagtcaagcatcaagcttcatgcagcaaagagcgggaagcagatggtcagtgtgaggggcaatttcaacggatcaggatcccgtcagtttcatggatcaactcagctcaattctataagcttcccacgtcaacctctcaaagatcagccacaatcccaagtcatggctaatcagactcagacagtggaagagttgttacagcagatgcgacgtcggtaccagatctatctgatgcagcagatgcaacggcaatgtcaggagccgcgtcaagtccaccagccacaaatgcaagtccaggtgccagcccggaacctgaatcagagtcaggagttcccaatatcggcacctaagacccctgtcaaaatgatgtccagatccccgaagataacttcagccaactcaccgtcggaccaaaggaaaataagtgctacctgttatgactgtggtgagcaaggtcattatgtaaggaactgtccatggaaggtgtttgccaggtcacctgaaaaagacgagaagcagtgcccagggagtaaccaagctccaagtcagtctaccgacaagaaggatggtactttgcagcgcaactctggagcgaataggacagtgatatggaagatggataatggtaggaccatgatcatcaccggttcagaatttactcctgaagacgcagcaaggatacccaagcgtcggagaggaagaaataccttccgaggagcgcgtcagctaacccgtcatctcataaagtacggtccacccagacccgaagatgatgaatcaggagaacggttttctgctgatgacaatgacgacaacgatgatgataatgatgacaatgatgatgcgacccttgacagtttcagggaaagagagttgaagtgcaaagcatgtgctagatgtgggatagtcggacatactgctagtttatgcctccccacatgtcgctgtggtgaatacacccattactcagatgcatgccctttgaggaaggtcacatgtttcttgtgtgaaggaacagatcatgtgcctaaggactgtcagttgaacgcggtcctagctatgaccaagaaagaacaaggggcaaccgtgcaacccattcgtcaaccaatggtggtcgacaacaacagtctcaacccttctactctttcaccaaccacagctccagtggaagccaaccttggaagaagcaacgtcgccagggatgttcatgaatcactatgtgttccagtttcagctgccaaagtgcataatcagaagcctgcaccccgagacccagcaagtcgattctgtcgcaactgtcgtaagccaggacatcgtttcagtgattgtcctcttccaagagcagcaaaggcagttcgtcgtgattcccaagttaccagcactgcccatgacaccaatcgacacctgaatgtgcaacctccgcctcaacggattatcgtcaagggcaccgtcaaaggtcacattgttccaccggccatcgtttcaagcctacagcaccagcaccagtag

SEQ ID NO: 23338 - DNA, 5491 bp, Oryza sativa
  Clone ID: TF_OsC1517_1418
ctaagggagcagctccgggaactcggcgcggagaagatcttctcgctcccaggttgcctcatcttcagaatggttgctccattggactttgtagaacttgatggtcttccttcgagtctgacgttctgcctcttcaagaaccttgatcagtctttccttgtaggtcagattcttttccagctcgatattacccagggaaacttgctcttcttcaggtaactcaagctgataagccacttcgccacgtctggcggttatgaggtaggggccgatgtagcggggtgctaacttgccggacatcccaaacctcctcataccacggagaggtgatacccgcaggtacacatgatctccttttccgaactcaaggtcacgcctccgattgtcagcgtaattcttttggcggttctgtgctgtctttaaacgttctcggatcagcttaacttgttcttttgctgccttgagtatgtcaggaccgaataccagcgcttcgcctacctcattccagcacaagggggtgtggcactttcttccgaacattgcctcattcggcgacatctgaatactggcctggtaactgttgttgtatgagaactcagcatacggcaaacaacgatcccaagtgccttcgaaatccagggcacacgcacgtagcatgtcttctaggatttggtttactctttctgtctgaccatcggtctgcggatggtaagctgtactaaaatttagatcggttccgagagcttcatgcaactgtttccagaaccttgaggtgaactgagtgcctcggtctgacacgatcttcttgggacagccgaatctacatacgacatgggtcatgtagagttctgctagtttctttccatcaaaggtagttttcactgccacgaaatgagctgatttcgtgagtcgatccacgattacccagatggagtcgtacccgctaggggttcttggcaaaccggtgatgagatccattccgatttcttcccatttccactcgggaattggtaggggctgtagcagaccagctggcctctgatgctctgccttgactctttggcaaatgtcacacaaggctacgtattctgtgacatctcgcttcattccagcccaccagaagtatgccttgatatcttggtacatcttcgtacttcctggatgaatggagtaggcggactcatgagcttcctttaggatgagatctcttaattccttcttggccggtacacagatgcgtggaccgcaccaaactgtgccttgatcgtctatggagaaattggtgtctttcttctcctgtattctttttattaactcttttatcccttcgtcgtctttctgagcttcccggatttgcgactctagggtaggctgtactgtcaagctggcagggacacctgactgtaccacggtcagcctcaacttctccaattctctgcacaggcgatcttggtcaggccgtatttgagctacattgcaataggccttgcgacttagcgcatcagcgaccacgttggctttaccggggtgataatgaattccaagatcgtaatccttgattagttccaaccatcttctctgcctcatatttaactcagtctgagtgaagatgtacttaagacttttgtgatcggtgtatacttcacatctgttcccgattaaatagtgcctccagatcttaagagcatgaaccacggctgccaactcgagatcatgggtgggatagttgacttcatgaggcctgagctgcctggatgcataggccacaacctttcgttcttgcattaggacacatcctaagccttgtcttgatgcatcacagaagatctcaaaatcttttcggatatctggcaaggtgagaactggggcagtggtcaaccttttcttcatttcttgaaagctgccttcacatgctgcagaccattgaaatttcttttccttctttaatagctcggtcataggtctggctagcttagagaatccttcaatgaatcttcgataatatccagctaagccaaggaagctgcggatctctgacacattcttgggcgggttccaagcaagtacagccttaaccttgctgggatctacttcgacaccgttggaggagatcatgtgtccaagaaatgctactcggtctaaccagaattcgcattttgagaatttagcgagtagttgatgatccctgagcttttccattatcagcctcaggtgttcagcatgttcttcctcattcttggagtatatcaggatgtcatcgatgaacaccacgacaaattggtccaggtattccatgaagattttgttcattaagttcatgaagaatgctggagcattggtgagtccgaaggacatcactgtgaactcatatagaccataacgcgttgagaaagtggtcttcgggatatcttcagatctgatttccagttggtggtaacctaatctcaagtcaattttggagaaaactcttgctccttttagttgatcgaacaaatcgtcaatccgtggcaatgggtacttgttatttatagttacttcattcagggctctacagtcgattaccattctctcagagccatccttctttttaaccagaagcactggggctccccaaggggatgagctaggtcgcacataacctttactctccaattcttcgatttgtcttttgacctctgctaactcattagctgccatttggtagggtctttttgcaattggtgcggtgcctggtgccagttctatcgcgaactcaatctctcggtctggtggcatactcgttaattcttctgggaatacgtcgggatattcacagactacgggcaccgactccaaggaggtgacttgtaaacaggttaggatagaccgacttgcggtaggggtgttagaggtaaagcggacttgctttcctccaggtccttgcaaggtgatggacttttcggcacaatctatctgtcctttgtgcttagctaaccaatccatccgtaggatgatgtccaagttttgcgagtctaggactatcggtttggctaggaagtcaacttcctcagttctaaggttaacttccgggcatatttgagttgcccttatattcctcccaggggaatgtactatcataggtacacgtaaattttgggttttccaaccatttcttttcacaaaagcttgtgatatgaaagaatgagaagctcctgaatcaaatagaactattgcgggtatggagttgacagagaacatacccatcacaatgtctggagcatcctgagcggtctcagcttgaatgtggttcactcggcctcgaccaaagctgttggaagcacgagaaccttgtccacttgcctgagagctaggacgagactgagctgccgctggagtaggagttctggcagtgctgccattagcatgcccggagttggtgttggtaggattctgagggcactctctggcatagtgacccatctggttgcaccggaaacactgaactgctgacggtccctgcggtgacttgaaagaggtaacactgtttggcgcagtagtgccactaggggcacgctgctgtggccgaggtgccggacggttcatctgaggacgaggggcgtagcctggctggcagttagcctgagtgaccgactggtggtattgcatgggttgaccaaagcgagggcgaggtgcgcctcgggaagaattcccctgatggttagacctgcgtttcttgtattcttcggtggtctcctttctggcatcctcaagtagaagtgctgcgattcccttcaagaacttcctgatctttttcttgtctgtgtccacttcctcaggggcataccgagccaacttgttgaactgacttaggtactcattgacactgttgttgccttgcttgagcctgttaaattcctctttcttcatatcaatggtgctttcaggcacatgagctgcacggaaagccgtagcaaactcatcccaagcaatgttagtgggtttagggtgtgcattgcagtaattctcccaccaatctgcagcaggtcctcttagctggtgagaggcgtagagcgtcttctcaacaggagtacactgcactaagttgagttttctatcaacatccttcagccaatcgtcagcctcgacgggctcgacggtctaagagaactctggcggacgagacctcagaaagtctgtcagcttggatctattgttgcccatgtgagggtggtcatttccatgcgcattatgctggaagccggctatggctgcggctaatccttgcaagatctgtgtctgaactgccatcaagtgttgcatgttgttttccacatgaggtagggaggggatgcgttcttctccagaattatgactggcagcacggtgagagcagtgagactgttccacctctgcattacgggaagctgtgtgatgcgagcggttgctgcggtggggttgctcaacttctgcattgcgggaagcagtacggtgcgaacggttgctgtggtgagactgctgattagctgactcatgatttgcttctggctcaactctaccttcctcaaaaccgaagcgggctcctgtagtcggctcctcagtcgaagaaacatcgatcggctgacgcgaagggaccagcggaacctatcgagggccggcagcagcacgggccgctggcagtgggggagctgggtagtcgaagcggaacacagtggaagaaccaacaacacgcttccgcgcagtgcggataaagcgtgggccacggcgggaggaagcaactggggtatgtccggggtgtagaaggggctaactgggtgtgggtaggggaagtacactggtgagtatggcgcacgcgagctgggggagtgcgggctgagccgcgagagctgtgggaggacaggtggctggcgtggcagaggcggcctgagtcccaagagacagtgtcaactaaggtgacaccctcctcggccagacgggcctccagagcggcgtagcggcgggcaagggagcggtaagcctcaaggagtaggtcgtgctgagtggcctgagcctccgaaagctcaaccatgcgagtcagcactggctgagactcgctgtacggacaagggtacctggcgtctgtgtggccggaaggaaggcgtgggagctgccggaaggcagagcccccgagacggtgggcgatctggagagtgggcctggccacagtgaagtggtgtgggcgaaggccagctccgtgtatacctccacgagggtaaaggtacaccgaaagctcacagcgagggggaacacggtccacggagtaccccgtgtactcgggacacgagaagccaaggaagcgggcgaggtcacgaagctgagcgacgtggtgaccctcaccaaaaccgtgggaactgaagctggcgttcactgccatttgttaatcgataccagtcccaggaaacagtgctggtatcacaggaagacagaatatcacagcaacagtggtctctttattacagagtaggagtacagtcat

SEQ ID NO: 23339 - DNA, 1122 bp, Oryza sativa
  Clone ID: TF_OsC82075_1
gccgccgccgaccactctcctccgcgtccgcctcgtcgccggctagggttccacgggttcttgcccgccccgcccgccgcccgcctcgcgggctgcgcaggcaaaatgtctcggtatgttgaccctaatgaccgttacgaaccacgtggtcgtaacagcaggttgtatgtgggccatatttctctacgtacaagggcagaggatcttgagaacctgttcagcagatatgggagggtgcgatttgtggatctgaagaatgaatatggctttgttgagtttagtgatccccgggatgcaaatgatgcgaggcttgatcttgatggccgaaagtatgatgggagtgacatcattgttcagtttgcaagaggggtcgaacgtggtcttggaggttctcgtggatataaagccagacccgcacatggttctgaccactgcttcaactgtgggatggaggggcactggcaccgtaactgcactgctggtgactggacaaataggtgctatggctgtggagagaggggtcatatattaagggaatgcaagaacagccccaaggatctcaagcaagagagaggctactcaaggtcccgttcacctcgtcgcagaaggagcccaagctatggcaagagtggacccccttctcattggggtagccatggtgctgatcgtgaggaaaggcttcattcaagaagggatggccgcggttacagccgcagccctcggcgccatgattcgccttccaatcagagaaaccacagccctaggcgctatgctttaccctccaatgagagatatgatggcactaggcgctacgcctcgccttcttatgggagagaccgcagtcccgggggcaatgctttgccagccaatgggagaagccacaacctcacatcagatggcatgaacccttcaccaagggagagagatgatcagaatgggagccacaggagaggtgacaacgattacctgcccagtaagagagatgatcagaatgggagctacaggagaggtgacagcgattacctctccagggagagagatgattacctgtccagggggagagatgatcagaatgggagccacaggagaggtgacagcgattacctgtcccgcgaccgttga

SEQ ID NO: 23340 - DNA, 2259 bp, Oryza sativa
  Clone ID: TF_OsC359_7473
ttcctggttggtttcctctctcacctcaatccctgtaacagatgtttaacagagaaaaaggaaagaatgtcagcgggtatgcctccagtaactcaagttttcaactcaatccgccactggcctcaagagagttaacaagggcacaccctcggtccattccaagcatgctgcttagttcacagctaccattagttggaagtcaagaccaaaatcagtatgtgtttgatcgagcgtttgccacccaggtcaatgagcttccaatgctagaagaggatgtccccttttgtcacgattgtagagagcaaggacactatgccctgaattgtccatgggtatatgtcaaagaagccccttcctttggttcagcagggcagacatcgctaaaccagcctcctcgcaccaagtcaagcttgcagcctagtgtgcaaagtgaagagcccaatggagacaatccattgaatcctagaaaatgctttcctcctagcctttcgtaccacgtggggtcacgtactaagcaagccaaaggcaagaagagtaagaatcaaaagagaaaagcaccgatgcgaactgaagaagaagtacgtaagatgactattaccagcacagaatggcctccaccaggaatgacaaggcgtcagagaagaaataccttccgaggtgcaccacagttgacagagcatcttttagctaatggaggtagagtgtctgatagtgaagattcagatcaagtctcctcagatgatgaagatgaaatggaacgtaaggcatgctctcgttgtggagaaatcggtcatgtcgccagctcgtgtgccactatatgcgttcattgtgaggaagaccatccacccgacaggtgtccaacgagcaggatcacttgtttcttttgtgaaggaactgatcatgtaccaaaaaattgtcaattcagttttctgctgacgaagaagatggctaaccaacccgccagttccaacggagagaagcctcaaggcaacaccaatcctcgccaagattacagtctcagcttaaaaccagtgccaggacagaggaatcaaaatgagaaaagaaaatgccgagtccgggaagatatctgttgcttcaattgtcaaggaatgggtcatttcgccgacaagtgcccaaaactgagaaacatagctgccagcacgtcagtccacacaactccctgcaatcagaagcttgctcctcagcgaattgtcatccatgcatcccgaagcagtcctatagcccgcgttgcaacagctccaactccagcaggcgcattaccacaaggtgtcaatgctcaatttcagccccagccagcagttgacaagacagaggccagtatcggcatcgtacctttggatgttccagcacagcagccaagaaatcaagtacaagatgaagaacccgagcaagaccatccaccaggggagtgtcccactcgcaaggtgacatgttttctgtgcgaaggaacaaaccatgtgcccaaggattgccaactcagtgtgttgttgaccaagaccgcagaaatccaacgaacgaccctacgattgtctcgtcagctagtcagctccaacaacaacatcgatgatatcatccacagcaccaatgctcctcttgctccacctaactctgcaataaatcatggcaataatacctacagcactaaccattctctgcaccgacagccccagcaaagaattgtcgtcgatggaagaagttgtgtctctccccgacctactccaggccaagcaaagggcaatcgacctccggagggcgataccaagcagaagaccgtcatccgcttcaaccagcaatcagaaggaagcttctcctgtgaatgatagcattatgcagtcctatcacatcatcacagaaccaatcaaggatgcagtcactagaacaataccagctatatctctccagaatcaaaatgagcagccatgtttgtggtttccagttcgctacttatcatggtgtaatcgaaagtttgcagcaatcattggtgacttgtatgaggttgactccgaagatatgaatcatgagaagttcgggaacggaagcatcattgaactaccgcaacctagtctgagtcagccaaaaggtgcaccctggtccaagtcaggtgaagagaagattccatccgcaacaggaggtcaagccaagcagttccgagtggtgaagttttgctggaagtttgtcaagacgcaacggaagaagtcagacaagaagagaagaccgcccaacctatcttcttgctag

SEQ ID NO: 23341 - DNA, 2200 bp, Oryza sativa
  Clone ID: TF_OsC359_7487
ctctcttcctctttcaaaacccgtaaaacctgttttccggtgggatttgggtgcatcccagttgtgggaagtagcaccccggccaatataaggattaagctcgggcctctgttgcaaagcagtaccgtactaaccacatgtctaatgggtaaggcttatctcggtgctcagtctagtcctgaacaaaaggacacagatagagatggatgaagtcgttgcgacgatggatatctctgaggcaaatgaaggctacgcgagctgcggctcggtaatcgagatgtctaggcaaatgaagactacacgggtcggtgcccgggctcaaccctggcctgcctgtcccgggataccggccgtaggcagggttgggtcggtacttttgttcacggctaggatgggtgaagggttatgtcacatctttacgacgggttccaaggccatggaatgcggagtaaagatgtgtcttgtgggttggcctgggttggcttgggacgagctggaacccaggtcgggttgccagtttggtctgaatcatcgtaggccttgggttaaggcagtactagatggtcaggtcagtgaagaagaggacatcgtcagttgtttgccgaagctccagaagactgcaggatctgctagtgaagtggaggaagcagtgaagccagctgtgaagcaggacaaaagacttagatctgttaaggtcctatccttagtttctaatctgtctctcccctttgttttccctctctccctctccaaacctttgcaacagatggctgacaatgagaaaggcaataaggtcagaagtcaggacattggtacctcaaactcccgagtgaatgaagcaccagacaccagttgtgtggcagtggtccaacacctgattaaccagaacaaattgcttatagagatactacagcagcatcggatgccaattttgaacccgagtcagatgcaacctcaagtgcagttggaggcagtccaagcactcacaccacaagtcagcgcaccgccaacatcccagaaggcccctcatgccatgccacatgttgacccaaaagaagcaagtatcatctgttttatgtgtgatgagcaagggcactacgcaaggaactgtcctcagcagaaaagaaaagcaccaatgcgaaccgaagatgaagtccgtaagatgatcattaccagcacagaatggcctccaccaggaatgacaaaacatcagagaagaaattccttccgaggtgcacaacagttgacagagcatcttttagctaatggaggtagagtgtctgatagtgaagattcagatcaagtctcctcagatgatgaaggtgcgaagcctccccaaggttttaaccagaataaaatagaacttaaggcatgctctcgttgtggagaaatcggtcatgttgccagctcgtgtgcctctatatgcgttcattgtgaggaagaccatccacccgacaggtgtccaacgagcaggatcacttgtttcttttgtgaaggaactgatcatgtaccaaaagattgtcgattcagttttctgctgacgaagaagatggccaaccaacccgccagttccaacggagagaagcatcaaggaaacacaaatcctcgccaagattccagtttcagcctaactccagtgccaggacagaggaatcaaaatgagaaaagaaaatgccgagtccgggaagatatctgttgcttcaattgtcaaggaatgggtcatttcgccgacaagtgcccaaaaccgagaaacgtagctgccagcacgtcagtccacgcaaacccccgcaatcagaagcttgctcctcaacgaattgtcatccatgcatcccgaagcagtccgatagcccgcgttgcaacagctccaactccaatgagtgcactaccacaaggtgtcaatgctcaatttcagccccagccaccagctgacaagacagaggccagtatctgcgttgtacctttggaagttccaatacagcagctgagaaatcaagtacaagatgaagaacccgagtgtaagaaagttattgtttgttacaactgcaatgaagaagggcattactccaaaaactgtccccaaccaaggcaaaatcgacctccacattaccgccaatttacacgaagcagacattccaatcgtattgtggtcactggagcaaacgctgtacccgtgaggcctcgtgttaatcagaacccatag

SEQ ID NO: 23342 - DNA, 7907 bp, Oryza sativa
  Clone ID: TF_OsC359_7990
atggtggcagagtatctgatagtgaagggtcagatcaagtctccttggatgatgaagatgagtctccccgacatctcggcgaggaagagatggaatcaaaggcatgcacccgttgcggggaaattgaacacgttgctagcatgtgtctcacactctgcactcattgtgaagaagaccatccaccaggggagtgtcccacccgcaagctccaacagcaacatcgacgatatcatccacagcaccaatgctcctcctgctgcacctgaccctgcaataaatcatagcgataataccttcagcaccaaccattctctgcaccgacagcctcagcaaagaattgtcgtcgatgaaagaagttgtgtctctccccgacctactccaggccaagcaaagggcaatcaacctccggagggcgataccaagcggaagaccgttattcgcctcaaccagcaaccagaaggaaacttctcctccctccgtttcgcgggaaagcaccggagacgcgtcctcgccggcaaaacagtggcgttgccgccactgttccacctccggccgccactgtcgcgtttcccgtgcgccggccgacgtcgccaccacctccctcggctccgcgacgccgccctcatccccggcatcacctcctcctcgctcgaagctcgccggagtggcctccacgtcggcgtccagtacctccccgcctccggccggctcctgtacgtcgccggtacgccgatcgacgtcgccgcgttgtcctctcctccagctgctcctctgtttcgccggaacaccgtcgcccgtgctggcctctccatcctcatcgtcgccgacgtcccttcggccgcccgttcatcctcgccggctcgtcgtctcgcggcgccgcctccgtcatcgtcatcgctgcggcgtgttccacgccatcctcgcattcgtgcagccgctgccggctgccctcgtcgcctcctcgccggccccggtcgtcgtcgtcgtcgtcctctcatcattcccggtcgtcgtggcgttcgtccctccgtcgagccgttctcatccgtcgtccgcatcagtcaagcaagccgcggcagccccgtcctcgtcttcgtcctcagctccgcgtcgtcaagccttgtgccagccgcgtctcgccttcgtccaaggatcgccgccgaagtcgttccctcgccgttcgcctccgtcgtccccgagctgtctccgccgcgcccgttcgtcgttgtcgtccccacgcctcgtcgcgtggtggtaaggatccctctccctcgctgccccgtcctcgtcctttcggtgtcgcccgtgctcgttgtgcggttgtcggccccggtacccgtgtaccggtgtcggtagtcgttcacgcgtgcgggtggtgaccgtgtagtgtccgcgttagtgtgcccgctcggtgtctagtggagtccgtttgtcgaccactcgcctcggttgacacacagggtccgcttccatcgacccgtggaccgtctctgtgtacccggttttctttttatgtattgttattgcttctttgtaggcttgtagctttgcttgtgtgcttcgcgtagctttcgtcgtcccggaggttcccgaagcgtggttcgtggtcgtcgccgaaggttcggaaggccgttccctctctcttcctctttcaaaacccctaaaacctgttttcggtggggtttgggtgcatgccagttgtgggaagtagcaccccggccactataaggattaagctcgggcctctgttgcaaagcactaccgtacttccacatgtctagtgggtaaggcttagtttgtggctcagtctggtcataaacaaaagtacacggatggagatggatgaagtcgggggtcgatggacattctccagggcagatgaaggctacacgagctgcggcccggtagtcgagatgtcatggcacagggccggtgtcctgctgctaggggctcagtcctgcctgcctgtcccgggggttccggccgtaggtaggattgggtcggtactcttgtctatggctaggatgggttggaaactatgtcacgtcttctgtctgtataccatggtgatggccggcagcgtcacccgtcgtggtttggacatgactggcttcgtcttggagctgcggggcatgtgcgtggtcctggggtatccgcatggagtggactaccaggccaggccgcttccggagcaggagggtgacgatgcagagccccacgctggttgggaggttactgcagtgatcctctctggctctcccgagcggacttcactggcagtcaccgcgggtggagattccttccccgccgcttgccagagcgccgctctcctcgccatcggcactcttcaccagcgctacccggacgagttgcagcactcgccctatcgctaccaccctcgtcgcggaggagcccgcgactacgccaccttccgggatgctagctcggaggatgacgctaccatcgtgcacctggcgcgcatggtggaggcgtacgacgcggctcgtatcgacttccatcagatggtgcgccgtgggatggtcgagaacaacttgaagatcctggagctgcgtcaggagaacctgcagctccagaaggacctggacgcggtggaggcgcagctgcatcagctcaagatcgcccagggagaggtctgtcgccccaagcgccgccgcgtctgccgcagccagaagatcaccgcccgcaagagcacctccaggcccgagcttgttcgtcagtccctggcgtggacctgcttcatcgagacccctcgtgccgagcccgcgcccgtggttccccaggagggggaaacctccggcgttggtagcacggaggatgcgctgttgctcaccttccgtcctggcccatcgcagcggagaagtgctaacaccggtgatggcaaccaactcgaaggcagcaaccacaaccaccagggcaacccacctccacctcctcctccgcctccaccaccaccaccagataccaacgccattctcacccaaatcctcgcccagcaggccaacatgatgactgctttcctccaccacctccaaaatccgccacaacataatgctccaccaccacctccccaacactctaaactcgctgagttcctccgcatccgcccacctaccttctctagttccaacaaccccgtggatgcgttggattggttgcatgccgtggggaaaaagctagacattgtgcagtgcagcgatgaggagaaagtcatcttcgccgcccaccagctgcaggggcccgcatctctatggtgggaccatttccaggctacgcagccagaggggcaacctatcacttgggctcgcttcaccgccgctttccggagaacccatgtgcccgccggagtcgtggcccttaagaaaagggagttccgagagttgaagcagggcaaccgctccgtgatggagtatttgcatgagttcaacaacctggcccgttacgctccggaggatgtgcgggaagatgaggagaagcaagagaatttcttggcaggaatggaccctgagctgtccgtccgtctagtctccggggactatccggatttccaacgtctggtggacaagagcatctgcttggaagccaagcacaaggaactggagtcgcacaagcgccgcttggcgaatttccgcaatcaacagggtgccaaccaaagggtccgctacaccaatccctatccagggggatcctcctcgcagcagcagcagcagcaacctcgccccgcgcctcgacctcaattcgtggtgcgcgtcccacagccgcagcagcagcagaatcaacaagggactcgtgcgccccgtccacctacgccaactgtgcagcctggtcaaggccgcagggacgctcaaggtccgcagcgtctgtgcttcaactgcttcgagcccgggcactttgcggataaatgcccaaagccgaggcgccagcaaggccaagcgcctccccgctccaacaatggtgggaaggatgtcattcggggtcgtgtgaaccacgtgacggccgaggacgtgctgacaactccagacgtcatcgttggtacgttcctcattcattccatccctgctaccattttgttcgactctggagcttcccactcgtttatatctgtgccattcgtggggagaaatcagttgggggtagaaaggcttaggaaccctctgctcatcaccacccctggaggggttatgacagcaaagtattatagccctgccgtccctatagaaattcaggggattccttttccctcggatctgattctgctagacaccaagaacttggatgtgatccttgggatgaattggttggctcaattccaaggagtagtggattgcgcgagacgcaccgtcactctgtaccgagggccggaacaaccggttgttttctttgcatccccaacctctgtcagaagttcagaactgcatcagattggactgtcagaaatccccatcgtcagagagttcagagatgtgtttccggaagaactacccggtatgctgcccaagcgagagattgagttccggatagatcttgctccaggaaccactcctctgtacaagcgaccctaccgtatggcagcaaatgaactggccgaagtcaagaaacagttggaagagttgaaagaaaaggggtatatacgcccgagtacttccccctggggtgctcctgtgatttttgtggagaagaaagacaagacgaagaggatgtgcgttgactacagagctctcaatgaagtcaccatcaaaaacaagtaccctcttccccgaatcgatgatctgttcgatcagcttaaaggtgccactgtattctccaagatcgatcttcgttccggatatcaccaattacgtattcgtgaagaagatattcctaagaccgcattcaccacgcgatacggactgtatgaattcacggtgatgtcgttcggtttaaccaatgcacctgccttcttcatgaacttaatgaacaaagtgttcatggaatacttggataagtttgtcgtggttttcattgatgacattctgatatactcacaatcagaggaagatcatcagcaccatctccgtctggtgttgggaaagttgcgtgaacatcaattgtatgccaaacttagcaagtgtgagttctggttgtccgaagtcaaattcttagggcacgtgatatctgctaaaggagttgctgtggaccccgaaacagtgaccgctgtcaccgattggaagcaacccaagacagtcactcaagtccgcagtttcttaggtttggcaggatactaccggaggttcatcgagaacttctccaaaatcgctcgacccatgacacagttgttgaagaaagaagagaagtttgtgtggagcccgcaatgtgaaaaggcgttccaaactctcaaagaaaagctggtttcctcaccagtgctaatcttgccagatactcgcaaggatttcgtggtgtattatgatgcttcgcgccaaggattggggtgcgtgctcatgcaggacggtcatgtggtggcctatgcctcacgccagctacggcctcatgaaggcaattaccctacccatgatttggagttagccgctgtggttcatgctctaaaaatctggcggcactatctcattgggaatcgctatgaaatatatactgatcataagagtttgaaatacatcttcacccagtcggatctgaatcttcggcaaaggagatggttagaactcatcaaggattatgatgtgggaagtcactatcatcctggtaaggccaacgtggtcgccgacgccctaagtcgaaaaagccattgcaacactcttaacatccgtggcgttccacccgaacttaatcaacagatggaagccctgaacctaagcatagttggtcgcggatttttggctgcgttggaagccaagcccaccttgctcgatcaaatccgcgaggctcagaagaatgacctggacatgcatggactcctcaggaatatgaaacagggtaaagccgctggtttcacagaggatgaacacggaaccctatggaacggaaatcgggtatgcgttccagataacagagaacttaaacagctgatacttcaggaagctcacgaaagtccttattccatccaccctggcagtacgaagatgtatctagacttgaaggagaaatactggtgggttagtatgaagcgagaaattgcagagttcgtggccctttgtgatgtgtgccagcgtgtcaaggaagagcaccaacgaccggccgggcttctccaacctctccaagtaccggaatggaaatgggatgaaattgggatggatttcatcaccggacttccaaaaacccaaggtggatatgattctatatgggtagttgtggatcgattaaccaaggtagcccgatttattcctgtgaagaccacctatggagggaacaaactagccgagctctacttcgctaggatcgtgagtctccatggcgttcccaagaaaatcgtatctgatcggggaagccaattcacctctcacttttggaagaagctccaagaagagctgggtacccgattaaatttcagcaccgcgtatcacccgcagacagatggacagaccgagcgtctaaatcagattctagaagatatgcttcgcgcatgtgtcctagatttcgggaagacctgggataagagtctcccctatgccgagttctcctacaataacagctatcaagccagcatacaaatggcaccctatgaagcgttgtatgggcgcaagtgccggacaccgctattgtgggaccaagctggcgaaagccaagtgttcgggaccgatatcctgagagaagctgaagcgaaggtcagaaccattcgggataatctaaaggtggcacagtcccggcagaaaagttatgcagataaccgtcgccgtgatctggaattcgcagtggatgactttgtgtatcttcgggtcacgccattgcgaggtgtacacaggtttcagacaaagaggaagctcgcacctcggtatgtgggtcctttccgtatcattgctcggcgcggagaagtcgcatatcggctggagctgcccgcctctttgggcaacgtgcatgatgtgttccatgtgtcgcaactcaagaaatgtcttcgagtgccatccgagcaggccgactcagagcaaattgaagttcgcgaagacttgacctatgtggagaggccagtgaaaatcctggacaccatggaacgcgggaccaggaaccgggtaatccgtttttgcaaggtccagtggagcaaccacgccgaagaagaagctacctgggagcgtgaagacgagctcgtcccgcttcggcatcgcctccttcggctccgccgcgtcctcgccgacctcgtccactcctccgtttcgcccgccgaccgccggaacaccgccgtcctcgtcgacccgagccgcgccgccgccttcctccactccggtcgtcgttctcgccgtcctcgtcgacccggggtgagccgtggaccgcccctttcgcttcccccttccctcccctctctcgggcgccgctccgctgcgtgcgtgatgcccggcggcgaccatcggggcgcgggcgcgccgcctcccgtcggccgtgccgcgaggccgccttcgggcgcgccccgcggctgccaggtggggcccggccgtcagccgcccgcgccctcgggtgcggccggtccgcgcgcccctcccctcggtcggtccgaatcccagaaccctggcctccacctgcgctccggcgccgccgccgccgccgtggacgcccttctgctcctcctccggctgagcctcctgctcgtgctcgccgccgccggcctcgcgcgcagccacctcctgctcgcgctccacgccgccgccctcgcgctccctccccgaccgcgtccacctccgcgccat

SEQ ID NO: 23343 - DNA, 7605 bp, Oryza sativa
  Clone ID: TF_OsC359_8313
agctttcccatcacgaacatgtttgactctttgatcacagtctacgtcctgatagtgcttgtgctcttcttgtaatgccatgacccgatccggtttagcatttgcaccatcttccttccaaaagcatgtcttcatgttcttcatagacaattgtggtaggttgacttgagttgattgaggttgatcaagtagtccaccttggtcatcatggacttcttgtggtcacacccgtgattcttacacggatggataacatttaagtatgcatgttcttgtgaacttggagcctctggcctagatccttcgggtgaccaaggaatcttcccggagtctccggggtatctttccagagcctccgggctccaatgcatggtgatagatgagcttcattgcaaatcgagcggtcttaccgaagcctttggttccactataaaattttagcacattttggtccccaacaacattgggtccataaaggttagtcacaagagacttagacacccaaatggcctttatgctagtgtgtggcgaacaaatcaccctagtagcacaaatatcatttttggcattcctaagcaaattatgatcaaatgagagacttgtcttaggaatgttacccatgggaaaatttttaccaatatgtccctttgcccggcaattatagcaaagtcgacttttgcttctatattgcttttcggtttgcttgttgccggtttgcctctcacttgatgttttgcattgttcatccaatgtacaaggagaccttgaggcaaagtgtcccacttcggtgcacttgaagcacttgatgtgaggaatgtctttcttcttgctcaacttatttcctttcttccaagggcaatctctagcatgatgtcccactttcttgcacttgaagcaagtaatggaactcttgatcatcttttgatttcgtcccttggtataagcattgatggacttgctatccctttgatggatcctggtgcaagccacggttgatccctcctcaagattcttcaccatgccttcacagttatcttgagaaggttgagcaatgcacacaagtccatgatctatttgcttctcccttttgcctacacaatccaagtcatatatagtgctcggggaaatatttgcttgggcgcaacaagggttagtacaagtaagatcaacttgaacatgaggctcgtaggattttaccgttgcaattatcacctcatgagatacctctagcattgcatgagaatccacaagattctcatgagaacacaaaagttcatcatgtctttcttgtaaatccacatacttgttagtgatctcatcaagttgagatttgagctcttgattttgcttctccaaagatgctacacaagcaatagaattagtggcacaagcaaattcattttccaatttttcatacctcatagtcaatgaagaatgaaaatccttaagtttcttgtgttcttcggttagactcatgatttcttcattcttcttgatagtgcatgcttgttgcttctcaatggcttccatgagcttgatcaccattgttatatccttcttgctcaagtgatcaaactcggagtcaccatcttcactcataaagcaagcataatcttcggaaatagaagatgagcatcttggtgaggtggattcttcacttgtccattggtgcttatttacttctcccttcttcaatgtagtcatgtgttgatgataaggtggttgtgggatgattatcttttctcctttggaaatatcggctaaatcggtttggaatgtgtttgattcgagttcgaatcggatcggtctctttccttcaaaccccgatctttccttctcgtcgccggccgccgtgggccttcttcgtcgcctcctagcccctttaaaaggacccccaagctcttctctacccgccgccaccttcgccttcgcctctcgtcgtccgtagcgccatagcgccgcgtagccctagcgccgccgtcgccgccgtcgctccagtcgtgcgccgccgccgttctagacgtcgccgtcgctcgggaagaccgccgtcgtggtcgccgtcgcgtcgccgtcctcgttcgccctttcgccgtcgccgaagatcaccggagcgccatcgccgccgtcgacccgaagaccgccgccgctttcttcgtcgtcgccgtcgccgtccgttggtcttccgccgctcctttggttaccggtgagttcgccgcgtcgcgctctacccgttggtgctctccgttcgtgccgaagtgccgccgttcgccggcgagcatgcgccgcccgagccgccgagccgccgccgccggtggtgacgtcaccgccgacgtcatagtcgtcctcttccgtgagccggtcgtggacccgatcgatctcggccgtccgttttggatggatcgatctcggccgtccgttcgcgtgaaccgccgcccgtgcgcccggtccaccgaaaccctagccgctgacgcaataaaccctcttttccgtgccaaccacaagccagcatgggcaacggctttatcttttgtatagcatggttcattgcggggcaccagactgagaagtggcggagataagcccacgggggtcgctggggagtccatgcctctggtttttgagggggtgattatgatccaggaagctcctggtttggaatggttaattcctggtttggaggtagaactgtgcagccgggatggttgttcagaatggttgggcctatacaacaggatgccgcgctacaagcatgagtacctgtttggtgttgagggttttgttcaggagttgcgtacgatgtcctttgtcattggatttgggactgcccctttttatgctcagattcctcatgatcgtcatgaagaaaagtgccgagtcaaagtcaccttgaacagcaatagtgaagatgtcccctcagtgatgtttgaagctggaggaaggaactacatccatgcatgtcaggaggtggcaaggatagccataggagagctccgtgatcgctacagtgatcagttggccgacaccgagtatcgctaccatcctcgtcaaccccagggaagtgaccgtggcagctacctagagattgaaggaattgagaatgatgctaccacaaggcatttggttgagatgttgtgggctatggatgaaagtcgtgcggagactgtgttagcagcccaagatcgtgaagatcggaatcgtggtaagatttgcaagctagaagacaaggtggatcgtttggaaaaggaattagccgcattgaagggagaagcaccaccgcagaaggccaggattcgtctcaccgcaaggaagagagctctatttgtccctcgctatcaattggcgccaaagatggtgaatactcgcagcaatgggaatggccccaaccaccccaataacaataacaatggagagaacccaactctggcccaagttcttgctcaacagactcagctaatgaacatgatgatgcagcaatttcagaatcagcagaaccaaggaaataaccatgtacctccccagaacaagttagcagaatttcttcgtgtgaggccgcctgttttctctagcaccactaatcctgttgaagctggtgattggctgcatgccatagagaagaagttggatttgcttcaatgcactgatcaggagaaggtctcatttgcatcacatcagttgcatggccctgcatctgaatggtgggatcacttccgcttgaataggattaatgctgaacctatcacttggcttgaattcgccgctgctttccggaagacgcatataccatcgggagtggtgtctcttaagaagaaggagttcaggtcgcttactcagggatctcgctctgtcacggagtatttacatgagttcaatcgtcttgctcgttatgctccggaagatgtgcgcaatgatgaagagcgccaggagaagtttttgggaggactcaatgatgagctttcttatccactcatgggaggttcttcatctgttgttcgtccgcaacgtcagttcttcaacaacaatgctggcaacaacatccgcaatcaagctccacgccccgttgcagctccaacccagcaacagcctaccaagagggagcaaggcagcaagcccgtggtgtgtttcaactgtggagacccaggacattatgctgacaagtgtccgaagccccgacgcgtgaaggttgtccctgcccaaaataactctgctgtaccagcatcaaaagcccgtgtcaatcacgtcgctgctgcagaagctcaagatgctccagatgtgattttgggtacgtttcctgttaactcagttcctgcaacagtgcttttcgattctggtgctacacattcatttttatcaatgagttttgcgggaaataatgggatggaagtagaagatcttagacgtcctttgatggttagtaccccgagtaatcaagcactctctttgcaatgtagcccctctgtcagaatagaaattcaaggaataccctttctagccaatcttatcttgttagaatccaaagaccttgatgtcatcctagggatggactggttagccagacatagaggagtgatagactgtgctaacagaaaagtaactctcaccagtaatgatggtcgagttgtaactgttcatgcattgtcttcggagtctttaaggtcaagactgaaccagataactttggaagagattcctatagttcgggaatatcccgatgtgttcccagatgatttacctggtatgccgccaaaaagggatatagagttcagaatagatcttgtacctggaacaactccgatccataagagaccttatagaatggcagccaatgagttggcagaagtcaaaaggcaagtagatgatttgcttcagaaaggatacatcagaccaagttcatcaccatggggagctccagttatttttgtggaaaagaaagaccatacccagaggatgtgtgtggactatcgtgcattaaacgatgtgactatcaagaataagtatccgctaccccgaattgatgatttgtttgatcagcttaaaggtgccactgttttctccaaaatagatcttcgatcagggtatcaccagttgagaatcaaagaggaagatatacccaagaccgcttttaccactaggtatgggttgttcgaatgtactgttatgtcttttggacttaccaatgcccccgctttcttcatgaacttgatgaataaagtatttatggaatacctagacaagttcgtggtggtctttattgatgatattcttatctactcccgaaccaaagaagagcatgaagaacatcttcgccttgctttggagaagctacgagaacatcaactgtatgctaagtttagcaagtgtgaattttggttgtctgaagtgaagttccttggtcacgtcatctcagcaggaggagttgccgtcgatcctagtaacgtggaatctgtaaccaactggaaacaaccaaagacagtttcagagattcgcagtttccttggcctcgcaggatattatcggaggtttatagagaatttttccaagattgctaagcccatgactcgattgcttcagaaagatgtgaagtacaagtggtcagaagaatgtgagcaaagttttcaagagttgaaaagccgcttaatatcagctcctattttgattttgcctgatccaaagaagggttttcaagtgtattgcgatgcatccaaatttgggttaggttgtgtcctgatgcaagatgggaaggtggttgcctatgcatctcgtcagttacgtccgcatgagaagaactaccctactcatgatcttgagttagctgcagtagtacatgcgtttaagatttggcgtcattatcttttcggtactcgtacagaggtgtacaccgatcataagagtttaaagtatatctttactcagccggatctgaacatgagacaaaggagatggttggaattaattaaggattatgacatgggaattcattatcacccgggaaaggctaatgttgtagcagacgctcttagtaggaaaagctattgcaatgctacggaagggcgacagttaccattggaattatgcaaggaatttgaaagattaaatttgggaattgtcagtagaggtttcgttacagccttagaagcgaagcccactctaattgatcaagttagagaagcccaaattaatgatcctgatattcaagagatcaagaagaatatgagaagaggaaaagctatcggtttcttggaggatgagcaaggaactatatggttgggcgagagaatctgtgtccctgacaacaaagatttaaaggatgcaattctgaaagaagctcatgatactttatactccattcaccctggtagtactaagatgtaccaggatctcaaggaaagattttggtgggcaagtatgaagcgtgaaatcgcagagtacgtagcagtatgtgatgtttgtcagcgagtcaaggcagaacatcagaaacctgccggtttgctgcagcctttgaagattcctgaatggaaatgggaagaaatcggtatggattttatcactggtttacccagaacgtcatcaggccatgattctatttgggtaatagtcgatagacttaccaaagtggctcattttattccggtaaagacaacttattccgaaagtcggttggcagaattgtatatggcaaggattgtgtgttcgcatggcgtccctaagaaaatagtgtctgatcgaggcagtcagtttacttcaaatttttggaagaaacttcaggaagagatgggttctaagctgaactttagcactgcttatcatccacagacagacggacaaaccgaaagggtgaatcagattttggaagacatgttgagagcttgtgctttagatttcggtggaaattgggataagaatctaccttatgcagaattttcgtacaacaacagttatcaagctagtatacagatggctccttacgaagcactgtatggtcggaagtgccgcactccgcttttgtgggatcaaacgggagaacgtcaggttttcgggactgatatcctgagggaagcagaagaaaaggtaaagatcattcaagaaagattgcgagtggctcagtctcgtcataagagttatgccgacaatcgccgtagagatttgagttttgaagaaggagattatgtgtatcttcgtgtcacgccttttcgaggagttcatcgttttcacaccaaaggaaaattagcaccgcgttttgtgggaccttataagaacgttagtagaagaggagaggttgcttatcagttagagttacctcaatctttggcaggagtccataatgtgttccatgtgtcgcaattaaagaagtgtttaagagtacctaccgaagaagctaatcttgaacagatcgaagtccaagaggatctgacctatgttgagaaaccaatccgtatcttggaaacaaatgagagaagaaccaggaatcgagttatccgtttttgcaaagttcaatggagtaatcattcggaagaagaatcaacttgggaacgagaagatgaattgaagtcagctcatccgcatctattcgccagttcttccgaatctcgaggacgagattctgtttaa

SEQ ID NO: 23344 - DNA, 2752 bp, Oryza sativa
  Clone ID: TF_OsC1528_1709
tcagaccaccgccgttgcggtggttcctttctctcctggcaccggcatgtcgtgcactccatccaggagtgtgagcgcccgcagaccggcgatgacatgcaacggaagcggtgtgtcgaaggactttgcataagcctccaccaccgcatccacgaccggttcacccggggtgagcagccccatctcctccatgaggcgcacttctgcgcgcttagacaccggcaccgacgagaagcgcgccttacggccgctccgccgcgacggcatctgcaccaccttgcgtccgcaccccttcgtcttggccgcgccgggcggcgccagctcgagcggcgcctgcaggatgatcggcggctgcagctgcgagaacagaggagataagacgaccttttcacgttcaccttctcctccgtggatgggctgagtctggaccgtggcctggtgttgctcctcgcagtcggcctgctgcaccagggtgggctggtctcctgtggaagcttgggcctcgtcatctccagtggactgagcgaggaggtccatcttgggggcctgctgcgcatctgggacgagatggcccatcttctcctggcccaactcagctgccgacgccaccttatcctctcccagtatcggttcttccccacccgtcctcttcgtctcgttctccgcctcccgtgaagacttgggagcgatctctgccaggagcggcagcatcgggtcgtggtccccctggtcatctgagaaggggagcaggggtgaggagcataggatcttgatcagagggtcaggaagactcacgagagcgtcgactggctgctggtcgccatcagcctggccactaacagcgaccaccttggtcgtcgcgccgcctgcatcgccggtgccgtcctgaccgcgaggagtcaaggagcttggggagcgcgtgcgacgggatctgcagcggcaggagcatcgggagctgtgcctggttcgtgagcggccttggcacccatcgccgtgcgctcgctggcggccggaaggatgcggcgtgcggctccagtgccgcgccccttccgccgcccgcgactcaaccgaccagtcccttccaatgatgacatcgcgcagcgagcggcggcgtggtggaatatcctcagcgtggcgccgccgcccgttgtcatcctcatcatcctctgggtcttctcttctctgcggcagtgccctgcatccccgcctcactgccgcccgttgccgaggaggctgggttccgtcggcgcagcccaggtaccactggaaggtgcgcaccgtgggtatcgggcctcccgaatcagacgagtccgaggagggaagtccgctcacgccggaagaaggcgagcagggcggatggggcggtcctggagtccagtcctccatctcgtccagatggactatgacatgcggcagcctccccctcggcggtggcgcgatctcgtccggaagcggcggtgtgatgccggaggtgacacgcccagcttccggcgggaagaaggtggagatcactattcgtggcaggaggtcaggattccgcatccacatccagcatgagaagatggccatgttctgccgctgaaccgactcatgctcgatgcgatcgaagaggcagatgggacccatgacgccctccaatcccgccctgttccatgcgtactgcggcaatccctccaggcagagccgcacgcgaaaccaccagttcgggtggtgcacatgcctgtcggcgctccatggcgtgatggtgaaccttcctccatccagagtgatgaagcctctccgcgttgccgcggcctgcccctctgggaaatcgaagaagacgaagaaatcttccgggtgatggcgcgtcactcgcaggtccgagatggggatcccaacctgctgggtcagtgcacgtgccacctccctaggggacgtctcctgtccctcaacctcggccgagatgagtgcgccatgaaagcgaaggcgctccagctcgtgctgcatgagctccgtcatcggcaccgttgcatagccgaccgccggccgttgattcggtagaccaggtatgtgatccatggtcaccgttggcttgtgcaaacgatggaaaaccgaaccagggcgggtcgttgttggttgctgttggttcttgctgggaagcggtgggaagatgagttgggattgaatggagggggcttgcttggggaaggtgaggcgggagtgaatgggttgctttgatttgtttgggcagcggaaggagatgtgtccactgcgtctacaagtatagcagcggatgggatccctgcaagctgctgcctggtgatctgaagcgaggcagcggaagcacttgccgtgcaagatctccttgaatttttctctgagatttagtggattgaaggaggcagctgggcgattgaagacggcctgagaggttgacgaagaaggattttggcgcttccgccaccaaaactttggttttaccgcttgccattttgatgaaagatattgttcttctgcctcgatttgaaacttgcttgtagctctcgccggggctacgattatcgactttaatgttgcttttcctctggctttcttctctgcatcttcctcttgtgccttttcgggagggggcgtaatggcgctccgtccctcaggtttcacccccactcctcgcaaggcagcgggcagtcccctctcgtgcctaggtgaatctggaagccgcataggacgtcgcagggcccatccaaactccatcacgcccacccttgcctag

SEQ ID NO: 23345 - DNA, 1818 bp, Oryza sativa; identical to SEQ ID NO: 15336
  Clone ID: TF_OsC359_5999

SEQ ID NO: 23346 - DNA, 3141 bp, Oryza sativa
  Clone ID: TF_OsC359_8126
acacctcccaactctaagctatcaattgaggctccccgtggaccggcattgtcagtacctcattctcccggtggagctgatatggacttggcagatatagctcaaagcttggctccaataaagaccacaatagcgccgccgccgccgcggattccgccgcatcccgccgtccccgcgcgcattaaagagggggaaattattccccgcgtttccctcccccgtttcccccgatttcccctctctctctccctcggatccgtccggattcatcccgtaatcctcgccggcgacatctatggagcccgagatccccgcgcccgtttccttcctctccggccgcgttctccccctctcggtgctatataattgctccccgagctccgctcttccgtttcccgccgctcgccgctcgctctcgccgtcggatccgtgctcgcgccgtgctcctctctctccgccgtcgccgccgaccttcggttcgccgccgacgtcgctccggtcctccgcccgactcggcgacacctccatccgcttcgccgtatcgccgtcgacctcgtccgcgcctccgtttcgctcgccgaccgtcggagcgccgccgtcatcgtcatcccgagccgcgccgccgcgtttctccactccgttcgtcgtctccgccgtcctcgtgtctcggggtgagccgtggaccgtcccttccgtttccccctcctctccgctctctcgggcgctgctccgccgcgccgatggtcgccggcggtgaccatcggggcgcgggcgcgccgctcccgtcggccgtgccggcgaggccgccttcgggcgcgccctcgcggctgccaggtgggcccggccgtcagccgcccgcgcccgcgggtgcggctgacgcgcgggacccacggcgccgaccgccgccagccgcgtgcgcccggtccaccgtggaccgagaggctgacgcgtgggccccacttcccgtggacccgggcaaatgaaggctacacgagctgcggcccgatggctgacaatgagaaaggcaataaggtcagaagtcaggacattggtacctcaagctcccgagtggatgaagcaccagacaccagttgtgtgacactggtccaacacctgattaaccagaaccgattgcttatagagatactacagcagcatcagacgccaattctgaacctgagtcaaacacaacctcaagtgcagttggaggcagtccaagcactcacaccacaagtcagcatgccgccagcatcccgaaggacccatggtgacgtgccacatgttgacccaaaaggagcaagtaacatttgctttatgtgtgatgagcaagggcactatgcaagggagcgtcctcagcagaaaagaaaaacaccaatgcgaaccgaagatgaagtccgtaagatgatcattactagcacagagtggcctccaccaggaatgaccagacgtcagagaagaaataccttccgaggtgcaccacagttgacagagcatcttttagctaatggaggtagagtgtctgatagtgaagattcagatcaagtctcctcagatgatgaagatgaaatggaacgtaaggcatgctctcgttgtggagaaatcggtcatgtcgccagctcgtgtgccactatatgcgttcattgcgaggaagaccatccacccgacaggtgtccaacgagcaggatcacttgtttcttttgtgaaggaactgatcatgtaccaaaagattgtcaattcagttttctgctgacgaagaagatggctaaccaacccgccagttccaacggagagaagcatcaaggcaacaccaatcctcgccaagattacagtttcagcctaactccagtgccaggacagaggaatcaaaatgagaaaagaaaatgccgagtccgggaagatatctgttgcttcaattgtcaaggaatgggtcatttcgccgacaagtgcccaaaaccgagaaacatagctgccggcacgtcagtccacgcagctccctgcaatcagaagcttgctcctcagcgaattgtcatccatgcatcccaaagcagtcctatggctcgcgttgcaacagctccaactccagcgagtgcattaccacaaggtgtcaatgctcactttcagccccagcaaagaattgtcgtcgatggaagaagttgtgtctctccccgacctactccaggccaagcaaagggcgataccaagcagaagaccgtcatccgcttcaaccagcaatcagaaggaagcttctcctgtgaagagaagattccatccgcaacaggaggtcaagccaagcagttccgaaaggtaaagatttgctggaagtttgtcaagacgcaacggaagaagcgggcccgcccgccgctctcgctgacgggtggggcccacctgtcatcgccttcctcccgccgcgcccgccgccgcgcccgtgccctagcgccgccgccgccgcggattgcgccgcatcccgccgtccccgcgcgcattaaagagaggggaattactccccgcgtttccctctcccgattccccctcttttccctctctctctccctcggattcgtccggattcatcccgcgaagttcgccggcgtcttcaatggcgcccgagatctccgcgcgcggtttcctctctccccggccgcgctctccccctcccgttgctatatattcgatccccgtgcttcgctcttccgtttccgccgctcgccgctcgctctcgccgtcggattcgtgctcgcgccgtgctcctctctctccgccgtcgccgtcgaccttcggttcgccgccgacgtcgctccggtcctccgcccgactcggcgccacccccatcggcttcgccgagtggttgccgaccccgtccgccgctccgcttcgcccgccgactgccggagcaccgtcgccctcggcatcccgaaccgcgccgtcgccttcctccgctccggttcgccgccgccgtcgctccggtcttcctcccggctcggcgccacctccctcggcatcgccgcatcgccgtcgacctcgtccgcgcctccgtttcgctcgccgaccgtcggagcgccgccgtcatcgtcatcccgagccgcgccgccgtctttctccgctccgtccgccgtttccgccgccttcgctgcctcggggtga

SEQ ID NO: 23347 - DNA, 2674 bp, Oryza sativa
  Clone ID: TF_OsC359_7561
gaatctgagttgcttgttcgtgcgccgccgccgccgccgattccgccgcatcccgccgtccccgcgcgcaataaagtggggggaatcattccccgtgattccctctccgttttcccccgcttttccctctctctctccctcggattcgttcggatttaatcccgcaagtttcaccggcgtcattgatggagccgagatctccgcggccgattcctccctctccggccgctctctccctctcccgacgctatataattgttccccgtgcctccctcctccgtttccgccactcgccgctcgctctccccgtcggattcgtgctcgcgccgtcctcctctctctccgccgtcgccgccgagctccggttcgccgccgccgtcgctccggacttcctcccgactcggcgtcacctccatcggcttcgccgcgtcgtcgtcgacctcgtccgctcctccgtttcgcccgccgaccgccggagcaccgtcgtcctcgccgtcccgaaccgcgccgccgctttcctccactccggtcgtcgtttccgccgtcctcgtcgtcccggggtgagccgtggaccgcccctttcgcttccctctcttctccgctctctcgggcgccgctccgccgcgccggtggtcgccggcggtgaccatcggggcgcgggtgcgccgcctcccgtcggccgtgccggcgaggccgccttcgggcgcgccccgcggctgccaagtggggcccggccgtcagccgcccgcgctcgcgggatgtttaacagagaaaaaggaaagaatgtcagcgggtatgcctcaagtaactcaagttttcaactcaatccaccactggcctcaagagagttaaccagggcacacccttggtccattccaagcatgctgcttagttcacagctaccattagttggaagtcaagaccaaaatcagtatgtgtttgatcgagcgtttgccacccaggtcaatgagcttccaatgccagaagaggatgtccccttttgtcacgattgtagagagcaaggacactatgccctgaattgtccatgggtatatgtcaaagaagccccttcctttggtttagcagggcagacatcgctaaaccagcctcctcgcaccaagtcaagtttgcagcctagtgtgcaaagtgaagagcccaatggagacaatccattgaatcctagaaaatgctttcctcctagcctttcgcaccacgtggggtcacgtactaagcaagccaaaggcaggaagagtaagaatcagaagagaaaggcaccgatgcgaactgaagaagaagtacgtaagatgactattaccagcacagaatggcctccaccaggaatgacaaaacgtcagagaagaaataccttccgaggtgcgccacagttgacagagcaacttttagctaatggaggtagagtgtctgatagtgaagattcagatcaagtctcctcagatgatgaagatgagaagtctccccaaggtttcaaccagaataaaatggaacataaggcatgctctcgttgtagagaaatcggtcatgttgccagctcgtgtgccactacatgcgttcattgtgaggaagaccatccacccgacaggtgtccaacgagcaggatcacttgtttcttttgtgaaggaactgatcatgtaccaaaagattgtcaattcagttttctgctgacgaagaagatggccaaccaacccgccagttccaacggagagaagcatcaaggcaacacaaatcctcgccaagattacagtttcagcctgactccagtgccaggacagaggaatcaaaatgagaaaagaaaatgccgagtccgggaagatatctgttgcttcaattgtcaaggaatgggtcatttcgccgacaagtgcccaaaaccgagaaacatagctgccggcacgtcagtccacgtaactccctgcactcagaagcttgctcctcagcgaattgtcatccatgcatcccgaagcagtcctatagcccgcgttgcaacagctccaactccagcgagagcattaccacaaggtgtcaatgctcaatttcagccccagccatcagttgacaagacagaggccagtatcggcattgtacctttggatgttccagcacagcagccaaggaatcaagtacaagatgaagaacctgagcaagaccatccaccaggggagtgtctcacccgcaggtgacatgttttctgtgtgaaggaacaaaccatgtgcccaaggattgccaacttagtgtgttgttgaccaagaccgcagaaatccaacgaacaactctacgattgtctcatcagctagtcagctccaacaacaacatcgatgatatcatccaccgcaccaatgctcctcttgctccacctaactttgcaataaatcatggcaataataccttcagcaccaaccactctctgcatcgacagcctcagcaaagaattgtcgtagatggaagaagttgtgtctctccccgacgtgaaatgggtaacttgtatgaggttgactccaaagatatgaactatacgaagttctggaactgaagccccatcttcaagtgccgcaacccagacgaagtcagctaaaggttcaaccagggacaagtcaggtgaagagaagattccacgataagttcttccagggcatcccgcgaaccggtccttaattgccat

SEQ ID NO: 23348 - DNA, 1773 bp, Oryza sativa
  Clone ID: TF_OsC1713_3496
atggaggagaaaccgtcaacttcatgtctgttcggaagtcaagtcaagtcaagcctcaagcttcatgcaaggagcgagaagatcagttcaaagtcgtcgttccgcgaagatcaagagtcacgtcaatgtcacccaccgcaggtgccagatcagatgccagcccggaacccgaatcagagtcagagtcaggagttcccaatatcggcaccgaagacccctgtcaaaatgctgtccagatccccgaagataacgacagccaagtcatcgtcagaccaaaggaaagtaagtgctacctgttatgactgtggtgagcaaggtcattatgtaaggaactgtccatggaaggtgttcgccaggtcacctgaaaaagacgagaagcagtgcccagggagtaaccaagctccaagtcagtctaccgacaagaaggatggtactttgcagcccaactctggagcgaacaggaaggtgacatggaagatggataatggcaggaccatgatcatcacaagttcagaatttactcctgaagacgcagcaaggatacccaagcgtcagagaggaagaaataccttccgtggagcacgccagctaacccgacatctcataaagtacggttcgcccagacccgaagatgatgaatcaggagagcagttttctgctgatgacgatgatgatgatactgatgacgatgatgatacgacccttaacagtttcatggaaagaggattggagttcaaagcatatcatgtgcctaaggactgtcagttaaacgcggtcatagctaagaccaagaaagaacaagggacaaccgtgcaacccattcgtcaaccaatgacaatcgacaacagcggtcacaatccttctgctcttcctccaactctagttccagtggaagccaaccatggaagaagcaacgtcaccaaggatgttcataagtctctgcttgttcccgtttcagctgccaaagtgcataatcagaagcctgcaccccgagaccaagcaagtcgattctgtcacaactgtcgtaagccaggacatcgtttcagtgattgtcctcttccaagagcagcaaaggcagttcgtcgtgattcacaagttaccagcactgcccatgacaccaatcgacacctgaatgtgcaacctccgccccaacggattatcgtcaagggcaccgtcaaaggtcacattgttccaccagcaatcgtttcaagcctacagcaccaacgccagcagcgtaagcaatgccaggagaacaacagctcgctacagctacaaagaggcggtacgccccttcgtcagcacccgcggcaagtgttgtcagcaccaggtcgcccaactgttgtcagttctagcaatgcacctcgtattgctccaatctggaggcccatcgacaaatcaccgttcggtaaccccacgggcaagaagatcctacccgttacagctgacaagacagttgcccctccaccatcgaagatcaacaagcagagcaacgttcccggtcatacctacccccactccgccagagacagaggcgacgtgggggcacggccgcccgttcaatcggacgtgaccggcaacaggccggtcacagattggtcacctccgattgacgtggcctgggtcccctccccgttcgctccccccgccacatggcaattgggcgagggcctcggggcgaggcagtgcgagggcccgaggggcacgacgtggcaccccgaggccctccggccgcttctgcgactcgcgaggtgcgggagtagggccaggctgtag

SEQ ID NO: 23349 - DNA, 4950 bp, Oryza sativa
  Clone ID: TF_OsC1713_4665
ttactgtggcaactggtggatatcactcctgcgatatatggaaaccgctaatccgatcagatctctctcacttgctttccatctctggtgttcttcctcctccgcgcgtctgtgctgcctctgttctgcctccccacttctgatcgcttgcgtgcacgagagatcggaacgagcagggcctccggaaccacaccttcgcttgagatctgcatcgggtaggcggatgatcaggtttttggggagtgcttccacacgactgctctcgtcgtccaccatgtctgcacctggagccactgccgacgcacctggagccactgccgtccctggagatggcacgccgggagccggagccgctgcgaacgtcaacatcaacgtaggcagtcctacctcacaatccagcggagggacattctcgggagatgctacattctttgagaatgaatttcccatgaaatatacacctagcacttctagtcaagaaactgtcataccccatgagcactttgcaccgatagaacacaatgatcaaacgcctgagggaaatcctcaggaggacacaattgtagatactcgtaagaggcctccggaaccacaccttcgcctgagatctgcaccgggtagacgggtgatcaggtttttggggagtgcttccgcacgactgctctcgacttttgctctgttcgtcatcgtctcgtcgtccaccatgtctgcacctggagccgctgccgccgcacctggagccgccgccgccgctggcgccgctgccgccgtcctagagatagcacgccaggagccggagccgctgcgaacgtcaacgtcaacagaggcagttctgcctcacaatctagcggagggccattctcggggtatatctttctcctgctgttaactcattcgttcatacctctgttagtcatgttagtcgcaattctattgcgttcttggtatgtgcatgatgcttattataccttaagcatgctcctggttatgctacatttcatcactagatcaccccacattgttcatgccatgattattatcttaacattttggattaaaatatgccgatatatgactatatttccaacaatccaaaaacctgatgggtcattttcggtagttggctttgctgctacactgaaaccacatgcatttgatggttctaactataagaggtggaaagcacgtgcactattgtggttgacagcgatgcaatgcttctatgtttcatggggcaaacgaagtgaaccacctctctctcctaaggaagatgttaagtttgaagcttcaaattgcctgttccgtggagcattgatcagtgtactcgctgacaacatagtggacgtgtacattcacatgccttccgggaaggacatgtgggatgcacttgaggccaagttcggagtttccgacgccggcagtgagctatatgtcatggagcagttctatgactacaagatggttgatgaccgttctgtagtagaacaagctcatgagattcagatgctggctaaggaacttgagaacaacaactgtgagttgccagacaagtttgtggcgggtggcattattgccaagttgccaccttcttggtcagactttgccacttctctaaagcacaaacaagagtttagtgtttctgatctcattggctctttgggtgttgaggagaaggcgagggcaaaggacaaccggggcaaaaaggttgagggaggttctagtgccaatatggtacagaagaagaaccctcatgcatcccacaacaacaagaaagtcaagcttgatggcaaacccaaggctacaaccaattttaagaagaaaggcaagggaaaggcaaaggaagactgctttgtgtgtggcaagtctgggcattgggccaaggactgtcctgagcgcaaagaaaggaagtctgccaacatggttattagcgagggcggagaaacatcggggtaaggtaaaatattacctacagttctctctgtttttcactcacctgattggtgggttgatactggtgctaatattcatgtatgtgatgacgggagaggttcctccttgttgatgggaaacgggtcgcttgcggctgttcatggtgttggtacggtcgatctgaagtttacttcgggaaagaccgtgcaactgaagaacgtgcagcatgtcgcttcaacaaagaagaatcttgttagcggctctctattgtgtagagaaggttttagagttgttttttgaatcctataaatgtgtcgtatctaaatatggaacttttattggaaaaggttatgacagcagaggcttgttccacttttctttggatgatatgtgtaataatcataatgttgtgaaccatattagcgagaatgatgagtctaatgtgtggcattcgcgactctgtcatgtgaatttcggttgtacgacgcgcttagctaacatgagtttaattccaaaattcactttggtcaaagtttctaagtgccatacttgtgttcaatcgaaacaacctcgcaagcctcacaaggcatttgaggcgaggaatttggcacttctagaacttgttcattccgatttgtgcgaaatgaacggcgtgttgactaaagggggaaagaaatatttcatgacactgatagatgattgcactagattttgttatgtgtatctattgaaaacaaaggatgaagcattgcattactttaagacctataaagctgaagtagaaaaccaacttgaaaggaaatcaaacggttgaggtctgatagaggtggggagtatttttccaatgagtttgcatccttttgcgaagagtttggaattatccatgagaggacgcctccctatccaccccaatcaaatggggtggccgaaagaaagaactgtactctaactgagatggtgaatgccatgttagacactgcggagctttccaaggaatggtggggtgaggcagttttgactgcgtgttatatcctgaataaaattccaatgaagtataaggaagtgacaccattcgaggaatgggaaaggaaaaaattaaatctctcatacctacgaacatggggctgtttggccaaggtaagtgtacctatagccaaaaagcgaaaacttagaccaaatactgttgattgtatgttccttggttatgctatttacagtgtgggttatagattcttaatagtaaactctggagtacctgacatgcgtgttggtacaattattgagtccagagatgctatattctttgataatgaatttcccatgaaacatacacctagcacttctagtcaagaaactgtcataccccatgagcactttgcaccgatagaacacaatgatcaaacgcctgagggaaatcctgaggacaacattgtagatactcttaagagtaagagacaaagggttgcaaaatcctttggagatgactatattgtatacctcgtggataacaccccaagaaccatagaagaggcatatttatctcctgacgctgactactggaaggaagcagtacgcagtgagatggactcgattatgtctaatgatacttgggaagtcgttgagtatccatatgggtgcaagcctgtaggatgtaaatgggttttcaagaaaaagcttaggcctgatggtacaattgaaaagtacaaggtaaggcttgtggccaaggattatacccaaaaggaaggcgaggattttttcgacacatactcactagttgctcgcttgaccacgattcgattactacttgctctggcagcctctcatggtcttctcgtccatcaaatggacgttaagacagctttcctaaacggagagctggaggaggagatctatatggatcaaccagacgggtatgtactagaaggtcaggagggaatggtgtgtaaactgttcaaatccttgtatggccttaagcaagcacctaaacaatggcatgagaagtttgacactacacttacatctgcaggctttgttgataacgaagctgacaaatgtgtgtactatcgtcatggtgggggagaaggagtgatcttgtgcttatatgtcgatgacatattgatcttttggaccagcctcaatgtgattgaggaggtcaaggactatctgtccaagagttttgaaatgaaggatttgggagaggctgatgttattcttaacattaagctaccaagaggatatgagggtgggattacacttgtgcaatcccactatgtggacaaggttttgactcctactccttatgatcccagcgtgctattaaggaaaaaccgaagaatagcaagggatcaactgagatactctcaaatcattggttcattgatgtacttggctagtgcaacgaggcctaacatctcatttgctgtaagcaagctgagccggtttgtctcaaatccgggagatgatcattggcaggctctggaaagagtaatgcgctatttaaagggcactatgagctatggaattcactataccgggtacccaaaagtactagaagggtatagtgactcaaactggatatctgatgctgatgagataaaagccacaagtggatatgtgttcacacttggaggtggcgctgtttcctagaagtcttacaagcagaccatcttaacgaggtcaacaatggaagcagaactcacagcactagatactgcgacagttgaggccgagtggcttcgtgaactcctgatggatttgccggtggttgaaaaaccagtgtcagctatcctaatgaactgtgataatcaaatagtgattattacagtgaacagttcaaaggacaacatgaagtcatctaggcatatcaagagaagactgaaatctgtcagaaagtagaaaaactccggagtgatagcattggactatgtccaaacggctaataatctggcagatcagtttaccaaggggctaccacgtaatgtgatagacagtgcatcgaggaaaatgggcttgatacccacc

SEQ ID NO: 23350 - DNA, 4731 bp, Oryza sativa
  Clone ID: TF_OsC22235_2
atggatactacgtcacttccctgccacgagctcattgagggtaccccatctcatccactgcacatgtgctcctacctccttgatgccacaggttggggagaagggcaacaaggtaggaggaggtcgtcggcaagccaaaatatgaccggtgagaggctaacccatcgtgtggagtctgttatgagggtatccgagtttagctcgttgcccgcgtcttgtgctgggagctcggatcacgtcgtgtggttgtggggatggacgcagctagagcatggcgtgagaagtggtcttggtggtttagccacacgatcgctggggaaattcctaacaattggtatcagagcacggtttaggaagtggactcgtgaccgcgcattggaaggcgtcttcatgccgcgtcgtcgctcgtcgtcaccgatcgtgcgcactcctcatgactccggcggccgcgccacgggcagcggcgggggtgaccgcgggctggtgatccaccgcgtggtgaaagaaggaggcggctcggtgaactacccgctgctgaccaagaccaactacaacgactgggcgctactgatgaagatcaagctgcaggctcgctgcctgtgggcggcgatcgagcccgacggcgtggacgtccctctgcatgaggaccggatggctcttgacgctatctgcagtgccgtgccgccggagatgattggcaccctggcgaccaaagcgtcggcccgggaagcctgggaatgcatcaagacaatgcgagtcggcaacgaccggattcgcaaggcgagtgcacagaaagtgcgcgctgagtatgaatcgcttgcgttccgcggtgacgagaccgtggaagatttcgctctacggctcacaaccatcgtcaaccagcttgcaaccctcggtgatcctgaacctgctgataaagtcgtcgaaaagtaccttcgggtagctcgtcccaggttcaatcaactcatcttgtctattgaaactcttctcgatatctctactctgtccatggaggaagttactggcagactgaaagccgctgaggattctgggcaatcctcgtcgcacaccgccggtgggaagctgtacctaactgaggaggagtgggctgaacgtcagaagaagaaggatcaagaggcaaagcggggtgactcgggcggctctggcggccgcggcaagcgccgtggcgggagagggcgcactggtggcggcgggactgcgagccccgagagcacgaactctggttcggcgcgcaagggagacaaatgccgaaattgcggcaaacttgggcactgggcgaaggactgcaggagcaagtccaagcgcgaagaacaggctcacgtcgcccaggaggatgaagaagagcacaccttgatgttgctcaccggcggccgcgttgacacggtcgacgcggcggcgccggagggcgacacgcccacaccgccccaccaagccgtggtggaactcgtggagatgaaagtatttgcagcgctcgacgacgcggctgaccatgatcccgggcgctggattatggattccggcgcgtcaaaccatatgacgggcagcaggatggcgttcgccgacctcgacacgaacatcaccgggaacgtgcgactcggcgatggatccgtggtccggatcgcaggacggggcacaattctctttgcctgcaagaatggtgagcaccgcactctgtcgaacacctattatcttccccgtcttgctgccaatattatcagcattgggcaattggatgagaccggcttcaaagtgctggcggaggatggcatcatgcgggtctgggatgagcagcggcgtctgcttgcccggatccctcgcaccccagggcgactgtacatgcttgacatcaacctggcgcgcccggtctgtttggcggcacacgccgacgaagacgcgtggcgctggcatgctcgcctcgggcacataaacttcagggcgctctgcaagatgggcaaggaggagctggtacgtggtctaccatgtttgtcgcaggttgatcaggtctgtgaggcctgtctcgccgggaaacaccggaggtcgccgttcccgcggcaggcactttgccggtctgacgagccgctggcgctgctacatggagatctctgtggaccgatcacgccggcgacacccagtggcaaccgctatttccttctactcgtcgacgactacagccggtacatgtgggtcgccctcctctccaccaaagatgcggcgccggctgccatcaagcgtattcaggcggcggcagaaaggaagagtggacgcaagctccgcgcgttgcggacggatcgcgggggagaattcacgtctacacagttcgccgagtactgcgccgagctgggaatgcggcgcgagctcacggcgccctactctccgcaacagaacggcgttgtcgagcggcgaaaccaatccgtggtgggcacggcgcggagtatgctcaaggcgaaggggctgccaggtatgttttggggagaggcgataaataccgccgtgtatctgctcaacaggtcgtcgtccaagggtatcggcggcaagaccccgtacgcgctgtggaacggcgttccgccggccgtgcaccatctgcgcacgtttgggtgtgtggcacacgtgaagacgaccaccccgaacctgaagaaactggatgacaggagtcgtccaatgatctttgtcggctacgagccggggtccaaggcgtatcgcgcctatgatccggctactcggcgtgttcacatctcccgtgacatcgtcttcgacgaagcggcccagtgggactgggatgctgaggcggccgctgatctcgacaccgacttcgtcgttgagtacaccacggtgtaccatcctggctcgctgtcaggaacacgccaagacgctggggagccgcctgctcgatcttcatcatcgccgcgaacgccatcagactcaccgacagccggccgaacaccttcggtgcatggcgatgcgccggcggttgattttgtgtcgccaccaactggagcagctgctaatcttgatgcagaccacgacgacgcaccactccgtttccgcacgatggacaatgtgctggggccggccatgctgccaggtctcgctaatcgtgaggtccaggaagagctgatgatggtgagcggagaagaaccggcaacgttcgctcaagctgaacgcgacgaggattggcgtcgggcaatgctcgatgaaatctcttcgatagaggagaacaagacctggaggctcgtcgatctgccttcgggacatcggccaattgggctgaaatgggtgtataaactgaagaaagatgctcagggcgtcgtcgtcaaacacaaggcgagattggtggcaaagggctacgtgcagagggctggaattgactttgatgaggtattcgctcctgttgctcgtcttgattctgttcgtttgttgctcgctctcgctgcgcaggaaggttggatggtgcatcatatggacgttaaatcagcgttcctcaatggggaactgattgaggaggtgtatgttgttcagccaccggggtttgagatcgatggacaggagaacaaggtttacaggcttgataaggcgctgtatggtcttcgccaagcacccagagcttggaacaccaagctagactgcacactgaagaaacttggcttcaagcagagcccgttggagcatgggctgtacgcgcgcggcgatggcagtgggcgactgctcgtcggtgtgtatgtggatgatctggtaattgtcgggggtgacagtggcatgatcaagggattcaaagagcagatgaaggctgaatttaagatgagtgatcttggtcctttgagtttttatcttgggatcgaggtacatcaagaagctggaatcatcactttaaagcaagcagcgtatgcgtcgcgtattgtggagaaggctgggctcaccggctgcaacccctgtgcaacaccgatggaaccacgtctaaagctgagcaaggaaagtgcaggatcgctagttgatgcgacagaatacagaagtctagtgggaagcttgcgctatctggtgaacacccgaccagaccttgcatattcggttggttatgtcagtcgtttcatggagaaacccacggacgaacacttggcggcagtgaagcgcatcataaggtatgttgctggtaccattcatcttgggtgccgctatgtgaaggaaggtgaaggaggactgcagggttacagtgacagtgatatggctggagacattgacactcgcaagagcaccacaggagtaattttctttctcggcaaaaatcctgttagctggcagtctcaaaaacagagagttgtagcactctcctcctgtgaatctgagtatattgcagctgcaacagctgcatgccagggcatttggcttgcccggctcctcggtgacctcaggaatgcagcaactgaagtcgtcgatctcagggtggacaaccaatccgctctggccctgatgaagaaccctgtttttcacgatcgaagtaagcacattcaaacaaaatttcatttcattcgtgaagccgtggagaatggggaaatcacaccgagttacatcggcacagaagggcaacttgcagatatcctgacgaagccgctttctcgaatcaagtttcaggagctgcgggaacaaattggcttagccacagtacgcatgcgttgtgtcgtctggtttcctgctagcgatcgctggggaaattcctaa

SEQ ID NO: 23351 - DNA, 5216 bp, Oryza sativa
  Clone ID: TF_OsC22235_3
cggaattcccgggtcgacccacgcgtccgcatcttgggtgccgctatgtgaaggaaggtgaaggaggactgcagggttacagtgacagtgatatggctggagacattgacactcgcaagagcaccacaggagtaattttctttctcggcaaaaatcctgttagctggcagtctcaaaaacagagagttgtagcactctcctcctgtgaatctgagtatattgcagctgcaacagctgcatgccagggcatttggcttgcccggctcctcggtgacctcaggaatgcagcaactgaagtcgtcgatctcagggtggacaaccaatccgctctggccctgatgaagaaccctgtttttcacgatcgaagtaagcacattcaaacaaaatttcatttcattcgtgaagccgtggagaatggggaaatcacaccgagttacatcggcacagaagggcaacttgcagatatcctgacgaagccgctttctcgaatcaagtttcaggagctgcgggaacaaattggtatgtttcctgtataatcggcacatcaagcttagggagagttttgttagcagtaatcttgtgtgccacggttagttagttgattagttatctgcatgtttccgtttttttttcgaataaacgcatgggaaaagaacttctgggcgcgacaccacggcactccggagcacgctccaagcgccgccgcagccgacatcgtcgtcgttccgaccaccgtagaccaaaccaagccgagccgtcgcgccaacgtcttctctgttagcagtaatcttgtgtgccacggtttagccacacgatcgctggggaaattcctaacaattggtatcagagcacggtttaggaagtggactcgtgaccgcgcattggaaggcgtcttcatgccgcgtcgtcgctcgtcgtcaccgatcgtgcgcactcctcatgactccggcggccgcgccacgggcagcggcgggggtgaccgcgggctggtgatccaccgcgtggtgaaagaaggaggcggctcggtgaactacccgctgctgaccaagaccaactacaacgactgggcgctactgatgaagatcaagctgcaggctcgctgcctgtgggcggcgatcgagcccgacggcgtggacgtccctctgcatgaggaccggatggctcttgacgctatctgcagtgccgtgccgccggagatgattggcaccctggcgaccaaagcgtcggcccgggaagcctgggaatgcatcaagacaatgcgagtcggcaacgaccggattcgcaaggcgagtgcacagaaagtgcgcgctgagtatgaatcgcttgcgttccgcggtgacgagaccgtggaagatttcgctctacggctcacaaccatcgtcaaccagcttgcaaccctcggtgatcctgaacctgctgataaagtcgtcgaaaagtaccttcgggtagctcgtcccaggttcaatcaactcatcttgtctattgaaactcttctcgatatctctactctgtccatggaggaagttactggcagactgaaagccgctgaggattctgggcaatcctcgtcgcacaccgccggtgggaagctgtacctaactgaggaggagtgggctgaacgtcagaagaagaaggatcaagaggcaaagcggggtgactcgggcggctctggcggccgcggcaagcgccgtggcgggagagggcgcactggtggcggcgggattgcgagccccgagagcacgaactctggttcggcgcgcaagggagacaaatgccgaaattgcggcaaacttgggcactgggcgaaggactgcaggagcaagtccaagcgcgaagaacaggctcacgtcgcccaggaggatgaagaagagcacaccttgatgttgctcaccggcggctgcgttgacacggtcgacgcggcggcgccggagggcgacacgcccacaccgccccaccaagccgtggtggaactcgtggagatgaaagtatttgcagcgctcgacgacgcggctgaccatgatcccgggcgctggattatggattccggcgcgtcaaaccatatgacgggcagcaggatggcgttcgccgacctcgacacgaacatcaccgggaacgtgcgactcggcgatggatccgtggtccggatcgcaggacggggcacaattctctttgcctgcaagaatggtgagcaccgcactctgtcgaacacctattatcttccccgtcttgctgccaatattatcagcattgggcaattggatgagaccggcttcaaagtgctggcggaggatggcatcatgcgggtctgggatgagcagcggcgtctgcttgcccggatccctcgcaccccagggcgactgtacatgcttgacatcaacctggcgcgcccggtctgtttggcggcacacgccgacgaagacgcgtggcgctggcatgctcgcctcgggcacataaacttcagggcgctctgcaagatgggcaaggaggagctggtacgtggtctaccatgtttgtcgcaggttgatcaggtctgtgaggcctgtctcgccgggaaacaccggaggtcgccgttcccgcggcaggcactttgccggtctgacgtgccgctggcgctgctacatggagatctctgtggaccgatcacgccggcgacacccagtggcaaccgctatttccttctactcgtcgacgactacagccggtacatgtgggtcgccctcctctccaccaaagatgcggcgccggctgccatcaagcgtactcaggcggcggcagaaaggaagagtggacgcaagctccgcgcgttgcggacggatcgcgggggagaattcacgtctacacagttcgccgagtactgcgccgagctgggaatgcggcgcgagctcacggcgccctactctccgcaacagaacggcgttgtcgagcggcgaaaccaatccgtggtgggcacggcgcggagtatgctcaaggcgaaggggctgccaggtatgttttggggagaggcgataaatactgccgtgtatctgctcaacaggtcgtcgtccaagggtatcggcggcaagaccccgtacgcgctgtggaacggcgttccgccggccgtgcaccatctgcgcacgtttgggtgtgtggcacacgtgaagacgaccaccccgaacctgaagaaactggatgacaggagtcgtccaatgatctttgtcggctacgagccggggtccaaggcgtatcgcgcctatgatccggctactcggcgtgttcacatctcccgtgacatcgtcttcgacgaagcggcccagtgggactgggatgctgaggcggccgctgatctcgacaccgacttcgtcgttgagtacaccacggtgtaccatcctggctcgctgtcaggaacacgccaagacgcttgggagccgcctgctcgatcttcatcatcgccgcgaacgccatcagactcaccgacagccggccgaacaccttcggtgcatggcgatgcgccggcagttgaatttgtgtcgccaccaactggagcagctgctaatcttgatgcagaccacgacgacgcaccactccgtttccgcacgatggacaatgtgctggggccggccatgctgccaggtctcgctaatcgtgaggtccaggaagagctgatgatggtgagcggagaagaaccggcaacgttcgctcaagctgaacgcgacgaggattggcgtcgggcaatgctcgatgaaatctcttcgatagaggagaacaagacctggaggctcgtcgatctgccttcgggacatcggccaattgggctgaaatgggtgtataaactgaagaaagatgctcagggcgtcgtcgtcaaacacaaggcgagattggtggcaaagggctacgtgcagagggctggaattgactttgatgaggtattcgctcctgttgctcgtcttgattctgttcgtttgttgctcgctctcgctgcgcaggaaggttggatggtgcatcatatggacgttaaatcagcgttcctcaatggggaactgattgaggaggtgtatgttgttcagccaccggggtttgagatcgatggacaggagaacaaggtttacaggcttgataaggcgctgtatggtcttcgccaagcacccagagcttggaacaccaagctagactgcacactgaagaaacttggcttcaagcagagcccgttggagcatgggctgtacgcgcgtggcgatggcagtgggcgactgctcgtcggtgtgtatgtggatgatctggtaattgtcgggggtgacagtggcatgatcaagggattcaaagagcagatgaaggctgaatttaagatgagtgatcttggtcctttgagtttttatcttgggatcgaggtacatcaagaagctggaatcatcactttaaagcaagcagcgtatgcgtcgcgtattgtggagaaggctgggctcaccggctgcaacccctgtgcaacaccgatggaaccacgtctaaagctgagcaaggaaagtgcaggatcgctagttgatgcgacagaatacagaagtctagtgggaagcttgcactatctggtgaacacccgaccagaccttgcatattcggttggttatgtcagtcgtttcatggagaaacccacggacgaacacttggcggcagtgaagcgcatcataaggtatgttgctggtaccattcatcttgggtgccgctatgtgaaggaaggtgaaggaggactgcagggttacagtgacagtgatatggctggagacattgacactcgcaagagcaccacaggagtaattttctttctcggcaaaaatcctgttagctggcagtctcaaaaacagagagttgtagcactctcctcctgtgaatctgagtatattgcagctgcaacagctgcatgccagggcatttggcttgcccggctcctcggtgacctcaggaatgcagcaactgaagtcgtcgatctcagggtggacaaccaatccgctctggccctgatgaagaaccctgtttttcacgatcgaagtaagcacattcaaacaaaatttcatttcattcgtgaagccgtggagaatggggaaatcacaccgagttacatcggcacagaagggcaacttgcagatatcctgacgaagccgctttctcgaatcaagtttcaggagctgcgggaacaaattggtttagccacagtacgcgtgcgttgtgttcgtctggtttcctgctag

SEQ ID NO: 23352 - DNA, 659 bp, Oryza sativa
  Clone ID: TF_rsicem_14574.y1.abd
ggaattcggcacgaggcatcatctcctttacctctgtacgcatataatcagagaaggagctagctcctggatgtatggaacaaaaacacatcactccaccctctgttgctgctgcactactgaattctcatcgctagtttctgcacgtacagaaccagcgagagcaggcctccgaaaccatgccccgctgcgacgtttgcacggacgggcgagcgatcaggattttagggagcgcaaggcgtgactgctcactgttcgtttgcttcatcttcttcttggtaccgtcagtgagagcaaggactgcatccacaatagcaaccaatggcgagaaaggtggcaccgatggagcggagaacatcaacaccaacggtggcaactacaacaataatgcctcatcctcaggagcgttctctaggtcgagggaggttctagcgccaatttggtgtagaagaagaaccctcatgcatcccacaacaacaacaacaatgtcaaacctgacatcaaacccaaggctacaaccaattttaagaagaaaggcaagagaaaggcaaagggcaactgctttgtgtgtggtaagcctgggcattaggccaaggattgtcctgagcgcaaggacaaaaagtctgcaaacatggtcattatcgagggcggaggaacat

SEQ ID NO: 23353 - DNA, 6101 bp, Oryza sativa
  Clone ID: TF_OsC1517_1130
ctaagggagcagctccgggaactcggcgcggagaagatcttctcgctcccaggttgcctcatcttcagaatgattgctccattggaccttgtagaacttgacggtcttccttcgagtctgacgttctgcctcttcaagaaccttgatcggtctttccttgtaggtcagattcttttccagctcgatattacccaggggaacttgttcttctagaactcgaagacatttctttaactgggatacgtggaatacgttgtgcacatctgcgagaccttcaggtaactcaagttgataagccacttcgccacgtctggcggttacgaggtaggggccgatgtagcggggtgctaacttgccggacatcccaaacctcataccacggaggggtgatacccgcaggtacacatgatctcctttttcgaactcaaggtcacgcctccgattgtcagcgtaatttttctgacggttctgcgctgtctttaagcgttctcggattagcttaacttgttcttctgctgacttgagtatgtcaggaccgaataccagcgcttcgcccacctcattccagcacaagggagtgcggcactttcttccgaacattgcctcattcggcgacatctgaatgctggcctgataactgttgttgtatgagaactcagcatacggcaaacaatgatcccaagtgccttcgaaatccagggcacacgcacgtagcatgtcttctaggatttggtttaccctttctgtctgaccatcggtctgcggatggtaggccgtactaaaatttagatcggttccgagggcttcatgcaactgcttccagaaccttgaggtgaactgagtgcctcggtctgacacaatcttcttgggacagccaaatctacatacgacatgggtcatgtagagttctgctagtttctttccatcaaaggtggttttcactggcacgaaatgagctgatttcgtgagtcggtccacgattacccaaatggagtcgtacccgccaggggttcttggcaaaccggtgatgaaatccattccgatctcttcccatttccactcgggaatcggtaggggttgcagcagaccagctggcctctgatgttctgccttgactctttggcaaatgtcacacaaggctacgtattctgcgacatctcgcttcattccagcccaccagaagtatgccttgatatcttggtacatcttcgtacttcctggatgaatggagtaggcggactcatgagcttcttttaggatgagatctcttaactcctttttggccggtacacagatgcatggaccgcaccaaactgtgccttggtcgtctatggagaaatcggtgtctttcttctcttgtattctttttattaactcctttatcccttcgtcgtctttctgagcttcccggatttgcgactctagggtaggctgtactgtcaagctggcagggacacctgactgtaccacggtcagcctcaacttctccaattctctgcacaggcgatcttggtcaggccatatttgagctacgttgcaatagactttgcgacttagcgcatcagcgaccacgttagctttactggggtgataatgaattccaagatcgtaatcttcacatctgttcccgattaaatagtgcctccagatcttaagagcatgaaccacagctgccaactcgagatcatgggtgggataattgacttcatgaggcctgagctgcctggatgcataagccacaacctttcgttcttgcattaggacacatcctaagccttgtcttgatgcatcacagaagatctcgaaatgctttcggatatctggcaaggtgagaactggggcagtggtcaaccttttcttcatttcttgaaagctgtcttcacaggctgcagaccattgaaatttcttttccttctttaacagctcggtcatgggtctggctagtttagagaatccttcaatgaatcttcgataatatccagctaagccaaggaagctgcgaatctctgacacattcttgggcgggttccaagcaagtacagcttcaaccttgctgggatctacttcgacaccgttggaggagatcacgtgtccaagaaatgctactcggtctaaccagaattcgcatttcgagaatttagcgaatagtcgatgatctctgagcttttccattatcagcctcatgtgttcagcatgttcttcctcattcttggagtatatcaggatgtcatcaatgaacaccacgacaaactggtccaggtattccataaagattttgttcattaagttcatgaagaatgctggagcattggtgagtccgaaggacatcactgtgaactcatatagaccataacgcgttgagaaagcggtcttcgggatatcttcagatctgattttcaattggtggtaacctgatctcaagtcaatctttgagaaaactcttgctcctttaagttgatcgaacaaatcgtcaatccgtggcaacgggtacttgttctttatagttacttcattcagggctctatagtcgattaccattctctcagagccatcctttttcttaaccagaagcactggggctccccaaggagatgagctaggtcgcacataacctttactctccaattcttcgatttgtcttttaacttctgctaactcattagctgccattcggtagggtctttttgcaattggtgcggtgcttggcgccagttctatggcgaactcaacgtcgggatattcacagactatgggcaccgactccaaggaggtgacttgtaaacaggttaggatagaccgacttgcggtaggggtgttagaggtaaagcgggcttgctttcctccaggtccttgcaaggtgatggacttttcggcacaatctatctgtcccttgtgcttagccaaccaatccatccctaggatgatgtccaagctttgcgagtctaggactatcggtttggctaggaagtcaacttcctcaattctaaggttaacttccgggcatatttgagttgcccttatattgctcctaggggaatgtactatcattggtacacgtaaattttgggttttccaaccatttcttttcacaaaagcttgtgatatgaaagaatgggaagctcccgaatcaaacagaactattgcgggtacggagttgacagagaacatacccatcacaacgtctggagcatcctgagcggtttcagcttgaatgtggttcatccggcctcgaccaaagttgttggaagcacgagaaccttgtccacttgcctgagagctaggacgagactgagctgccgctggagtaggagttctggcagtgctgccattagcatgccctgagctggtgttggtaggattctgagggcactgtctggcatagtgacccatctggttacaccggaaacactgaactgctgacggtccctgcggtgacttgaaagaggtaacactgtttggcgcagtattgccactaggggcacgctgctgtggctgaggtgccggacggttcatctgaggacgaggggcgtagcctggctggcggttagcctgagtgaccgactggtggtattgcatgggttgaccgtagcgagggcgaggtgcgcctcgggaagaatttccctgatggttagacttgcgtttcttgtattcttcggtagcctcttttctggcatcctcaagtagaagtgccttgttgatcatatgttgaaaagtggggaagtcatgagcaagcaactggagtctcattccaactgcgatccctttcaagaatttcctgatcttcttcttgtctgtgtccacttcctcaggggcgtaccgagccaacttgttgaacatgcttaggtactcattgacactgctgttgccttgcttaagtctgttgaattcctctttcttcatgtcaatagtgctttcaggcacatgagctgcacggaaagccgtagcaaactcatcccaagcaatgttagtgggttcagggtgtgcattgcagtaattctcccaccaatctgcagcaggtcctcttagctggtgagaggtgtagagcgtcttctctaccggagtacactgcactaagttgagttttctatcaacatctttcagccaatcgtcagcctcgacaggctcgatggtctgagagaattctggcggacgagacctcagaaaatctgtcagcttggatctattgttgctcatgtgagggtggccatttccatgcgcattatgctgaaaaccggctacggctgcggctaatccttgcaagatttgtgtctgaactgccattaagtgctgcatgttgttttccacatgaggtggggaagggaggcgttcttctccagaattgtgactggcagtgcggtgagagcggtgggactgttccatctctgcattacgggaagctgtgcgatgcgagcggttgatgcggcggggttgctcaacttctgcgttgcgggaagcagtacggtgcgaacggttgctgtggtgagaccgctcattagctgactcatgattttcttctggctcaactctaccttcctcaaaaacgaagcgggctggtgcacgagctgcacggcgggggcggctagccatctgtcgagggccgacagcagcaagggccactggcggtgggggagctgggtagtcgaaacggaacacggtggaagaaccaacaacacgcttccgcgcagtgcggataaagcgtgggccacggcgggacgaagcaactggggtgtgtccgggggtgtaggaagggctaactgggtttgggtagggggagtacactggtgagtacggcgcacgcgagctgggggagagcgggccactgggagtgcgggcagagccgcgggagctatgggaggacaggtggatggcgtggcagaggcggcctgagtcccaggagacagtgtcaactgaggtgacaccctcctcggccagacgggcctccaaagcggcgtagcggcgggcaagggagcggtaagcctcaaggagtaggtcgtgctgagtggcctgagcctccgaaagctcaaccatgcgagtcagcactggctgagactcgctgtacggacaagggtacctggcgactacgtggccagaaggaaggcgtggaagctgccggaaggcggagcccccgagacggtggctgtagtcgtgggccaggcgacgaagcgcagtccaggagaggtcctggtactcgatctggagagggggcctggccacggtgaagtggtgtgggcgaaggccagctccgtgtatacctccacgagggtaaaggtacacagagagctcacagcgagggggaacacggtccacggagtaccccgtgtactcgggacacgagaagccaaggaaacgggcgaggtcacgaagctgagcgatgtggtgaccctcaccaaaaccgtgggaactgaagctggcgttcactgccatcgtagctggcttgctcctggaagaactcctcatctgcaggatccgcttcatcttcttcagcaactgagggggggattacttatatagagcaagggtgattaacctctgcagagggggtacactttacccacacgacattactaacccggatcacccagcccgtggggatcagccacgtcgggagacctccaagctttcatgacaaggcatttccaaagccgacacaggtttaccatatgccgacgagaggggtcccagaccaacaacagttttacccaagatgtttatcatattttaagtttgaaggcgaccgtcgatactcgcacagagtgcacgaataccgaagcgtgactgggtggctataagggaacatggccgaggtggcgccgacgtggcgcctacgtggcagccatgcgggccggcgggaggtagacgacgacgccggccggaacggacggcggacgacagcggcgagcggcggagcgaaccacggcgatacaggcaaaagcgagcacaccgggtggttgcacgagacgaggggagacgagccaacggctcggattcgccggagggagcttgacggcggcgaattgcggcggcggcaaccggcggcgagggaaggggaaacggcgacgaggtcacgaggggccgattcctggcggcgagagcatctacgg

SEQ ID NO: 23354 - DNA, 3600 bp, Oryza sativa
  Clone ID: TF_OsC1517_1149
ttagactttgtagagcttgatggtcttccttcgagtctgacgttctgcctcttcaagaaccttgatcggtctttccttgtaggtcagattcttttccagctcgatattacccaggggaacttgctcttctggaactcgaagacatttctttaactgggatacgtggaacacgttgtgcacgtttgcgagaccttcaggtagctcaagctgataagccacttcgcaccgtctggcggttatgaggtaggggccgatgtagcggggtgctaacttgccggacatcccaaaccttctcataccacggaggggtgatacccgcaggtacacatgatctcctttttcgaactcaaggtcacgcctccgattgtcagcgtaattcttctgacggttctgtgctgtcttcaaacgttcccgtatcagcttaacttgttcttctgctgacttgagtatgtcaggaccgaataccaatgctttgcccacctcattccagcacaatggggtgcggcactttcttccgaacattgcctcattcggcgacatctgaatgctggcctgataactgttgttgtatgagaactcggcatacggcaaacaacgatcccaagtgccttcgaaatccaaggcacacgcacgtagcatgtcttctaggatttggtttaccctttcggtctgaccatcggtctgcggatggtaggctgtactaaaattcagaaccttgaggtgaactgagtgcctcggtctgacacaattttcttgggacagccaaatccaaatggagtcgtacccgttgggggttcttggcaaaccggtgatgaaatccattccgatctcttcccatttccactcgggaatcggtaggggttgcagcagaccagctggcctctgatgttccgccttgactctttggcaaatgtcacacagggctacgtattctgcgacgtctcgcttcattccagcccaccagaagtatgccttgatatcttggtacatcttcgtacttcctgggtgaatggagtaggcggactcatgagcttcctttaggatgagatctcttaactccttcttggccggtacacagatgcgtggtccgcaccaaactgtgccttgatcgtctatggagaaatttgtgtctttcttttcctgtattctttttattaattcttttatcccttcgtcgtctttctgagcctcccggatttgcgactctagggtaggctgtactgtcaagctggcagggacacctgactgtatcacggtcagtcttaacttctccaattctctgcacaggtgatcttggtcaggccgtatttgagctacattgcaataggccttgcgacttagcgcatcagcgaccacgttggctttaccaggatgatagtggattccaagatcgtaatccttgattagttccaaccatcttctctgtctcatatttaactcggtctgagtgaagatatacttaagacttttgtgatcggtgtatacttcacatctgttcccgattaaatagtgcctccagatcttaagagcatgaaccacggctgccaactcgagatcatgggtgggataattggcttcatgaggcctgagctgcctggatgcataggccacaaccttttgttcttgcattaggacacatcctaagccttgtcttgatgcgtcacagaagatctcgaaatattttcggatatctggcaaggtgagaactggggcagtggtcaactttttcttcaattcttggaagctgtcttcacaggcgttggaggaaatcacgtgtccaagaaatgctactcggtccaaccagaattcgcatttcgagaatttagcgaatagttgatgatctctgagcttttccattatcagcctcaggtgttcagcatgttcttcctcgttcttggagtatatcaggatgtcatcgatgaacaccacgacaaactggtctaggtattccatgaagattttgttcattaagttcatgaagaatgctggagcattagtgagtccgaaggacataactgtgaactcatatagaccataacgcgttgagaaagtggtcttcgggatatcttcagatctgattttcagttggtggtaacctgacctcaagtcaatttttgagaaaactcttgctcctttaagttgatcgaataaatcgtcaatccgtggcaacgggtacttgttctttatagttacttcattcagggctctatagtcgattaccattctctccgagccatcctttttcttaaccagaagtactggggctccccaaggggatgagctaggtcgcacataacctttactttccagttcttcgatttgtcttttaacttctgctaactcattagctgccatttggtagggtctttttgcaattggagctgtgcctggtgccagttctatggcgaactcgatctctcggtctggtggcattcttgttaattcttccggaaatacgtcgggatattcacagactatgggcaccgactccaaggaggtgacttgtaaacaggttaggatagaccgacttgcggtaggggtgttaggggtaaagcggacttgctttcctccaggtcccatcacaacgtctggagcatcctgagcggtttctgcttgaatgtgattcacacggcctcgaccaaagttgttggaagcacgtgaaccttgtccacttgcctgagagctaggacgagactgagctgccgctggagtaggagttctggcagtgctaccattagcatgccctgagttggtgttggtaggattctgaggacactgtctagcatagtgacccatctggttgcaccggaaacactgaactgctgacggtccctgcggtgacttgaaagaggtaacactgttaggcgcagtatcgctactaggggcacgctgctgtggctgaggtgccggacggtttatctgaggacgaggggcgtagcctggctggcggttagcctgggtgaccgactggtggtattgcatgggttgaccgtagcgagggcgaggtgcgcctcgggaagaatttccctgatggttagacttgcgtttcttgtattcttcggtagcctcttttctggcatcctcaagtagaagtgccttgttgatcatatgttgaaaagtggggaagtcatgagcaagcaactggagtctcattccaactgcgattcctttcaagaatttcctgatcttcttcttatctgtgtctacttcctcaggggcgtaccgagccaacttgttgaactgacttaggtactcattgacactgctgttgccttgcttaagtctgttgaattcttctttcttcatgtcaatagtgatttcaggcacatgagctgcacggaaagccgtagcgaactcatcccaagcaatgttagtgggttcagggtgtgcattgcagtaattctcccaccaatctgcggcaggtccacttagttggtgagaggcgtagagcgtcttctcaacaggagtacactgcactaagttgagttttctatcaacatctttcaaccaatcgtcagcctcgacgggctcgacggtctgagagaactctggcggacgagacctcagaaagtctgtcagcttggatctgttgttgcccat

SEQ ID NO: 23355 - DNA, 4515 bp, Oryza sativa
  Clone ID: TF_OsC1517_1275
ctaagggagcagctccggaaactcggcgcggagaagatcttctcgttccctggttgcctcatcttcagaatgattgctccattggactttgtagaacttgatggtcttccttcgagtctgacgttctgcctcttcaagaaccttgatcggtctttccttgtaggtcagattcttttccagctcgatactacccaggggaacttgctcttctggaactcgaagacatttctttaactgggatacgtggaacacgttgtgcacatctgcgagaccttcaggtagctcaagctgataagccacttcgccacgtctggcggctatgaggtaggggccgatgtagcggggtgctaacttgccggacatcccaaaccttctcatacctcggaggggtgacacccgcaggtacacatgatctccttttttgaactcaaggtcacgtctccgattgtcagcgtaatttttctgacggttctgcgctgtcttcaagcgttctcggatcagcttaacttgttcttctgctgacttgagtatgtcaggaccgaataccagggcttcgcccacctcattccagcacaagggggtgcggcactttcttccgaacattgcctcatttggcgacatctgaatactagcctggtaactgttgttgtatgagaactcagcatacggcaaacaacgatcccaagtgccttcgaaatccaaggcacacgcacgcagcatgtcttctaggatttggtttaccctttctgtctgaccatcggtctgtggatggtaggccgtactaaaatttagatcagttccgagagtttcatgcaactgcttccagaaccttgaggtgaactgagtgcctcggtccgacacaattttcttgggacagccaaatctacatacgacatgagtcatgtagagttctgccagtttctttccatcataggtggttttcactggcacgaaatgagctgatttcgtgagtcggtccacgattacccaaatggagtcatacccgcagggggttcttggcaaaccggtgatgaaatccattccgatctcttcccatttccactcgggaattggtaggggttgtagcagaccagctggcctctggtgctctgccttgactctttggcaaatgtcacacaaggctacgtattctgcgacgtctcgcttcattccagcccaccagaagtatgccttgatatcttggtacatcttcgtacttcctggatgaatggagtaggcggactcatgagcttcctttaggatgagatctcttaactccttcttggccggtacacagatgcgtggaccgcaccaaactgtgccttgttcgtctatggagaaattggtgtctttcttctcccgtattctttttattaactcttttatcccttcgtcatctttctgggcctcccggatttgtgattctagggtaggctgtactgtcaagctggcagggacacctgactgtaccacggtcagccttaacttctccaattctctgcacaggtgatcttggttaggccgtgtttgggctacattgcaataggccttgcgacttagcgcatcagcgaccacgttagctttaccgggatgataatgaattcccagatcgtaatccttgattagttccaaccatcttctctgtctcatatttaactcggtctgtgtgaagatatacttaagacttttgtgatcggtgtatacttcacatctgttcccgattaaataatgcctccagatcttaagagcatgaaccatggctgccaactcgagatcatgggtgggataattgacttcatgaggcctgagctgcctggatgcgtaggccacaacctttcgttcttgcattaggacacatcctaagccttgtcttgatgcgtcacagaagatctcgaaatcttttcggatatctggcaaggtgagaactggtgcagtggtcaaccttttcttcatttcttgaaagctgtcttcacaggctgcagaccattgaaatttcttttctttctttaacagctcggtcataggtctggctagcttagagaatccttcaatgaatcttcgataatatcccgctaagccaaggaagctgcggatctctgacacgttcttgggcgggttccaagcaagtacagcttcaaccttgctgggatctacttcgacaccgttggaggaaatcacgtgtccaagaaatgctactcggtccaaccagaattcgcatttcacgacaaactggtccaggtattccatgaagattttgttcattaagttcatgaagaacgctggagcattggtgagtccgaaggacattactgtgaactcgtatagaccataacgcgttgagaaagcggtcttcggaatatcttcagatctgattttcaattggtggtaacctgacctcaagtcaatttttgagaagactcttgctcctttaagttgatcgaataaatcgtcaatccgtggcaacgggtacttgttctttatagttacttcattcagggctctatagtcgattaccattctctcagagccatcctttttcttaaccagaagcactggggctccccaaggggatgagctaggtcgcacataacctttactctccaactcttcgatttgtcttttgacttctgctaactcattagtcgttaattcttctggaaatacgtcaggatattcactgactatgggcaccgactccaaggaggtgacttgcaaacaggttaggatagaccgacttgcggtaggggtgttaggggtaaagcggacttgctttcctccaggtccttgcaaggtgatggacttttcggcacaatctatctgtcctttgtgcttagccaaccaatccatccctaggatgatgtccaagctttgcgagtctaggactatcggtttggctaggaagtcaacttcctcaattctaaggttaacttccgggcatatttgaattgcccttatattcctcccaggggaatgtactatcattggtacacgcaaattttgggttttccaaccgtttcttttcacaaaagcttgtgatatgaaagaatgggaagctcctgaatcaaatagaactattgcgggtacggagttgacagagaacatacccatcacaacgtctggagcatcctgagcggtttcagcttgaatgtgattcacacgtcctcgaccaaagtggttggaagcacgagaaccttgtccacttgcctgagagctaggacgagactgagctgccgctggagtaggagttctggcggtgctgccattagcatgccctgagttggtgttggcaggattctgaggacactgtctagcatagtgacccatctggttgcaccggaaacactgaactgctgacggtccctgtggtgacttgaaagaggtaacactgtttggcgcagtattgccactaggggcacgctgctgtggcggaggtgccggacggtttatctgaggacgaggggcgtagcctggctggcggttagtttgagtgatcgactggtggtattgcatgggttgaccgtagcgagggcgaggtgcgcctcgggaagaatttccctgatggttagacttgcgtttcttgtattcttcggtagcctcttttctggcatcctcaagcagaagtgccttgttgatcatatgttgaaaagtggggaagtcatgagcaagcaactggagtctcattccaactgcgattcccttcaagaatttcctgatcttcttcttatcggtgtctacttcctcaggggcgtaccgagccaacttgttgaactgacttaggtactcattgacactgttgttgccttgcttaagtctgttgaattcttctttcttcatgtcaatagtgctttcaggcacatgagctgcacggaaagccgtagcaaactcatcccaagcaatgttattgggttcaggatgtgcattgcagtaattttcccaccaatctgcggcaggtcctcttagctggtgagaggcgtagagcgtcttctcaacaggagtacactgcactaagttgagttttctatcaacatctttcaaccaatcgtcagcctcgacgggctcgacggtctgagagaactctggcggacgtgacctcagaaagtctgtcagcttggatctattgttgcccacgtgagggtggccatgcacattatgctgaaaactggctatggctgtggttagtccttgcaagatttgtgtctgaactgccattatgtgttgcatgttgttttccacatgaggtggggaagggaggcgttcttctccagaattgtgactgacagtgcagtgagagaggtgagactgctccatctctgcatcacgggaaactgtgcgatgcgagcggctgctgcggcggggttgctcaacctctgcgttgcgggaaacagtacggtgcgaacggttgctgcggtgagactgctcattagctgattcatgatttgcttctgcttcaactctaccatcttcaaaaccaaagcgggctggtgcacgagctgcacggcgggggcggctagccat

SEQ ID NO: 23356 - DNA, 5547 bp, Oryza sativa
  Clone ID: TF_OsC1517_1307
ctaagggagcagctccggaaactcggcgcggagaagatcttctcgttcccaggttgcctcatcttcagaatgattgctccattggactttgtagaacttgatgatcttccttcgagtctgacgttctgcctcttcaagaaccttgaacggtctttccttgtaggtcagattcttttccagctcgatattacccaggggaacttgctcttctggaactcgaagacatttctttaactgggatacgtggaacacgttgtgcacatctgcgagaccttcaggtagctcaagctgataagccacttcgccacgtctggcggttatgaggtaggggccgatgtagcgggctgctaacttgccggacatcccaaacctcctcataccacggaggggtgatactcgcaggtatacatgatctcctttttcgaactcaaggtcacgcctccgattgtcagcgtaattcttctgacggctctgtgctgtcttcaaacgttctcggatcagcttaacttgttcttctgctgacttgagtatgtcaggaccgaataccagtgcttcgcccacctcattccagcacaagggagtgcggcactttcttccgaacattgcctcattcggcgacatcttaatgctggcctgataactgttgttgtatgagaactcagcatacggcaaacaacgatcccaagtgccttcgaaatccaaggcacacgcacgtagcatgtcttctaggatttggtttaccctttcggtctgaccatcggtctgcggatggtaggctgtactaaaatttagatcagttccgagggcttcatgcaactgcttccagaaccttgaggtgaactgagtgcctcggtctgacacaattttcttgggacagccaaatctacatacgacatgggtcatgtagagttctgctagtctctttccatcataggtggttttcactggcacgaaatgagctgatttcgtgagtcggtccacgattacccaaacggagttgtacccgctgggggttcttggcaaaccggtgatgaaatccattccgatctcttcccatttccactcgggaatcggtaggggttgcagcagaccagctggcctctgatgctctgccttgactctttggcaaatgtcacacaaggctacgtattctgcgacatctcgcttcattccagcccaccaaaagtatgccttgatatcttggtacatcttcgtacttcctggatgaatggagtaagcggactcatgagcttcctttaggatgagatctcttaactccttcttggccggtacacagatgcgtggaccgcaccaaactgtgccttgatcgtctatggagaaattggtgtctttcttctcctgtattctttttattaactcttttatcccttcgtcatctttctgagcctcccggatttgcgattctagggtaggctgtactgtcaagctggcagggactcctgactgtaccacggtcagccttaacttctccaattctctgcacagatgatcttggtcaggccgtatttgagctacattgcaataggccttgcgacttagcgcatcagcgaccacgttggctttaccaggatgatagtggattccaagatcgtaatccttgattagttccaaccatcttctctgcctcatatttaactcggtctgggtgaagatatatttaagacttttgtgatcggtgtatacttcacatctgttcccgattaaataatgcctccagatcttaagagcatgaaccacggctgccaactcgagatcatgggtgggataattgacttcatgaggcctgagctgcctggatgcataggccacaacctttcgttcttgcattaggacacatcctaagccttgtcttgatgcgtcacagaagatctcaaaatcttttcggatatctggcaaggtgagaactggtgcagtggtcaaccttttcttcatttcttgaaagctgtcttcacaggctgcagaccattgaaatttcttttccttctttaacagctcggtcataggtctggctagcttagagaatccttcaatgaatcttcgataatatcccgctaagccaaggaaactacggatctctgacacgttcttgggcgggttccaagcaagtacagcttcaaccttgctgggatctacttcgacaccgttggaggaaatcacgtgtccaagaaatgctactcgatctaaccagaattcgcatttcgagaatttagcgaatagttgatgatctctgagcttttccattatcagcctcaggtgttcagcatgttcttcctcgttcttggagtatatcaggatgtcatcgatgaacaccacgacaaactggtccatgtattccatgaagattttattcattaagttcatgaagaatgctggagcattggtgagtccgaaggacataactgtgaactcatatagaccataacgcgttgagaaagcggtcttcgggatatcttcagatctgattttcagttggtggtaacctgacctcaagtcaatttttgagaaaactcttgctcctttaagttgatcgaataaatcgtcaatccgtggcaacgggtacttgttctttatagttacttcattcagggctctatagtcgattaccattctctcagagccatcctttttcttaaccagaagcactggggctccccaaggggatgagctaggtcgcacataacctttactttccagttcttcgatttgtcttttaacttctgctaactcattagctgccattcggtagggtctttttgcaattggagctgtgcctggtgccagttctatggcgaactcaacctctcggtctggtggcattctcgttaattcttctgggaatacgtcgggatattcacagactatgggcaccgactccaaggaggtgacttgtaaacaggttagaatagaccggcttgcggtaggggtgttaggggtaaagcggacttgctttcctccaggtccttgcaaggtgatggacttttcggcacaatctatctgtcctttgtgcttagccaaccaatccatccctaggatgatgtccaagctttgcgagtctaggactatcggtttggctaggaagtcaacttcctcaattctaaggttaacttccgggcatatttgagttgcccttatattcctcccaggggaatgtactatcattggtacacgcaaattttgggttttccaaccatttcttttcacaaaagcttgtgatatgaaagaatgggaagctcctgaatcaaatagaactattgcgggtacggagttgacagagaacatacccatcacaacgtctggagcatcctgagcggtttcagcttgaatgtgattcacacgtcctcgaccaaagtggttggaagcacgagaaccttgtccacttgcctgagagctaggacgagactgagctgccgctggagtaggagttctggcggtgctgccattagcatgccctgagttggtgttggtaggattctgagggcactgtctagcatagtgacccatctggttgcaccggaaacactgaactgctgacggtccctgtggtgacttgaaagaggtaacgctgttaggcgcagtattgccactaggggcacgctgctgtggctgaggtgccggacggtttatctgaggacgaggggcgtagcttggctggcggttagcctgagtgaccgactggtggtattgcatgggttgaccgtagcgagggcgaggtgcgcctcgggaagaatttccctgatggttagacttgcgtttcttgtattcttcggtagcctcttttctggcatcctcaagcagaagtgccttgttgatcatatgttgaaaagtggggaagtcatgagcaagcaactggagtctcattccaactgcaattcccttcaagaatttcctgatcttcttcttatctgtgtctatttcctcaggggcgtaccgagccaacttgttgaactgacttaggtactcattgacactgctattgccttgcttaagtctgttgaattcttctttcttcatgtcaatagtgctttcaggcacatgagctgcacggaaagccgtagcaaactcatcccaagcaatgttagtgggttcaggatgtgcattgcagtaattctcccaccaatctgcagcaggtcctcttagctggtgagaggcatagagcgtcttctcaacaggagtacactgcactaagttgagttttctatcaacatctttcaaccaatcgtcagcctcgacgggctcgacggtctgagagaactctggcggacgtgacctcagaaagtctgtcagcttggatctattgttgcccacgtgagggtggccatttccatgcgcattatgctgaaaactggctatggctgtggttagtccttgcaagatttgtgtctgtactgccattatgtgttgcatgttggtttccacatgagatggggaagggaggcgttcttctccagaattgtgactggcagtgcggtgagactgttccatctttgcatcacgggaaactgtgcgatgcgagcggctgctgcggcggggttgctcaacctctgcgttgcgggaaacagtacggtgcgaacggttgctgtggtgagactgctcattagctgattcatgatttgcttctgcttcaactctaccatcttcaaaaccaaagcgggctggtgcacgagcggcatggcgggggcggctagccatctgtcgagggccggcagcagcacgggccgctgacggtgggggagctgggtagtggaaacggaacacggtggaagaaccaacaacacgcttccgcgcggtgcggataaagcgtgggccacggcgggaggaagcaactggggtgtgtccgggggtgtaggaagggctaactgggtgtgggtagggggagtacactggtgagtacggcgcacgcgagctgggggagcgcgggccactgggagtgcgggcagagccgcgggagctgtgggaggacaggtggctggcgtggcagaggcggcctgagtcccaagagatagtgtcaactgaggtgacaccctcctcggccagacgggcctccaaagcggcgtagcggcgggcaagggagcggtaagcctcaaggagtaggtcgtgctgagtggcctgagcctccgaaagctcgaccatgcgagtcagcactggctgagactcgctgtacggacaagggtacctggcgtctgagtggccagagggaaggcgtggaagctgccggaaggcggaacctccgagacggtggctgtagtcgtgggccaggcgacgaagcgcagtccaggagaggtcctggtacgcgatctggagagtgggcctggccacagtgaagtggtgggggcgaaggccagctccgtgtatacctccacgggggtaaaggtacaccgagagctcacagtgagggggaacacggtccacggagtaccccgtgtactcgggacacgagaagccaaggaaacgggagaggtcacgaagctgagcgacgtggtgaccctcaccaaaaccgtgggaactgaagctggcgttcactgccat

SEQ ID NO: 23357 - DNA, 5208 bp, Oryza sativa
  Clone ID: TF_OsC1517_1333
ctaagggagcagctccgggaactcggcgcggagaagatcttctcgctcccaggttgcctcatcttcagaatggttgctccattggactttgtagaacttgatggtcttccttcgagtctgacgttctgtctcttcaagaaccttgatcggtctttccttgtaggtcagattcctttccagctcgatattacccagggggacttgctcttctggaactcgaagacatttctttagctgggatacgtggaacacgttgtgcacatctgcgagaccttcaggtagctcaagctgataagccacttcgccacgtctggcggttatgaggtaggggccgatgtagcggggtgctaacttgctggacatcccaaaccttctcataccacggaggggtgatacccgcaggtatacatgatctcctttttcgaactcaaggtcacgcctccgattgtcagcgtaattcttctgacggctctgtgctgtcttcaaacgttctcggatcagcttaacttgttcttctgctgacttgagtatgtcaggaccgaataccagtgcttcgcccacctcattccagcacaagggagtgcggcactttcttccgaacattgcctcattcggcgacatcttaatgctggcctgataactgttgttgtatgagaactcagcatacggcaaacaacgatcccaagtgccttcgaaatccagggcacatgcacgtaacatgtcttctaggatttggtttaccctttcagtctgaccatcggtgtgcggatggtaggccgtactaaagtttagatcggttccgagggcttcatgcaattgtttccagaaccttgaggtgaactgagtgcctcggtctgacacaatcttcttgggacagccaaatctacatacgacatgggtcatgtagagttctgctagtttctttccatcaaaggtggttttcactggcacgaaatgagctgatttcgtgagtcggtccacgattacccagatggagtcgtacccgctaggggttcttggcaaatcggtgatgaaatccattccgatctcttcccatttccactcgggaatcggtaggggttgcagcagaccagctggcctctggtgctctgccttgactctttggcaaatgtcgcacagggctacgtattctgcgacatctcgcttcattccagcccaccagaagtacgccttgatatcttggtacatcttcgtacttcctggatgaatggagtaggcggactcatgagcttcctttaggatgagatctcttaactccttcaaactgtgccttgatcgtctatggagaaattggtgtctttcttctcctgtattcctttttattaattcttttatcccttcgttgtctttctgagcctcccggatttgcgactctagggtaggctgtactgtcaagctggcagggacacctgactgtaccacggtcagccttaacttctccaattctctgcacaggtgatcatggtcaggccgtatttgagctacattgcaataggccttgcgacttagcgcatcagcgaccacgttggctttaccaggatgataatggattccaagatcgtaatccttgattagttccaaccatcttctctgtctcatgtttaactcggtctgtgtgaagatatacttaagacttttgtgatcggtgtatacttcacatctgttcccgattaaatagtgcctccagatcttaagggcatgcaccacggctgccaactcgagatcatgggtgggataattgacttcatgaggcctgagctgcctggatgcataggccacaacctttcgttcttgcattaggacacatcctaagccttgtcttgatgcatcacagaagatctcgaaatcttttcggatatctggcaaggtgagaactggggcagtggtcaaccttttcttcatttcttgaaagctgtcttcacaggatgcagaccagtgaaatttattttccttctttaacagctcggtcataggtctggctagcttagagaatacttcaatgaatcttcgataatatccagctaagcctaggaagctgcgaatctctgacacattcttgggcgggttccaagcaagtacagcttcaaccttgctgggatctacttcgacaccgtgggaggagatcacgtgtccaagaaatgctactcgatctaaccagaatttgcatttcgagaatttagcgaatagttgatgatctctgagcttttccattatcagccttaggtgttcagcgtgttcttcctcattcttggagtatatcaggatgtcatcgatgaacaccacgacaaactggtccaggtattccataaagattttgttcattaagttcatgaagaatgctggagcattggtgagtccgaaggacattactgtgaactcatatagaccataacgcgttgagaaagcggtcttcgggatatcttcagatctgattttcagttggtggtaacctgacctcaagtcaatttttgagaaaactcttgctcctttaagttgatcgaataaatcgtcaatccgtggcaacgggtacttgttctttatagttacttcattcagggctctatagtcaattaccattctctcagagccatcctttttcttaaccagaagcactggggctccccaaggggatgagctaggtcgcacataacctttactctccaactcttcgatttgtcttttaacttctgctaactcattagctgccattcggtagggcctttttgcaattggagccgtgcctggtgccagttctatagcgaactcaatctctcggtctggtggcatactcgttaattcttctgggaatacgtcgggatattcacagactatgggcaccgactccaaggaggtgacttgtaaacaggttaggatagaccgacttgcggtaggggtgttaggggtaaagcggacttgctttcctccaggtccttgcaaggtgatggacttttcggcacaatctatctgtcctttgtgcttagccaaccaatccatacctaggatgatgtccaagctttgcgagtctaggactatcggtttggctaggaagtcaacttcctcaattttaaggttaacttccgggcatatttgagttgcccttatattccttccaggggaatgtactatcattggtacacgtaaattttgggttttccaaccatttcttttcacaaaagcttgtgatatgaaagaatgggaagctcctgaatcaaacagaactattgcgggtacggagttgacagagaacatacccatcacaacgtctggagcatcctgagcggtttcagcttgaatatggttcacacgtcctcgaccaaagtggttggaagcacgtgaaccttgtccacttgcctgagagctgggacgagactgagctgtcgctggagtaggagttctggcagtgctgccattagcatgtactgagttggtgttggtaggattctgaggacactgtctggcatagtgacccatctggttgcaccggaagcactgaactgctgacggtccctgtggtgacttaaaagaggtaacactgtttggcgcagtattgccactaggggcacgctgctgtggctgaggtgccggatggttcatctgaggacgaggggcgtagcctggctggcggttagcctgagttaccgactggtgatattgcatgggctgaccgtagcgagggcgaggtgcgcctcgggaagaatttccctgatggttagacttgcgtttcttgtattcttcgatagcctcttttctggcatcctcaagtagaagtgccttgttgatcatatgttgaaaggtgggaaagtcatgagcaagcaactggagtctcattccaactgcgatccccttcaaaaatttcctgatcttcttcttgtctgtgtccacttcctcaggggcgtaccgagccaacttgttgaacatacttaggtactcattgacactgctgttgccttgcttaagtctgttgaattcttctttcttcatgtcaatagtgctttcaggcatatgagctgcacggaaagccgtagcaaactcatcccaagcaatgttagtgggttcagggtgtgcattgcagtaattctcccaccaatctgcagcgggtcctcttagctggtgagaggcgtagagcgtcttctcaacaggagtacactgcactaagttgagttttctatccacatctttcagccaatcgtcagcctcgacgggctcgacggtctgagagaactctggcggacgagacctcagaaagtctgtcagcttggatctattgttgctcatgtgagggtggccatttccatgcgtattatgctgaaaaccggctatggctgcggctaatccttgcaagatttgtgtctgtcgagggccggcagcagcacgggccgctggcggtgggggagctgggtagtggaaacggaacacggtggaagaaccaacaacacgcttccgcgcggtgcggataaagcgtgggccacggcgggaggaagcaactggggtgtgtccgggggtgtaggaagggctaactgggtgtgggtagggggagtacactggtgagtacggcgcacgcgagctgggggagcgcggaccactgggagtgcgggcagagccacgggagctgtgggaggacaggtggctggcgtgacagaggcggcctgagtcccaggagatagtgtcaactgaggtgacaccctcctcggccagacgggcctccaaagcggcgtagcggcgggcaagggagcggtaagcctcaaggagtaggtcgtgctgagtggcctgagcctccgaaagctcaaccatgcgagtcagcactggctgagactcgctgtacggacaagggtacctggcgtctgagtggccagaaggaaggcgtggaagctgccggaaggcggagcctccgagacggtggctgtagtcgtgggccaggcgacgaagcgcagtccaggagaggtcctggtacgcgatctggagagtgggcctggccacggtgaagtggtgtgggcgaaggccggctccgtgtatacctccacgggggtaaaggtacacagagagctcacagtgagggggaacacggtccacggagtaccccgtgtactcgggacacgagaaaccgaggaaacgggcgaggtcacgaagctgagcgacgtggtgaccctcaccaaaaccgtgggaactgaagctggagttcactgccat

SEQ ID NO: 23358 - DNA, 5571 bp, Oryza sativa
  Clone ID: TF_OsC1517_1376
ctaagggagcagctccgggaactcggcgcggagaagatcttctcgctcccaggttgcctcatcttcagaatgattgctccattggactttgtagaacttgacggtcttccttcgagtctgacgttctgcctcttcaagaaccttgatcggtctttccttgtaggtcagattcttttccagctcgatattacccaggggaacttgctcttctggaactcgaagacatttctttaactgggatacgtggaacacgttgtgcacatctgcgagaccttcaggtaactcaagctgataagccacttcgccacgtctggcggttatgaggtaggggccgatgtagcggggtgctaacttgccggacatcccaaacctcctcataccatggagaggcgatacccgcaggtatacatgatctcctttttcgaactcaaggtcacgcctccgattgtcggcataactcttctgacggttctgcgctgtctttaaacgttctcggatcagcttaacttgttcttctactgccttaagtatgtcaggaccgaataccagcgcttcgcccacctcattccagcacaagggagtgcggcactttcttccgaacattgcctcattcggcgacatctgaatgctggcctgataactgttgttgtatgagaactcctcatacggcaaacaacgatcccaagtgccttcgaaatccagggcacacgcacgtagcatgtcttctaggatttggtttaccctttcggtctgaccatcggtctgcgggtggtaggccgtactaaaatttagatcggttccaagggcttcatgcaattgcttccagaaccttgaggtgaactgagtgcctcggtctgacacaatcttgttgggacagccaaatctacacacgacatgggtcatgtagagttctgctagtttctttccatcaaaggtggttttcactggcacgaaatgagctgatttcgtgagtcggtccacgattacccagatggagtcgtacccgctaggggttcttggcaaaccggtgatgaaatccattccgatctcttcccatttccactcgggaatcggtaggggttgcagcagaccagctggcctctgatgttctgccttgactctttggcaaatgtcacacaaggctacgtattctgcgacatctcgcttcattccagcccaccagaagtatgccttgatatcctggtacatcttcgtacttcctggatgaatggagtaggcggactcatgagcttcctttaggatgagatctcttaactccttcttggccggtacacagatgcgtggaccgcaccaaactgtgccttgatcgtctatggagaaattgatgtctttcttctcctgtattctttttattaactcttttatcccttcgtcgtctttctgagcttcccggatttgcgactctagggtaggctgtactgtcaagctggcagggacacctgactgtaccacggtcagcctcaacttctccaattctctgcacaggcgatcttggtcaggccgtatttgagctacattgcaataggccttgcgacttagtgcatcagcgaccacattagctttaccggggtggtaatgaattccaagatcgtaatccttgattagttccaaccatcttctctgcctcatatttaactcggtctgagtgaagatgtacttaagacttttgtgatcggtgtatacttcacatctgttcccgattaaatagtgcctccagatcttaagagcatgaaccatggctgccaactcgagatcatgggtgggataattgacttcatgaggcctgagctgcctggatgcataggccacgacttttcgttcttgcattaggacacatcctaagccttgtcttgatgcatcacagaagatctcaaaatcttttcggatatctggcaaggtgagaactggggcagtggtcaaccttttcttcatttcttgaaagctttcttcacaggctgcagaccattgaaatttcttttccttctttaacagctcggtcataggtctggctagcttagagaatccttcaatgaatcttcgataatatctagctaagccaaggaagctgcgaatctctgacacattcttgggcgggttccaagcaagtacagctctaaccttgctgggatctacttcgacaccgttggaggagatcacgtgtccaagaaatgctactcggtctaaccagaattcgcatttcaagaattttgcaaatagttgatgatctctgagtttttccattatcagcctcaggtgttcagcatgttcttcctcattcttggagtatatcaggatatcatcgatgaacaccatgacaaactggtccaggtattccataaagattttgttcattaagttcatgaagaacgctggagcattggtgagtccgaaggacattactgtgaactcatatagaccataacgcgttgagaaagcggtcttcgggatatcttcagatctgattttcagttggtggtaacctgatctcaagtcaatttttgagaaaactcttgctcctttaagttgatcgagcaaatcgtcaatccgtggcaacgggtacttgttctttatagttacttcatttagggctctatagtcgattaccattctctcagagccatcctttttcttaaccagaagcactggggctccccaaggggatgagctaggtcgcacataacttttactctccaattctttgatttgtcttttaacttctgctaactcattagctgccattcggtagggtctttttgcaattggtgcagtgcctggcgccagttctatggcgaactcaatctctcggtctggtggtatactcgttaattcttctggaaatacgtcggggtattcacagactatgggcaccgactccaaggaggtgacttgtaaacaggttaggatagaccgacttgcggtaggggtgttagaggtaaagcggacttgctttcctccaggtccttgcaaggtgatggacttttcggcacaatctatctgtcctttgtgcttagccaaccaatccatccctaggatgatgtccaagctttgcgagtctaggactatcggtttggctaggaagtcaacttcctcaattctaaggttaacttccgggcatatttgagttgcccttatattcctcccaggggaatgtactatcattggtacacgtaaattttgggttttccaaccatttcttttcacaaaagcttgtgatatgaaagaatgagaagctcctgaatcaaacagaactattgcgggtacggaattgacagagaacatacccatcacaacgtctggagcatcctgagcggtctcagcttgaatgtggttcactcggcctcgaccaaagttgttggaagcacgtgaaccttgtccacttgcctgagagctaggacgagactgagctgccgctggagtaggagttctggcagtgctgccattagcatgccctgagttggtgttggtgggattctgagggcactgtctggcatagtgacccatctggttgcaccggaaacactgaactgctgacggtccctgtggtgacttgaaagaggtaacactgtttggcgcagtattgccactaggggcacgctgctgtggctgaggtgccggacggttcatctgaggacgaggggcgtagcctggctggcggttagcctgagtgaccgactggtggtattgcatgggttgaccgtagcgagggcaaggtgcgcctcgggaagaatttccctgatggttagacttgcgtttcttgtattcttcggtagcctcttttctggcatcctcaagtagaagcgctgcgattcctttcaagaatttcctgatcttcttcttgtctgtgcccacttcctcaggggcgtaccgagccaacttgttgaacatacttaggtactcattgacactgctgttgccttgcttaagtctgttgaattcttctttcttcatgtcaatagtgctttcaggcacatgagctgcacggaaagccgtagcaaactcatcccaagcaatgttagtgggttcagggtgtgcattgcagtaattctcccaccaatctgcagcaggtcctcttagctggtgagaggcgtagagcgtcttctcgaccggagtacactgcactaagttgagttttctatcaacatctttcagccaatcgtcagcctcaacgggctcgacggtctgagagaactctggcggacgtgacctcagaaaatctgtcagcttggatctattgttgctcatgtgagggtggccatttccatgcgcattatgctgaaaaccggctacggctgcggctaatccttgcaagatttgtgtctgaactgccattaagtgttgcatgttgttttccacatgaggtggggaagggaggcgttcttctccagaattgtgactggcagtgcggtgagagcggtgagactgttccatctctgcattacgggaaactgtgcgatgcgagcggctgctgcggcggggttgctcaacttctgcgttgcgggaagcagtacggtgcgaacggttgctgtggtgagactgctcattagctgactcatgattttcttctggctcaactctaccattttcaaaaccaaagcgggcccctgtggtcggctcctcagtcgaagaaacgtcgatcggctgacgcgaagggaccggcggaacctgtcgagggccggcagcagcacgggccgctggcggtgggggagctgggtagtgaaaacggaacacggtggaagaaccaacaacacgcttccgcgcggtgcggataaagcgtgggccacggcgggaggaagcaactggggtgtgtccgggggtgtaggaagggctaactgggtgtgggtagggggagtacactggtgagtacggcgcacgcgagctgggggagcgcgggccactgggagtgcgggcagagccgcgggagctgtgggaggacaggtggctggcgtggcagaggcggcctgagtcccaagagacagtgtcaactgaagtgacaccctcctcggccagacgggcctccagggcggcgtagcggcgggcaagggagcggtaagcctccaggagtaggtcgtgctgagtggcctgagcctccgaaagctcaaccatgcgagtcagcactggctgagactcgctgtacggacaagggtacctggcgtctgagtggccagaaggaaggcgtggaagctgccggaaggcggagcccccgagacggtgggcgatctggagagtgggcctggccacggtgaagtggtgtggacgaaggccagctccgtgtatacctccacgggggtaaaggtacacagagagctcacagtgagggggaacacggtccacggagtaccccgtgtactcgggacacgagaagccaaggaaacgggcgaggtcacgaagctgagcgacgtggtgaccctcaccaaaaccgtgggagctgaagctggcgttcactgccatctgttaatcgataccagtcccaggaaatagtgctggtatcacagggagacagaatatcacagcaacagaagtctctttattatagagtagaagtacagtcat

SEQ ID NO: 23359 - DNA, 5085 bp, Oryza sativa
  Clone ID: TF_OsC1517_1403
ctaagagagcagctccggaaactcggcgcggagcagatcttctcgttcccaggttgcctcatcatcagaatgattgctccattggactttgtagaacttgatggtcttccttcgagtctgacgttctgcctcttcaagaaccttgatcggtctttccttgtaggtcagattcttttccagctcgatattacccaggggaacttgctcttctggaactcgaagacatttctttaactgggatacgtggaacacgttgtgcacatctgcgagaccttcaggtagctcaagctgataagccacttcgccacgtctggcagttatgaggcggggtgctaacttgccggacatcccaaaccttctcataccacggaggggtgatacccgcaggtacacatgatctcctttttcgaactcaaggtcacgcctccgattgtcagcgtaattcttctgacggttctgtgttgtcttcaaacgttctcgtatcagcttaacttgttcttcttctgacttgagtatgtcaggaccgaataccagtgcttcgcccacctcattccagcacaagggggtgcggcactttcttccgaacattgcctcattcggcgacatctgaatgctggcctgataactgttgttgtatgagaactcggcatacggcaaacaacgatcccaagtgccttcgaaatccaaggcacacgcacgtagcatgtcttctaggatttggtttaccctttcggtctgaccatcggtctgcggatggtaggctgtactaaaattcagatcagttccgagggcttcatgcaactgcttccagaaccttgaggtgaactgagtgcctcggtctgacacaattttcttgggacagccaaatctacatacgacatgggtcatgtagagttctgctagtttctttccatcataggtggttttcactggcacgaaatgagctgatttcgtgagtcggtccacgattacccaaatggagtcgtacccgctgggggttcttggcaaaccggtgatgaaatccattccgatctcttcccatttccactcgggaatcggtaggggttgcagcagaccagctggcctctgatgctctgccttgactctttggcaaatgtcacacaaggctacgtattctgcgacatctcgcttcattccagcccaccaaaagtatgccttgatatcttggtacatcttcgtacttcctggatgaatggagtaagcggactcatgagcttcctttaggatgagatctcttaactccttcttggccggtacacagatgtgtggaccgcaccaaactgtgccttgatcgtctatggagaaattggtgtctttcttctcctgtattctttttattaactcttttatcccttcgtcatctttctgagcctcctggatttgcgattctagggtaggctgtactgtcaagctggcagggactcctgactgtaccacggtcagccttaacttctccaattctctgcacatatgatcttggtcaggccgtatttgagctacattgcaataggccttacgacttagcgcatcagcgaccacgttggctttaccaggatgatagtggattccaagatcgtaatccttgattagttccaaccatcttctctgcctcatatttaactcggtctgtgtgaagatatatttaagacttttgtgatcggtgtatacttcacatctgttcccgattaaataatgcctccagatcttaagagtatgaaccacggctgccaactcgagatcatgggtgggataattgacttcatgaggcctgagctgcctggatgcataggccacaacctttcgttcttgcattaggacacatcctaagccttgtcttgatgcatcacagaagatctcgaaatcttttcggatatctggcaaggtgagaactggtgcagtggtcaaccttttcttcatttcttgaaagctgtcttcacaggctgcagaccattgaaatttcttttccttctttaacagctcggtcataggtctggctagcttagagaatccttcaatggatcttcgataatatcccgctaagccaaggaagctgcggatctctgacacgttcttgggcgggttccaagaaagtacagcttcaaccttgctgggatctacttcgacaccgttggaggaaatcacgtgtccaagaaatgctactcgatctaaccagaattcgcatttcgagaatttagcgaatagttgatgatctctgagcttttccattatcagcctcaggtgttcagcatgttcttcctcgttcttggagtatatcaggatgtcatcgatgaacaccacgacaaactggtccaggtattccatgaagattttgttcattaagttcatgaagaatgctagagcattggtgagtccgaaggacataactgtgaactcatatagaccataacgcgttgagaaagcggtcttcgggatatcttcagatctgattttcagttggtggtaacctgacctcaagtcaatttttgagaaaactcttgctcctttaagttgatcgaataaatcgtcaatccgtagcaacgggtacttgttctttatagttacttcattcagggctctatagtcgattaccattctctcagagccatcctttttcttaaccagaagcattggggctccccaaggggatgagctaggtcgcacataacctttactttccagttcttcgatttgtcttttaacttctgctaactcattagctgccattcggtagggtctttttgcaattggagctgtgcctggtgccagttctatggcgaactcaatctctcggtctggtggcattctcgttaattcttctaggaatacgtcgggatattcacagaccatcacaacgtctggagcatcctgagcggtttcagcttgaatgtgattcacacgtcctcgaccaaagtggttggaagcacgaggaccttgtccacttgcctgagagctaggacgagactgagctgccactggagtaggagttctggcggtgctgccattagcatgccctgagttggtgttggtaggattctgagggcactgtctagcatagtgacccatctggttgcaccggaaacactgaactgctgacggtccctgtggtgacttgaaagaggtaacactgtttggcgcagtgttgccactaggggcacgctgctgtggcggaggtgccggacggttcatctgagggcgaggggcgtagcctggctggcggttagcctgagtgaccgactggtggtattgcatgggttgaccgtagcgagggcgaggtgcgcctcgggaagaatttccctgatggttagacttgcgtttcttgtattcttcggtagcctcttttctggcatcctcaagcagaagtgccttgttgatcatatgttgaaaagtggggaagtcatgagcaagcaactggagtctcattccaactgcgatccccttcaagaatttcctgatcttcttcttgtctgtgtccacttcctcaggggcgtaccgagccaacttgttgaacatacttaggtactcattgacactgctgttgccttgcttaagtctgttgaattcttctttcttcatgtcaatagtgctttccggcacatgagctgcacggaaggccgtagcaaactcatcccaagcaatgttagtgggttcagggtgtgcattgcagtaattctcccaccaatctgcagcaggtcctcttagctggtgagaggcgtagagcgtcttctcaacaggagtacattgcactaagttgagttttctatcaacatctttcaaccaatcgtcagcctcgacgggctcgacggtctgagagaactctggcggatgtgacctcagaaaatctgtcagcttggatctattgttgcccacgtgagggtggccatttccatgcgcattatgctgaaaactggctatggctgtggttagtccttgcaagatttgtgtctgtactgccattatgtgttgcatgttgttttccacatgaggtggggaagggaggcgttcttctccagaattgtgactggcagtgcggtgagagcggtgagactgttccatctctgcattacggaaaactgtgcgatgcgagcggttgctgcggtggggttgctcaacctctgcgttgcggaaaacagtacggtgcgaacggttgctgtggtgagactgctcattagctgattcatgatttgcttctgcttcaactctaccatcttcaaaaccaaagcgggctggtgcacgagctgcacggcgggggcggctagccatcggtgggggagctgggtggcggaaacggaacacggtggaagaaccaacaacacgcttccgcgcagtgcggataaagcgtgggccatggcgggaggaagcaactggggtgtgtccgggggtgtaggaagggctaactgggtgtgggtagggggagtacactggtgagtacggcgcacgtgagctaggggagcgcgggccactgggagtgcgggcagagccgcgggagctgtgggaggacaggtggctggcgtggcagaggcggcctgagtcccaggagatagtgtcaaccgaggtgacaccctcctcggccagacgggcctccaaagcggcgtagcggcgggcaagggagcggtaagcctcaaggagtaggtcgtgctgagtggcctgagcctccgaaagctcgaccatgcgagtcagcactggctgagactcgctgtacggacaagggtacctggcgtctgagtggccagaaggaaggcgtggaagctgccggaaggcggaacctccgagacggtggctgtagtcgtgggccaggcgacgaagcacagtccaggagaggtcctggtacgcgatctggagagtgggcctggccacagtgaagtggtgggggcgaaggccagctccgtgtatacctccacgggggtaaaggtacacagagagctcacagtgagggggaacacggtccacggagtaccccgtgtactcggaacacgagaagccaaggaaacgggcgaggtcacgaagctggacgacgtggtgaccctcaccgaaaccgtgggaactgaagctggcgttcaccgccat

SEQ ID NO: 23360 - DNA, 5553 bp, Oryza sativa
  Clone ID: TF_OsC1517_1411
agggagcaggtccgggaactcggcgcggagaagatcttctcgctcccaggttgcctcgtcttcggaatgattgctccattggactttgtagaacttgatggtcttccttcgagtctgacgttctgcctcttcaagaaccttgatcggtctttccttgtaggtcagattcttttctagctcgatattacccaggggaacttgctcttctggaactcgaagacatttctttaactgggatacgtggaacacgttgtgcacgtctgcgagaccttcaggtagctcaagctgataagccacttcgccacgtctggcggttatgaggtaggggccgatgtagcggggtgctaacttgccggacatcccaaaccttctcataccacggaggggtgatacccgcaggtacacatgatctcctttttcgaactcaaggtcacgcctccgattgtcagcgtaattcttctgacggttctgtgctgtcttcaaacgttctcgtatcagcttaacttgttcttctgctgacttgagtatgtcaggaccgaataccagtgctttgcccacctcattccagcacaagggggtgcggcactttcttccgaacattgcctcattcggcgacatctgaatgctggcctgataactgttgttgtatgagaactcggcatacggcaaacaacgatcccaagtgccttcgaaatccaaggcatacgcacgtagcatgtcttctaggatttggtttaccctttcggtctgaccatcggtctgcggatggtaggctgtactaaaattcagatcagttccgagggcttcatgcaactgcttccagaaccttgaggtgaactgagtgcctcggtctgacacaattttcttgggacagccaaatctacatacgacatgggtcatgtagagttctgctagtttctttccatcataggtggttttcactggcacgaaatgagctgatttcgtgagtcggtccacgattacccaaatggagtcgtacccgttgggggttcttggcaaaccggtgatgaaatccattccgatctcttcccatttccactcgggaatcggtaggggttgcagcagaccagctggcctctgatgttccgccttgactctttggcaaatgtcagacagggctacgtattctgcgacgtctcgcttcattccagcccaccagaagtatgccttgatatcttggtacatcttcgtacttcctgggtgaatggagtaggcggactcatgagcttcctttaggatgagatctcttaactccttcttggccggtacacagatgcgtggtccgcaccaaactgtgccttgatcgtctatggagaaatttgtgtctttcttctcctgtattctttttattaattcttttatcccttcgtcgtctttctgagcctcccggattcgcgactctagggtaggctgtactgtcaagctggcagggacacctgactgtaccacggtcagtcttaacttctccaattctccgcacaggtgatcttggtcaggccgtatttgagctacattgcaataggccttgcgacttagcgcatcagcgaccacgttggctttaccaggatgatagtggattccaagatcgtaatccttgattagttccaaccatcttctctgtctcatatttaactcggtctgagtgaagatatacttaagacttttgtgatcggtgtatacttcacatctgttcccgattaaatagtgcctccagatcttaagagcatgaaccacggctgccaactcgagatcatgggtgggataattggcttcatgaggcctgagctgcctggatgcataggccacaaccttttgttcttgcattaggacacatcctaagccttgtcttgatgcgtcacagaagatctcgaaatctttttggatatctagcaaggtgagaactggggcagtggtcaaccttttcttcaattcttggaagctgtcttcacaggctgcagaccattgaaatttcttttccttctttaacagctcggtcataggtctggctagcttagagaatccttcaatgaatcttcgataatatccagctaagccaaggaagctgcggatctctgacacgttcttgggcgggttccaagcaagtacagcttcaaccttgctgggatctacttcgacaccgttggaggaaatcacgtgtccaagaaatgctactctgtccaaccagaattcgcatttcgagaatttagcgaatagttgatgatctctgagcttttccattatcagcctcaggtgttcagcatgttcttcctcgttcttggagtatatcaggatgtcatcgatgaacaccacgacaaactggtctaggtattccatgaagattttgttcattaagttcatgaagaatgctggagcattggtgagtccgaaggacataactgtgaactcatatagaccataacgcgttgagaaagcggtcttcgggatatcttcagatctgattttcagttggtggtaacctgacctcaagtcaatttttgagaaaactcttgctcctttaagttgatcgaataaatcgtcaatccgtggcaacgggtacttgttctttatagttacttcattcagggctctatagtcgattaccattctctccgagccatcctttttcttaaccagaagcactggggctccccaaggggatgagctaggtcgcacataacctttactttccagttcttcgatttgtcttttaacttctgctaactcattagctgccattcggtagggtctttttgcaattggagctgtgcctggtgccagttctatggcgaactcgatctctcggtctggtggcattcttgttaattcttccggaaatacgtcgggatattcacagactatgggcaccgactccaaggaggtgacttgtaaacaggttaggatagaccgacttgcggtaggggtgttaggggtaaagcggacttgctttcctctaggtccttgcaaggtgatggacttttcggcacattctatctgtcctttgtgcttagccaaccaatccatccctagaatgatgtccaagctttgcgagtctaggactatcggtttggctaggaagtcaacttcctcaattctaaggttaacttccgggcatatttgagttgcccttatattccttccaggggaatgtactatcattggtacacgcaaattttgggttttccaaccatttcttttcacaaaagcttgcgatatgaaagaatgggaagctcccgaatcgaacagaactattgcgggtacggagttgacagagaacatacccatcacaacgtctggagcatcctgagcggtttcagcttgaatgtgattcacacggcctcgaccaaagttgttggaagcacgtgaaccttgtccacttgcctgagagctaggacgagactgagttgccgctggagtaggagttctggcagtgctgccattagcatgccctgagttggtgttggtaggattctgaggacactgtctagcatagtgacccatctggttgcaccggaaacactgaactgctgacggtccctacggtgacttgaaagaggtaacgctgttaggcgcagtattgccactaggggcacgctgctgtggctgaggtgccggacggtttatctgaggacgaggggcgtagcctggctggcggttagcctgagtgaccgactggtggtattgcatgggttgaccgtagcgagggcgaggtgcgcctcgggaagaatttccctgatggttagacttgcgtttcttgtattcttcggtagcctcttttctggcatcctcaagtagaagtgcgttgttgatcatatgttgaaaagtggggaagtcatgagcaagcaactggagtctcattccaactgcgattcctttcaagaatttcctgatcttcttcttgtctgtgtccacttcctcaggggcgtaccgagccaacttgttgaactgacttaggtactcattgatactgctgttgccttgcttaagtctgttgaattcttctttcttcatgtcaatagtgctttcaggcacatgagctgcacggaaagccgtagcgaactcatcccaagcaatgttagtgggttcagggtgtgcattgcagtaattctcccaccaatctgcggcaggtcctcttagttggtgagaggcgtagagcgtcttctcaacaggagtacactgcactaagttgagttttctatcaacatctttcaaccaatcgtcagcctcgacgggctcgacggtctgagagaactctggcggacgagacctcaaaaagtctgtcagcttggatctgttgttgcccatgtgagggtggccatttccatgcgcattatgctgaaaactggctatggctgtggttagtccttgcaagatttgtgtctgaactgccattaagtgttgcatgttggtttccacatgaggtggggaagggaggcgttcttctccagaattgtgactggcagtgcggtgagagcggtgagactgttccatctctgcatcacgggaaactgtgcgatgcgagcggctgctgcggcggggttgctcaacctctgcgttgcgggaaacagtacgatgcgaacggttgctgtggtgagactgctcattagctgattcatgattttcttctggctcaactctaccatcctcaacaccaaagcgggctggtgcacgagctgcacggcggggacggctagccatctgtcgagggccggcagcagcacgggccgctggcggtgggggagctgggtagtggaaacggaacacggtggcagaaccaacaacacgcttccgcgcagtgcggataaagcgtgggccacggcgggaggaagcaactggggtgtgtcctggggtgtaggaagggctaactgggtgtgggtagggcgagtacactggtgagtacggcgcacgcgagctgggggagcgcgggccactgggagtgcgggcagagccgcgggagctgtgggaggacaggtggctggcgtggcagaggcggcctgagtcccaagagatagtgtcaactgaggtgacaccctcctcggccagacgggcctccaaagcggcgtagcggcgggcaagggagcggtaagcctcaaggagtaggtcgtgctgagtggcctgagcctccgaaagctcgaccatgcgagtcagcactggctgagactcgctgtacggacaagggtacctggcgtctgagtggccagagggaaggcgtggaagctgccggaaggcggaacctccgagacggtggctgtagtcgtgggccaggcgacgaagcgcagtccaggagaggtcctggtacgcgatctggagagtgggcctggccacagtgaagtggtgggggcgaaggccagctccgtgtatacctccacgggggtaaaggtacaccgagagctcacagtgagggggaacacggtccacggagtaccccgtgtactcgggacacgagaagccaaggaaacgggagaggtcacgaagctgagcgacgtggtgaccctcaccaaaaccgtgggaactgaagctggcgttcactgccat

SEQ ID NO: 23361 - DNA, 5556 bp, Oryza sativa
  Clone ID: TF_OsC1517_1425
ctaagggagcaggtccgggaactcggcgcggagaagatcttctcgctcccaggttgcctcgtcttcggaatgattgctccattggactttatagaacttgatggtcttccttcgagtctgacgttctacctcttcaagaaccttgatcggtctttccttgtaggtcagattcttttccagctcgatattacccaggggaacttgctcttctggaactcgaagacatttctttaactgggatacgtggaacacgttgtgcacatctgcgagaccttcaggtagctcaagctgataagccacttcgccatgtctggcggttatgaggtagggaccgatgtagcggggtgctaacttgccggacatcccaaaccttctcataccacggaggggtgatactcgcaggtacacatgatctcccttttcgaactcaaggtcacgtctccgattgtctgcgtaatttttctgacggttctgcgctgtctttaaacgctctcggatcagcttaacttgttcttctgctgacttgagtatgtcaggaccgaataccagggcttcgcccacctcattccagcacaagggggtgcggcactttcttccgaacattgcctcattcggcgacatctgaatgctggcctgataactgttgttgtatgagaactcagcatacggcaaacaacgatcccaagtgccttcgaaatccaaggcacacgcacgtagcatgtcttctaggatttggtttaccctttccgtctgaccatcggtctgtggatggtaggccgtactaaaatttagatcagttccgagggcttcatgcaactgcttccagaaccttgaggtgaactgagtgcctcgatccgacactattttcttgggacagccaaatctacatacgacatgagtcatgtagagttctgctagtttctttccatcataggtggttttcactggcacgaaatgagctgacttcgtgagtcggtccacgattacccagatggagtcgtacccgctgggggttcttggcaaaccggtgatgaaatccattccgatctcttcccatttccactcgggaatcggtaggggttgcagcagaccagctggcctctgatgttccgccttgactctttggcaaatgtcacacagggctacgtattctgcgacgtctcgcttcattccagcccaccagaagtatgccttgatatcttggtacatcttcgtacttcctgggtgaatggagtaggcggactcatgagcttcctttaggatgagatctcttaactccttcttggccggtacacagatgcgtggtccgcaccaaactgtgcctttatcgtctatggagaaattggtgtctttcttctcctgtattctttttattaattcttttatcccttcgtcgtctttctgagcctcccggatttgcgactctagggtaggctgtactgtcaagctggcagggacacctgactgtaccacggtcagtcttaacttctccaattctctgcacaggtgatcttggtcaggccgtatttgagctacattgcaataggccttgtgacttagcgcatcagcgaccacgttggctttaccaggatgatagtggattccaagatcgtaatccttgattagttccaaccattttctctgtctcatatttaactcggtctgagtgaagatatacttaagacttttgtgatcggtgtatacttcacatctgttcccgattaaatagtgcctccagatcttaagagcatgaaccacggctgccaactcgagatcatgggtgggataattggcttcatgaggcctgagctgcctggatgcataggccacaaccttttgttcttgcattaggacacatcctaagccttgtcttgatgcgtcacagaagatctcgaaatcttttcggatatctggcaaggtgagaactggggcagtggtcaaccttttcttcaattcttggaagctgtcttcacaggctgcagaccattgaaatttcttttccttctttaacagctcggtcataggtctggctagcttagagaatccttcaatgaatcttcgataatatcccgctaagccaaggaagctgcgaatctctgacacattcttgggcgggttccaagcaagtacagcttcaaccttgctgggatctacttcgacaccgttggacgagatcacgtgtccaagaaatgctactcggtctaaccagaattcgcacttcgagaattttgcgaatagttgatgatctctgagcttttccattatccgcctcaggtgttcagcatgttcctcctcgttcttggagtatatcaggatgttatcgatgaataccacgacaaactggtccaggtattccataaagattttgttcattaagttcatgaagaatgctggagcattggtgagtccgaaggacattactgtgaactcatatagaccataacgcgttgagaaagcggtcttcggaatatcttcagatctgattttcagttgatggtaacctgacctcaagtcaatttttgagaagactcttgctcctttaagttgatcgaataaatcgtcaatccgtggcaacgggtacttgttctttatagttacttcattcagggctctatagtcgattaccattctctcagagccatcctttttcttaaccagaagcactggggctccccaaggggatgagctaggtcgcacataacctttactctccaactcttcgatttgtcttttaacttctgctaactcattagctgccattcggtagggtctttttgcaattggagctgtgcctggtgccagttctatggcgaactcgatctctcggtctggtggcattctttttaattcttccggaaatacgtcgggatattcacagactatgggcaccgactccaaggaggtgacttgtaaacaggttaggatagaccgacttgcggtaggggtgttaggggtaaagcggacttgctttcctccaggtccttgcaaggtgatggacttttcggcacaatctatctgtcctttgtgcttagccaaccaatccatccctagaatgatgtccaagctttgcgagtctaggactatcggtttggctaggaagtcaacttcctcaattctaaggttaacttccgggcatatttgagttgcccttatattccttccaggggaatgtactatcattggtacacgcaaattttgggttttccaaccatttcttttcacaaaagcttgcgatatgaaagaatgggaagctcccgaatcgaacagaactattgcgggtacggagttaacagagaacatacccatcacaacgtctggagcatcctgagcggtttcagcttgaatgtgattcacacggcctcgaccaaagttgttggaagcacgtgaaccttgtccacttgcctgagagctaggacgagactgagctgccgctggagtaggagttctggcagtgctgccattagcatgccctgagttggtgttggtaggattctgaggacactgtctagcatagtgacccatctggttgcaccggaaacactgaactgctgacggtccctgcggtgacttgaaagagataacactgttaggcgcagtattgccactaggggcacgctgctgtggctgaggtgccggacggtttatctgaggacgaggggcgtagcctggctggcggttagcctgagtgaccgactggtggtattgcatgggttgaccgtagcgagggcgaggtgcgcctcggaaagaatttccctgatggttagacttgcgtttcttgtattcttcggtagcctcttttctggcatcctcaagtagaagtgccttgttgatcatatgttgaaaagtggggaagtcatgagcaagcaactggagtctcattccaactgcgattcctttcaagaatttcctgatcttcttcttgtctgtgtccacttcctcaggggcataccgagccaacttgttgaactgacttaggtactcattgatactgctgttgccttgcttaagtctgttgaattcttctttcttcatgtcaatagtgctttcaggcacatgagctgcacggaaagccgtagcgaactcatcccaagcaatgttagtgggttcagggtgtgcattgcagtaattctcccaccaatctgcggcaggtcctcttagttggtgagaggcgtagagcatcttctcaacaggagtacactgcactaagttgagttttctatcaacatctttcaaccaatcgtcagcctcgacgggctcgacggtctgagagaactctggcggacgagacctcagaaagtctgtcagcttggatctgttgttgcccatgtgagggtggccatttccatgcgcattatgctgaaaactggctatggctgtggttagtccttgcaagatttgtgtctgaactgccattaagtgttgcatgttggtttccacatgaggtgggaaagggaggcgttcttctccagaattgtgactggcagtgcggtgagagcggtgagactgtcccatctctgcatcacgggaaactgtgcgatgcgagcggctgctgcggcggggttgctcaacctctgcgttgcgggaaacagtacgatgcgaacggttgctgtggtgagactgctcattagctgattcatgattttcttctggctcaactctaccatcctcaaaaccaaagcgggctggtgcacgagctgcacggcgggggcggctagccatctgtcgagggccggcagcagcacgggccgctggcggtaggggagctgggtagtggaaacggaacacggtggcagaaccaacaacacgcttccgcgcagtgcggataaagcgtgggccacggcaggaggaagcaactggggtgtgtcctggggtgtaggaagggctaactgggtgtgggtagggcgagtacactggtgagtacggcgcacgcgagctgggggagcgcgggccactgggagtgcgggcagagccgcgggagctgtgggaggacaggtggctggcgtggcagaggcggcctgagtcccaggagatagtgtcaactgaggtgacaccctcctcggccagacgggcctccaaggcggcgtagcggcgggcaagggagcggtaagcctcaaggagtaggtcgtgctgagtggcctgagcctccgaaagctcaaccatgcgagtcagcactggctgagactcgctgtacggacaagggtacctggcgtctgagtggccagaaggaaggcgtggaagctgccggaaggcggagcctccgagacggtggctgtagtcgtgggccaggcgacgaagcgcagtccaggagaggtcctggtacgcgatctggagagtgggcctggctacagtgaagtggtgtgggcgaaggccagctccgtgtatacctccacgggggtaaaggtacacagagagctcacagtgagggggaacacggtccacggagtaccccgtgtactcgggacacgagaagccaaggaaacgggcgaggtcacgaagctgagcgacgtggtgaccctcaccaaaaccgtgggaactgaaactggcgttcactgccat

SEQ ID NO: 23362 - DNA, 5281 bp, Oryza sativa
  Clone ID: TF_OsC1517_1433
agggaacagctccggaaactcggcgcggagaagatcttctcgttcccaggttgcctcatcttcagaatgattgctccattggactttgtagaacttgatggtcttccttcgagtctgatgttctgcctcttcaagaaccttgatcggtctttccttgtaggtcagattcttttccagctcgatattacccaggggaacttgctcttctggaactcgaagacatttctttaactgggatacgtggaacacgttgtgcacatctgcgagaccttcaggtagctcaagctgataagccacttcgccacgtctggccgttatgaggtaggggccgatgtagcggggtgctaacttgccggacatcccaaaccttctcataccacggaggggtgatacccgcaggtacacatgatctcctttttcgaactcaaggtcacgcctccgattgtcagcgtaattcttctaacggttctgtgctgtcttcaaacgttctcgtatcagcttaacttgttcttctgctgacttgagtatgtcaggaccgaataccagtgcttcgcccacctcattccagcacaagggggtgcggcactttcttccgaacattgcctcattcggcgacatctgaatgctggcctgataactgttgttgtatgagaactcggcatacggcaaacaacgatcccaagtgccttcgaaatccaaggcacacgcacgtagcatgtcttctaggatttggtttaccctttcggtctgaccatcggtctacggatggtaggctgtactaaaattcagatcagttccgagggcttcatgcaactgcttccagaaccttgaggtgaactgagtgcctcggtctgacacaattttcttgggacagccaaatctacatgacatgggtcatgtagagttctgctagtttctttccatcataggtggttttcactggcacgaaatgagctgatttcgtgagtcggtccacgattacccaaatggagtcgtacccgttgggggttcttggcaaaccggtgatgaaatccattccgatctcttcccatttccactcgggaatcggtaggggttgcagcataccagctggcctctgatgctctgccttgactctttggcaaatgtcacacaaggctacatattctgcgacatctcgcttcattccagcccaccaaaagtatgccttgatatcttggtacatcttcgtacttcctggatgaatggagtaagcggactcatgagcttcctttaggatgagatctcttaactccttcttggccggtacacagatgcgtggaccgcaccaaactgtgccttgatcgtctatggagaaattggtgtctttcttctcctgtattctttttattaactcttttatcccttcgtcatctttctgagcctcccggatttgcgattctagggtaggctgtactgtcaagctggcagggactcctgactgtaccacggtcagccttaacttctccaattctctgcacaaatgctcttggtcaggccgtatttgagctacattgcaataggccttgcgacttagcgcatcagcgaccacgttggctttaccaggatgatagtggattccaagatcgtaatccttgattagttccaaccatcttctctgcctcatatttaactcggtctgtgtgaagatatatttaagacttttgtgatcggtgtatacttcacatctgttcccgattaaataatgcctccagatcttaagagcatgaaccacggctgccaattcgagatcatgggtgggataattgacttcatgaggcctgagctgcctggatgcataggccacaacctttcgttcttgcattaggacacatcctaagccttgtcttgatgcgtcacagaagatctcgaaatcttttcggatatctggcaaggtgagaactggtgcagtggtcaaccttttcttcatttcttgaaagctgtcttcacaggctgcagaccattgaaatttcttttccttctttaacagttcggtcataggtctggctagcttagagaatccttcaatgaatcttcgataatatcccgctaagccaaggaagctgcggatttctgacacgttcttgggcgggttccaagcaagtacagcttcaaccttgctgggatctacttcgacaccgttggaggaaatcacgtgtccaagaaatgctactcggtccaaccagaattcgcatttcgagaatttagcgaatagttgatgatctctgagcttttccattatcagcctcaggtgttcagtatgttcttcctcgttcttggagtatatcaggatgtcatcgatgaacaccacgacaaactggtccaggtattccaagaagatttggttcattaagttcatgaagaatgctggagcattggtgagtccgaaggacataactgtgaactcatatagaccataacgcgttgagaaagcggtcttcgggatatcttcagatctgattttcagttggtggtaacctgacctcaagtcaatttttgagaaaactcttgctcctttaagttgatcgaataaatcgtcaatccgtggcaacgggtacttgttctttatagttacttcattcagggctctatagtcgattaccattctctcagagccatcctttttcttaaccagaagcactagggctccccaaggagatgagctaggtcgcacataacctttactctccaactcttcgatttgtcttttgacttctgctaactcattagctgccattcggtagggtctttttgcaattggagctgtgcctggtgccagttctatggcgaactcaatctctcggtctggtggcatactcgttaattcttctggaaatacgtcgggatattcacagactatgggcaccgactccaaggaggtgacttgtaaacaggttaggatagaccgacttgcggtaggggtgttaggggtaaagcggacttgctttcctccaggtccttgcaaagtgatggacttttcggcacaatctatctgtcctttgtgcttagccaaccaatccatccctaggatgatgtccaagctttgcgagtctaggattatcggtttggctagaaagtcaacttcctcaattctaaggttaacttccgggcatatttgagttgcccttatattcctcccaggggaatgtactatcattggtacacgcaaattttgggttttccaaccatttcttttcacaaaagcttgtgatatgaaagaatgggaagctcctgaatcaaatagaactattgcgggtacggagttgacagagaacatacccatcacaacgtctggagcatcctgagcggtttcagcttgaatgtgattcacacgtcctcgaccaaagtggttggaagcacgagaaccttatccacttgcctgagagctaggacgagactgagctgccgctggagtaggagttctggcggtgctgccattagcatgccctgagttggtgttggtaggattctgagggcactgtctagcatagtgacccatctggttgcaccggaaacactgaactgctgacggtccctgtggtgacttgaaggaggtaacactgtttggcgcagtgttgccactaggggcacgctgctgtggcggaggtgccggacggttcatctgaggacgaggggcgtagcctggctgtcggttagcctgagtgaccgactggtggtattgcatgggttgaccgtagcgagggcgaggtgcgcctcgggaagaatttccctgatggttagacttgcgacttgcgtttcttgtattcttcggtagcctcttttctggcatcctcaagcagaagtgccttgttgatcatatgttgaaaagtggggaagtcatgagcaagcaactggagtctcattccaactgcgattcccttcaagaatttcctgatcttcttcttatctgtgtctacttcctcaggggcgtaccgagccaacttgttgaactgacttaggtactcattgacactgctgttgccttgcttaagtctgttgaattcttctttcttcatgtcaatagtgctttcaggcacatgagctgcatggaaagccatagcaaactcatcccaagcaatgttagtgggttcaggatgtgcattgcagtaattctcccaccaatctgcagcaggtcctcttagctggtgagaggcgtagagcgtcttctcaacaggagtacactgcactaagttgagttttctatcaacatctttcaaccaatcgtcagcctcgacgggctcgacggtctgagagaactctggcggacgtgacctcagaaagtctgtgagcttggatctattgttgcccacgtgagggtggccatttccatgcgcattatgctgaaaaccggctatggctgtggttattccttgcaagatttgtgtctgaactgccattatgtgttgcatgttgttttccacatgaggccgaaaccctaaaactcatcgtagccggcttgctcctggaagaactcctcatcagcaggatccgcttcatcttcttcagcaactggggaggagttatttatatagagcaaggtttgttaacctctgcagagggggtacactttacccacatgacattactaacccggatcatccagcccgtggggatcagccacgtcgggagacctccaagctttcatgacaaggcatttcgaaagccgacacaggtttaccatatgccgacgagaggggtcccagaccaacaacagttttacccaagttgttactcagattttaagtttgaaggcgaccgtcgattctcgcacagagtgcacgattatcgaggcgcaactgggtggttacaaagggacatagctgagctggcgccgacgtggcgcctacgtggctgccacgcgggccggcgggaggtagacgacgacccggccgcgaatggacggcgggcggcggcggcgagcggcggagcgaaccacggcgatacgggcaacagcgagcacaccgggcggttgcacgtgacaaggggaggcgagccaacggctcggattcgccggaggttgctcgacggcggaggattgcggcggtggcaaccggtggcgggagaagagggaaacggcgacgaggtcacgagaggtcgattcccggcggtgagagcatctacgcggcttcgggaactcgacgctagcgtcggattgggcggaactacgccgagcgaggccggcgacgagcgggtgctacggagctcgggcggcgacggcggcgagcacacggcgagcgacggcaacggtcggggcggcgccggc

SEQ ID NO: 23363 - DNA, 5556 bp, Oryza sativa
  Clone ID: TF_OsC1517_1463
ctaagggagcaagtccgggaactcggcgcggagaagatcttctcgctcccaggttgcctcgtcttcggaatgattgctccattggactttgtagaacttgatggtcttccttcgagtctgacgttctgcctcttcaagaaccttgatcggtctttccttgtaggtcagattcttttccagctcgatattacctaggggaacttgctcttctggaactcgaagacatttctttaactgggatacgtggaacacgttgtgcacgtctgcgagaccttcaggtagctcaagctgataagccacttcgccacgtctggcggttatgaggtaggggccgatgtagcggggtgctaacttgccggacatcccaaaccttctcataccacggaggggtgatactcgcaggtacacatgatctcccttttcgaactcaaggtcacgtctccgattgtcagcgtaatttttctgacggttctgcgctgtctttaaacgttctcggatcagcttaacttgttcttctgctgacttaagtatgtcaggaccgaataccagggcttcgcccacctcatcccagcacaagggggtgcggcactttcttccgaacattgcctcattcggcgacatctgaatgctggcctgataactgttgttgtatgagaactcagcatacggcaaacaacgatcccaagtgccttcgaaatccaaggcacacgcacgtagcatgtcttctaggatttggtttaccctttcggtctgaccatcggtctgcggatggtaggctgtactaaaattcagatcagttccgagggcttcatgcaactgcttccagaaccttgaggtgaactgagtgcctcggtccgacactattttcttgggacagccaaatctacatacgacatgagtcatgtagagttctgctagtttctttccatcataggtggttttcactggcacgaaatgagctgacttcgtgagtcggtccacgattacccagatggagtcgtacccgctgggggttcttggcaaaccggtgatgaaatccattccgatctcttcccatttccactcgggaatcggtaggggttgcagcagaccagctggcctctgatgttccgccttgactctttggcaaatgtcacacagggctacgtattctgcgacgtctcgcttcattccagcccaccagaagtatgccttgatatcttggtacatcttcgtacttcctgggtggatggagtaggcggactcatgagcttcctttaagatgagatctcttaactccttcttggccggtacacagatgcgtggtccgcaccaaactgtgccttgatcgtctatggagaaatttgtgtctttcttctcctgtattctttttattaattcttttatcccttcgtcgtctttctgagcctcccggatttgcgactctagggtaggctgtactgtcaagctggcagggacacctgactgtaccacggtcagtcttaacttctccaattctctgcacaggtgatcttggtcaggccgtatttgagctacattgcaataggccttgcgacttagcgcatcagcgaccacgttggctttaccaggatgatagtggattccaagatcgtaatccttgattagttccaaccatcttctctgtctcatatttaactcggtctgagtgaagatatacttaagacttttgtgatcggtgtatacttcacatctgttcccgattaaataatgcctccagatcttaagagcatgaaccacggctgccaactcgagatcatgggtgggataattaacttcatgaggcctgagctgcctggatgcataggccacaacctttcgttcttgcattaggacacatcctaagccttgtcttgatgcatcacagaagatctcgaaatcttttcggatatctggcaaggtgagaactggggcagtggtcaaccttttcttcatttcttgaaagctgtcttcacaggctacagaccattggaatttcttttccttctttaacagctcggtcataggtctggctagcttagagaatccttcaatgaatcttcgataatatccagctaagccaaggaaactgcgaatctctgacacattcttgggcgggttccaagcaagtacagcttcaaccttgctgggatctacttcgacaccgttgggggagatcacgtgtccaagaaatgctactcggtctaaccagaattcgcattttgagaattttgcgaatagttgatggtccctgagcttttccattatcaacctcaggtgttcagcatgttcttcctcgttcttagagtatatcaggatgtcatcgatgaataccacgacaaactggtccagatattccataaagattttgttcattaagttcatgaagaatgctggagcattggtgagtccgaaggacattactgtgaactcatatagaccataacgcgttgagaaagcggtcttcgggatatcttcagatctgattttcagttggtggtaacctgacctcaagtcaatttttgagaaaactcttgctcctttaagttgatcgaataaatcgtcaatccgtggcaacgggtacttgttctttatagttacttcatttagggctctatagtcgattaccattctctcagagccatcctttttcttaaccagaagcactggggctccccaaggggatgagctaggtcgcacataacctttactttccagttcttcgatttgtcttttaacttctgctaactcattagctgccattcggtagggtctttttgcaattggagctgtgcctggtgccagttctatggcgaactcgatctctcggtctggtggcattcttgttaattcttccggaaatacgtcgggatattcacagactatgggcaccgactccaaggaggtgacttgtaaacaggttaggatagaccgacttgcggtaggggtgttaggggtaaagcggacttgctttcctccaggtccttgcaaggtgatggacttttcggcacaatctatctgtcctttgtgcttagccaaccaatccatccctagaatgatgtccaagctttgcgagtctaggactatcggtttggctaggaagtcaacttcctcaattctaaggttaacttccgggcatatttgagttgcccttatattccttccaggggaatgtactatcatcggtacacgcaaattttgggttttccaaccatttcttttcacaaaagcttgcgatatgaaagaatgagaagctcctgaatcaaacagaactattgcgggtacggagttgacagagaacatacccatcacaacgtctggagcatcctgagcgatttcagcttgaatgtgattcacacgtcctcgaccaaagtggttggacgcacgagaaccttgtccacttgcctgagagctaggacgagactgagctgccgctggagcaggagttctggcagtgctgccattagcatgccctgagttggtgttggtaggattctgaggacactgtctggcatagtgtcccatctggttgcaccggaaacactgaactgctgacggtccctgtggtgacttgaaagaggtaacactgtttggcgcagtattgccactaggggcacgctgctgtggctgaggtgccggacggttcatctgaggacgaggggcgtagcctggctggtggttagcctgagttaccgactggtgatattgcatgggttgaccgtagcgagggcgaggtgcgcctcgggaagaatttccctgatggttagacttgcgtttcttgtattcttcggtagcctcttttctggcatcctcaagtagaagtgccttgttgatcatatggtgaaaagtggggaagtcatgagcaagcaactggagtctcattccaactgcgatccctttcaagaatttcctgatcttcttcttatctgtgtccacttcttcaggggcgtaccgagctaacttgttgaactgacttaggtactcattgacactgctgttgccttgcttaagtctgttgaattcttctttcttcatgtcaatagtgctttcaggcacatgagctgcacggaaagccgtagcaaactcatcccaagcaatgttagtgggttcagggtgtgcattgcagtaattctcccaccaatctgcagcaggtcctcttagctggtgagaggcgtagagcgtcttctcaacaggagtacactgcactaagttgagttttctatcaacatctttcaaccaatcgtcagcctcgacgggctcgacggtctgagagaactctggcggacgtgacctcagaaaatctgtcagcttggatctattgttgcccacgtgagggtggccatttccatgcgcattatgctgaaaactggctatggctgtggttagtccttgcaagatttgtgtctgaactgtcattatgtgttgcatgttgttttccacatgaggtagggaagggaggcgttcttctccagaattgtgactggcagtgcggtgagagcggtgagactgtcccatctctgcatcacgggaaactgtgcgatgcgagcggttgctgcggcggggttgcccaatctctgcgttgcgggaaacagtatggtgcgaacggttgctgtggtgtgactgctcattagccgactcatgattttcttctggctcaactctaccatcttcaaaaccaaagcgggctggtgcacgggctgcatggcgggggtggctagccatctgtcgagggccggcagcagcacgggccgctggcggtgggggagctgggtggcggaaacggaacacggtggaagaaccaacaacacgcttccgcgcagtgcggataaagcgtgggccacggcgggaggaagcaactggggtgtgtccgggggtgtaggaagggctaactgggtgtgggtagggggagtacattggtgagtacggcgcacgcgagctgggggagcgcgggccactgggagtgcgggcagagccgcgggagctgtgggaggacaggtggctggcgtggcagaggcggcctgagtcccaggagatagtgtcaactgaggtgacaccctcctcggccaggcgggcctccaaggcggcgtagcggcgggcaagggagcggtaagcctcaaggagtaggtcgtgctgagtggcctgagcctccgaaagctcaaccatgcgagtcagcactggctgagactcgctgtacggacaagggtacctggcgtctgagtggccagaaggaaggcgtggaagctgccggaaggcggagcctccgagacggtggctgtagtcgtgggccaggcgacgaagcgcagtccaggagaggtcctggtacgcgatctggagagtgggcctggccacagtgaagtggtgggggcgaaggccagctccgtgtatacctccacgggggtaaaggtataccgagagctcatagtgagggggaacacggtccacggagtaccccgtgtactcgggacacgagaagccaaggaaacgggagaggtcacgaagctgagcgacgtggtgaccctcaccaaaaccgtgggaactgaagctggcgttcactgccat

SEQ ID NO: 23364 - DNA, 4092 bp, Oryza sativa
  Clone ID: TF_OsC1517_1473
ctaggttgcctcatcttcagaatggttgctccattggactttgtagaacttgatggtcttccttcgagtctgacgttctgcctcttcaagaaccttgatcggtctttccttgtaggtcagattcttttccagcacgatattacccaggggaacttgttcttctggaacacggagacatttctttaactgggatacgtggaacacgttgtgcacatctacgagaccttcaggtaactcaagctgataagccacttcgccacgtctggcggttatgaggtaggggccgatgtagcggggtgctaacttgccggacattccaaacctcctcataccacggaggggcgatacccgcaggtacacatgatctcctttttcgaactcaaggtcacgcctccgattgtcagcgtaattcttctgacggttctgcgctgtcttcaaacgttctcggatcagcttaacttgttcttctgctgccttgagtatgtcaggaccgaataccagtgcttcgcccacctcattccagcacaagggagtgcggcactttcttccgaacattgcctcattcggcgacatctgaatgctggcctgatagctgttgttgtatgagaactccgcatacggcaaacaacaatcccaagtgccttcgaaatccagggcgcacgcacgcaacatgtcttctaggatttggtttaccctttcggtctgaccatcggtctgcggatggtaggccgtactaaaatttagatcggttccgagggcttcatgcaactgcttccagaaccttgaggtgaactgagtgcctcggtctgacacaattttcttgggacagccaaatctacatacgacatgggtcatgtagagttctgctagtttctttccatcaaaggtggttttcactggcacgaaatgagctgatttcgtgagtcggtccacgattacccagatggagtcgtacccgctaggtgttcttggcaaaccggtgatgaaatccattccgatctcttcccatttccactcgggaatcggtaggggttgcagcagaccagctggcctctgatgctctgccttgactatcttcgtacttcctggatgaatggagtaggcggactcatgagcttcctttaggatgagatctcttaactccttcttggccggtacacagatgcgtggaccgcaccaaactgtgccttgatcgtctatggagaaatcggtgtctttcttctcttgtattctttttattaattcttttatcccttcgtcatctttctgagcctcccggatttgcgattctagggttggctgcaccgtcaagctggcagggacacctgactgtaccacggtcagcctcaacttctccaattctctgcacaggcggtcttggtcaggccgtatttgagctacattactgtaggccttgcgacttagcgcatcaccgaccacattagctttaccggggtggtcatgaattccaagatcgtaatccttgattagttccaaccatcttctttgcctcatatttaactcggtctgagtgaagatgtacttaagacttttgtgatcggtgtatacttcacatctgttcccgattaaatagtgcctctttcgttcttgcattaggacacatcctaagccttgtcttgatgcatcacagaagatctcgaaatcttttcggatatctagcaaggtgagaactggggcagtagtcaaccttttcttcattttttgaaagctgtcttcacaggctgcagaccattgaaatttattttccttctttaacagctcggtcataggtctggctagcttagagaatccttcaatgaatcttcgataatatccagctaagtcaaggaagctgcgaatctctgacacattcttgggtgggttccaagcaagtacagcttcaaccttgctgggatctacttcgacaccgttggaggagatcacgtgtccaagaaatgctactcggtctaaccagaattcgcatttcgagaatttagcgaatagttgatgatccctgagcttttccattatcagcctcaggtgttcagcatgttcttccttattcttggagtatatcaggatatcgtcgatgaacaccacgacaaactggtccaggtattccatgaagattttgttcattaagttcatgaagaatgctggagcattggtgagtccgaaggacatcactgtgaactcatatagaccataacgcgttgagaaagcggtcttcgggatatcttcagatctgattttcagttggtggtaacctgatctcaagtcaatttttgagaaaactcttgctcctttaagttgatcgaacaaatcgtcaatctgtggcaacgggtacttgttctttatagttacttcattcagggctctatagtcgattaccattctctcagagccatcctttttcttaaccagaagcactagggctccccaaggggatgagctaggtcgcacataactcttactctccaattcttcgatttgtcttttaacttctgctaactcattagctgccattcggtagggtctttttgcaattggtgcggtgcctggtgccagttctatggtgaactcaatctctcggtctggtggcatactcgttaattcttctggaaatacgtcgggatattcatagactatgggcaccgactccaaggaggtgacttgtaaacaggttaggatagaccgacttgcggtaggggtgttagaggtaaagcggacttgctttcctccaggtccttgcaaggtgatggacttttcggcacaatctatctgtcctttgtgcttagccaaccaatccatccctaggatgatgtccaagctttgcgagtctaggactatcggtttggctagaaagtcaacttcctcaattctaaggttaacttccgggcatatttgagtggcccttatattcctcccaggggaatgtactatcattggtacacgcaaattttgggttttccaaccatttcttttcacaaaagcttgtgatatgaaagaatggaaagctcctgaatcaaatagaactattgcgggtacggagttgacagagaacatacccatcacgacgtctggagcatcctgagcggtctcagcttgaatgtggttcacccggcctcgaccaaagttgttggaagcacgtgaaccttgtccacttgcctgagagctaggacgaggctgagctgccgctggagtaggagttctggcagtgctgccattagcatgccctgagttggtgttggtaggattctgagggcactgtctggcatagtgacccatctggttgcaccggaaacactgaactgctgacggtccctgcggtgacttgaaagaggtaacactgtttggcgcagtattgccactaggggcacgctgctgtggctgaggtgccggacggttcatctgaggacgaggggcgtagcctggctggcggttagcctgagtgaccgactggtgatattgcatgggttgaccgtagcgagggcgaggtgcgcctcgggaagaatttccctgatggttagacttgcgtttcttgtattcttcggtagcctcttttctggcatcttcaagtagaagtgccatgttgatcatatgttgaaaagtggggaagtcatgagcaagcaactggagtctcattccaacagcgatccctttcaagaatttcctgatcttcttcttgtctgtgtccacttcctcaggggcgtaccgagccaacttgttgaacatacttaggtactcattgacactgctgttgccttgcttaagtctgttgaattcctctttcttcatgtcaatagtgctttcaggcacatgagctacacggaaagccgtagcaaactcatcccaagcaatgttagtgggttcagggtgtgcattgcagtaattctcccaccaatctgcagcaggtcctcttagctggtgagaggcgtagagcgtcttctcaacaggagtacactgcactaagttgagttttctatcaacatctttcagccaatcgtcagcctcgacgggctcgacggtctgagagaactctggcggacgagacctcagaaaatctgtcagcttggatctattgttgctcat

SEQ ID NO: 23365 - DNA, 4974 bp, Oryza sativa
  Clone ID: TF_OsC1517_1474
ctaagggagcagctccgggaactcggcgcggagaagatcttctcgctcccaggttgcctcatcttcagaatgattgctccactggactttgtagaacttgatggtcttccttcgagtctgacgttctgcctcttccagaaccttgatcggtctttccttgtaggtcagattcttttccagttcgatattacccagggggacttgctcttctggaactcgaagacatttctttaactgggatacgtgaaacacgttatgcacgtctgcgagaccttcaggtagctcaagctgatatgccacttcgccacgtctggcggttatgaggtaggggccgatgtagcggggtgctaacttgccggacatcccaaacctcttcataccacggaggggtgatacccgcaggtatacatgatctcctttttcgaactcaaggtcacgcttgagtatgtcaggaccgaataccagcgcttcgcccacctcattccagcacaagggagtgcggcactttcttccaaacattgcctcattcggcgacatctgaatgctggcctgataactgttgttgtatgagaactcagcatacggcaaacaacgatcccaagtgccttcgaaatccaaggcacacgctcgcagcatgtcttctaggatttggtttaccctttctgtctgaccatcggtctgcggatggtaggctgtactaaaatttagatcagttccgagagcttcatgcaactgcttccagaaccttgaggtgaactgagtgcctcgatccgacactattttcttgggacaaccaaacctacatacgacatgggttatgtagagctctgctagtttccttccatcataggtggttttcactggcacgaaatgagctgatttcgtgagtcgatccacgattacccagatggagtcgtacccgctaggggttcttggcaaaccggtgatgaaatccattccgatctcttcccatttccacccggggatcggtaggggttgcagcagaccagctggcctctgatgctctgccttgactctttggcaaatgtcacacaaggctatgtattctgcgacatctcgcttcattccagcccaccagaagtatgccttgatatcttggtacatcttcgtacttcctggatgaatggagtaggcggactcatgagcttcttttaggatgagatctcttaactccttcttggccggtacacagatgcgtggaccgcaccaaactgtgccttgatcgtctatggagaaattagcgtctttcttctcctgtattctttttattaactcttttatcccttcgtcatctttctgagcctcccggatttgcgattctagggtaggctgtactgtcaagctggcagggactcctgactgtaccacggtcagccttaacttatccaattctctgtacagatgatcttggtcaggccgtatttgagctacattgcaataggccttgcgacttagcgcatcagcgaccacgttggctttaccaggatgatagtggattccaagatcgtaatccttgattagttccaaccatcttctctgcctcatatttaactcggtctgtgtgaagatatatttaagacttttgtgatcggtgtatacttcacatctgttcccgattaaatagtgcctccagatcttaagtgcatgaaccacggctgccaactcgagatcatgggtgggataattgacttcatgaggcctgagctgcctggatgcataggccacaacctttcgttcttgcattaggacacatcctaagccttgtcttgatgcgttacagaagatctcgaaatcttttcggatatctggcaaggtgagaactggtgcagtggtcaaccttttcttcatttcttgaaagctgtcttcacaggctgcagaccattgaaatttcttctccttctttaacagctcggtcataggtctggctagcttagagaatccttcaatgaatcttcgataatatcccgctaagccaaggaaactgcggatctctgacacgttcttgggcgggttccaagcaagtacagcttcaaccttgctgggatctacttcgacaccgttggaggaaatcacgtgtccaagaaatgctactcggtccaaccagaattcgcatttcgagaatttagcgaatagttgatgatctctgagcttttccattatcagcctcaggtgttcagcatgttcttccttgttcttggagtatatcaggatgtcatcgatgaacaccacgacaaactggtccaggtattccatgaagattttgttcattaagttcatgaagaatgctggagcattggtgagtccgaaggacataactgtgaactcatatagaccataacgcgttgagaaagcggtcttcgggatatcttcagatctgattttcagttggtggtaacctgaccattctctcagagccatcctttttcttaaccagaagcactggggctccccaaggggatgagctaggtcgcacataacctttactttccagttcttcaatttgcttttaacttctgctaactcattagctgccattcggtagggtctttttgcaattggagctgtgcctggtgccagttctatggcgaactcgatctctcggtctggtggcattctcgttaattcttccggaaatacgtcgggatattcacagactatgggcaccgactccaaggaggtgacttgtaaacaggttaggatagaccgacttgcggtaggggtgttaggggtaaagcggacttgctttcctccaggtcccattacaacgtctagagcatcctgagcggtttcagcttgaatgtgattcacacgtcctcgaccaaagttgttggacgcacgagaaccttgtccacttgcctgagagctaggacgagactgagctgccgctggagtaggagttctggcagtgctgccattagcatgccctgagttgttgttggtaggattctgaggacactgtctggcatagtgtcccatctggttgcaccggaaacactgaactgctgacggtccctgtggtgacttgaaagaggtaacactgtttggcgcagtattgccactaggggcacgctgctgtggctgaggtgccggatggttcatctgaggacgaggggcgtagcctggctggcggttagcctgagttaccgactggtgatattgcatgggttgaccgtagcgagggcgaggtgcgcctcggaaagaatttccctgatggttagacttgcgtttcttgtattcttcggtagcctcttttctggcatcctcaagtagaagtgctttgttgatcatatgttgaaaagtggggaagtcatgagcaagcaactggagtctcattccaactgcgattcccttcaagaacttcctgatcttcttcttgtctgtgtccacttcctcaggggcgtaccgagccaacttgttgaacatacttaggtactcattgacactgctgttgccttgcttaagtctgttgaattcttctttcttcatgtcaatagtgctttccggcacatgagctgcacggaaggccgtagcaaactcatcccaagcaatgttagtgggttcagggtgtgcattgcagtaattctcccaccaatctgcggcaggtcctcttagctggtgagaggcgtagagcgtcttctcaaccggagtacactgcactaagttgagttttctatccacatctttcagccaatcgtcagcctcgacgggctcgacggtctgagagaactctggcggacgagacctcagaaagtttgtcagcttggatctattgttgctcatgtgagggtggccatttccatgcgcattatgctgaaaaccggctacggctgcggctaaaccttgcaagatttgtgtctgaactgccattaagtgttgcatgttgttttccacatgaggtggggaagggaggcgttcttctccagaattgtgactgacagtgtggtgagagcggtgggactgttccatttctgcattacgggaagctgtacgatgcgaacggttgctgcggtgagactgctcattagccgactcatgattttcttctggctcaactctaccatcttcaaaaccaaagtgggctggtgcacgagctgcacggcgggggcggctagccatctgtcgagggccggcagcagcacgggccgctggcggtaggggagctgggtagtggaaacggaacacggtggcagaaccaacaacacgcttccgcgcagtgcggataaagcgtgggccacggcgggaggaagcaactggggtgtgtcctggggtgtaggaagggctaactgggtgtgggtagggcgagtacactggtgagtacggcgcacgcgagctgggggagcgcgggccactgggagtgcgggtagagccgcgggagctgtgggaggacaggtggctggcgtggcagaggcggcctgagtcccaggagatagtgtcaactgaggtgacaccctcctcggccagacgggcctccaaggcggcgtagcggcgggcaagggagcggtaagcctcaaggagtaggtcgtgctgagtggcctgagcctccgaaagctcaaccatgcgagtcagcactggctgaggctcgctgtacggacaagggtacctagcgtctgagtggccagaaggaaggcgtggaagctgccggaaggcggagcctccgagacggtggctgtagtcatgggccaggcgacgaagcgcagtccaggagagatcctggtacgcgatctggagagtgggcctggccacggtgaagtggtgtgggcgaaggccagctccgtgtatacctccacgggggtaaaggtacacagagagctcacagtgagggggaacacggtccacggagtaccccgtgtactcgggacacgagaagccaaggaaatgggcgaggtcacgaagctgagcgacgtggtgaccctcaccaaaaccgtgggaactgaagctggcattcactgccat

SEQ ID NO: 23366 - DNA, 4044 bp, Oryza sativa
  Clone ID: TF_OsC1517_1486
ctaagggagcagctccggaaactcggcgcggagaagatcttctcgctcccaggttgcctcatcttcagaatggttgctccattggactttgtagaacttgatggtcttccttcgagtctgacgttctgcctcttcaagaaccttgatcggtctttccttgtaggtcagattcttttccagcacgatattacccaggggaacttgctcttctggaactcgaagacatttctttagctgggatacgtggaacacgttgtgcacatctgcgagaccttcaggtagctcaagctgataagccacttcgccacgtctggcggttatgaggtaggggccgatgtagcggggtgctaacttgccggacatcccaaacctcctaacgggtttccactcgggaatcggtaggggttgcagcagaccagctggcctctgatgttccgccttgactctttggcaaatgtcacacagggctacgtattctgcgacatctcgcttcattccagcccaccagaagtatgccttgatatcttggtacatcttcgtacttcctggatgaatggaataggcggactcatgagcttcctttaggatgagatctcttaactccttcttggccggtacacagatgcgtggaccgcaccaaactgtgccttggttgtctatggagaaattggtgtctttcttctcctgtattctttttattaattcttttatcccttcgtcgtctttctgagcctcccggatttgcgactctagggtaggctgtactgtcaagctggcagggacacctgactgtaccacggtcagcattaacttctgcaattctctgcacaggtgatcttggtcaggccgtatttgagctacattgcaataggccttgcgacttagcgcatcagcgaccacgttggctttaccagggtgatagtggattccaagatcgtaatccttgattagttccaaccatcttctctgtctcatatttaactcggtctgtgtgaagatatacttaagacttttgtgatcagtgtatacttcacatctgttcccgattaaatagtgcctccagatcttaagagcatgaaccacggctgccaactcgagatcatgggtgggataattgacttcatgaggcctgagctgcctggatgcataggccacaacctttcgttcttgcattaggacacatcctaagccttgtcttgatgcatcacagaagatctcgaaatcttttcggatatctggcaaggtgagaactggggcagtggtcaaccttttcttcatttcttggaagctgtcttcacaggctgcagaccattgaaatttcttttccttctttaacagctcggtcataggtctggctagcttagagaatccttcaatgaatcttcgataatatccagctaagccaaggaagctgcggatctctgacacattcttgggcgggttccaagcaagtacagcttcaaccttgctgggatctacttcgacaccattggaggaaatcacgtgtccaagaaatgctactcggtctaaccagaattcgcatttcgagaattttgcgaatagttgatgatccctaagattttccattatcaacctcaggtgttcagcatgttcttcctcgttcttggagtatatcaggatgtcatcgatgaataccacaacaaactggtccaggtattccatgaagattttgttcattaagttcatgaagaatgctggagcattggtgagtccgaaggacattactgtgaactcatatagaccataacgcgttgagaaagcggtctttgggatatcttcagatctgattttcagttggtggtaacctgacctcaagtcaatttttgagaaaactcttgctcctttaagttgatcgaataaatcgtcgatccgtggcaacgggtacttgttctttatagttacttcattcagggctctatagtcgattaccattctctcagagccttcctttttcttaaccagaagcactggggctccccaaggggatgagctaggtcgtacataacctttactttccagctcttcgatttgtcttttaacttctgctaactcattagctgccattcggtagggtctttttgcaattggtgcggtgcctggtgccagttctatggcgaactcaatctctcggtctagtggcattcttgttaattcttccggaaatacgtcgggatattcacaaactatgggcaccgactccaaggaggtgacttgtaaacaggttaagatagaccgacttgcggtaggagtgttaggggtaaagcggacttgctttcctccaggtccttgcaaggtgatggacttttcggcacaatctatctgtcctttgtgcttagccaaccaatccatccctaggatgatgtccaagctttgcgagtctaggactatcggtttggctaggaagtcaacttcctcaattctaaggttaacttccgggcatatttgagttgcctttatattccttccaggggaatgtactatcattggtacacgtaaattttgggttttccaaccatttcttttcacaaaagcttgtgatatgaaagaatgggaagctcctgaatcaaacagaactattgcgggtacggagttgacagagaacatacccatcacaacgtctggagcatcctgagcggtttcagcttgaatgtgattcacacggcctcgaccaaagtggttggaagcacgtgaaccttgtccacttgcctgagtgctaggacgagacttagctgccgctggagtaggagttctggcagtgctgccattagcatgccctgagttggtgttggtaggattctgagggcactgtctagcatagtgacccatctggttgcaccggaaacactgaactgctgacggtccttgaggtgacttgaaggaggtaacgctgtttggcgcagtattgccactaggggcacgctgctgtggctgaggtgccggacggtttatctgaggacgaggggcgtagcctggctggcggttagcctgagtgaccgactggtggtattgcacgggttgaccgtagcgagggcgaggcgcgcctcgggaagaatttccctgatggttagacttgtgtttcttgtactcttcggtagcctcttttctggcatcctcaagtagaagtgccttgttgatcatgtgttgaaaagtggggaagtcatgagcaagcaactggagtctcatcccaactgcgattcccttcaagaacttcctgatcttcttcttgtctgtgtccacctcctcaggggcgtaccgagccaacttgttgaactgacttaggtactcattgacactggtgttgccttgcttaagcctgttgaattcctctttcttcatgtcaatggtgctttcaggcacatgagctgcacggaaagccgtggcaaactcatcccaagcaatgttagtgggttcagggtgtccattgcagtaattctcccaccaatctgcagcaggtcctcttagttggtgagaggcgtagagcgtcttctcaacaggagtacactgcactaagttgaattttctttcaacatccttcagccaatcgtcagcctcgacgggctcgacggtctgagagaactctggcggacgtgaccttagaaaatctgtcagcttggatctattgttgcccatgtgagggtggccatttccatgcacattatgctgataaccggctacggctgcggctattccttgcaagatttgtgtctgaactgccattaagtgttgcatgttgttttccacatgaggtggggaagggaggcgttcttctccagaattgtgactagcagtgcggtgagagcggtgagactgttccatctctgaatcacgggaagctgtgcgatgcgagcggttgctacggcggggttgctcaacttctgcgttacgggaaacagtacggtgcgaattgttgctgcggtgagactgctcattagctgattcatgatttgcttctggttcgactctaccttcttcaaaaccgaagtgggctggcgcacgagctgcacggcaggggcggctagccat

SEQ ID NO: 23367 - DNA, 1983 bp, Oryza sativa
  unsure (1)..(1983): unsure at all n locations
  Clone ID: TF_OsC1517_1505
gctaactcattagctgccattcggtagggtctttttgcaattggagctgtgcctggtgccagttctatggcgaactcgatctctcggtctggtggattctgttaattctccggaaacccaaaagggaaaacnccctttaatggggcacccgactcccaaggaggtgacttgtaaacaggttaggatagaccgacttgcggtaggggtgttaggggtaaagcggacttgctttcctctaggtccttgcaaggtgatggacttttcggcacattctatctgtcctttgtgcttagccaaccaatccatccctagaatgatgtccaagctttgcgagtctaggactatcggtttggctaggaagtcaacttcctcaattctaaggttaacttccgggcatatttgagttgcccttatattccttccaggggaatgtactatcattggtacacgcaaattttgggttttccaaccatttcttttcacaaaagcttgcgatatgaaagaatgggaagctcccgaatcgaacagaactattgcgggtacggagttgacagagaacatacccatcacaacgtctggagcatcctgagcggtttcagcttgaatgtgattcacacggcctcgaccaaagttgttggaagcacgtgaaccttgtccacttgcctgagagctaggacgagactgagttgccgctggagtaggagttctggcagtgctgccattagcatgccctgagttggtgttggtaggattctgaggacactgtctagcatagtgacccatctggttgcaccggaaacactgaactgctgacggtccctacggtgacttgaaagaggtaacgctgttaggcgcagtattgccactaggggcacgctgctgtggctgaggtgcccgaccggtttatctgaggacgaggggcgtagcctggcttgcggttagcctgagtgaccgactggtggtattgcatgggttgaccgtagcgaggcgagaggtgcgcctcgggaagaatttccctgatggttagacttgcgtttcttgtattcttcggtagcctctttcctggcatcctcaagtagaagtgcgttgttgatcatatgttgaaaagtggggaagtcatgagcaagcactggagtctcattccaactgcgattcctttcaagaatttcctgatcttcttcttgtctgtgtccacttcctcaggggcgtaccgagccaacttgttgaactgactttaggtactcatttgatactgctgttgccttgcttaagtctgttgaattcttctttcttcatgtcaatagtgctttcaggcacatgagctgcacggaaagccgtagcgaactcatcccaagcaatgttagtgggttcagggtgtgcattgcagtaattctcccaccaatctgcggcaggtcctcttagttggtgagaggcgtagagcgtcttctcaacaggagtacactgcactaagttgagttttctatcaacatctttcaaccaatcgtcagcctcgacgggctcgacggtctgagagaactctggcggacgagacctcaaaaagtctgtcagcttggatctgttgttgcccatgtgagggtggccatttccatgcgcattatgctgaaaactggctatggctgtggttagtccttgcaagatttgtgtctgaactgccattaagtgttgcatgttggtttccacatgaggtggggaagggaggcgttcttctccagaattgtgactggcagtgcggtgagagcggtgagactgttccatctctgcatcacgggaaactgtgcgatgcgagcggctgctgcggcggggttgctcaacctctgcgttgcgggaaacagtacgatgcgaacggttgctgtggtgagactgctcattagctgattcatgattttcttctggctcaactctaccatcctcaacaccaaagcgggctggtgcacgagctgcacggcggggacggctagccat

SEQ ID NO: 23368 - DNA, 4953 bp, Oryza sativa
  Clone ID: TF_OsC1517_1525
atgacggaacgggcgctacagaccaacccccctaacaagaatctcgaccccgagattcagcacctaagggagcaggtccgggaactcggcgcggagaagatcttctcgctcccaggttgcctcgtcttcggaatgattgctccattggactttgtagaacttgatggtcttccttcgagtctgacgttctgcctcttcaagaaccttgatcggtctttccttgtaggtcagattcttttccagctcgatattacccaggggaacttgctcttctggaactcgaagacatttctttaactgggatacgtggaacacgttgtgcacgtctgcgagaccttcaggtagctcaagctgataagccacttcgccacgtctggcggttatgaggtaggggccgatgtagcggggtgctaacttgccggacatcccaaaccttctcataccacggaggggtgatacccgcaggtacacatgatctccacacatgatctcctttttcgaactcaaggtcacgcctccgattgtcagcgtaattcttctgacggttctgtgcagtgctttgcccacctcattccagcacaagggggtgcggcactttcttccgaacattgcctcattcggcgacatctgaatgctggcctgataactgttgttgtatgagaactcggcatacggcaaacaacgatcccaagtgccttcgaaatccaaggcacacgcacgtagcatgtcttctaggatttggtttaccctttcggtctgaccatcggtctgcggatggtaggctgtactaaaattcagatcagttccgagggcttcatgcaactgcttccagaaccttgaggtgaactgagtgcctcggtctgacacaattttcttgggacagccaaatctacatacgacatgggtcatgtagagttctgctagtttctttccatcataggaggttttcactggcacgaaatgagctgatttcgtgagtcggtccacgattacccaaatggagtcgtacccgttgggggttcttggcaaaccggtgatgaaatccattccgatctcttcccatttccactcgggaatcggtaggggttgcagcagaccagctggcctctgatgttccgccttgactctttggcaaatgtcacacagggctacgtattctgcgacatctcgcttcattccagcccaccagaagtatgccttgatatcttggtacatcttcgtacttcctgggtgaatggagtaggcggactcatgagcttcctttaggatgagatctcttaactccttcttggccggtacacagatgcgtggtccgcaccaaactgtgccttgatcgtctatggagaaatttgtgtctttcttctcctgtattctttttattaattcttttatcccttcgtcgtctttctgagcctcccggatttgcgactccagggtaggctgtattgtcaagctggcagggacacctgactgtaccacggtcagtcttaacttctccaattctctgcacaggtgatcttggtcaggccgtatttgagctacattgcaataggccttgcgacttagcgcatcagcgaccacgttggctttaccaggatgatagtggattccaagatcgtaatccttgattagttccaaccatcttctctgtctcatatttaactcggtctgagtgaagatatacttaagacttttgtgatcggtgtatacttcacatctgttcccgattaaatagtgcctccagatcttaagagcatgaaccacagctgccaactcgagatcatgggtgggataattggcttcatgaggcctgagctgcctggatgcataggccacaaccttttgttcttgcattaggacacatcctaagccttgtcttgatgcgtcacagaagatctcgaaatcttttcggatatctggcaaggtgagaactggggcagtggtcaaccttttcttcaattcttggaagctgtcttcacaggctgcagaccattgaaatttcttttccttctttaacagctcggtcataggtctggctagcttagagaatccttcaatgaatcttcgataatatccagctaagccaaggaagctgcggatctctgacacgttcttgggcgggttccaagcaagtacagcttcaaccttgttgggatctacttcgacaccgttggaggaaatcacgtgtccaagaaatgctactcggtccaaccagaattcgcatttcgagaatttagcgaatagttgatgatctctgagcttttccattatcagcctcaggtgttcagcatgttcttccttgttcttggagtatatcaggatgtcatcgatgaacaccatgacaaactggtctaggtattccatgaagattttgttcattaagttcatgaagaatgctggagcattggtgagtccgaaggacataactgtgaactcatatagaccataacgcgttgagaaagcggtcttcgggatatcttcagatctgattttcagttggtggtaacctgacctcaagtcaatttttgagaaaactcttgctcctttaagttgatcgaataaatcgtcaatccgtggcaacgggtacttgttctttatagttacttcattcagggctctatagtcgattaccattctctctgagccatcctttttgtcgggatattcatagactatgggcaccgactccaaggaggtgacttgtaaacaggttaggatagaccgacttgcggtaggggtgttaggggtaaagcggacttgctttcctccaggtccttgcaaggtgatggacttttcggcacaatctatctgtcctttgtgcttagccaaccaatccatccctagaatgatgtccaagctttgcgagtctaggactatcggtttggctaggaagtcaacttcctcaattctaaggttaacttccgggcatatttgagttgcccttatattccttccaggggaatgtactatcattggtacacgcaaattttgggttttccaaccatttcttttcacaaaagcttgcgatatgaaagaatgggaagctcccgaatcgaacagaactattgcgggtacggagttgacagagaacatacccatcacaacgtctggagcatcctgagtggtttctgcttgaatgtgattcacacggcctcgaccaaagttgttggaagcacgtgaaccttgtccacttgcctgagagctaggacgagactgagctgccgctagagtaggagttctggcagtgctaccattagcatgccctgagttggtgttggtaggattctgaggacactgtctagcatagtgacccatctggttgcaccggaaacactgaactgctgacggtccctgcggtgacttgaaagaggtaacactgttaggcgcagtatcgctactaggggcacgctgctgtggctgaggtgccggacggtttatctgaggacgaggggcgtagcctggctggcggttagcctgggtgaccgactggtggtattgcatgggttgaccgtagcgagggcgaggtgcgcctcgggaagaatttccctgatggttagacttgcgtttcttgtattcttcggtagcctcttttctggcatcctcaagtagaagtgccttgttgatcatatgttgaaaagtggggaagtcatgagcaagcaactggagtctcattccaactgcgattcctttcaagaatttcctgatcttcttcttatctgtgtctacttcctcaggggcgtaccgagccaacttgttgaactgacttaggtactcattgacactgctgttgccttgcttaagtctgttgaattcttctttcttcatgtcaatagtgctttcaggcacatgagctgcacggaaagccgtagcgaactcatcccaagcaatgttagtgggttcagggtgtgcattgcagtaattctcccaccaatctgcggcaggtcctcttagttggtgagaggcgtagagcgtcttctcaacaggagtacactgcactaagttgagttttctatcaacatctttcaaccaatcgtcagcctcgacgggctcgacggtctgagagaactctggcggacgagacctcagaaagtctgtcagcttggatctgttgttgcccatgtgagggtggccatttccatgcgcattatgctgaaaactggctatggctgtggttagtccttgcaagatttgtgtctgaactgccattaagtgttgcatgttggtttccacatgaggtggggaagggaggcgttcttctccagaattgtgactggcagtgcggtgagagcggtgagactgttccatctctgcatcacgggaaactgtgcgatgcgagcggctgctgtggcggggttgctcaacctctgcgttgcgggaaacagtacgatgcgaacggttgctgtggtgagactgctcattagctgattcatgattttcttctggctcaactctaccatcctcaaaaccaaagcgggctggtgcacgagctgcacggcggggacggctagccatctgtcgagggccagcagcagcacgggccgctggcggtgggggagctgggtagtggaaacggaacacgttggaagaaccaacaacacgcttccgcgcggtgcggataaagcgtgggccacggcgggaggaagcaactggggtgtgtccgggggtgtaggaagggctaactgggtgtgggtagggggagtacactggtgagtacggcgcacgcgagctgggggagcgcgggccactgggagtgagggcagagccgcgggagctgtgggaggacaggtggctggcgtggcagaggcggcctgagtcccaagagatagtgtcaactgaggtgacaccctcctcggctagacaggcctccaaagcggcgtagcggcgggcaagggagcggtaagcctcaaggagtaggtcgtgctgagtggcctgagcctccgaaagctcgaccat

SEQ ID NO: 23369 - DNA, 4149 bp, Oryza sativa
  Clone ID: TF_OsC1517_1552
ctattggactttgtagaacttgatggtcttctttcgagtctgacgttctgcctcttcaagaaccttggtcggtctttccttgtaagtcagattcttttccagctcgatattacccagagggacttgctcttctggaactcgaagacatttcttcaactgagacacgtgaaacacgttgtgcacatctgcgagaccttcaggtaactcaagctgataagccacttcgccacgtctggcggttatgaggtaggggccgatgtagcggggtgctaacttgccggacatcccaaacctcctcataccacggaggggtgatacccgcaggtatacatgatctcctttttcgaactcaaggtcacgcctccgattgtcagcgtaattcttctgacggttttgcgctgtctttaaacgttctcggattagcttaacttgttcttctgctgccttgagtatgtcaagaccgaataccagcgcttcgcccacctcattccagcacaagggagtacggcactttcttccgaacattgcctcgttcggcgacatctgtatgctagcctgataactgttgttgtatgagaactccgcatacggcaaacaacgatcccaggtgccttcgaaatccaaggcacacgcacgtagcatgtcttctaggatttggtttaccctttctgtctgaccatcagtctgcggatggtagcccgtacttaaatttagatcggttccgagggcttcatgcaactgcttccagaaccttgaggtgaactgagtgcctcgatctgacacgatcttcttgggacagccaaatctacatacgacatgggtcatgtagagttctgctagtttctttccatcaaaggtggttttcactggcacgaaatgagctgatttcgtgagtcggtccacgattacccaaatggagtcgtacccgctaggggttcttggcaaaccggtgatgaaatccatcccgatctcttcccatttccactcgggaatcggtaggggctgtagcagaccagctggcctctggtgctctgccttgactctttggcaaatgtcacacagggctacgtattctgcgacatctcgcttcattctagcccaccagaaatatgccttgatatcttggtacatcttcgtacttcttggatgaatggagtaggcggactcatgagcttcctttaggatgagatctcttaactccttcttggctggtacacagatgtgtggaccgcaccaaactgtgccttggtcgtctatggagaaattggtgtctttcttttcctgtattctttttattaactcttttatcccttcgtcatctttctgagcctcccggatttgcgattctagggtaggctgtactgtcaagctggcagggacacctgactgtaccacggtcagccttaacttctccaattctctgcacaggcgatcttggtcaggccgtatttgagctacattgcaataggccttgcgacttagcgcatcagcgaccacgttagctttaccgggatgataatgaattcccagatcgtaatccttgattagttccaaccatcttctctgcctcatgtttaactcggtctgagtgaagatgtatttaagacttttgtgatcggtgtatacttcacatctctttccgattaaatagtgcctccagattttaagagcatgaatcacggctgccaactcgagatcatgggtggggtaattgacttcatgaggcctgagctgtctggacgcataggccaccacctttcgttcttgcattaggacacatcctaagccttgtcttgatgcatcacagaagatctcaaaatctttttggatatctggcaaggtgagaactggggcagtggtcaaccttttcttcatttcttgaaaactgtcttcacaggctgcagaccattgaaatttcctttccttctttaatagctcggtcataggtctggctagcttagagaatccttcaatgaatcttcgataatatccagctaagccaaggaagctgcgaatctctgacacattcttgggcgggttccaagcaagtacagcttcaaccttgctgggatctacttcgacaccgttggaggagatcacgtgtccaagaaatgctactcggtctaaccagaattcgcatttcgagaatttagcgaatagttgatgatctctgagcttttccattatcagcctcaggtgttcagcatgttcttcctcattcttggagtatatcaggatgtcatcgatgaacaccacgacaaactggtccagcattctctcagagccatcctttttcttaaccagaagcactggggctccccaaggggatgagctaggtcgcacataacctttaccctccaattcttcgatttgtcttttaacttctgctaactcattagctgccattcggtagggtctttttgcaattggtgcagtgcctggcgccagttctatggcgaacacaatctctcggtctggtggcatacttgttaattcttctgggaatacgtcgggatattcacagactatgggcaccgactccaaggaggtgacttgtaaacaggttaggatagaccgacttgcggtaggggtgttagaggtaaagcggacttgctttcctccaggtccttgcaaggtgatggacttttcagcacaatctatctgtcctttgtgcttagccaaccaatccatccctagaatgatgtccaagctttgcgagtctaggactatcggtttggctaggaagtcaacttcctcaattctaaggttaactcccgggcatacttgagttgcccttatattcctcccaggggaatgtacttgtccacttgcctgagagctaggacgagactgagctgccgctggagtaggagttctggcagtgctgccattagcatgccctaagctggtgttggtaggattctgagggcactgtctggcatagtgacccatctggttgcaccggaaacactgaactgctgacggtccctgtggtgacttgaaagaggtaacactgtttggcgcagtattgccactaggggcacgctgctgtggctgaggtgccggacggttcatttgaggacgaggggcgtagcctggctggtggttagcctgagtgaccgactggtggtattgcatgggttgaccgtagcgagggcgaggtacgcctcgggaagaatttccctgatggttagacttgcgtttcttgtattcttcggtagcctcttttctggcatcctcaagtagaagcgccttgttgatcatatgttgaaaagtggggaaatcatgagcaagcaactggagtctcattccaactgcgattcctttcaagaatttcctgatcttcttcttgtctgtgtccacttcctcaggggcgtaccgagccaacttgttgaacatacttaggtactcattgacactgctgttgccttgcttaagtctgttgaattcttctttcttcatgtcaatagtgctttcaggcacatgagctgcacggaaagccgtagcaaactcatcccaagcaatgttagtgggttcagggtgtgcattgcagtaattctcccaccaatctgcagcaggtcctcttagctggtgagaggcgtagagcgtcttctcgaccggagtacactgcactaagttgagttttctatcaacatctttcagccaatcgtcagcctcaacgggctcgatggtctgagagaactctggcggacgtgacctcagaaaatctgtcagcttggatctattgttgctcatgtgagggtggccatttccatgcgcattatgctgaaaaccggctacggctgcggctaatccttgcaagatttgtgtctgaactgccattaagtgttgcatgttgttttccacatgaggtgggaaagggaggcgttcttctccagaattgtgactggcagtgcggtgagagcggtgagactgttccatctctgcattacgggaaactgtgcgatgcgagcggctgctgcggcggggttgctcaacttctgcgttgcgggaagcagtacggtgcgaacggttgctgtggtgagactgctcattagctgactcatgattttcttctggctcaactctaccatcttcaaaaccaaagcgggctggtgcacgagctgcacggcgggggcggctagccat

SEQ ID NO: 23370 - DNA, 5600 bp, Oryza sativa
  Clone ID: TF_OsC1517_1556
atgggccggccggcccaaaaggcggcccagagcgcgcacgggaggggaggagagaggggaccggtggaccaggctcaccgcgcgcggtcccggcctcacggctcgcggtggatcgcgcgcacgcggagggaccgaccggggtcggcccgacccggtctggcccttggaggctagcgcgcggagtggtgatacccgcaggtacacatgatctcctttttcgaactcaaggtcacaccttcgattgtctgcgtaattcttctgacggtgtgctgtcttcaaacgttctcgtatcagcttaacttgttcttcagctgacttgagtatgtctggaccgaataccagtgcttcgcccacctcattccagcacaagggggtgcggcactttcttccgaacattgcctcattcggcgacatctgaatgctggcctgataacttgaggtgaactgagtgcctcggtctgacacaattttcttgggacagccaaatctacatacgacataggtcatgtagagttctgctagtttctttccatcataggtgattttcactggcacgaaatgagctgatttcgtgagtcggtccacgattacccaaatggagtcgtatccgttgggggttcttggcaaaccggtgatgaaatccattccgatctcttcccatttccactcgggagtcggtaggggttgcagcagaccaactggcctctgatgttccgccttgactctttggcaaatgtcacacagggctacgtattctgtgacatctcgcttcattccagcccaccagaagtatgccttgatatcttggtacatcttcgtacttcctggatgaatggaataggcggactcatgagcttccttgaggatgagatctcttaactccttcttggccggtacacagatgcgtggaccgcaccaaactgtgccttggttgtctatggagaaattggtgtctttcttctcctgtattccttttattaattcttttatcccttcgtcgtctttctgagcctcccggatttgcgactctagggtaggctatactgtcaagctggcagggacacctgactgtaccacggtcagccttaacttctccaattctctgcacaggtgatcttggtcaggccgtatttgagctacattgtgataggccttgcgacttagcgcatcagcgaccaccttggctttaccagggtgatagtggattccaagatcgtaatccttgattagttccaaccatcttctctgtctcatatttaactcagtctgtgtgaagatatacttaagactttggtgatcagtgtatacttcacatctgttcccgattaaatagtgcctccagatcttaagagcatgaaccacggctgccaactcgagatcatgggtgggataattgacttcatgaggcctgagctgcctggatgcataggccacaacctttcgttcttgcattaggacacatcctaagccttgtcttgatgcatcacagaagatctcgaaatcttttcggatatctggcaaggtgagaactggggcagtggtcaaccttttcttcatttcttggaagctgtcttcacaggctgcagaccattgaaatttcttttccttctttaacagctcggtcataggtctggctagcttagagaatccttcaatgaatcttcgataatatccagctaagccgaggaagctgcgaatctctgacacattcttgggcgggttccaagcaagtacagcttcaaccttgctgggatctacttcgacaccattggaggaaatcacgtgtccaagaaatgctactcggactaaccagaattcgcatttcgagaattttgcgaatagttgatgatccctgagcttttccattatcaacctcaggtgttcagcatgttcttcctcgttcttggagtatatcaggatgtcatcgatgaataccacaacaaactggtccaggtattccatgaagattttgttcattaagttcatgaagaatgctggagcattggtgagtctgaaggacattactgtgaactcatatagaccataacgcgttgagaaagcggtctttgggatatcttcagatctgattttcagcattctctcagagccatcctttttcttaaccagaagcactggggctccccaaggggatgagctaggtcgcacataacctttactttccagctcttcgatttgtcttttaatttctgctaactcattagctgccattcggtagggtttttttgcaattggtgcggtgcctggtgccagttctatggcgaactcaatctctcggtctggtggcattcttgttaattcttccggaaatacgtcgggatattcacaaactatgggcaccgactccaaggaggtgacttgtaaacaggttaagatagaccgacttgcggtaggagtgttaggggtaaagcggacttgctttcctccaggtccttgcaaggtgatggacttttcggcacaatctatctgtcctttgtgcttagccaaccaatccattcctaggatgttgtccaagctttgcgagtctaggactatcggtttggctaggaagtcaatttcctcaattctaaggttaacttccgggcatatttgagttgcccttatattccttccaggggaatgtactatcattggtacacgtaaattttgggttttccaaccatttcttttcacaaaagcttgtgatatgaaagaatgggaagctcccgaatcaaacagaactattgcgggtacggagttgacagagaacatacccatcacaacgtctggagcatcctgagcggtttcagcttgaatgtgattcacacggcctcgaccaaagtggttggaagcacgtgaaccttgtccacttgcttgagtgctaggacgagactgagctgccgctggagtaggagttctggcagtgctgccattagcatgccctgagttggtgttggtaggattctgagggcattgtctggcatagtgacccatctggttgcaccggaaacactgaactgctgacggtccctgcggtgacttgaaagaggtaacactgtttggcgcaatattgccactaggggcacgctgctgtggctggggtgccgggcggttcatctgaggacgaggggcgtagcctggctggcggttagcctgagtgaccgactggtggtattgcatgggttgaccgtagcgagggcgaggtgcgccttgggaggaattcccctggtggttagatttgcgtttcttgtattcttcggtagcctcttttctggcatcctcaagtagaagtgctgcgattcctttcaagaatttcctgatcttcttcttatctgagtccacttcctcaggggcgtaccgagccaacttgttgaacatacttaggtactcattgacactgctgttgccttgcttaagtctgttgaattcctctttcttcatgtcaatggtgctttcaggcacatgagctgcacagaaagccgtagcaaactcatcccaagcaatgttagtgggttcagggtgtgcattgcagtaattctcccaccaatctgcagcaggtcctcttagctggtgagaggcgtagagcgtcttctcgaccggagtacactgcactaagttgagttttctattaacatctttcaaccaatcgtcagcctcgacgggctcgacggtctgagagaactctggcggacgtgacctcagaaaatctgtcagcttggatctattgttgcccatgtgagggtggccatttccatgcgcattatgctgataaccggctacggctgcggctattccttgcaagatttgtgtctgaactgccattaagtgttgcatgttgttttccacatgaggtggggaagggaggcgttcttctccagaattgtgactggcagtgcggtgagagcggtgagactgttccatctctgcatcacgggaagctgtgcgatgcgagcggttgctgcggcggggttgctcaacctctgcgttgcgggaaatagtacggtgcgaacggttgctgtggtgagactgctcattagctgattcatgatttgcttctgcttcaactctaccatcttcaaaaccaaagcgggctcctgtagtcggctcctcagtcgaagaaacgtcgatcggctgacgcgaagggaccggcggaacctgtcgagggccggcagcagcacgggccgctggcggtgggggagctgggtagtggaaacggaacacggtggaagaaccaacaacacgcttccgcgcggtgcggataaagcgtgggccacggcgggaggaagcaactggggtgtgtccgggggtgtaggaagggctaactgggtgtgggtagggggagtacactggtgagtacggcgcacgcgagctgggggagcgcgggccactgggagtgcgggcagagccgcgggagctgtgggaggacaggtggctggcgtggcagaggcggcctgagtcccaagagatagtgtcaactgaggtgacaccctcctcggccaaacgggcctccaaagcggcgtagcggcgggcaagggagcggtaagcctcaaggagtaggtcgtgctgagtggcctgagcctccgagagctcaaccatgcgagtcagcactggctgagactcgctgtacggacaagggtacctggcgtctgagtggccagaaggaaggcgtggaagctgccggaaggcggaacctccgagacggtgggcgatctggagagtgggcctggccacagtgaagtggtgggggcgaaggccagctccgtgtatacctccacgggggtaaaggtacacagagagctcacagtgagggggaacacggtccacggagtaccccgtgtactcgggacacgagaagccaaggaaacgggcgaggtcacgaagctgagcgacgtggtgaccctcaccaaaaccgtgggaactgaagctggcgttcactgccatctgttaatcgataccagtcccaggaaacagtgctggtatcacaggaagatagaatatcacagcaacagaggtctctttattatagagtaggagtacagtcatgttgggctgtggacagatcccgagctcacaactgcattacaaaaggaaagcggaagccaggactagaccaaacaacacaggcgcgacttgggaactaggccgagaccctaaaactcatcgtagccggcttgctcctggaagaactcctcatcagcaggatccgcttcatcttcttcagcaacgtgcgcggtcccgggtgggacccgcttgtcagcggctcggctcaccgtgcggagggagcacgcggcgcacgcgcgcgggcgggggagggacgcggtgcacgcgcgcggtctgcggaggaacggatgcggcgggcccacgcgcagcctcacggctcgcggtggaacacgcgcacggaaggggctgaccggggtcggcccgtcccgacctcggctgagctggcgcacggcgatacctgtcaggtcgtccccttcctccagccacccgcctccgacggcaaccgccgccgaatccgccacgccgccgcctcctccgctcttcccgcgcccacgccgcgccgctcccgcgtcctccccacgtcgccgcctcttcccccgcat

SEQ ID NO: 23371 - DNA, 4797 bp, Oryza sativa
  Clone ID: TF_OsC1517_1561
atgacattactaacccggatcatccagcccgtggggatcagccacgtcgggagacctccaagctttcatgacaaggcatttcgaaagccgacacagatttaccatatgccgacgagaggggtcccagaccaacaacaggctcaagatgttcaagggtggcttgccttgctcgagatctggagcttgatcctcgaaatcctcgcactgcgggtcttcgggctctgaaaccaggggaacttgctcttctggaattcgaagacatttctttaactgggatacgtggaacacgttgtgcacatctgcgagaccttcaggtagctcaagctgataagccacttcgccacgtctggcggttatgaggtaggggccgatgtagcggggtgctaacttgccggacatcccaaaccttctcataccatggaggggtgatactcgcaggtatacatgatctcctttttcgaactcaaggtcacgtctccgattgtcagcgtaattcttttggcggttctgcgctgtcttcaaacgttctcggatcagcttaacttgttcttctgctgacttgagtatgtcaggaccgaatactagcgcttcgcccacctcattccagcacaagggagtgcggcactttcttccgaacattgcctcattcggcgacatctgaatgctggcctgatagctgttgttgtatgagaactcggcatacggcaaacaacgatcccaagtgccttcgaaatccagggcacacgcacgtagcatgtcttctaggatttggtttaccctttcggtctgaccatcggtctgcggatggtaggctgtactaaaatttagatcagttccgagagcttcatgcaactgcttccagaaccttgaggtgaactgagtgcctcggtctgacacgatcttcttgggacagccaaatctacatacgacatgggtcatgtagagttctgctagtttctttccatcataggtggttttcactagcacgaaatgagctgatttcgtgaggcgatccacgattacccaaatggagtcgtacccgctaggggttcttggcaaaccggtgatgaaatccattccgatctcttcccatttccactcgggaatcggtaggggttgcagcagaccagctggcctctgatgctctgccttgactctttggcaaatgtcacacaaggctacgtattctgcgacatctcgcttcattccagcccaccagaagtatgccttgatatcttggtacatcttcgtacttcctggatgaatggagtaggcggactcatgagcttcttttaggatgagatctcttaactccttcttggccggtacatagatgcgtggaccgcaccaaactgtgccttgatcgtctatggaaaaattggtgtctttcttctcctgtattctttttattaactcttttatcccttcgtcgtctttctgtgcctcccggatttgcgactctagggtaggctgtactgtcaagctggcagggacacctgactgtaccatggtcagccttaacttctccaattctctgcacaggtgatcttggtcgggccgtatttgagctacgttgcaataggccttgcgacttagcgcatcagcgaccacgttggctttaccaggatgatagtggattccaaggtcgtaatccttgattagttccaaccatcttctctgtctcatatttaactcggtctgtgtgaagatatacttaagacttttgtgatcggtgtatacttcacatctgttcccgattaaatagtgcctccagatcttaagagcatgaaccacggctgccaactcgagatcatgggtgggataattgacttcatgaggcctgagctgcctggatgcataggccacaacctttcgttcttgcattaggacacatcctaagccttgtcttgatgcgtcacagaagatctcgaaatcttttcggatatctggcaaggtaagaactggggcagtggtcaaccttttcttcatttcttgaaagctgtcttcacaggctgcagaccattgaaatttcttttccttctttaacagctcagtcataggtctggctagcttagagaatcctttaatgaatcttcgataatatcccgctaagccaaggaagctgcgaatctctgacacattcttggggtatatcaggatgtcatcgatgaacaccacgacaaatgtgaactcgtatagaccataacgcgttgagaaagcggtcttcggaatatcttcagatctgattttcagttggtggtaacctgacctcaagtcaatttttgagaaaactcttgctcctttgagttgatcgaataaatcgtcaatccgtggcaacgggtacttgttctttatagttacttcattcagggctctatagtcgattaccattctctcagagccatcctttttcttaaccagaagcactggggctccccaaggggatgagctaggtcgcacataacctttactctccaattcttcgatttgtcttttaacttctgctaactcattagctgccattcggtagggtctctttgcaattggggcagtgcctagtgccagttctatggcgaactcgatctctcggtctggtggcattcttgttaattcttccggaaatacgtcggggtatgcacagactatgggcaccgactccaaggaggtgacttgtaaacaggttagaatagaccggcttgcggtaggggtgttaggggtaaagcggatttgctttcctccaggtcccatcacaacgtctggagcatcctgagcggtttcagcttgaatgtgattcacacggcctcgaccaaagttgttggaagcacgtgaaccttgtccacttgcctgagagctaggacgagactgagctgccgctggagtaggagttctggcagtgctgccattagcatgtcctgagttggtgttggtaggattctgaggacactgtctagcatagtgacccatctggttgcaccggaaacactgaactgctgacggtccctgtggtgacttgaaagaggtaacactgtttggcgcagtgttgccactaggggcacgctgctgtggcggaggtgccggacggttcatctgagggcgaggggcgtagcctggctggcggttagcctgagtgaccgactggtggtattgcatgggttgaccgtagcgagggcgaggtgcgcctcgggaagaatttccctgatggttagacttgcgtttcttgtattcttcggtagcctcttttctggcatcctcaagtagaagtgccttgttgatcatatgttgaaaagtggggaagtcatgcgcaagcaactggagtctcattccaactgcgatccctttcaagaatttcctaatcttcttcttgtctgtgtccacttcctcaggggcgtaccgagccaacttattgaactgacttaggtactcattgacactgctgttgccttgcttaagtctgttgaattcttctttcttcatgtcaatagtgctttcaggcacatgagctgcacggaaagccgtagcaaactcatcccaagcaatgttagtgggttcaaggtgtgcattgcagtaattctcccaccaatctgcggcaggtcctcttaactggtgagaggcgtagagcgtcttctcaaccggagtacactgcactaagttgagttttctatcaacatctttcaaccaatcgtcagcctcgacgggctcgacggtctgagagaactctggcggacgagacctcagaaagtctgtcagcttggatctgttgttgcccatgtgagggtggccatttccatgcgcattatgctgaaaactggctatggctgtggttagtccttgcaagatttgtgtctgaactgccattaagtgttgcatgttgttttccacatgaggtggggaagggaggcgttcttctccagaattgtgactggcagtgtggtgagagcggtgagactgttccatctctgcatcacgggaaactgtgcgatgcgagcggctgctgcggcggggttgctcaacctctgcgttgcgggaaacagtacggtgcgaacggttgctgtggtgagactgctcattagctgattcatgatttgcttctggttcgactctaccatcttcaaaaccaaagcgggctggcgcacgagctgtacggcgggggcggctagccatcgctagcggtgggggagctgggtagtggaaacggaacacggtggaagaaccaacaacacgcttccgcgcagtgcggataaagcgtgggccacggcgggaggaagcaactggggtgtgtccgggggtgtaggaagggctaactgggtgtgggtagggggagtacactggtgagtacggcgcacgcgagctgggggagcgcgggccactgggagtgcgggcagagccgcgggagctgtgggaggacaggtggctggcgtggcagaggcggcctgagtcccaagagatagtgtcaactgaggtgacaccctcctcggccagacaggcctccaaggcggcgtagcggcgggcaagggagcggtaagcctcaaggagtaggtcgtgctgagtggcctgagcctccgaaagctcaaccatgcgagtcagcactggctgagactcgctgtacggacaagggtacctggcgtctccacgggggtaaaggtacacagagagctcacagtgagggggaacacggtccacggagtaccccgtgtactcgggacacgagaagccaaggaaacgggcgaggtcacgaagctgagcgacgtggtgaccctcaccaaaaccgtgggaactgaagctggcgttcactgccat

SEQ ID NO: 23372 - DNA, 4797 bp, Oryza sativa
  Clone ID: TF_OsC1517_1568
ctaagggagcaggtccgggaactcggcgcggagaagatcttctcgctcccaggttgtctcgtcttcggaatgattgctccattggactttgtagaacttgatggtcttccttcgagtctgacgttctgtctcttcaagaaccttgatcggtctttccttgtaggtcagattcttttctagctcgatattacccaggggaacttgctcttctggaactcgaagacatttctttaactgggatacgtggaacacgttgtgcatatctgcgagaccttcaggtaactcaagctgataagccacttcgccacgtctggcggttatgaggtaggggccgatgtagcggggtgctaacttgccggacatcccaaacctcctcataccacggaggggtgatacccgcaggtatacatgatctcctttttcgaactcaaggtcatgccttcgattgtcagcgtaattcttctgacggttctgtgctgtcttcaaacgttctcgtatcagcttaacttgtacttctgctgacttgagtatgtcaggaccgaatatcagcgcttcgcccacctcattccagcataagggagtgcggcactttcttccgaacattgcctcgttcggcgacatctgaatgctggcctgataactgttgttgtatgagaacttggcatacggcaaacaacgatcccaagtgccttcgaaatccaaggcacacgcacgtagcatgtcttctaggatttggtttaccctttcggtctgaccatcggtctgcggatggtaggctgtactaaaattcagatcagttccgagggcttcatgcaactggttccagaaccttgaggtgaactgagtgcctcggtctgacacaattttcttgggacagccaaatctacatacgacgtgggtcatgtagagatctgctagtttctttccatcataggtggttttcactggcacgaaatgagctgatttcgtgagtcggtccacgattacccaaatggagtcgtacccgttgggggttcttggcaaaccggtgatgaaatccattccgatctcttcccatttccactcgggaatcggtaggggttgcagcagaccagctggcctctgatgttccggcttgactctttggcaaatgtcacacagggctacgtattctgcgacgtctcgcttcattccagcccaccagaagtatgccttgatatcttggtacatctttgtacttcctgggtgaatggagtaggcggactcatgagcttcctttaggatgagatctcttaactccttcttggccggtacacagatgcgtggtccgcaccaaactgtgccttgatcgtctgtggagaaatttgtgtctttcttctcctgtattctttttattaattcttttatcccttcgtcgtctttctgagcctcccggatttgcgactctagggtaggctgtactgtcaagctggcagggacacctgactgtaccatggtcagtcttaacttcaccaattctctgcacaggtgatcttggtcaggccgtatttgagctacattgcaataggccttgcgacttagcgcatcagcgaccacgttggctttaccaggatgatagtggattccaagatcgtaatccttgattagttccaaccatcttctctgtctcatatttaactcggtctgagtgaagatatacttaagacttttgtgatcggtgtatacttcacatctgttcccgattaaatagtgcctccagatcttaagagcatgaaccacggctgccaactcgagatcatgggtgggataattggcttcatgaggcctgagctgcctggatgcataggccacaaccttttgttcttgcattaggacacatcctaagccttgtcttgatgcgtcacagaagatctcgaaatcttttcggatatctggcaaggtgagaactggggcagtggtcaaccttttcttcaattcttggaagctgtcttcacaggctgcagaccattgaaatttcttttccttctttaacagctcggtcataggtctagctagcttagagaatccttcaatgaatcttcgataatatccagctaagccaaggaagctgcggatctctgacacgttcttgggcgggttccaagcaagtacagcttcaaccttgctgggatctacttcgacaccgttggaggaaatcatgtgtccaagaaatgctactcggtccaaccagaattcgcatttcgagaatttagcgaatagtcgatgatctctgagcttttccattatcagcctcaggtgttcagcatgttcttcctcgttcttggagtatatcaggatgtcatcgatgaacaccacgacaaactggtctaggtattccataaagattttgttcattaagttcatgaagaatgctggagcattggtgagtccgaaggacataactgtgaactcatatagaccataacgcgttgagaaagcggtcttcgggatatcttcagatctgattttcagttggtggtaacctgacctcaagtcaatttttgagaaaactcttgctcctttaagttgatcgaataaatcgtcaatccgtggcaacgggtacttgttctttatagttacttcattcagggctctatagtcgattaccattctctccgagccatcctttttcttaaccagaagcactggggctccccaaggggatgagctaggtcgcacataacctttactttccagttcttcgatttgtcttttaacttctgctaactcattagctgccattcggtagggtctttttgcaattggagctgtgcctggtgccagttctatggcgaactcgatctcttggtctggtggcattcttgttaattcttccggaaatacgtcgggatattcacagactatgggcaccgactccaaggaggtgacttgtaaacaggttaggatagaccgacttgcggtaggggtgttaggggtaaagcggacttgctttcctccaggtccttgcaaggtgatggacttttcggcacaatctatctgtcctttgtgcttagccaaccaatccatccctagaatgatgtccaagctttgcgagtctaggactatcggtttggctaggaagtcaacttcctcaattctaaggttaacttccgggcatatttgagttgcccttatattgcttccaggggaatgtactatcattggtacacgcaaattttgggttttccaaccatttcttttcacaaaagcttgcgatatgaaagaatgggaagctcccgaatcgaacagaactattgcgggtacggagttgacagagaacatacccatcacaacgtctggagcatcctgagcggtttctgcttgaatgtgattcacacggcctcgaccaaagttgttggaagcacgtgaaccttgtccacttgcctgagagctaggacgagactgagctgccgctggagtaggagttctggaagtgctaccattagcatgccctgagttggtgttggtaggattctgaggacactgtctagcatagtgacccatctggttgcaccggaaacactgaactgctgacggtccctgcggtgacttgaaagaggtaacactgttaggcgcagtatcgctactaggggcacgctgctgtggctgaggtgccggacggtttatctgaggacgaggggcgtagcctggctggcggttagcctgggtgaccgactggtggtattgcatgggttgaccgtagcgagggcgaggtgcgcctcgggaagaatttccctgatggttagacttgcgtttcttgtattcttcggtagcctcttttctggcatcctcaagtagaagtgccttgttgatcatatgttgaaaagtggggaagtcatgagcaagcaactggagtctcattccaactgcgatttctttcaagaatttcctgatcttcttcttatctgtgtctacttcctcaggggcgtaccgagccaacttgttgaactgacttaggtactcattgacactgctgttgccttgcttaagtctgttgaattcttctttcttcatgtcaatagtgctttcaggcacatgagctgcacggaaagccgtagcgaactcatcccaagcaatgttagtgggttcagggtgtgcattgcagtaattctcccaccaatctgcggtaggtcctcttagttggtgagaggcgtagagcgtcttctcaacaggagtacactgcactaagttgagttttctatcaacatctttcaaccaatcgtcagcctcgacgggctcgacggtctgagagaactctagcggacgagacctcaaaaagtctgtcagcttggatctgttgttgcccatgtgagggtggccatttccatgcgcattatgctgaaaactggctatggctgtggttagtccttgcaagatttgtgtctgaactgccattaagtgttgcatgttggtttccacatgaggtggggaagggaggcgttcttctccagaattgtgactggcagtgcggtgagagcggtgagactgttccatctctgcatcacgggaaactgtgcgatgcgagcggctgctgcggcggggttgctcaacctctgcgttgcgggaaacagtacgatgcgaacggttgctgtggtgagactgctcattagctgattcatgattttcttctggctcaactctaccatcctcaaaaccaaagcgggctggtgcacgagctgcacggcggggacggctagccatgtactgcaccgagttagccatcatggacagctcaaccacccaggcaagttcctgtgcacggatcgagttggccgccat

SEQ ID NO: 23373 - DNA, 5379 bp, Oryza sativa
  Clone ID: TF_OsC1517_1573
ctaagggagcagctccgggaactcggcgcggagaagatcttctcgctcccaggttgcctcatcttcagaatgattgctccattggaccttgtagaacttgatggtcttccttcgagtctgacgttttgcctcttcaagaaccttgatcggtctttccttgtacgtcagattcttttccagctcgatattacccagggggacttgctcttctggaactcgaagacatttctttagctgggatacgtggaacacgttgtgcacatctgcgagaccttcaggtaactcaagctgataagccacttcgccacgtctggcggttatgaggtaggggccgatgtagcggggtgctaacttgccggacatcccaaacctcctcataccacggaggggtgatacccgcaggtatacatgatctcctttttcgaactcaaggtcatgccttcgattgtcagcgtaattcttctgacggttctgtgctgtcttcaaacgttctcgtatcagcttaacttgttcttctgctgacttgagtatgtcaggaccgaatatcagcgcttcgcccaccctttctgtctgaccatcggtctgcggatggtaggccgtactaaaatttagatcagttccgagagcttcatgcaactgcttccagaaccttgaggtgaactgagtgcctcgatctgacacaattttcttgggacagccaaatctacatacgacatgggtcatgtagagttctgctagtttctttccatcataggtggttttcactggcacgaaatgagctgatttcgtgagtcggtccacgattacccaaatggagtcgtacccgttgggggttcttggcaaaccggtgatgaaatccattccgatctcttcccatttccactcgggaatcggtaggggttgcagcagaccagctggcctctgatgctctgccttgactctttggcaaatgtcacacaaggctacgtattccgcgacatctcgcttcattccggcccaccagaagtatgccttgatatcttggtacatcttcgtacttcctgggtgaatggagtaggcggactcatgagcttcctttaggatgagatctcttaactccttcttggccggtacacagatgcgtggaccgcaccaaactgtgccttgatcgtctatggagaaattggtgtctttcttctcctgtattctttttatcaactcttttatcccttcgtcgtctttctgagcttcccggatttgcgactctagggtaggctgtactgtcaagctggcagggacacctgactgtaccacggtcagccttaacttctctaattctctgcacaagtgatcttggtcaggccgtatttgagctacattgcaataggccttgcgacttagcgcatcagcgaccacgttggctttaccaggatgatagtggattccaagatcgtaatccttaattagttccaaccatcttctctgtctcatatttaactcggtctgtgtgaaaatatacttaagacttttgtgatcggtgtatacttcacatctgttcccgattaaataatgcctccagatcttaagagcatgaaccacggctgccaactcaagatcatgggtgggataattgacttcatgaggcctgagctgcctggatgcataggccacaacctttcgttcctgcattacgacacatcctaagccttgtcttgatgcatcacagaagatctcgaaatcttttcggatatctggcaaggtgagaactggggcagtggtcaaccttttcttcatttcttgaaagctgtcttcacaggctgcagaccattgaaatttcttttccttctttaacagctcggtcataggtctggctagcttagagaatccttcaatgaatcttcgataatatccagctaagccaaggaaactgcgaatctctgacacattcttgggcgggttccaagcaagtacagcttcaaccttgctgggatctacttcaacaccgttgggggagatcacgtgtccaagaaatgctactcggtctaaccagaattcgcatttcgagaattttgcgaatagttgatggtccctgagcttttccattatcaacctcaggtgttcagcatgttcttcctcgttcttagagtatatcagaatgtcatcgatgaataccacgacaaactggtccaggtattccatgaagattttgctcattaagttcatgaagaatgctggagcattggtgagtccgaaggacataactgtgaactcatatagaccataacgcgttgagaaagcggtcttcggaatatcttcagatctgattttcagttgatggtaacctgacctcaagtcaatttttgagaagactcttgctcctttaagttgatcgaataaatcgtcaatccgtggcaacgggtacttgttctttatagttacttcattcagggctctatagtcgattaccattctctcagagccatcctttttcttaaccagaagtactggggctccccaaggggatgagctaggtcgcacataacctttactctccaactcttcgatttgtcttttaacttctgctaactcattagctgccattcggtagggtctttttgcaattggagctgtgcctggtgccagttctatggcgaactcgatctctcggtctggtggcattcttgttaattcttccagaaatacgtcgggatattcatagactatgggcaccgactccaaggaggtgacttgtaaacaggttaggatagaccgacttgcggtaggggtgttaggggtaaagcggacttgctttcctgcaggtccttgcaaggtgatggacttttcggcacaatctatctgtcctttgtgcttagccaaccaatccatccctagaatgatgtccaagctttgcgagtctaggactatcggtttggctaggaagtcaacttcctcaattctaaggttaacttccgggcatatttgagttgcccttatattcctcccaggggaatgtactatcattggtacacgcaatttttgggttttccaaccatttcttttcacaaaagcttgcgatatgaaagaatgggaagctcccgaatcgaacagaactattgcgggtacggagtcgacagagaacatacccatcacagcgtctggagcatcctgagcggtttcagcttgaatgtgattcacacggcctcgaccaaagtggttggaagcacgagaaccttgtctacttgcctgagagctaggacgagactgagctgccgctggagtaggagttctggcggtgctgccattagcatgccctgagttggtgttggtaggattctgagggcactgtctagcatagtgacccatctggttgcaccggaaacactgaactgctgacggtccctgtggtgacttgaaagaggtaacactgtttggcgcagtgttgccactaggggcacactgctgtggcggaggtgccggacggttcatctgagggcgaggggtgtagcctggctggcggttagcctgggtgaccgactggtggtattgcatgggttgaccatagcgagggcgaggtgtgcctcgggaagaatttccctgatggttagacttgcgtttcttgtattcttcggtagcctcttttctggcatcctcaagcagaagtgccttgttgatcatatgttgaaaagtggggaagtcatgagcaagcaactggagtctcattccaactgcgattcccttcaagaatttcctgatcttcttcttatctgtgtctacttcctcaggggcgtaccgagccaacttgttgaactgacttaggtactcattgacactgctgttgccttgcttaagtctgttgaattcttctttcttcatgtcaatagtgctttcaggcacatgagctgcacggaaagccgtagcgaactcatcccaagcaatgttagtgggttcagggtgtgcattgcagtaattctcccaccaatctgcggcaggtcctcttagttggtgaaaggcgtagagcatcttctcaacaggagtacactgcactaagttgagttttctatcaacatctttcaaccaatcgtcagcctcgacgggctcgacggtctgagagaactctggcggacgagacctcagaaagtctgtcagcttggatctgttgttgcccatgtgaggatggccatttccatgcgcattatgctgaaaactggctatggctgtggttagtccttgcaagatttgtgtctgaactgccattaagtgttgcatgttggtttccacatgaggtggggaagggaggcgttcttctccagaattgtgactggcagtgcggtgagagcggtgagactgttccatctctgcatcacgggaaactgtgcgatgcgagcggctgctgcggcggggttgctcaacctctgtgttgcgggaaacagtacgatgcgaacggttgctgtggtgagactgctcattagctgattcatgattttcttctggctcaactctaccatcctcaaaaccaaagcgggctggtgcacgagctgcacggcggggacggctagccatctgtcgagggccggcagcagcacgggccgctggcggtgggggagctgggtagtggaaacggaacacggtggaagaaccaacaacacgcttccgcgcggtgcggataaagcgtgggccacggcgggaggaagcaactggggtgtgtccgggggtgtaggaagggctaactgggtgtgggtagggggagtacactggtgagtacggcgcacgcgagctgggggagcgcgggccactgggagtgcgggcagagccgcgggagctgtgggaggacaggtggctggcgtggcagaggcggcctgagtcccaagagatagtgtcaactgaggtgacaccctcctcggccagacgggcctccaaagcggcgtagcggcgggcaagggagcggtaagcctcaaggagtaggtcgtgctgagtggcctgagcctccgaaagctcgaccatgcgagtcagcactggctgagactcgctgtacggacaagggtacctggcgtctgagtggccagagggaaggtgtggaagctgccggaaggcggaacctccgagacggtggctgtagtcgtgggccaggcgacgaagcgcagtccaggagaggtcctggtacgcgatctggagagtgggcctggccacagtgaagtggtgggggcaaaggccagctccgtgtatacctccacgggggtaaaggtacaccgagagctcacagtgagggggaacacggtccacggagtaccccgtgtactcgggacatgagaagccaaggaaacgggcgaggtcacgaagctgggcgacgtggtgaccctcaccaaaaccgtgggaactgaagctggcgttcactgccatcat

SEQ ID NO: 23374 - DNA, 4863 bp, Oryza sativa
  Clone ID: TF_OsC1517_1576
ttatttcttttcgatggttaggttgttgccgacatttctataactaatataaatattcgtatttttccattcgttgcctgataggtgcggtgattttttcgtcacccttgcctccccccaaatcccagtaagaattccatcacccccacatgtgttatcgttaccaagctttccacaagcgacataatagttccgacttcgctgcgaagatgccctcctctccgcctgcatggaggccaccctcaggctcctacgcgcgtgccgctggtcaccggtgccctctctaaaactacgccaccggctttccaccctatgtcgcggcggctgccccatcgtggatcgggccacgggctctagtctcaagactttcagggaggagaagaaaggcacggttttctggtggcttgcttgggcggcaatgaggtagaggtgggaggagatgatgggtcggctggggagggaggcgacgcccgtgtcgcccaacccttgagcgacgcgggcggggaccaagagtatgagcgccttcatcaaaattgctaacgactttgtagtccccaccgcagcttctgacctcaaataggccagatctggcggcactgagaggtggcagcgatggatctgaaggggaagggggtaaagcgatggatcggcgaaggaggtggtgacctctgacctcaaagagccattctggagcttgcttggaccgacggagttggacacggaggcgggggcgtgggcggatgcggcgactagaccaaggccggtgacaagatccgactgccgcgaggtcagtgatgtgaccaagggtagcatgtcttctaggatttggtttaccctttctgtttgaccatcggtctgcggatggtaagctgtactaaaatttagatcggttccgagagcttcatgcaactgcttccagaaccttgaggtgaactgagtgcctcggtctgacacaatcttcttgggacagccaaatctacacacgacatgggtcatgtagagttctgctagtttctttccatcaaaggtggttttcactggcacgaaatgagctgatttcgtgagtcggtccacgattacccagatggagtcgtacccgctaggggttcttggcaaaccggtgatgaaatccattccgatctcttcccatttccactcgggaatcggtaggggttgcagcagacccgctggcctctgattctctgccttgactctttggcaaatgttacacaacgccacgtattctgcgacatctcgcttcattccagcccaccagaaatatgccttgatatcctggtacatcttcgtacttcctggatgaatggagtaggcggactcatgagcttcctttaggatgggatctcttaactccttcaaactgtgccttgatcgtctatttgagaaatcggtgtccttcttctcctgtattctttttattaattcttttatcccttcatcatctttctgagcttcccggatttgcgactctagggtaggctgcacggtcaagctggcagggacacctgactgtaccacggtcagccttaacttctccaattctccgcacaggcgatcttggtctggccatatttgagctacattgtagtaggtcttgcgacttagcgcatcagcgaccacattagctttaccgggatggtaatgaattccaagatcgtaatccttgattagttccaaccatcttctctgcctcatatttaactcggtctgggtgaagatgtacttaagacttttgtgatcggtgtatacttcacatctgttcccgattaaatagtgcctccagatcttaagagcatgaaccacggctgccaactcgagatcatgggtgggatagttgacttcatgaggcctgagctgcctggatgcataggccacaacctttcgttcttgcattaggacacatcctacgccttgtcttgatgcatcacagaagatctcgaaatcctttcggatatctggcaaggtgagaactggggcggtggtcaaccttttcttcatttcttgaaagctgtcttcacaggctgtagaccattgaaatttcttttcattctttaacagctcggtcataggtctggctagcttagagaatccttcaataaatcttcgataatatccagctaagccaaggaagctgtggatctctgacacattcttgggcgggttccaagcaagtacagctccaaccttgctgggatctacttcgacaccgttgaaggagatcacgtgtccaagaaatgctactcggtccaaccagaattcgcatttcgagaatttagcgaatagttgatgatccctgagcttccccattatcagcctcaggtgttcagcatgttcttcctcattcttggagtatatcaggatgtcatcgatgaataccacgacaaactggtccaggtattccatgaagatcttgttcattaagttcatgaagaatgctggagcattggtgattccgaaggacatcactgtgaactcatatagaccataacgcgttgagaaagcggtcttcgggatatcttcagatctaattttcaattggtggtaacctgatctcaagtcaattttagagaaaactcttgctcctttaagttgatcgaacaaatcgtcaatccgtggcaatgcgtacttgttctttatagttacttcattcagggctctatagtcgattaccattctctcagagccatcctttttcttaaccaggagcactggggctccccaaggggatgagctaggtcgcacataacctttactctccaattcttcgatttgtcttttgacttctgctaactcattagctgccatttggtagggtctttttgcaattggtgcggtgcctggtgccagttctatggcgaactcaatctctcggtctggtggcatacttgttaattcttcgggaaatacgtcgggatattcacagactatgggcaccgactccaaggaggtgacttgtaaataggttaggatagaccgacttgcggtaggggtgttagtggtgaagcagacttgctttcctctaggtccttgcaaggtgatggacctttcggcataatctatctgtcctttgtgcttagccaaccaatccatccctaggatgatgtccaagctttgcgagtctaggactatcggtttggctaggaagtcaacttcctcaattctaaggttaacttccgggcatatttgggttgcccttatattcctcccaggggaatgtaccatcacaacgtctggagcatcctgagcggtctcagcttgaatgtggttcacccggcctcgaccaaagttgttggaagcacgagaaccttgtccacttgcctgagagctaggacgagactgagctgccgctggagtaggagttctggcagtgctgccattagcatgccctgagttggtgttggtaggattctgagggcactgtctggcatagtgacccatctggttgcaccggaaacactgaactgctgatagtcctagtggtgacttgaaagaggtaacactatttggcgcagtattgccacttggggcatgctgctgtggctgaggtgccggacggttcatctgaggacgaggggcgtagcctggctggcggttagcctgagtgaccgattggtgatattgcatgggttgaccatagcgagggcgaggtgcgcctcgggaagaattcccctgatggttaaacttgcgtttcttgtattcttcggtagcctcttttctggcatcctcaagtagaagtgccttgttgatcatatgttgaaaagtggggaagtcatgagcaagcaactggagtctcattccaactgcgattcccttcaagaacttcctgattttcttcttgtctgtgtccacttccttaggggcgtaccgagccaacttgttgaactgacttaggtactcattgacactgttgttgccttgcttaagcctgttaaattcctctttcttcgtatcaatggtgctttcaggcacatgagctccacggaaagccgtagcaaactcatcccaagcaatgttagtgggttcagggtgtgcattgcagtaattctcccaccaatctgcagcatgtcctcttagctggtgagaggcgtagagcatcttctcaacaggagtacactgcactaagttgagttttctatcaacatctttcagccaatcgtcagcctcgacgggctcgacggtctgagagaactctggcggacgagacctcagaaagtctgtcagcttggatctattgttgcccatgtgagggtggccatttccatgggcattatgctgaaagccggctatggctgcggctaatccttgcaagatttgtgtctgaactgtcattaagtgctgcatgttgttttccacatgaggtggggaagggatgcgttcttctccagaattgtgactggcagtgcggtgagagcggtgagattgttccacttctgcattacgggaagctgtgtgatgcgagcgattgctgcggtggggttgctcaacttctgcattgcgggaagcagtatggtgcgaacggatgctgtggtgagactgctcattagctgactcatgatttgcttctggctcaactctaccttcctcaaaactgaagcgggctggcatctgcgtagccagaaggaagacgtgggagctgccggaaggcagagcccccgagacggtggctgtagtcgtgggccaagcgacgaagcgcagtccaggagaggtcctggtacgcgatctggagggtgggcctagccacagtgaagtggtgtgggcgaaggccagctccgtgtatacctccgcgagggtaaaggtacacagagagctcacagcgagggggaacacgtccacggagtaccccat

SEQ ID NO: 23375 - DNA, 6033 bp, Oryza sativa
  Clone ID: TF_OsC1517_1586
atggggagggaaggagaaggggaggccgggggtttaaggaggcggcaatgtcggtttggggaaccgacttgcgcggtcaagagcgcgagctggcgctcggctagcggccaaattggcgacagggaggatgacgccggcggagaggcgtgcgcagaggctgacggcggcggcgaccgggcggtcggccacgcgcgcgcggctcgcaacgggaaggcgcggcggatggtgcggcgcggctcggcacgcgcgctggctgcggggccgagcggctgcaggctgcaggcggcagggcagcgggaccgggcggcatccacgcgggcgcgcgcgagcaacggcccgcggggagcggcagcgagggatggggagacggagagcgaggggggggcgctcggggcggcgcgcgagcagcgcgccacgacggaacgggcgctacagaccaacccccctaacaagaatctcgtccccgagattcagcacctaagggagcagctccggaaactcggcgcggagaagatcttctcgttcccaggttgcttcatcttcagaatgattgctccattggactttgtagaacttgattgtcttccttcgagtctgacgttctgcttcttcaagaaccttgatcggtctttccttgtaggtcagattcttttccagctcgatattacctaggggaacttgctcttctggaactcgaagacatttctttaactgggatacgtggaacacgttgtgcacatctgcgagaccttcaggtagctcaagctgataagccacttcgccacgtctggcggttatgaggtaggggccgatgtagcggggtgctaacttgccggacatcccaaaccttctcattcctcggagtggtgatacccgtaggtacacatgatctcctttttcgaactcaaggtcacgcctccgattgtcagcgtaattcttctgacggttctgtgctgtcctcaaacgttctcgtatcagcttaacttgttcttctgctgacttgagtatgtcaggaccgaataccaaggcttcgcccacctcattccagcacaagggagtgcggcaccttcttccgaacattgcctcattcggcgacatctgaatgctggcctgataactgttgttgtatgagaactcggcatacggcaaacaacgatcccaagtgccttcgaaatccaaggcacatgctcgcagcatgtcttctaggatctggtttactctttctgtctgaccatcggtctgcgggtggtaggccgtactaaaattcagatcagttccgagtgcttcatgcaattgcttccagaaccttgaggtgaactgagtgcctcgatccgacactattttcttgggacagccaaatctacatacgacatgagtcatgtagagttctgctagtttctttccatcataggtggtcttcactggcacgaaatgtgctgacttcgtgagtcggtccacgattacccaaatggagtcgtatccgctgggggttcttggcaaaccggtgatgaaatccattccgatctcttcccatttccactcgggaatcggtaggggttgtagcagtccagctggcctttggtgttctgccttgactctttggcaaatgtcacacaaggctacgtattctgcgacatctcgcttcattccagcccaccaaaagtatgccttgatatcttggtacatcttcgtacttcctggatgaatggagtaagcggactcatgagcttcctttaggatgagatttcttaactccttcttggccggtacacagatgcgtggaccgcaccaaattgtgccttgatcgtctatggagaaattggtgtctttcttctcctgtattctttttattaattcttttatcccttcgtcgtctttctgagcctcccggatttgcgactctagggtaggctgtactgtcaagctggcagggacacctgactgcaccacggtcagccttaacttctccaattctctgcacaggtgatcttggtcaggccgtatttgagctatattgcaataggccttgcgacttagcgcatcagcgaccacgttggctttaccaggatgatagtggattccaagatcgtaatccttgattagttccaaccatcttctctgtctcatatttaactcggtctgagtgaagatatacttaagacttttgtgatcggtgtatacttcgcatctgttccctattaagtagtgcctccagatcttaagagcatgaatcacggctgccaactcgagatcatgggtggggtaattgacttcatgaggcctgagctgcctggatgcataggccacaacctttcgttcttgcattaggacacatcctaagccctgtcttgatgcatcacagaagatctcgaagtcttttcggatatctggcaaggtgagaactggggcagtggtcaatcttttcttcatttcttgaaagctgtcttcacaggctgtggaccattgaaatttcttttccttctttaacagctcggtcataggtctggctagcttagagaatccttcaatgaatcttcgataatatccagctaagccgaggaagctgcgaatctccgacacattcttgggcgggttccacgcaagtacagcttcaactttgctgggatctacttcgacaccgttggaggagatcacgtgaccaagaaaagctactcggtccaaccagaattcgcatttcgagaatttagcgaatagttgatgatctctgagcttttccattatcagcctcaggtgttcagcatgttcttcctcattcttagagtatatcaggatgtcatcgatgaataccactacaaactggtccaggtattccataaagattttgttcattaagttcatgaagaatgctggagcattggtgagtccgaaggacattactgtgaactcatatagaccataacgcgtcgagaaagcggtcttcggaatatcttcagatctgattttcagttggtggtaacctgacctcaagtcaatttttgagaagactcttgctcctttaagttgatcgaataagtcgtcaatccgaggcaacgggtacttgttctttatagttacttcattcagggctctatagtcaattaccattctctcagagccatcctttttcttaaccagaagcactggggctccccaaggggatgagctaggtcgcacataacctttactttccagttcttcgatttgtcttttaacttctgctaactcattagcggccattcggtagggtctttttgcaattggagctgtgcctggtgccagttctatggcgaactcaatctctcggtctggtggcattcttgttaattcttccggaaatacgtcgggatattcacagactatgggcaccgactccaaggaggtgacttgcaaacaggttaggatagaccgacttgcggtaggggtgttaggggtaaagcggacttgctttcctccaggtccttgcaaggtgatggacttttcggcacaatctatctgtcctttgtgcttagccaaccaatccatccctaggatgatgtccaagctttgcgagtctaggactatcggtttggctaggaagttaacttcctcaattctaaggttaacttccgggcatatttgagttgcccttatattccttccaggggaatgtactatcattggtacacgcaaattttgggttttccaaccatttcttttcacaaaagcttgcgatatgaaagaatgggaagctcccgaatcaaacaggactattgcgggtacggagttgacagagaacatacccatcacaacgtctggagcatcctgagcggtttcagcttgaatgtgattcacacgtcctcgaccaaagtggttggaagcacgagaaccttgtccacttgcttgagagctaggacgagactgagctgccgctggagtaggagttctggcagtgctgccattagcatgtcctgggctggtgttggtaggattctgaggacactgtctagcatagtgacccatctggttgcaccggaaacactgaactgctgacggtccctgtggtgacttgaaggaggtaacactgtttggcgcagtgttgccactaggggcacgctgctgtggcggaggtgccggacggttcatctgaggacgaggggcgtagcttgactggcggttagcctgagtgaccgactgatggtattgcatgggctgaccgtagcgagggcgaggtgcgcctcgggaagaatttccctgatggttagacttgcgtttcttgtattcttcggtggcctcttttctggcatcctcaagtagaagtgctttgttgatcatatgttgaaaagtggggaagtcatgagcaagcaactggagtctcattccaactgcgattcctttcaagaatttcctgatctttttcttatcggtgtctacttcctcaggggcgtaccgagccaacttgttgaactgacttaggtactcattgacactgctgtggccttgcttgagtctgttaaattcttctttcttcatgtcaatagtgctttcaggcacatgagctacacggaaagccgtagcgaactcatcccaagcaatgttagtgggttcaggatgtgcattgcagtaattctcccaccaatctgcggcaggtcctcttagctggtgagaggcgtagagcgtcttctcaacaggagtacactgcactaagttgagttttctatccacatctttcaaccaatcgtcagcctcgacgggctcgatggtctgagagaactctggtggacgtgacctcagaaagtctgtcagcttggatctattgttgcccacgtgagggtggccatttccatgcgcattatgctgaaagctggctatggctgtggttagaccttgcaagatctgtgtctgaactgccattatgtgttgcatgttgttttccacatgaggtggggaagggaggcgttcttctccagaattgtgactggcagtgcggtgagagcggtgagactgctccaactctgcttcacgggaaactgtgcgatgcgagcggctgctgcggcgaggttgctcaacctctgcgttgcgggaaacagtacggtgcgaacggttgctgtggtgagaatgctcattagctggttcgtgatttgcttctgcttcaactctaccatcttcaaaaccaaagcggactggtgcacgagctgtacgacgggggcggctagccatctgtcgagggccggcagcagcacgggccgctggcggtgggggagctgggtggcggaaacggaacacggtggaagaaccaacaacacgcttccgcgcagtgcggataaagcgtgggccacggcgggaggaagcgactggagtgtgtccgggggtgtaggaagggctaactgggtgtgggtagggggagtacactggtgagtacggcgcacgcgagctgggggagcgcgggccactgggagtgcgagcagagccgcgggagctgtgggaggacaggtggctggcgtggcagagacggcctgagtcccaagagatagtgtcaactgaggtgacaccctcctcggccagacgggcctccaaggcggcgtagcggcgggcaagggagcggtaagcctcaaggagtaggtcgtgctgagtggcctgagcctccgaaagctcgaccatgcgagtcagcactggctgagactcgctgtacggacaagggtatctggcgtctgcgtggccagaaggaagacgtggaagctgccggaaggcggagcctccgagacggtggccgtagtcgtgggccaggcggcgaagcgcagtccaggagaggtcctggtacgcgatctggagagtgggcctggccacagtgaagtggtgggggcgaaggccaactccgtgtatacctccacgagggtaaaggtacacagagagctcacagtgagggggaacacggtccacggagtaccccgtgtactcgggacacgagaagccaaggaaacgggcgaggtcacgaagctgggcgacgtggtgaccctcaccaaaaccgtgggaactgaaactggcgttcactgccat

SEQ ID NO: 23376 - DNA, 5339 bp, Oryza sativa
  Clone ID: TF_OsC1517_1607
ctaagggagcagctccgggaactcggcgcggagaagatcttcttgctcccaggttgcctcatcttcagaatggttgctccattggactttgtagaacttgatggtcttccttcgagtctgacgttctgcctcttcaagaaccttgatcggtctttccttgtaggtcagattcttttccagctcgatattacccagggggacttgctcttctggaactcgaagacatttctttaactgggatacgtggaacacgttgtgcacatctgcgagaccttcaggtaactcaagatgataagccacttcgccacgtctggcggttatgaggtaggggccgatgtagcggggtgctaacttgccggacatcccaaacctccttataccacggagaggcgatacccgcaggtacacatgatctcctttttcgaactcaaggtcacgcctccgattgtcaacgtaattcttctgacggttctgcgctgcctttaaacgttctcggatcagcttaacttgttcttctgctgccttgagtatgtcaggaccgaataccagcgcttcgcccacctcattccagcacaagggagtgcggcactttcttccgaacatttcctcattcgatgacatctgaatgctggcctgataactgttgttgtatgagaactccgcatacggcaaacaacgatcccaagtgccttcgaaatccagggcacacgcacgtagcatgtcttctaggatttggtttaccctttctgtctgaccatcggtctgcggatggtaggccgtactaaaatttagatcggttccgagggcttcatgcaactgcttccagaaccttgaggtgaactgagtgcctcggtctgacacaatcttcttgggacagccaaatctacacacgacatgggtcatgtagagttctgctagtttctttccatcaaaggtggttttcattggcacgaaatgagctgatttcgtgagtcggtccacgattacccagatggagtcgtacccgctaggggttcttggcaaaccggtgatgaaatccattccgatctcttcccatttccactcggggatcggtaggggttgcagcagaccagctggcctctgatgttctgccttgactctttggcaaatgtcacacaaggctacgtattctgcgacatctcgcttcattccagcccaccaaaagtatgccttgatgtcttggtacatcttcgtacttcctggatgaatggagtaggcggactcatgagcttcctttaggatgagatctcttaactccttcttggccggtacacagatgcgtggaccataccaaactgtgccttgatcgtctatggagaaatcggtgtctttcttctcctgtattctttttattaactcttttatcccttcgtcgtctttctgagctttccggatttgcgattctagggtaggctgtactgtcaagctggcagcgacacctgactgtactacggtcagccttaacttttccagatctctgcacaggcgatcttggtcgggccgtatttgatctacattacaataggtcttgcgacttagcgcatcagcgaccacattagccttaccggggtggtaatggattccaagatcgtaatccttgattagttccaaccatcttctctgcctcatatttaactcggtctgtgtgaagatatacttaagacttttgtgatcggtgtatacttcacatctgttcccgattaaatagtgcctccagatcttaagagcatgaaccacggctgccaactcgagatcatgggtgggatagttgacttcatgaggcctgagctgcctggatgcataggccacaacctttcgttcttgcattaggacacatcctaagccttgtcttgatgcatcacagaagatctcgaaatcttttcggatatctggcaaggtgagaactggggcagtggtcaaccttttcttcatttcttgaaagctgtcttcacaggctgtagaccattgaaatttcttttctttctttaacagctcggtcataggtctggctagcttagagaatccttcaatgaatcttcgataatatccagctaagccaaggaagctgcgaatctctgacacattcttgggcgggttccaagcaagtacagcctcaaccttgctgggatctacttcgacaccgttgggggagatcacgtgtccaagaaatgctactcggtctaaccagaattcgtatttcgagaatttagcgaatagttgatgatccctgagcttttccattatcagcctcaggtgttcagcatgttcttcctcattcttggagtatatcaggatgtcattgatgaacaccacgacaaactggtccaggtattccatgaagattttgttcattaagttcatgaagaatgctggagcattggtgagtccgaaggacatcactgtgaactcatatagaccataacgcgttgagaaagcggtcttcgggatatcttctgatctgattttcaattggtggtaacctgatctcaagtcaatttttgagaaaactcttgctcctttaagttgatcgaacaaatcgtcaatccgtggcaacgggtacttgttctttatagttacttcattcagggctctatagtcgattaccattctctcagagccatcctttttcttaaccaggagcactggggctccccaaggggatgagctaggtcgcacataacctttactctccaattcttcgatttgtcttttaacttctgctaactcattagctgccattcggtagggtctttttgcaattggtgcggtgcctggtgccagttctatggcgaactcaatctctcggtctggtggcatactcgttaattcttctggaaatacgttgggatattcacagactatgggcaccgactccaaggaggtgacttgtaaacaggttaggatagaccgactcgcggtaggggtgttagaggtaaagcggacttgctttcctccaggtccttgcaaggtgatggacttttcggcacaatctatctgccctttgtgcttagccaaccaatccatccctaggatgatgtccaagctttgcgagtctaggactatcggtttggctaggaagtcaacttcctcaattctaaggttaacttccgggcatatttgagttgcccttatattcctcccagggaaatgtactatcattggtacacgtaaattttgggttttccaaccatttcttttcacaaaagcttgtgatatgaaagaatgggaagctcctgaatcaaacagaactattgcgggtacggagttgacagagaacatacccatcacaacgtctggagcatcctgagcggtctcagcttgaatgtggttcacccggcctcgaccaaagttgttggaaacacgagaaccttgtccacttgcctgagagctaggacgagactgagctgccgctggagtaggagttctggcagtgctgccattagcatgccctgagttggtgttggtaggattctgagggcactgtcgggcatagtggcccatctggttgcaccggaaacactgaactgctgacggtcctagcgatgacttgaaagaggtaacattgtttggcgcagtattgccactaggggcacgctgctgtggctgaggtgcctgacggttcatctgaggacgaggggcgtagcctggctggcggttagcctgagtgaccgactggtggtattgcatgggttgaccgtagcgagggcgaggtgcgcctcgggaagaatttccctgatggttagacttgcgtttcttgtattcttcggtagcctcttttcgagccaacttgttgaacagacttaggtactcattgacactattattgccttgcttaagtttgttgaattcctctttcttcatatcaatggcgctttcaggcacatgagctgcacggaaagccgtagcaaactcagcccaagcaatgttagtgggttcagggtgtgcattgcagtaattctcccaccaatctgcagcaggtcctcttagctggtgagaggcgtagagcgtcttctcaacaggagtacactgcactaagttgagttttctatcaacatctttcagccaatcgtcagcctcgacgggctcgacggtctgagagaactctggcggacgagacctcagaaagtctgtcagcttggatctattgttgcccatgtgagggtggccatttccatgcgcactatgctgaaaaccggctatggctgcggctaatccttgcaagatttgtgtctgaactgccattaagtgctgcatgttgttttccacatgaggtggggaagggaggcgttcttctccagaattgtgactagcagtgcggtgagagcggtgagactgttccatctctgcattacgggaagctgtgtgatgcgagcggttgctgcggcggggttgctcaacttctgcgttgcgggaagcagtacggtgcgaacggttgctgtggtgagaccgctcattagctgactcatgattttcttctggctcaactctaccttcttcaaaaccgaagcgggctggcgcacgagcagcacggcgggggcggctagccatctgtcgagggccgatagcagcacgggccgctggcggtgggggagctgggtagtcgaatcggaacacggtggaagaaccaacaacacgcttccgcgcagtgcggataaagcgtgggccacggcgggaggaagcaactggggtgtgtccgggggtgtaggaggggctaactgggtgtgggtagggggagtacactggtgagtacggcgcacgtgagctgggggagcgcgggccactaggagtgcgagcagagccgcgggagctgtgggaggacaggtggctggcgtggcagaggcggcctgagtcccaagagacagtgtcaactgaggtgacaccctcctcggccagacgggcctccagagcggcgtagcggcgggcaagggagcggtaagtctcaaggagtaggtagtgctgagtggcctggcgtctgcatggccagaaggaaggcgtggaagctgccggaaggcagagcccccgagacggtggctgtagtcgtgggccaagcgacgaagcgcagtccaggagaggtcctggtacgcgatctggagggtgggcctggccacagtgaagtggtgtgggcgaaggccagctccgtgtatacctccacgagggtaaaggtacacagagagctcacagcgagggggaacacggtccacggagtaccccgtgtacttgggacacgagaagccaaggaagtgggcgaggtcacgaagctgagcgacgtggtgaccctcaccaaaaccgtgggaactgaagctggcgttcactgccat

SEQ ID NO: 23377 - DNA, 5273 bp, Oryza sativa
  Clone ID: TF_OsC1517_1610
atggcggcgaccaggcggtcggccaccacagcacgcgcgcgcggcttgcaatgggaggcgcggcggattgagtggcgcggctcgggcacgcgcgctggctgcggggccgagcggctgcgcggctgcaggcgcggcagggcagcggggccgggcggcgcagacgcgacgcgggcgacgaccacgcgggcgcgcgccacgacggaacgggcgctacagaccaacccccctaacaagaatctcgaccccgagattcatcacctaagggagcagctccgggaactcggcgcggagaagatcttctcgctcccaggttgttttcactggcacgaaatgagccaatttcgtgagtcgatccacgattacccaaatggagtcgtacccgctaggggttcttggcaaaccggtgatgaaatccattccgatttcttcccatttccactcgggaattggtaggggctgtagcagaccagctggcctctggtgctctgccttgactctttggcaaatgtcacacaaggctacgtattctgcgacatctcgcttcattccagcccaccagaagtatgccttgatatcttggtacatcttcgtacttcctggatgaatggagtaggcggactcatgagcttcctttaggatgagatctcttaattccttcttggccggtacacagatacgtggaccgcaccaaactgtgccttgatcgtctatggagaaattggtgtctttcttctcctgtattctttttattaactcttttatcccttcgtcgtctttctgagcttcccggatttgcgactctagggtaggctgtactgtcaagctggcagggacacctgactgtaccacggtcagcctcaacttctccaattctctgcacaggcgatcttggtcaggccgtatttgagctacattgcaataggccttgcgacttagcgcatcagcgaccacgttggctttaccggggtggtaatgaattccaagatcgtaatccttgattagttccaaccatcttctctgcctcatatttaactccgtctgtgtgaagatgtacttaagacttttgtgatcggtgtatacttcacatctgttcccgattaaatagtgcctccagatcttaagagcatgaaccacggctgccaattcgagatcatgggtgggataattgacttcatgaggcctgagctgcctggatgcataggccacaacctttcgttcttgcattaggacacatcctaagccttgtcttgatgcatcacagaagatctcgaaatcttttcggatatctggcaaggtgagaactggggcagtggtcaaccttttcttcatttcttgaaagctgtcttcacaggctgcagaccattgaaatttcttttccttctttaacagctcggtcataggtctggctagcttagagaattcttcaatgaatcttcgataatatccaactaagccaaggaagctgcgaatctctgacacattcttgggcgggttccaagcaagtacagcttcaaccttgctgggatctacctcgacaccgttggaggagatcacgtgtccaaggaatgctactcggtctaaccagaattcgcatttcgagaatttagcgaatagttgatgatccctgagcttttccattattagcctcaggtgttcagcatgttcttcctcattcttggagtatatcaggatgtcatcgatgaacaccacgacaaactggtccaggtattccataaagattttgttcattaagttcatgaagaacgctggagcattggtgagtccgaaggacatttctgtgaactcatatagaccataacgcgttgagaaagcggtcttcgggatatcttcagatctgattttcaacattctctcagagccatcctttttcttaaccagaagcactggggctccccaaggggatgagctaggtcgcacataacctttactctccaattcttcgatttgtcttttaacttctactaactcattagctgccattcggtagggtctttttgcaattggtgcggtgcctggtgccagttctatggcgaactcaatctcccggtctggtggcatactcgttaattcttctggaaatacgtcgggatattcacagactatgggcaccgactccaaggaggtgacttgtaaacaggttaagatagaccgacttgcggtaggagtgttaggggtaaagcggacttgctttcctccaggtccttgcaaggtgatggacttttcggcacaatctatctgtcctttgtgctttgccaaccaatccatccctaggatgatgtccaagctttgcgagtctaggactatcggtttggctaggaagtcaacttcctcaattctaaggttaacttccaggcatatttgagttgcccttatatccctcccaggggaatgtactatcattggtacacgtaaattttgggttttccaaccatttcttttcacaaaagcttgtgatatgaaagagtgggaagctcctgaatcaaacagaactattgcgggtatggagttgacagagaacatacccatcacaacgtctggagcatcctgagcggtctcggcttgaatgtgattcacccggcctcgaccaaggttgttggacacacgagaaccttgtccacttgcctgagagctaggacgagactgagctgccgctggagtaggagttctggcagtgctgccattagcatgccctgagctggtgttggtaggattctgagggcactgtctggcatagtggcccatctggttgcaccggaaacactgaactgctgacggtccctgtggtgacttgaaagaggtaacactgttgggcgcagtattgccactaggggcacgctgctgtggctgaggtgccggacagttcatctgaggacgaggggcgtagcctggctggcggttagcctgagtgaccgactggtggtattgcatgggttgaccgtagtgagggcgaggtgcgcctcgggaagaatttccctgatggttagagttgcgtttcttgtattcttcggtagcctcttttctggcatcttcaagtagaagcgctgcgattcctttcacgaatttcctgatcttcttcttatctgtgtccacttcctcaggggcgtatcgagccaagttgttgaacatacttaggtactcattgacactgctgttgccttgcttaagtctgttgaattccactttcttcatgtcaatggtgctttcaggcacatgagctgcacggaaagacgtagcaaactcatcccaagcaatgttagtgggttcagggtgtgcattgcagtaattttcccaccaatctgcagcaggtcctcttagctggtgagaggcatagagcgtcttctcaaccggagtacactgcaccaagttgagttttctatccacatctttcagccaatcgtcagcctcgacgggctcgacggtctgagagaactctggcggacgagacctcagaaagtctgtcagcttggatctattgttgctcatgtgacggtggccatttccatgcgcagtatgctgaaaaccggctacggctgcggctaatccttgcaagatttgtgtctaaactgccattaagtgctgcatgttgttttccacatgaggtggggaagggaggcgttcttctccagaattgtgactggcagtgcggtgagagcggtgagactgttccatctctacatcacaggaagccgtgcgatgcgagcggttgctgcggcggggttgctcaacttctgcattgcgggaagcagtacggtgcgaacggttgctgtggtgagactgctcatgatttgcttctggctcggctctaccatcttcaaaaccaaagcgggctcctgtagtcggctcctcagtcgaagaaatgtcgatcggctgacgcgaagggaccggcggaacctgtcgagggccgacagcagcacgggccgctggcggtgggggagctgggtagtggaaacggaacacggtggaagaaccaacaacacgcttccgcgcggtgcggataaagcgtgggccacggcgggaggaagcaactggggtgtgtccgggggtgtaggaggggctaactgggtgtgggtagggggagtacactggtgagtacggcgcacgcgagctgggggagcgcgggccactgggagtgcgggcagagccgcgggagctgtgggaggacaggtggctgccgtgacagaggcggcggcgtagcggcgggcaagggagcggtaagcctcaaggagtaggtcgtgctgagtggcctgagcctccgaaagctcaaccatgcgagtcagcactggctgagactcgctgtacggacaagggtacctggcgtctgagtggccagaaggaaggcgtggtagctgccggaaggcgaagcccccgagatggtgggcgatctggagagtgggcctggccacggtgaagtggtgtgggcgaaggccagctccgtgtatacctccacgagggtaaaggtacacagagagctcacagtgagggggaacacggtccacggagtaccccgtgtactcgggacacgagaagccaaggaaacgagcgaggtcacgaagctgagcgacgtggtgaccctcaccaaaaccgtgggagctgaagctggcgttcactgccatctgttaatcgataccagtcccaggaaacagtgctggtatcacaggaagacagaatatcacagcaacagaggcgcgcggttcgcggaggacgcggtgcggcaggcccacgcgcagcctcacggctcgcggtggaccgcgcgcgcgagggggaggagggaagcgacggaccggggtctgcttgacccggtcgcggccgaggtggcgccgacgtggtgcctacgtggctgccacgtgggcgggcgggaggtagacgacgacgccggtcggaacggacggcagacaacagcggcgagcggcggagcgaaccacggcgatacaggcgaaagcgagcacaccgggaagttgcacaggactaagggagacgagccaatggctcggattcgccgggggatgctcgacggcggcggattgcggcggcggcaaccggcggcaggagaagggggaaacggcgatggcgcgacgggagaccgattcgggcgagttagagcatctacgcgactccgggaatccgttgctagcgtcggattgggcggagctacgctgagcgaggccggcgacgagtgggtgctacggagcacgggcggcgacggcggcgagcacacagcgagcggcggcaacggtcggggcggcgtcagctag

SEQ ID NO: 23378 - DNA, 5313 bp, Oryza sativa
  Clone ID: TF_OsC1517_1625
atgacggcggggcggtttggaccggagcggcgacactggcgacaggcgcgtgcagaggctgacggcggcggcgaccgggcggtcggccaccacggcacgcgcgcgcgggaagcaacgggcggcgtccgcgcgggcgcgcacacgctggctcgcgaggacgagcggatgcgcgggttctgcctcttcaagaaccttgatcggtctttccttgtaggtcagattcttttctagctcgatattacccaggggaacttgctcttctggaactcgaagacatttctttaactgggatacgtggaacacgttgtgcacgtctgcgagaccttcaggtagctcaagctgataagccacttcgccacgtctggcggttatgaggtaggggccgatgtagcggggtgctaacttgccggacatcccaaaccttctcataccacggaggggtgatacccgcaggtacacatgatctcctttttcgaactcaaggtcacgcctccgattgtcagcgtaattcttctgacggttctgtgctgtcttcaaacgttctcgtatcagcttaacttgttcttctgctgacttgagtatgtcaggaccgaataccagtgctttgcccacctcattccagcacaagggggtgcggcactttcttccgaacattgcctcattcggcgacatctgaatgctggcctgataacttgaggtgaactgagtgcctcgatccgacacaatcttcttgggacaaccaaatcgacacacgacatgggtcatgtagagttctgccagtttctttccatcaaaggtggttttcgctggcacgaaatgtgccgatttcgtgagtcgatccacgattacccagatggagtcgtacccgctaggggttcttggcaaaccggttatgaaatccattccgatctcttcccatttccactcgggaatcggtaggggttgcagcagaccagctggcctctgatgctctgccttgactctctggcaaatgtcacaaagggctacgtattctgcgacatctcgcttcattccaacccaccagaaatatgccttgatatcctggtacatcttcgtacttcctggatagatggagtaggcggactcatgagcttcttttaaaatgaggtctcttaactccttcttggccggtacacagatgcgtggaccgcaccaaactgtgccttgatcgtctatggagaaatcggtgtccttcatcttctgtattctttttattagctcttttatcccttcatcatctttctgagcttcccggatttgcgattctagggtaggctgcactgtcaagctggcagggacacctgactgcaccacggtcagccttaacttctccaattctctgcacaggcgatcttggtctggccatatttgagctgcattgcaataggtcttgcgacttagcgtatcagcgaccacattagctttaccgggatggtaatgaattccaagatcgtaatccttgattagttccaaccatcttctctgcctcatatttaactcggtctgagtgaagatgtacttaagacttttgtgatcggtgtatacttcacatctgttcccgattaaatagtgcctccagatcttaagagcatgaaccacggctgccaactcgagatcatgggtgggatagttgacttcgtgaggcctaagctgcctggatgcgtaggccacaacctttcgctcttgcattaggacacatcctaagccttgtcttgatgcatcacagaagatttcgaaatcttttcggatatctggcaaggtgagaactggggcagtggtcaatcttttcttcatttcttgaaagctgtcttcacaggctgctgaccattcaaacttcttttccttctttaacagctcggtcataggtctggctagcttagagaacccttcgatgaatcttcgatagtaaccagctaggccaaggaaactgcggatctctgactcattcttgggaggataccaagcaaggacagcttcaaccttgctgggatctacttcgacaccgttagaggagatcacgtgaccaaggaatgctactcggtccagccagaattcgcattttgagaacttagcgaacaattgatgatctcttagcttctccattatcagcctcaggtgttcaacatgttcttcctcattcttggagtatatcaggatgtcatcgatgaataccacaacaaactggtccaggtactccatgaagattttgttcatcaggttcatgaagaatgctggagcattggtgagtccgaaggacatcactgtgaactcatacagcccatagcgcgttgagaaagcggtcttcgggatatcttcatatctgattttcaacattctctcagagccatcctttttcttaaccagaagcactggggctccccaaggggatgagctaggtcgcacataacctttactctccaattcttcgatctgctttttgacttctgctaattcattagctgccattcggtagggactttttgcaattggtgcggtgcctagtgccagttctatggcgaactcaatctctcggtttggtggcatttccgttaattcttttggaaatacgtcgggatattcacagactatgggtaccgattccaaagaagtggcttgcaaactggttaggatagaccgacttgcagtaagagtgttgggggtaaagcgaacttgctttcctccaggtccttgcaaggtgatggacctttcggcacaatctatctgtcctttgtgcttagccaaccaatccatcccaagaatgatgtccaagctttgcgagtctaggactatcggtttggctaggaagtcaacttcctcaattctaaggttaacttccgagcatattttagttgcccttatatcccttccaggggaatgtactatcattggtactcgcaaattttgggttttccaaccatttcttttcacaaaagcttgcgatatgaaagaatgggatgctcctgaatcaaacagaactattgcgggtgcggagttgacagagaacatacccataacaacgtctggagcgtcctgagcggtctcggcttgaatgtggttcactcggtctcgaccaaagttgttggaagcacgggaaccttgtccacttgcctgcgtgctaggacgggactgagctgctgcaggagtaggagttctggcggtgctgccattggtatgccctgagttggagttggtaagattctgagggcactgtctggcatagtgacccatctggttgcaccggaaacactgaactgctgatagtcctggcggtgacttgaaagaggtaacactgtttggcgcggtattgccacttggggcacgctgctgcggctgaggtgccagacgattcatctgaggacgaggggcatagcttggctggcggttagcctgagtgactgactggtgatattgcatgggttgtccaaagcgagggcgaggttcccctcgggaagaatttccctgatgggtagacttgcgtttcttatactcctcggtagcctcttttctggcatcctcaagtagaagtctcttgttgatcatgtgtgtgactcctttcaagaacttcctgatcttcttcttgtctgtgtccacttcctcaggagcgtatcgagccaacttgttgaactgactcatatactcattgacactggtattgccttgcttgagcctgttaaattcttccttcttcatgtcaatagtgctttcaggcacatgagctgcacggaaagctgcagcgaattcatcccatggaatgttagtgggttcggggtgtgcgttgcaataattctcccaccaatctgcagcaggtcctcttagctggtgagaggcgtagagcgtcttctcaacaggagtacactgcactaagttgagttttctctcaacatctttcagccaatcgtcagcctcaacgggctcgacggtctgggagaactctggcggacgagaccttagaaagtctgtcagcttagatctgttgttgcccgtgtggggatggccatttccatgcgcgttgtgctgaataccggctatggctgtggctaaaccttgcaagatttgagtctgaactgccatcaagtgctgcatgttgttctcaacatggggtggggaaggaatgcgttcttccctagaattgtgaatggcagcgcggggagagcggtgagactgttccacttctgcattacgggaaactgtgcggtgcgagcggttgctgcggtggggttgctcaacttctgcattgcgggaagcagtatggtgcgaacggttgctgtggtgagactgctcattagctgactcatgatttgcttctggctcaactctaccttcctcaaaaccgaaatgggctcctgtagtcggctcctcagtcgaagagacgtcgatcggctgacgcgaagagatcggcggaacttgtcgagggccggcagcagcacgggctgctggcggtgggcgagctgggtggtcaaagcggaacacagtggaagaaccaacaacacgcttccgcacagtgcggataaagcgtgggccacggcaggaggaagcaactggggtgtgaccaggagtgtaggaagggctaactgggtgagggtagggagagtgcactggggagtacggcacacgcgaactgggggtgcgcgggccactgggagtgcgaacagagccgcgggagctgtgggaagacaggtggctggcgtggcagaggcgacctaagtcccaagaggcagtgtcaactgaggtgacaccctcctcggccaggcgggcctccaaagcagcgtagcggcgagcaagggagcggtaagcctcaaggagaaggtcgtgctgggtggcctgagcctcagagagctcaaccatgcgagtcagcacaggctgagactcgctgtacgggcaagggtacctagtgtcagtgcggccagaaggaaggcgcaggagctgccgaaaggcagagcccccgaggcggtgggcgatctggagagtgggcctggccacagtgaagtggtgtgggcgaaggccagccccgtgtatacctccacgagggtaaaggtacaccgaaagctcataacgagagggaacacggtccacagagtaccccgtgtactcaggacacgagaagccaaggaagcgggcgaggtcacgaagctgagcgacgtggtgaccctcaccaaaaccgtgggaactgaagctggcgttcactgccatctgttcatcgataccagtcccaggaaacaatgctggtatcacaggaagacagaatatcatagcaacagaggtctctttattacagagtaggagtacagtcat

SEQ ID NO: 23379 - DNA, 5856 bp, Oryza sativa
  Clone ID: TF_OsC1517_1640
ttatgcacaaataagttcggaaattactagtgaatttccgggcgtgacagcgcccaccgtgcgcaggaggtggaagtagacctgcgggttcgccaggaacgccgcgcgggagatgacgtagccggcggcgcccggcgccttcatcatatcatcgccgccgccggcgccgaggccggccacagcaagtacaagaaggcggtcgacccgacgcccacgggcacggcagcgatcatcgacggcgccgcaaccatcggcaccggccaacagcttttcaaacggccacccgggccaaccacttttcaaacggccacccgggcccggatcacccagcccgtggggatcagccacgtcgggagacctccaagctttcatgacaaggcatttccaaagccgacacaggtttaccatatgccgacgagaggagtcccagaccaacaacaggttaggtcccagaccatactgtgccaagaagcccaggggtcctccccgacaccaccccggcgaatccacatgtctctcggcatcaaggctcccctgataagctagttactcagccaagggtgtcccattccacccatgtggtcgtacttgtcttatgtttggatgaaattccaaggaaatcggtccttaagtgcgagagcgggaaaccgtacacccgttatggcagtgaacgctagcttcagttcccacggttttggtgagggtcaccacgtcgcccagcttcgtgacctcgcccgtttccttggcttctcgtgtcccgagtacacggggtactccgtggaccgtgttccccctcactgtgagctctctgtgtacctttacccccgtggaggtatacacggggctggccacttcactgtggccaggcccaccctccagatcgcgtaccaggacctctcctggactgcgcttcgtcgcctggcccacgactacagccaccgtctcggaggctccgccttccggcagcttccacgtcttccttctgggcactcagacgccaggtacccttgtccgtacagcgagtctcagccagtgctgactcgcatggtcgagctttcggaggctcaggccactcagcacgacctactccttgaggcttaccgctcccttgcccgccgctacgccgccttggaggcccgtctggccgaggagggtgtcacctcagttgacactatctcttgggactcaggccgtctctgccacgccagccacctgtcctcccacagctcccgcggctctgctcgcactcccagtggcccacgctcccccagctcgcgtgcgccgtactcaccagtgtactccccctacccacacccagttagcccttcctacacccccggacacactccagtcgcttcctcccgccgtggcccacgttttatccgcactgcgcggaagcgtgttgttggttcttccaccgtgttccgtttctgccacccagctcccccaccgccagcggcccgtgctgctgccggccctcgacagacacaaatcttacaaggtctaaccacagccatagccagctttcagcataatgcgcatggaaatggccaccctcacgtgggcaacaatagatccaagctgacagactttctgaggtcacgtccaccaaagttctctcagaccgtcgagcccgtcgaggctgacgattggttgaaagatgttgatagaaaactcaacttagtgcagtgtactcctgttgagaagacgctctacgcctctcaccagctaagaggacctgccgcagattggtgggagaattactgcaatgcacaccctgaacccactaacattgcttgggatgagttcgctacggctttccgtgcagctcatgtgcctgaaagcactattgacatgaagaaagaagaatttaacagacttaagcaaggccacagcagtgtcaatgagtacctaagtcagttcaacaagttggctcggtacgcccctgaggaagtagacaccgataagaaaaagatcaggaaattcttgaaaggaatcgcagttggaatgagactccagttgcttgctcatgacttccccacttttcaacatatgatcaacaaagcacttctacttgaggatgccagaaaagaggccaccgaaaaatacaagaaacgcaagtctaaccatcagggaaattcttcccgaggcgcacctcgccctcgctacggtcaacccatgcaataccatcagtcgctcactcaggctaaccgccagccaggctacgcccctcgtcctcagataaaccgtccggcacctcagccacagaagcatgcccctagtggcaacactgcgccaaacagtgttacctccttcaagtcaccacagggaccgtcagcagttcagtgtttccggtgcaaccagatgggtcactatgctagacagtgtcctcagaatcctaccaacaccaactcagggcatgctaatggcagcaccgccagaactcctactccagcggcagctcagtctcgtcctagctctcaggcaagtggacaaggttctcgtgcttccaaccactttggtcgaggacgtgtgaatcacattcaagctgaaaccgctcaggatgctccagacgttgtgatgggtatgttctctgtcaactccgtacccgcaatagttctgtttgattcgggagcttcccattctttcatatcgcaagcttttgtgaaaagaaatggttggaaaacccaaaatttgcgtgtaccaatgatagtacattcccctggaaagaatataggggcaactcaaatatgcccggaagttaaccttagaattgaggaagttgacttcctagccaaaccgatagtcctagactcgcaaagcttgaacatcatccttgggatggattggttggctaagcacaaaggacagatagattgtgccgaaaagtccatcaccttgcaaggacctggaggaaagcaagtccgctttacccctaacacccctaccgcaagtcggtctatcctaacctgtttgcaagtcacctccttggagtcggtgcccatagtctgtgaatatcccgacgtatttccggaagaattaacaagaatgccaccagaccgagagatcgagttcgccatagaactggcaccaggcacagctccaattgcaaaaagaccctaccgaatggccgctaatgagttagcagaagttaaaagacaaatcgaagaactggaaagtaaaggagccccagtgcttctggttaagaaaaaggatggctctgagagaatggtaattgactatagagccctgaatgaagtaactataaagaacaagtacccgttgcctcggattgacgacttattcgatcaacttaaaggagcaagagtcttctcaaaaattgacttgaggtcaggttaccaccaactgaaaatcagatctgaagatattccgaagaccgctttctcgatgcgttatggtctatatgagttcacagtaatgtccttcggactcaccaatgctccagcattcttcatgaacttaatgaacaaaatctttatggaatacctggaccagtttgtcgtggtattcatcgatgacatcctgatatactctaagaacgaggaagaacatgctgaacacctgaggctgataatggaaaagctcagagatcatcaactattcgctaaattctcgaaatgcgaattctggttggaccgagtagcatttcttggacacgtgatctcctccaacggtgacgaagtagatcccagcaaggttgaagctgtacttgcttggaacccgcccaagaatgtgtcagtgattcgcagcttcctcggcttagctagatattatcgaagattcattgaaggattctctaagctagccagacctatgaccgagctgttaaagaaggaaaagaaatttcaatggtctacagcctgtgaagacagctttcaagaaatgaagaaaagattgaccactgccccagttctcaccttgccagatatccgaaaagatttcgagatcttctgtgacgcatcaagacagggcttaggatgtgtcctaatgcaagaacgaaaggttgtggcctatgcatccaggcagctcaggcctcatgaagtcaattatcccacccatgatctcgagttggcagccgtgattcatgctcttaagatctggaggcactacttaataggaaacagatgtgaagtatacaccgatcacaaaagtcttaaatatatcttcacacagaccgagttaaatatgaggcagagaagatggttggaactaatcaaggattacgatcttggaatccactatcatcctggtaaagccaacgtggtcgctgatgcgctaagtcgcaaggcctattgcaatgtagctcaaatacggcctgaccaagatcatctgtgcagagaattggagaagttaaggctgaccgtggtacagtcaggagtcccagccagcttgacagtacagcctaccctagagtcgcaaatccgggaggctcagaaagatgacgaagggataaaagagttaataaaaagaatacaggagaagaaagacaccaatttctccatagacgatcaaggcacagtttggtgcggttcacgcatctgtgtaccggccaagaaggagttaagagatctcatcctaaaggaagctcatgagtccgcttactccattcatccaggaagtacgaagatgtaccaggatatcaaggcatacttttggtgggctggaatgaagcgagatgtcgctgaatacgtagccttgtgtgacatttgccaaagagtcaaggcagagcatcagaggccagctggtctgctgcaacccctaccgattcccgagtggaaatgggaagagatcggaatggatttcatcaccggtttgccaagaacccccagcgggtacgactccatttgggtaatcgtggaccgactcacgaaatcagctcatttcgtgccagtgaaaaccacctatgatggaaagaaactggcagaactctacatgacccatgtcgtatgtagatttggctgccccaagaaaattgtgtcagaccgaggcactcagttcacctcaaggttctggaagcagttgcatgaagccctcgggactgatctaaactttagtacagcctaccatccgcagaccgatggtcagacagaaagggtaaaccaaatcctagaagacatgctgcgtgcgtgtgccttggatttcgaaggcacttgggatcgttgtttgccgtatgccgagttctcttacaacaacagttatcaggccagcattcagatgtcaccgaatgaggcaatgttcggaagaaagtgccgtacccccttgtgctggaacgaggtgggcgaagccctggtattcggtcctgacatactcaagtcagcagaagaacaagttaagctaatccgagaacgattaaagacagcgcaggaccgtcagaagaattacgctgacaatcggaggcgtgaccttgagttcgaaaaaggagatcatgtatacctgcgggtatcacccctccgtggtatgagaaggtttgggatgtccggcaagttagcaccccgctacatcggcccctacctcataaccgccagacgtggcgaagtggcttatcagcttgagctacctgaaggtctcgcagatgtgcacaacgtgttccacgtatcccagttaaagaaatgtcttcgagttccagaagagcaagttcccctgggtaatatcgagctggaaaagaatctgacctacaaggaaagaccgatcaaggttcttgaagaagcagaacgtcagactcgaaggaagacaatcaagttctacaaagtccaatggagcaatcattctgaagatgaagcaacctgggaacgagaagatcttctccgcgccaagtttccggagctgctcccttag

SEQ ID NO: 23380 - DNA, 5559 bp, Oryza sativa
  Clone ID: TF_OsC1517_1674
ctaagggagcagctccggaaactcggcgcggagaagatcttctcgttcccaggttgcctcatcttcagaatgattgctccattggaccttgtagaacttgatggtctttcttcgagtctgacgttctgcttcctcaagaaccttgatcggtctttccttgtaggtcagattcttttccagctcgatgttacccaggggaacttgctcttctggaactcgaagacatttctttaactgggatacgtggaacacgttgtgcacatctgcgagaccttcaggtagctcaagctgataagccacttcgccacgtctggcggttatgaggtaggggccgatatagcggggtgctaacttgccggacatcccaaaccttctcattcctcggagtggtgatacccgtaggtacacatgatctcctttttcgaactcaaggtcacgcctccgattgtcagcgtaattcttctgacggttctgtgctgtcttcaaacgttctcgtatcagcttaacttgttcttctgctgacttgagtatgtcaggaccgaataccaaggcttcgcccacctcattccagcacaagggagtgcggcaccttcttccgaacattgcctcattcggcgacatctgaatgctggcctgataactgttgttgtatgagaactcggcatacggcaaacaacgatcccaagtgccttcgaaatccaaggcacatgctcgcagcatgtcttctaggatctggtttactctttctgtctgaccatcggtctgcgggtggtaggccgtactaaaattcagatcagttccgagtgcttcatgcaattgcttccagaaccttgaggtgaactgagtgcctcgatccgacactattttcttgggacagccaaatctacatacgacatgagtcatgtagagttctgctagtttctttccatcataggtggtcttcactggcacgaaatgtgctgacttcgtgagtcggtccacgattacccaaatggagtcgtatccgctgggggttcttggcaaaccggtgatgaaatccattccgatctcttcccatttccactcgggaatcggtaagggttgtagcagtccagctggcctttggtgttctgccttgactctttggcaaatgtcacacagggctacgtattctgcgacatctcgtttcattccagcccaccagaagtatgccttgatatcttggtacatcttcgtacttcctgggtgaatggagtaggcggactcatgagcttcctttaggatgaggtctcttaactccttcttggccggtacacagatgcgtggaccgtaccaaactgtgccttgatcgtctatggagaagttggtgtctttcttctcctgtattctttctattaactcttttatcccttcgtcttctttctgtgcctcccgaatttgcgattctagggtaggctgtactgtcaagctggcagggactcctgactgtaccacggtcagccttaacttctccaattctctgcacagttgaccttggtcaggccgtatttgagctatattgcaataggccttgcgacttagcgcatcagcgaccacgttggctttaccaggatgatagtggattccaagatcgtaatccttgattagttccaaccatcttctctgtctcatatttaactcggtctgagtgaagatatacttaagacttttgtgatcggtgtatacttcacatctgttcccgattaaatagtgcctccagatcttaagagcatgaatcacggctgccaactcgagatcatgggtggggtaattgacttcatgaggcctgagctgcctggatgcataggccacaacctttcgttcttgcattaggacacatcctaagccctgtcttgatgcatcacagaagatctcgaagtcttttcggatatctggcaaggtgagaactggggcagtggtcaatcttttcttcatttcttgaaagctgtcttcacaggctgtggaccattgaaatttcttctccttctttaacagctcggtcataggtctggctagcttagagaatccttcaatgaatcttcgataatatccagctaagccgaggaagctgcgaatctctgacacattcttgggcgggttccacgcaagtacagcttcaactttgctgggatctacttcgacaccgttggaggagatcacgtgaccaagaaaagctactcggtccaaccagaattcgcatttcgagaatttagcgaatagttgatgatctctgagcttttccattatcagcctcaggtgttcagcatgttcttcctcgttcttagagtatatcaggatgtcatcgatgaataccacgacaaactggtccaggtattccataaagattttgttcattaagttcatgaagaatgctggagcattggtgagtccgaaggacattactgtaaactcatatagaccataacgcgtcgagaaagcggtcttcggaatatcttcagatctgattttcagttggtggtaacctgacctcaagtcaatttttgagaagactcttgctcctttaagttgatcgaataagtcgtcaatccgaggcaacgggtacttgttctttatagttacttcattcagggctctatagtcaattaccattctctcagagccatcctttttcttaaccagaagcactggggctccccaaggggatgagctaggtcgcacataacctttactttccagttcttcgatttgtcttttaacttctgctaattcattagcggccattcggtagggtctttttgcaattggagctgtgcctggtgccagttctatggcgaactcaatctctctatctggtggcattcttgttaattcttccggaaatacgtcgggatattcacagactatgggcaccgactccaaggaggtgacttgcaaacaggttaggatagaccgacttgcggtaggggtgttaggggtaaagcggacttgctttcctccaggtccttgcaaggtgatggacttttcggcacaatctatctgtcctttgtgcttagccaaccaatccatccctagaatgatgtccaagctttgcgagtctaggactatcggtttggctaggaagtcaacttcctcaattctaaggttaacttccgggcatatttgagttgcccttatatttcttccaggggaatgtactatcattggtacacgcaaattttgggttttccaaccatttcttttcacaaaagcttgcgatatgaaagaatgggaagctcctgaatcaaacagaactattgcgggtacggagttgacagagaacatacccatcacaacgtctggagcatcctgagcggtttcagcttgaatgtgattcacacgtcctcgaccaaagtggttggaagcacgggaaccttgtccacttgcctgagagctaggacgagactgagctgccgctggagtaggagttctggcggtgctgccattagcatgccctgagttggtgttggtaggattctgaggacactgtctagcatagtgacccatctggttgcaccggaaacactgaactgctgacggtccctgtggtgacttgaaggaggtaacactgtttggcgcagtgttgccactagggcatgcttctgtggctgaggtgccggacggtttatcgtagcgagggcgaggtgcgcctcgggaagaatttccctgatggttagacttgcgtttcttgtattcttcggtggcctcttttctggcatcctcaagtagaagtgctttgttgatcatatgttgaaaagtggggaagtcatgagcaagcaactggagtctcattccaactgcgattcctttcaagaatttcctgatctttttcttatcggtgtctacttcctcaggggcgtaccgagccaacttgttgaactgacttaggtactcattgacactgctgtggccttgcttaagtctgttaaattcttctttcttcatgtcaatagtgctttcaggcacatgagctgcacggaaggcagctgcaaactcatcccaagcaatgttagtgggttcaggatgtgcattgcagtaattctcccaccaatctgcggcaggtcctcttagctggtgagaggcgtagagcgtcttctcaacaggagtacactgcactaagttgagttttctatcaacatctttcaaccaatcgtcagcctcgacgggctcgacggtctgagagaactctggcggtcgagacctcagaaagtccgtcagcttggatctgttgttgcccacgtgagggtggccatttccatgcgcattatgctgaaagctggctatggctgtggttagaccttgcaggatttgtgtctgaactgccattatgtgttgcatgttgttttccacatgaggtggggaagggaggcgttctcctccagaattgtgactggcagtgtggtgagagcggtgagactgctccaactctgcttcacgggaaactgtgcgatgcgagcggttgctgcggcgaggttgctcaacctctgcgtcgcgggaaacagtacggtgcgaacggttgctgtggtgagaatgctcattagctggttcgtgatttgcttctgcttcaactctaccatcatcaaaaccaaagcggactggtgcacgagctgtacgacgggggcggctagccatctgatacaacgggtgtggactagtcacagagctacgccgagcttgactgtgcgcacacctcctaggagaaccagactgtcgagggccggcagcagcacgggccgctggcggtgggggagctgggtggcggaaacggaacacggtggaagaaccaacaacacgcttccgcgcagtgcggataaagcgtgggccacggcgggaggaagcgactggagtgtgtccgggggtgtaggaagggctaactgggtgtgggtagggggagtacactggtgagtacggtgcacgcgagctgggggagcgcgggccactgggtgtgcgagcagagccgcgggagctgtgggaggacaggtggctggcgtggcagagacggcctgagtcccaagagatagtgtcaactgaggtgacaccctcctcggccagacgggcctccaaggcggcgtagcggcgggcaagggaacggtaagcctcaaggagtaggtcgtgctgagtggcctgagcctccgaaagctcgaccatgcgagtcagcactggctgagactcgctgtacggacaagggtacctggcgtctgagtggccagaaggaagacgtggaagctgccggaaggcggagcctccgagacggtggccgtagtcgtgggccaggcggcgaagcgcagtccaggagaggtcctggtacgcgatctggagagtgggcctggccacagtgaagtggtgagggcgaaggccaactccgtgtatacctccacgagggtaaaggtacacagagagctcacagtgagggggaacacggtccacggagtaccccgtgtactcgggacacgagaagccaaggaaacgggcgaggtcacgaagctgggcgacgtggtgaccctcaccaaaaccgtgggaactgaagctggcgttcactgccat

SEQ ID NO: 23381 - DNA, 6479 bp, Oryza sativa
  Clone ID: TF_OsC1517_1687
ctaagggagcagctccgggaactcggcgcggagaagatcttctcgctcccaggttgcctcatcttcagagtggttgctccattggactttgtagaacttaatggtcttccttcgagtctgacgtactgcctcttcaagaaccttgatcggtctttccttgtaggtcagattcttttccagctcgatgttacccagggggacttgttcttctggaactcgaagacatttctttaactgggatacgtggaacacgttgtgcacatctgcgagaccttcaggtaactcaagctggtaagccacttcgccacgtctggcggttataaggtaggggccgatgtagcggggtgctaacttgccggacatcccaaacctcctcataccacggagaggtgatacccgcaggtacacatgatctcctttttcgaactcaaggtcacgcctccgattgtcagcgtaattcttttggcggttctgcgctgtctttaaacgttctcggatcagcttaacttgttcttctgctgccttgagtatgtcaggaccgaataccagcgcttcgcccacctcattccagcacaagggggtgcggcactttcttccgaacattgcctcattcggcgacatctgaatactggcctggtaactgttgttgtatgagaactcagcatacggcaaacaacgatcccaagtgccttcgaaatccagggcacacgcacgtagcatgtcttctaggatttggtttaccctttcggtctgaccatcggtctgcggatggtaggctgtactaaaatttagatcggttccgagagcttcatgcaactgtttccagaaccttgaggtgaactgagtgcctcggtctgacacgatcttcttgggacagccaaatctacatacgacatgggtcatgtagagttctgctagtttctttccatcaaagatggttttcactggcacgaaatgagccgatttcgtgagtcgatccacgattacccagatggagtcgtacccgctaggggttcttggcaaaccggtgatgaaatacattccgatttcttcccatttccactcgggaattggtaggggctgtagcagaccagctggcctctggtgctctgccttgactctttggcaaatgtcacacaaggctacgtattctgcgacatctcgcttcattccagtccaccagaagtatgccttgatatcttggtacatcttcgtacttcctggatgaatggagtaggcggactcatgagcttcctttaggatgagatctcttaattccttcttggccggtacacagatgcgtggaccgcaccaaactgtgccttgatcgtctatggagaaattggtgtctttcttctcctgtattctttttattaactcttttatcccttcgtcgtctttctgagcttcccggatttgcgactctagggtaggctgtactgtcaagctggcagggacacctgactgtaccacggtcagcctcaacttctccaattctctgcacaggcgatcttggtcaggccgtatttgagctacattgcaataggccttgcgacttagcgcatcagcgaccacattagctttaccggggtggtaatgaattccaagatcgtaatccttgattagttccaaccatcttctctgcctcatatttaatttggtctgagtgaagatatacttaagacttttgtgatcagtgtatacttcacatctgttcccgattaaatagtgcctccagatcttaagagcatgaaacacggctgccaactcgagatcatgggtgggatagttgacttcatgaggcctgagctgcctgaatgcataggccacaacctttcgttcttgcattaggacacatcctaagccttgtcttgatgcatcacagaagatctcgaaatcttttcggatatctggcaaggtgagaactggggcagtggtcaaccttttcttcatttcttgaaagctgtcttcacaggctgcagaccagtgaaacttcttttccttctttaacagctcggtcataggtctgactagcttagagaatccttcaatgaatcttcgataatatccagctaagccaaggaggctgcgaatctctaacacgttcttgggcgggttccaagcaagtacagcttcaaccttgctgggatctacatcgacaccgttggaggagatcacgtgtccaaggaatgcttctcggtctaaccagaattcgcatttcgagaatttagcgaatagttgatgatccctgagcttttccattattagcctcaggtgttcagcatgttcttcctcattcttggagtatatcaggatgtcatcgatgaacaccacgacaaactggtccagtgtgaactcatatagaccataacgcgttgagaaagcagtcttcgggatatcttcagatctgattttcaattggtggtaacctgatcttaagtcaatctttgagaaaactcttgctcctttaagttgatcgaacaaatcgtcaatccgtggcaacgggtacttgttctttatagtcacttcattcagggctctatagtcgattatcattctctcagagccatccttcttcttaaccagaagcactggggctccccaaggggatgagctaggtcgcacataacctttactcttcaattcttcgatttgtcttttaacttctgctagctcattggctaccattcggtagggtctttttgcaattggtgcggtgcctggtgccagttctatggcgaactcaatctctcggtctggtggcatactcgttaattcttctggaaatacgtcgggatattcacagactacgggcaccgactccaaggaggtgacttgtaaacaggttaagatagaccgacttgcggtaggggtgttagaggtaaaacggacttgctttcctccaggtccttgcaaggtgatggacttttcggcacaatctatctgtcctttgtgcttagccaaccaatccatccctaggatgatgtccaagctttgcgagtctaggactatcggtttggctaggaagtcaacttcctcaattctaaggttaacttccgggcatatttgagttgcccttatattcctcccaggggaatgtactatcattggtacacgtaaattttgggttttccaaccatttcttttcacaaaagcttgtgatatgaaagaatgggaagctcctgaatcaaacagaactattgcgggtacggagttgacagagaacatacccatcacaacgtctggagcatcctgagcggtctcagcttgaatgtggttcacccggcctcgaccaaagttgttggaagcacaagtaccttgtccacttgcctgagagctaggacgagactgagctgccgctggagtaggagttctggcagtgctgccattagcatgccgtgagctggtgttggtaggattctgagggcactgtctggcatagtggcccatctggttgcaccggaaacactgaacagctgacggtccttgcggtgacttgaaagaggtaacactgtttggcgcagtattgccactaggggcacgctgctgtggctgaggtgccggacggttcatttgaggacaaggggcgtagcctggctggcggttagcctgagtgaccgactggtggtattgcatgggttgaccgtagcgagggcgaggtgcgcctcgggaggaatttccctgatggttagacttgcgtttcttgtattcttcggtagcctcttttctggcatcctcaagtagaagtgccttgttgatcatatgttgaaaagtggggaagtcgtgagcaagcaactggagtctcattccaaccgcgattcctttcaagaatttcctgatcttcttcttatctgtgtccacttcctcaggggcgtaccgagccaacttgttgaacatacttaggtactcattgacactgctgttgccttgcttaagtttgttgaattcctctttcttcatgtcaatggtgctttcaggcacatgagctgcacggaaagccgtagcaaactcatcccaagcaatgttagtgggttcagggtatgcattacagtaattctcccaccaatctgcagtaggtcctcttagctggtgagaggcgtagagcgtcttctcaaccggagtacactgcaccaagttgagttttctatcaacatctttcagccaatcgtcagcctcgacgggctcgacggtctgagagaactctggcggacgagacctcagaaaatctgtcagcttggatctattattgcccatgtgagggtggccatttccatgcgcattgtgctgataaccggctacggctgcggctaatccttgcaagatttgtatctgaactgccattaagtgctgtcgagggccggcagcagcacaggccgctggcggtgggggagctgggtagtggaaacggaacacggtggaagaaccaacaacacgcttccgcgcggtgcggataaagcgtgggccacggcgggaggaagcaactggggtgtgtccgggggtgtaggaggggctaactgggtgtgggtagggggagtacactggtgagtacggcgcacgcgagctaggggagcgcgggccactgggagtgcgggcagagccgcgggagctgtgggaggacaggtggctggcgtgacagaggcggcctgagtcccaagagacagtgtcaactgaggtgacaccctcctcggccatatgggcctccagagcggcgtagcggcgggcaagggagcggtaagcctcaaggagtaggtcgtgctgagtggcctgagcctccgaaagctcaaccatgcgagtcagcactggctgagactcgctgtacggacaagggtacctggcgtctgcgtggccagaaggaaggcgtggaagctgccggaaggcggagcccccgagacggtggctgtagtcgtgggccaggcgacgaagcgcagtccaggagaggtcctggtacgcgatctggagagtgggcctggccacagtgaagtggtgtgggcgaaggccagctccgtgtatacctccacgggggtaaaggtacacagagagctcacagcgagggggaacacggtccacggagtaccccgtgtactcgggacacgagaagccaaggaaacgggcgaggtcacgaagctgagcgacgtggtgaccctcaccaaaaccgtgggagctgacgcttgcgttcactgccatctgtaaattgataccagacccaggaaacagtgctggtatcataggaagacagattatcacagcaacagaggtctctttattatagagtagaggtacagtcatgttgggctgcggacagatcccgagctcacaactgcattacaaaagggaaagcggaagccaagacttggaccaatcatcacaggcgcgacttgggaactagaccgaaaccctaaaactcatcgtagccgacttgctcctggaagaactcctcgtcagcgggatccacttcatcttcttcagcaaccggatcacccagcccgtgcagaacggccacgtttggagaccttgaggctttcatgacaaggcatttcgaaagccgacacaggttcactatatgccaacgagaggggtcccagaccgacatcaggttaggtcccagaccatgctctaagtatgccattagatagatctcgagatttgaggatttttggaagttgaacggagtcaatcggatgtacggttgagaagatattgaatttctaagattattggatttttgatcttgcatggtcccgagtgggacccgcttgttggcggctcggctcaccgtgagcggggagcaggcagcgcggcggctcgcggtggaccgcgcgcgcgagcggggcagaggggagcggcggaccggggttagcttgactcggtcgcggccaaggtggcaccgacgtggcgtctacgtggctgggcggacggcggcggcgagcggcggggagatcgggaggttgcacgggacgaggggagacgagctaatggctcggattcgccggagaaagctcgacggcagcagattgcggcggcggcaaccggcggcgagaaaagagggaaacggcgacgacgcgactagggttcgattcctccggactagagcatctacgcggtcaccggagtccattcctcgcatcggattgagcggagctacaacgagggaggccggcgatgagaggcgctcgagtggcactaggcgagggagcttcgaggggaagggatgggctcacgggcgcggggtcaaacggcatgggcgatggctggcgcggctgctcctctgcgtccatggcgctcgagccatgtcgatttggggagggagagagatgggagcgagaggcgctgcctcccgattttggacggacgcgggcggcgcggctcgggcacgcgcgctggcttgcggggccgagcggcagcgcggccacgggcacggcagggcagcggggcttaggcgcggcacgggcggcgaccgcgcgggcgcgcgtgcgcgaggc

SEQ ID NO: 23382 - DNA, 4629 bp, Oryza sativa
  Clone ID: TF_OsC1517_1697
atggcagtgaacgccagcttcagttcccatggttttggtgagggtcaccacgtcgctcagcttcgtgacctcgcccgtttccttggcttctcgtgtcccgagtacacggggtactccgtgggccgtgttccccctcactgtgagctctctgtgtacctctacccccgtggaggtatacacggagctggccttgcccacaccacttcactttggccaggcccactctccagatcgcgtaccaggacctctcctggactgcgcttcgtcgcctggcacacgactacagccaccgtctcgggggctccgccttccggcagcttccacgccttccttctggccactcagacgccagctcgtgcgccagcccgctttggttttgaagatggtagagccgagccagaagtaaatcatgagcagtctccccacagcaaccgttcgcaccgtactgcttcccgcaacgcagaagttgagcaaccccgccgcagcaaccgctcgcatcgcacggcttcctgtgatgcagagatggaacagtctcaccgctctcaccacactgccagtcacaattctggagaagaactcctcccttccccacctcatgtggaaaacaacatgcagcacttaatggcagttcagacacaaatcttgcaaggattagccgcagccgtagccggttttcagcataatgcgcatggaaatggccaccctcacatgagcaacaatagatccaagctgacagattttctgaggtctcgtccgccagagttctctcagaccgtcgagcccgtcgaggctgacgattggctgaaagatgttgatagaaaattcaacttagtgcagtgtacccctgttgagaagacgctctacgcctctcaccagctaagaggacctgctgcagattggtgggagaattactgcaatgcacaccctgaacccactaacattgcttgggatgagtttgctacagctttccgtgcagctcatgtacctgaaagcaccattgacatgaagaaagaggaattcaacagacttaagcaaggcaacagcaatgtcaatgagtacctaagtcagttcaacaagttggctcggtatgcccctgaggaagtggacacagacaagaagaagatcaggaagttcttgaagggaatcgcagttggaatgggactccagttgcttgctcatgacttccctacttttcaacatatgatcaacaaggcacttctacttgaggatgccagaaaagaggctaccgaagaatacaagaaacgcaagtctaaccatcagggaaattcttcccgaggcgcacctcgccctcgctacggtcaacccatgcaataccatcagtcggtcactcaagctaaccgccagccaggctacgcccctcgtcctcagatgaaccgtccggcaccccagccacagcagcgtgcccctagtggcaatactgtgccaaacagttttacctctttcaagtcaccgcagggaccgtcagcagttcagtgtttccggtgcaaccagatgggtcactatgctagacagtgccctcagaatcctaccaacaccagctcagggcatgctaatggcagcactgctagaactcctactccagcggcagctcagtctcgtcctagctcccaggcaagtggacaaggttctcatgcgtccaacaactttggtcgaggcggagcgaaccacattcaagccgagactgctcaggatgctccagacgttgtgatgggtatgttctctgtcaactccatacccgcaatagttctgtttgattcaggagcttcccactccttcatatcacaagcttttgtgaaaagaaatggttggaaaacccaaaatttacgtgtaccgatgatagtacattcccctgggagggatataagggcaactcaaatatgcccggaagttaaccttagaattgaggaagttgacttcctagccaaaccgatagtcctagactcgcaaagcttggacatcatcctagggatggattggttggcaaagcacaaaggacagatagattgtgccgaaaagtccatcactttgcaaggacctggaggaaagcaagtccgctttacctctaacagtcctaccgcaagtcggtctatcttaacctgtttacaagtcacctccttggagtcggtgcccatagtctgtgaatatcccgacgtatttccagaagaattaacgagtatgccaccagaccgagagattgagttcgccatagaactggcaccaggcaccgcaccaattgcaaaaagaccctaccgaatggcagctaatgagttagcagaagtcaaaagacaaatcgaagaattggagagtaaaggttatgtgcgacctagctcatccccttggggagccccagtgcttctggttaagaaaaaggatggctctgaaagaatgtttgtcgtggtgttcatcgatgacatcctaatatactccaagaatgaggaagaacatgctgaacacctgaggctaataatggaaaagctcagggatcatcaactattcgctaaatttttgaaatgcgaattctggttagaccgagtagcattccttggacacgtgatctcctccaacggtgtcgaagtagatcccagcaaggttgaagctgtacttgcttggaacccgcccaagaatgtgtcagagattcgcagcttccttggcttagccggatattatcgaagattcatcgaaggattctctaagttagccagacccatgaccgagctgttaaagaaggaaaagaaatttcaatggtctgcagcctgtgaagacagctttcaagaaatgaagaaaaggttgaccactgccccagttctcaccttgccagatatccgaaaagatttcgagatcttctgtgatgcatcaagacaaggcttagaatgtgtcctaatgcaagaacgaaaggttgtggcctatgcatccaggcagctcagacctcatgaagtcaattatcccacccatgatctcgaattggcagccgtggttcatgctcttaagatctggaggcactatttaatcgggaacagatgtgaagtatacaccgatcacaaaagccttaagtacatcttcacacagacggagttaaatatgaggcagagaagatggttggaactaatcaaggattacgatcttggaattcattaccacccctgtaaagccaacgtggtcgctgatgcgctaagtcgcaaggcctattgcaatgtagctcgaatacggcctgaccaagatcgcctgtgcagagaattggagaagttgaggctgaccgtggtgcagtcaggtgtccctgccagcttgacagtacagcctaccctagagtcgcaaatccgggaagctcagaaaaacgacgaagggataaaagagttaataaaaagaatacaggagaagaaagacaccaatttctccatagacgaccaaggcacagtttggtgcggtccacgcatctgtgtaccggccaagaaggaattaagagatctcatcctaaaagaagctcatgagtccgcctactccattcatccaggaagtacgaagatgtaccaagatatcaaggcatatttctggtgggctggaatgaagcgagacgtcgcagaatacgtagccttgtgtgacatttgccaaagagtcaaggcagagcatcagaggcccgctggtctgctacagcccctaccaattcccgagtggaaatgggaagaaatcggaatggatttcatcaccggtttgccaagaacccctagcgggtacgactccatttgggtaatcgtggaccagctcacgaaaccggctcatttcgtgccagtgaaaaccacctatgatggaaagaaactagcagaactctacatgacccatgtcgtatgtagatttggctgtcccaagaaaattgtgtcagaccgaggcactcagttcacctcaaggttctggaagcagttgcatgaagccctcggaaccgatctaaactttagtacagcttaccatccgcagaccgatggtcagacagaaagaatgtcgccgaatgaggcaatgttcggaagaaagtgccgcacccccttgtgctggaatgaggtgggcgaagcgctggtattcggtcctgacatactcaaggcagcagaagaacaagttaagctaatccgagaacatttaaagacagcgcagaaccgtcagaagaattacgctgacaatcggaggcgtgaccttaagttcgaaaaaggagatcatgtgtacctgcgggtatcacccctccgtggtatgaggaggtttgggatgtccggcaagttagcaccccgctacatcggcccctacctcataactgccagacgaggcgaagtggcttatcagcttgagttacctgaaggtctcgcagatgtgcacaacgtgttccacgtatctcagttaaagaaatgtcttcgagttccagaagagcaagtccccctgggtaatatcgagctggaaaagaatctgacctacaagggaagaccaatcaaggttcttgaagaggcagaacgtcaaactcgaaggaagaccatcaagttctacaaagtccaatggagcaaccattctgaagatgaggcgacctgggagcgagaagatcttctccacgccgagttcccggagctgctcccttag

SEQ ID NO: 23383 - DNA, 3208 bp, Oryza sativa
  Clone ID: TF_OsC2559_1
gcatcaaatcagcttgtgtaaccttggataagcaatacccatgaattgaataccactgcaaaattgcactcttgcagtatatactgcatgagttaaggtacatcctatgttacaaatgtacagccgtgagttcaatacgtaatcaaaattcatcagagttaaaaaaaaaatgtttctgtagttctgttgccgatatatactattttgttgctataaactatggctgtgtttggagctgccgttcttgtagctttggcagtgacttgtggcctcatctggtcgaggtcaagaaggctatcaaaggagatgagagacatccccggaacaatgggctggcctgtcgtcggcgagaccttctccttcatctccggcttctcgagccctgctggcattctgagcttcatgcgtgacagacagaagaggttcggcaaggtgttcaagacgtatgttcttgggaggatgacggtgttcatgacggggagggaggcggccaagatcctgctgtccgggaaggacggcgtggtgagcctgaacctgttctacaccggcaagcaggtgctcgggccgaccagcctcctcaccaccaacggcgacgagcacaagaagctgcgccgcctcatcggcgagccgctctccattgacgcgctcaagaagcacttcgacttcatcaacgacctcgccgtccagacgctcgacacctggctcgacaggagagtgcttgtgctcgaggaggcctcatctgtaattattaagctcttcacgctcaaggtgatcgccaacatgctgataagcttggagccagagggagaggagcaggagaagtttcgcgccaatttcaagatcatatcgtcttcgttcgcgtcgctgcctctcaagatcccaggaactgcatttcaccgtggcctcaagaaggccaggaaccggatgtacgcgatgctggactcggtgatcgccaggaggagggacggcggcgaggtccgcaacgacttcctccagacgctgctgcggaagcacgccaaggacggcaccgccgccgacgaggacgacggcggcggcggcggcgatcgagacgcggacaagctgacggacgcgcagctcaaggacaacatcctgacgctgctcgtcgccggccacgacacgacgacggcggggctgacgtggctcatcaagttcctcggcgagaacccggaggccctgcagaaactcagagtgatgaacgagacactgaggagagcgaccatcctgccatggttctcacgaaaagccgctcaggacttcagcattgatgggtacgagatcaagaaggggacgtcggtgaacctggacgtggtgtccatccaccatgacccgtccgtcttcgccgacccctacaagttcgatccaaacagattcgatgggacgttgaagccgtacagcttcctgggattcggcagcgggccgcggatgtgccccgggatgagcctggcgcgcctcgagatctgcgtcttcatccaccacctcgtctgcagatacagtactccagcaggcagccaagaaataaagcagcaggagctactccgtggcaaagtgacgaggaacagctacttcagtggcaaatgtgacaaagaacagcaaccacgtagcatcgctcagatattcaggtcgcttaaacatgatcacagcagggcagtaacaaggaatggcacaatccaagaagcaacacaacagcagcaactccggaagggccagggtcaatggaacaataaccaggtagcaaagccaatcagagtaacaaagaaacactatgcaaggcagcagtggccttcccacgctaaaccgcacatgatagattgatgccaacgaacaagccggtcataagactagaacaaatcgctgttaagacagtagtaaccaatccagaacaagagaacaaagaactcaaacaaacctgccaaaacaaaacaaacatttgagaacacctggtttacaatgagttgattaagaagagttaaagattacatggcaatttcccgtaaggttcagtagaatgcttcctctcccaagagaacagaaacaaaacaatttaccggtccaatcccacatatcccgtttccaaaggtgctatgccgcatgagcacaaccaacgtaacagagcatcaacaagtaatgtgacaaaaaccacctctcaagtctcaaccaagaaaagaatcacccaacagcatatcatgcatatatgtaggaccaagcgccaagcactatgaacaagtcatatgcctggcaacaagcaggaaacaataataagaatgtcagtaatacagtcgataataaagtagatgctttctcatggtacaccatagttctcaaactacatgaacacaaagttccagacacaaggaaacacagctcacaatagtagatagacttccatacctggatggaacatacttcttagagatttgataggccatcaatagggaccagaccggtcacgactgtaacggtcacccccacctccaccgtagccaccaccatctcgactacgaccagaataacggtcaccaccacggtcagatccataacggccgccaccgccaccaccaccaccgtacctatcatctcggccaccatatctatcacctctaccaccaccatctccagatgggcactctctagcaaagtggccaggttttccacacttgtagcaatccccaccaccacctgagccacgtggtgcacgcccaccaccaccaaagtcacggccacggtcataacgagatccacggtcacgatcataatcacggtctccattacggtctctaccaggtccttgtggctgagctttatcgacagtgatcgcccgcccatccaaatccaatccattcattccttcaatagcatcttccatggctttcttctcatcaaaggtcacaaagccaaaaccacgagaacggccagaatacttgtcaaaaaccacctttgcttcagtgaggttgccaaatttgccaaaggcatccttgaggctttcatcagttgtggaccatgacagattcccaatgaagcaacggtactcctccacgtccgccatctctgcgaggaagacgaaggcggcggcgaatcggatgctcttgccctcggtttggttcggaggtctagtatatagatcgaagggaagggagaagaagaccgccgcctttttttggggagggggaatttgggcatcccctcgtgc

SEQ ID NO: 23384 - DNA, 1528 bp, Oryza sativa
  Clone ID: TF_OsC359_6058
atgtcatggcacaaggccggtgtcctgctgctagggggctcaatcctgcctgcctgtcccggaggttccggccgtaggtggggttggatgtttaacagagaaaaagaaaagaatgtcagagggtatgcctccagtaactcaagttttcaactcaatccaccactggcctcaagagagttaacaagggcacacccttggtccattccgagcatgctgcttggttcacagctaccattggttggaagtcaagaccaaaatcagtatgtgtttgatcaagcatttgccacccaggtcaatgagcttccaatgccagaagagcatgtccccttttgtcatgattgtagagagcaaggacactatgccctgaattgtccatgggtatatgccaaagaagccccttcctttggtttagcagggcagacatcgctaaacccgcctcctcgcaccaagtcaagcttgcagcctagtgtgcaaggtagagagcccaatggagagaatccattgaatcccgagaattgctttcctcctagcctttcgtaccacgtggggtcacgtactaagcaagccaaaggcaagaagagtaagagtcagaagagaaaagcgccgatgcgaactaaagaagaagtacgtaagatgactattaccagcgccgaatggcctccagcagggataactattcctagacgtcaaagaggaaataccttccgaggtgcacgacggttgacccagcacctcctaagccatggtggcagagtatctgatcaagtctcctcggatgatgaagatgagtctccccgacatctcggcgaggaagagatggaatcaaaggcatgcacccgttgtggagaaattggacacgttgctagcatgtgtctcacactctgccttcattgtgaggaagaccatccacccgacaggtgtccaacgagcaggatcacttgtttcttttgtgaaggaactgatcatgtaccaaaagattgtcaatccagttttctgctgacgaagaagatggccaaccaacccgccagttccaacggagagaagcatcaaggcaacacaaatcctcgccaagattacagtttcagcctaactccagtgccaggacagaggaaccaaaatgagaaaagaaaatgccgagtccgggaagatatctgttgcttcaattgtcaaggaatgggtcatttcgccgacaagtgcccaaaaccgagaaacatagctgccagcacgtcagtccacgcaactccctgcaatcagaagcttgctcctcagcgaattgtcatccatgcatcccgaagcagtcctatagcccgcgttgcaacagctccaactccagcgagtgcattaccacaaggtgtcaatgctcaatttcagccccagccatcagttgacaagacagaggccagtatcggcattgtacctttggatgttccagcacagcagccaaagaaatcaagtacaagatgaagaacccgaacagaaacatgagataatgaatgagcttgataagcttatgaaggacccatgttaa

SEQ ID NO: 23385 - DNA, 1581 bp, Oryza sativa; identical to SEQ ID NO: 15511
  Clone ID: TF_OsC359_7004

SEQ ID NO: 23386 - DNA, 3810 bp, Oryza sativa
  Clone ID: TF_OsC1713_3645
atcaaattgatccaatgagaaatatgcaacagcagtagatgaattgtatggattgatttcggccgcacagccgaaacagacgtggtactcgtctcgacgaaacacagatgggtagattgcaaattcggctattaaagaggtgtcgcactctcgcagcggcggcggacggtttacggtgcaaaccgacaaagatggactaaacctgtggtctgaccggccctgtgaaggaaacccgtcactttctaaactttggcaattttcccctatttcgtccataggtgccaaatttgggtgtaaacagctggctaaggaacttgagaacaacaactgtgagttgctggacaagtttgtggcgggtggcattattgccaaattgccaccttcttgctcggactttgccacttgtctaaagcacaagagataagagttcagtgtttctgatctcattggctctttgggtgttgaggagaaggcgagggcaaaggacgtccagggcaaaaagattgagggaggttctagtgccaatatggtacagaagaagaaccctcaagcatcccacaacaacaagaaagtcaagcctgatgtcaaacccaaggctgcaaccaactttaagaagaaaggcaagggaaaggcaaagggagactgctttgtgtgtggcaagtctgggcattgggccaaggattgtcctgagcgcaaagacaggaagtctgctaacatggtcattagcgagggcggaggaacatcggggtacggtaaaatattacctacagttctctctgtttttcactcacctgattggtgggtggatactgtgctaatattcatgtatgtgctgacatttctctgttttcttcttatcaggtcgggagaggttcctccttgttgatgggaaacgggtcgcttgcggctgttcatggtgttggtacgatcgatctgaagtttacttcgggaaataccgtgcagctgaagaacgtgcagcatgtcccttcatatataaagaagaatcttgttagcggctctctattgtgtagagaaggttttagacttgtgtttgagtccaataaatgtgtcgtatctaaatatgagacttttgttggaaaaggttatgacagcggaggcttgtttcgctttgctttgaatgacatgtgtaataatcataatgctgtgaaccatattagcgagaatgatgagtctaatgtgtggcattcgcgactctgtcatgtgaatttcggttgtatgacgcgcttagctaacatgagtttaattccaaaattcactttggtcaaaggttccaagtgccatacttgtgttcaatcgaaacaacctcgtaagcctcacaaggcatctgaggcgaggaatttggcacctctagaacttgttcattccgatttgtgcgaaatgaacagcgtgttgactaaagggggaaagaaatatttcatgacactgacagatgattgcactagattttgctatgtgtatctattgaaaagaaaggatgaagcattgcattactttaaaatctataaagctgaggtagaaaaccaacttgaaaggaaaatcaaacggttgaggtctgatagaggtagggagtatttttccaatgagtttgcatccttttgcgaagagtttggaattattcatgagagaacgcctccctatttaccccaatcaaatggggtggccgaaagaaagaaccgtactctagctgagatagtgaatgctatgttagacactacggggctttgcaaggaatggtggggtgaggcagttttgactgcgtgttatgtcctgaataaaattccaatgaagcataagaaagtaacaccattcgaggaatgggaaaggaagaaattaaatctctcatacctacgaacatggggctgtttggccaaggtaaatgtacctatagccaaaaagcggaaacttggaccaaatactgttgattgtgtgttccttggttatgctattcacagtgtgggttatagattcttaatagtaaactctggagtacccgacatgcatgttggtacaatttttgagtccagagatgctatattctttgagaatgaatttcccatgaaacatacacctagcacttctagtcaagaaactgtcatgccccatgagcactttgcaccgatagaacacaatgatcaaacgcctaagaaaaatcctgaggaggacaacattgtagatactcgcaagagtaagagacaaagggttgcaaaatcctttggagatgactacattgtatacctcgttgatgacaccccaagaaccatagaagaggcatattcatctcctgacgctgactactggaaggaagcagtacgtagtgaaatggacccgattatgtctaatggtagttgggaagtcgttgagcgtccatatggctgcaagcccataggatgcaaatgggttttcaagaaaaagtttaggcctaatggtacaattgaaaagtacaaggcaaggcttgtgcccaagggttatacccaaaaggaaggcgaggacttctttgacatatactcaccagttgctcgcttgaccacgattcgagtactacttgctctggcagcctctcatggtcttctcgtccatcagatggacgttaagacagctttcctaaacggagagctggaggaggagatctatatggatcaactagacgggtatgtactagaaggtcgggagggaatggtgtgtaaactgttgaaatccttgtatggcatcaagcaagcacctaagcaatggcatgaaaagtttgacaccacgcttacatctgtaggctttgttgtgaacgtagttgacaaatgtatgtactatcgctatggtgggggagaaggagtgatcttgtgcttatatgtcgatgacatattgatctttgggatcagccttaatgtgattgaggaggtcaaggactatctgtccaagagttttgaaatgaaggatttgggagaggctgatgttatccttaacatcaaactacaaagaggagatgagggtgggattacacttgtgcaatcccactatgtggacaaggttttgagtcgctttggatatagtgactgcaagccagctcctactccttatgatcccagcgtgctattaagaaaaaaccgaagaatagtaagggatcaactgagatactctcaaatcattggttcattgatatacttggctagtgcaacgaggcctgacatctcatttgctgtaagcaagctgagccggtttgtctcaaatccgggagatgatcattggcaggctctggaaagagtaatgcgctatctaaagggcactatgagctatggaattcactataccgggtatccaaaagtactagaagggtatagtgactcaaactggatatctgatgctgatgagataaaagtcacaagtggatatgtgttcacacttggaggtggcgctgtttcctggaagtcttgcaagcagaccatcttaacgaggtcaacaatggaagtagaacttacagcactagatactgcgacagttgaggccgagtggcttcgtgaactcctgatggatttgtcggtggttgaaaaaccagtgccagctatcctaatgaactgtgataatcaaacagtgattattaaattgaacagttcaaaggacaacatgaagttatctaggcatatcaagagaagactgaaatctgtcagaaagtagaaaaactccggagtgatagcattggactatgtccaaacggctagaaatctggcagatcagtttaccaaggggctaccacgtaatgtgatagatagtgcatcgagggaaatgggcatgatacctacc

SEQ ID NO: 23387 - DNA, 2697 bp, Oryza sativa
  Clone ID: TF_OsC1713_3689
tcacagaacaaaaatgatcatctcaaaatccccaaatcggtaatctccaaatacatcataaattaatccggtgatgccgctgccgcctcccgcctcccctccggcagagaggacagcgccgcttgcacgccgcctaccgctgcccacccatccgcccgccacccgccttcttgcttcctgcagccgccttcctgccgccatcccctccgtctgcctctgcccgccacagccttcacggcgcgccgccgcgcgccactgcccgccaccgccatccccttcgcctgccgtcgcgcgccgctgcccgccgctgcccgccattgcgcgcacaagagatcggaaggagcagggcctccggaaccacaccttcgcctgatatctgcaccgggtaggcgggtgatcaggtttttggggagatcggaaggagcatggcctccggaacctcaccttcgcctgagatcttcgcctgatatctgcaccgggtaggcgggtgatcaggtttttggggagatcgaaaggagcatggcctccggaaccacaccttcgcctgagatctgcaccgggtaggcgggtgatcaggtttttggggagtgcttcccgcacgactgctcgtccaccatgtctgcgcctggagccggagctgccgccgccgccgctgctgctggagctggagatggcgtgcctggagctggagccggagccgttgcgaacgtcaacaccaacagaggcaattctgcctcacaatccagcggagggccattctcggggtatatccttctcctgctgttaactcattcgtttatagcgctgttagtcctgttagtcgcaagtcaattgcagcttttggggagtgcttcccgtacgattgctcgtccaccatgtatgcgcctggagccggagctgccgccggtgccactgctgctggagctagagatggcgcgcctggagctggagccggagctgttgcgaacgtcaacaccaacggaggcaattctgcctcacaatccaacggagggccattctcgggttggctttgctgctgcactgaaaccacatgcttttgatggttctaactataagagatggaaagcacgtgcactattgtggttgacagcgatgcaatgcttctatgtttcacggggcaaacaaagtgaaccacctctttctcctgaggaagaggctaagttcgaggcttcggattgcctgttccgtggagcattgatcagtgtactcgctgacaacatagtggacgtgtacatgcacatgccttctgggaaggacatgtgggatgcacttgaggccaaattcggagtttccgacgccggcagtgagctgtatgtcatggagcagttctatgactacaagattgtcgatgaccgttctgtagtagaacaagctcatgagattcagatgctggctaaggaacttgagaacaacaactgtgagttgccagacaagtttgtggcgggtggcattattgccaaattgccaccttcttggtcggacttggccacttctctaaagcacaagagacaagagttcagtgtttctgatctcattggctctttgggtgttgaggagaaggcgaggacaaaggacgtccggggcaaaaaggttgagggaggttctagtgccaatatggtacagaagaagaaccctcatgcatcccacaacaacaagaaagtcaagcctgatgtcaaacccaaggctgcaaccaactttaagaacaaaggcaagggaaaggcaaagggagactgctttgtgtgtggcaagtctgggcattgggccaaggactgtcctgagcgcaaagacaggaagtctgccaacatggtcattagcgagggcggaggaacatcggggtacggtcgggagaggttcctccttgttgatgggaaacgggtcgcttgcggctgttcatggtgttggttttgctatgtgtatctattgaaaacaaaggatgaagcattgcatttctttaagacctataaagctgaggtagaaaaccaacttgaaaggaaaatcaaacggttgaggtctgatagaggtggggagtatttttccaatgaatttgcatccttttgcgaagagtttggaattattcatgagaggacgcctccctattcaccccaatcaaatggggtggccgaaagaaagaaccgtactctaactgagatggtgaatgccatgttagacactgcagggctttctaaggaatggtggggtgaggcagttttgactgcgtgtcatgtcctgaataaaattccaatgaagcataaggaagtaacaccattcgaggaatgggaaaggaagaaattaaatctctcatacctacgaacatggggctgtttggccaaggtaaatgtacctatagccaaaaagcggaaacttggaccaaatactgttgattgtgtgttccttggttatgctattcacagtgtgggttataaattcttaatagtaaactctagagtacccgacatgcatgttggtacaattattgagtccagagatgctacattctttgagaatgaatttcccatgaaacatacacctagcacctctagtcaagaaactatcatgccccatgagcactttgcaccgatagaacacaatgatcaaacgcctgaggaaaatcctgaggaggacaacattgtagatactcgtaagagtaagagacaaagggttgcaaaatggagatga

SEQ ID NO: 23388 - DNA, 4086 bp, Oryza sativa; identical to SEQ ID NO: 15401
  Clone ID: TF_OsC1713_3856

SEQ ID NO: 23389 - DNA, 3414 bp, Oryza sativa
  Clone ID: TF_OsC1713_3861
atgtcgaacactggagacaaggagaaggagactcccgtcaacaccaacggaggcaatactgcctcaaactccagcggaggaccattcttggggtcattttcggtagttggctttgctgctacactgaaaccacatgcctttgatggttcaaactataagagatggaaagcacgtgcactattgtggttgacagcgatgcagtgcttctatgtttcacggggcaaacgaagtgaaccacctctttctcctgaggaagaggctaagttcgaggcttcggattgcctgttccgtggagcattgatcagtgtactcgctgacaacatagtggacgtgtacatgtacatgccttctgggaaggaaatgtgggatgcacttgaggccaagttcggagtttctgacgccggcagtgagctgtatgttatggagcagttctatgactacaagatggtcgatgaccgttctatagttgaacaagctcatgagattcagatgctggctaaggaacttgagaacaacaactgtgagttgccggacaagtttgtggcaggtggcattattgccaaactaccaccttcttggtcggactttgccacttctctaaagcacaagagacaagagttcagtgttcctgatctcattggctctttgggtgttgaggagaaggcgagggcaaaggacgtccggggcaaaaaggttgagggaggttctagtgccaatatggtacagaagaagaaccctcatgcatcccacaacaacaagaaagtcaagcctgatgtcaaacccaaggctgcaaccaattttaagaagaaaagcaagggaaaggcaaagggagactgctttgtgtgtggcaagtctgggcattgggccaaggactgtcctgagcgcaaagacaggaagtctgccaacatgatcattagcgagggcggaggaacatcggggtacggtaaaatattacctacagttctctctgtttttcattcacttgattggtgggtggacactggtgctaatattcatgtcgggagaggttcctccttgttgatgggaaacgggtcgcttgcggctgttcatggtgttggtacggtcgatctgaagtttacttcgggaaagaccgtgcagctgaagaacgtgcagcatgtcccttcaataaagaagaatctagttagcggctctctattgtgtagagaaggttttagacttgtgtttgagtccaataaatgtgtcgtatctaaatatgggacttttgttggaaaagattatgacagcggaggcttgttccgcttttctttgaatgacatgtgtaataatcataatgctgtgaaccatattagcgagaatgatgagtctaatgtgtggcattcgcgactctgtcatgtgaatttcggttgtatgacgcgcttagctaacatgagtttaattccaaaattcactttggtaaaaggttccaagtgccatacttgtgttcaatcgaaacaacctcgcaagcctcacaaggcatctgaggcgaggaatttggcacctctagaacttgttcattccgatttgtgcgaaatgaacggcgtgttgactaaagggggaaagaaatatttcatgacactgatagatgattgcactagattttgctatgtgtatctattgaaaacaaaggatgaggcattgcatttctttaaaatctataaagctgaggtagaaaaccaacttgaaaggaaaatcaaacggttgaggtctgatagaggtggggagtatttttccaatgagtttgcatccttttgcgaagagtttggaattattcatgagatgacgcctccctattcaccccaatcaaatggggtggccgaaagaaagaaccgtactctaactgagatggtgaatgccatgttagacactgcggggctttccaaggaatggtggggtgaggcagttttgactgcgtgtcatgtcctgaataaaattccaatgaagcataaggaaataacaccattcgaggaatgggaaaggaagaaattaaatctctcatacctacgaacatggggctgtttggccaaggtaaatgtacctatagccaaaaagcggaaacttggaccaaaaactgttgattgtgtgtttcttggttatgctatccacagtgtgggttatagattcttaatagtaaactctggagtacccgacatgcatgttggtacaattcttgagtccagagatgctacattctttgagaatgaatttcctatgaaatatacacctagcacttctagtaaagaaactgtcatgccccatgagcactttgcaccgatagaacacaatgatcaaacgcctgaggaaaatcctgaggaggacaacattgtagatactcgcaagagtaagagacaaagggttgcaaaatcctttggagatgactacattgtatacctcgtggatgacaccccaagaaccatagaagaggcatattcatctcctaacgctgactactggaaggaagcagtacgcagtgaaatggactcgattatgtctaatggtacttgggaagtcgttgagcgtccatatgggtgcaagcccgtaggatgcaaatgggttttcaagaaaaagcttaggcttgatggtacaatcgaaaagtacaaggcaaggcttgtggccaagggttatacccaaaaggaaggcgaggacttcttcgacacatactcactagttgctcgcttgaccacgattcgagtactactcgctctggcagcctctcatggtcttctcgtccatcagatggacgttaagacagctttcctaaacggagagctggaggaggagatctatatggatcaaccagacgggtatgtactagaaggtcaggagggaatggtgtgtaaactattgaaatccttgtatggcctcaagcaagcacctaagcaatgtcatgagaagtttgacaccacgcttacatctgcaggctttgttgtgaacgaagctgacaaatgtgtatgctatcgctatggtgggggagaaggggtgatcttgtgcttatatgtcgatgacatactgatctttgggaccagccttaatgtgattgaggaggtcaaagactatctgtccaagagttttgaaatgaaagatttgggagaggctgatgttattcttaacatcaaactacaaagaggagatgagggtgggattacacttgtgcaatcccactatgtggacaaggttttgagtcgctttggatatagtgactgcaagccagctcctactccttatgatcccagcgtgctattaaggaaaaaccgaagaatagcaagggatcagctgagatactctcaaatcattggttcattgatgtacttggctagcgcaacgaggcctgacatctcatttgctgtaagcaagctgagccggtttgtctcaaatccgggagatgatcattggtag

SEQ ID NO: 23390 - DNA, 3306 bp, Oryza sativa
  Clone ID: TF_OsC1713_4039
atgtctgcgcctggagccggagccgccggcgtggctgttggaggagatggcgtgcctggagctggagccggaggtggtgcgctaggagctagagccggtgccacgaacaacaacatcaacggaggcaattttgcctcacaatccagtggagggccattctcggggtatatccttctcctgttcctattgttagcgctttaccgctatgttcctgttcctgatattcatgatgcctttagcatgctagcgctttactgctatgttcctgttcctgatattcatgatgcctttagcgtgctactgcgttactgctatgttattcatgatgcctttagtatgctactggttatgttgtcactagattaccctacactgagatggaaagcacatgcactattgtggttgacagcgatgcaatgcttctttgtttcacggggcaaacgaagtgaaccacctctctctcctgaggaagaggctaagttcgaggcttcggattgcctgttccgtggagcattgatcagtgtactcgctgacaacatagtggacgtgtacatgcacatgccttccgggaaggacatgtgggatgcacttgaggccaagttcggagtttccgacgccggtagtgagctgtatgtcatggagcagttctatgactacaagatggtcgatgaccgttctgtagtagaacaagctcacgagattcagatgctggctaaggaacttgagaacaacaactgtgagttgccagacaagtttgtgcacaagagacaagagttcagtgtttctgatctcattggctctttgggtgttgaggagaaggcgagggcaaaggacaaccggggcaaaaagaagaagaaccctcatgcatcccacaacaacaagaaaatcaagcttgatgtcaaatccaaggctgcaaccaaatttaagaagaaatgcaagggaaaggcaaagggagactgctttgtgtgtggcaagtctgggcattgggccaaggactgtcctgagtgcaaagacaggaagtctgccaacatggtcattagcgagggcggaggaacatcggggtacggtaaaatattacctacagttctctctgtctttcactcacctgattggtgggtggatactggtgctaatattcatgcatgtgctgacatttctctgttttcttcttatcaggtcgggagaggttcctccttgttgatgggaaacaggtcgcttgcggctattcatggtgttggtacggtcgatctgaagtttacttcgggaaagaccatgcagctgaagaacgtgcagcatgtcccttcaataaagaagaatcttgttagcggctctctattgtgtagagaaggttttagacttgtgtttgaatccaataaatgtgtcatatctaaatatggaacttttgttggaaaaggttatgacagtggaggcttgttccgcttttctttgaatgacatgtgtaataatcataatgttgtgaaccatattagcgagaatgatgagtctaatgtgtggcattcgcgactctgtcatgtgaatttcggttgtatgacgctcttagctaacatgagtttaattccaaaattcactttggtcaaaggttctaagtgccatacttgtgttcaatcgaaacaaccttgcaagcctcacaagacatctgaggcgaggaatttggcacctctagaactcgttcattccgatttgtgcgaaatgaacggcgtgttgactaaagggggaaagaaatatttcatgacactgatagatgattgcactagattttgttatgtgtatctattgaaaacaaaggatgaagcattgcatttctttaagacctataaagctgaggtagaaaaccaacttgaaaggaaaatcaaactgttgaggtctgatagaggtggggagtattttttcaatgagtttgcatccttttgcgaagaatttggaattattcatgagaggacgcctccctattcaccccaatcaaatggggtggccgaaagaaagaaccgtactctaactgagatggtgaatgccatgttagacactgcggggctttccaaggaatggtggggtgaggcagttttgactgcgtgtcatgtcctgaataaaattctaatgaagcataaggaagtaataccattcgaggaatgggaaaggaagaaattaaatctctcatacctacgaacatggggctgtttggccaaggtaaatgtacctatagccaaaaagcggaaacttggaccaaatactgttgattgtatgttccttggttatgctattcacagtgtgggctatagattcttaatagtaaattctggagtacctgacatgtatgttggtacaattattgagtccagagatgctacattctttgagaatgaatttcccatgaaacatacacctagcacttctagtcaagaaactgtcatgccccatgagcactttgcaccgatagaacacaatgatcaaacgcctgaggaaaatcctgaggaggacaacattgtagatactcgtaagacctctcatggtgttctcgtccatcagatgaacgttaagacagctttcctaaacggagagctggaggaggagatctatatggatcaaccagacgggtatgtactagaaggctttgttgtgaacggagctgacaaatgtgtgtactatcgctatggtgggggagaaggagtgatcttgtgcttatatgtcgatgacatattgatctttgggaccaacctcaatgtgattgagggggtcaaggactatctgtccaagagttttgaaatgaaggatttgggagaggctgatgttattcttaacattaaactacaaagaggagatgagggtgagattacacttgtgcaatcccactatgtggacaagattttgagtcactttggatatagtggctgcaagccagcttctactccttatgatcccagcgtgctattaaggaaaaaccgaagaatagcaagggatcaactgagatactcccaaataattggttcattgatgtacttggctagtgcaacgaggcctgacatctcatttgctgtaagcaagctgagccggtttgtcttaaatccgggagatgatcattggcaggctctggaaagagtaatgcgctatctaaagggcattatgagttatggaattcactataccaggtatccaaaagtactagaagggtatagtgactcaaactggatatctgatgctgataagataaaagccacaagtggatatgtgttcgcacttgaaggtggcactgtttcctggaagccttgcaagcagacggggatcctctag

SEQ ID NO: 23391 - DNA, 4314 bp, Oryza sativa; identical to SEQ ID NO: 15392
  Clone ID: TF_OsC1713_4055

SEQ ID NO: 23392 - DNA, 3381 bp, Oryza sativa; identical to SEQ ID NO: 15381
  Clone ID: TF_OsC1713_4266

SEQ ID NO: 23393 - DNA, 4116 bp, Oryza sativa; identical to SEQ ID NO: 15390
  Clone ID: TF_OsC1713_4346

SEQ ID NO: 23394 - DNA, 3255 bp, Oryza sativa; identical to SEQ ID NO: 15431
  Clone ID: TF_OsC1713_4393

SEQ ID NO: 23395 - DNA, 3561 bp, Oryza sativa; identical to SEQ ID NO: 15372
  Clone ID: TF_OsC1713_4437

SEQ ID NO: 23396 - DNA, 3381 bp, Oryza sativa; identical to SEQ ID NO: 15421
  Clone ID: TF_OsC1713_4451

SEQ ID NO: 23397 - DNA, 4149 bp, Oryza sativa
  Clone ID: TF_OsC1713_4689
atgtcgaacactggagacaaggagaaggagactcccgtcaacaccaacggaggcaatactgcctcaaactccagcggaagaccattcttggggtataaccttattacattatttcaattagaagttttactgttaatgttcatcgcaatgtcaacattgtgtcattatgtgattgttgatgcttattcaatgttaagcatgctcatgttgattacattcaccactatcactggatcaaatcctattgtaaatatcatgtttattatcttgttattttggattaaaatatgccgaattatgaccaaatttctaacaatccaaaaacctgataggtcattttcggtagttggctttgctgctacactgaaaccacatgcctttgatggttcaaactataagagatggaaagcacgtgcactattgtggttgacagcgatgcagtgcttctatgtttcacggggcaaacgaagtgaaccacctctttctcctgaggaagaggctaagttcgaggcttcggattgcctgttccgtggagcattgatcagtgtactcgctgacaacatagtggacgtgtacatgcacatgccttctgggaaggaaatgtgggatgcacttgaggccaagttcggagtttctgacgccggcagtgagctgtatgttatggagcagttctatgactacaagatggtcgatgaccgttctgtagttgaacaagctcatgagattcagatgctggctaaggaacttgagaacaacaactgtgagttgccggacaagtttgtggcaggtggcattattgccaaactaccaccttcttggtcggactttgccacttctctaaagcacaagagacaagagttcagtgttcctgatctcattggctctttgggtgttgaggagaaggcgagggcaaaggacgtccggggcaaaaaggttgagggaggttctagtgccaatatggtacagaagaagaaccctcatgcatcccacaacaacaagaaagtcaagcctgatgtcaaacccaaggctgcaaccaattttaagaagaaaagcaagggaaaggcaaagggagactgctttgtgtgtggcaagtctgggcattgggccaaggactgtcctgagcgcaaagacaggaagtctgccaacatgatcattagcgagggcggaggaacatcggggtacggtaaaatattacctacagttctctctgtttttcattcacctgattggtgggtggacactggtgctaatattcatgtcgggagaggttcctccttgttgatgggaaacgggtcgcttgcggctgttcatggtgttggtacggtcgatctgaagtttacttcgggaaagaccgtgcagctgaagaacgtgcagcatgtcccttcaataaagaagaatctagttagcggctctctattgtgtagagaaggttttagacttgtgtttgagtccaataaatgtgtcgtatctaaatatgggacttttgttggaaaaggttatgacagcggaggcttgttccgcttttctttgaatgacatgtgtaataatcataatgctgtgaaccatattagcgagaatgatgagtctaatgtgtggcattcacgactctgtcatgtgaatttcggttgtatgacgcgcttagctaacatgagtttaattccaaaattcactttggtaaaaggttccaagtgccatacttgtgttcaatcgaaacaacctcgcaagcctcacaaggcatctgaggcgaggaatttggcacctctagaacttgttcattccgatttgtgcgaaatgaacggcgtgttgactaaagggggaaagaaatatttcatgacactgatagatgattgcactagattttgctatgtgtatctattgaaaacaaaggatgaggcattgcatttctttaaaatctataaagccgaggtagaaaaccaacttgaaaggaaaatcaaacggttgaggtctgatagaggtggggagtatttttccaatgagtttgcatccttttgcgaagagtttggaattattcatgagatgacgcctccctattcaccccaatcaaatggggtggccgaaagaaagaaccgtactctaactgagatggtgaatgccatgttagacactgcggggctttccaaggaatgcataaggaaaacaccattcgaggaatgggaaaggaagaaattaaatctctcatacctacgaacatggggctgtttggccaaggtaaatgtacctatagccaaaaagcggaaacttggaccaaaaactgttgattgtgtgtttcttggttatgctatccacagtgtgggttatagattcttaatagtaaactctggagtacccgacatgcatgttggtacaattcttgagtccagagatgctatattctttgagaatgaatttcctatgaaatatacacctagcacttctagtaaagaaactgtcatgccccatgagcactttgcaccgatagaacacaatgatcaaacgcctgaggaaaatcctgaggaggacaacattgtagatactcgcaagagtaagagacaaagggttgcaaaatcctttggagatgactacattgtatacctcgtggatgacaccccaagaaccatagaagaggcatattcatctcctgacgctgactactggaaggaagcagtacgcagtgaaatggactcgattatgtctaatggtacttgggaagtcgttgagcgtccatatgggtgcaagcccgtaggatgcaaatgggttttcaagaaaaagcttaggcctgatggtacaatcgaaaagtacaaggcaaggcttgtggccaagggttatacccaaaaggaaggcgaggacttcttcgacacatactcaccagttgctcgcttgaccacgattcgagtactacttgctctggcagcctctcatggtcttctcgtccatcagatggacattaagacagctttcctaaacggagagctggaggaggagatctatatggatcaaccagacgggtatgtactagaaggtcaggagggaatggtgtgtaaactattgaaatccttgtatggcctcaagcaagcacctaagcaatggcatgagaagtttgacaccacgcttacatctgcaggctttgttgtgaacgaagctgacaaatatgtatactatcgctatggtgggggagaaggggtgatcttgtgcttatatgtcgatgacatactgatctttgggaccagccttaatgtgattgaggaggtcaaagactatctgtccaagagttttgaaatgaaagatttgggagaggctgatgttattcttaacatcaaactacaaagaggagatgagggtgggattacacttgtgcaatcccactatgtggacaaggttttgagtcgctttggatatagtgactgcaagccagctcctactccttatgatcccagcgtgctattaaggaaaaaccgaagaatagcaagggatcagctgagatactctcaaatcattggttcattgatgtacttggctagcgcaacgaggcctgacatctcatttgctgtaagcaagctgagccggtttgtctcaaatccgggagatgatcattggcaggctctggaaagagtaatgcgctatctaaagggtactatgagctatggaattcactataccgggtatccaaaagtactagaagggtatagtgactcaaactggatatctgatgctgatgagataaaagccacaagtggatatgtgttcacacttggaggtggcgctgtttcctggaagtcttgcaagcagaccatcttaacgaggtcaacaatggaagcagaacttacagcactagatactgcgacagttgaggccgagtggcttcgtgaactcctgatggatttgccggtggttgaaaaaccagtgccagctatcctaatgaactgcgataatcaaacagtgattattaaagtgaacagttcaaaggacaacatgaagtcatctagacacatcaagagaagactgaaatctgtcagaaagcagaaaaactccggagtgatagcattggactatgtccaaacggctagaaatctggcagatcagtttaccaaggggctaccacgtaatgtgatagacagtgcatcgagggaaatgggcttgatacccacctaa

SEQ ID NO: 23398 - DNA, 5357 bp, Oryza sativa
  Clone ID: TF_OsC1713_4708
atggtgtgtggcaagctcgtggtcatcgagttcggtgcatcctggtgtgaaccttcacgcaggatcgctccagttttcgctgagtacgccaaggagttcgctggagtagttttcctgaagttcgatatcgatgagctggaggaaattgcagactcgtatgatgtcaacggagtagtacccaccttcaccttcgtcaaggctgggcagaagattgacatgatccaaggagccagatatagagagggcctggcggtcaccgggaaattcttcccgggtgcgcacgagagacgttcccggcctgggttgaccgacgaggacgtcggtgtcttaagggggagagaatgtgacatcccggctcagggcttaaagaggattaatagaatactcataccaacaagttgcaacttcttttccggaagccgatctcgaaagaactctaagctgccagatgtaacagggcccggcctcgagtgtggggcgtcacaccaggtctctccgttcgaagattcaaatgcacactgcttctccttacttcctgggttgcagctgctcaaggcagttgctgctacactcggaggggagaccatcttccaccacgaggcataccaacgcgatacatgaacaatggagaggacaaagagacacttggagaaggacttagagttatggaggatcatcaaggacgtccaagtcaaggtggagggccaaagcaagccaactttgagtgcaattcggagtccagaaccagtctacactaaaacgggcgtccagtataactgctgctctgctagtgctagcggctactgtggtgctgctccgcgcgccgccatggcgcctactgacggcttcgcgcagccgctccgcctgcagcctgccggcttccgcgcctgcggccgcctttgtttgctcttactcgccaccagacagctagctacggcgctgcagctcgaggcctcgagctcttgcgacttgcgtcggcgtcggctgctccagccgccaccagttgccagcgacagctcccacccggcggaggtggtacgccgccgccgacaggagctggtgcgccgccgccgacaggagctggtgcgccaggaggaggtgccgtgaacgactacaacaacggaggcaattctgcctcaccatccagcggagggccattctcggggtataatcttctcctcctgctactgctgttagcgctattcctgttcccattgttagcgctatactgtgtgcgctatgttcttgttcctattctacgtgatgcctctagcatgttatcgcgttactggtatgttcctgtttctgacattcatgatgcgcatagtatgctactggttatgttaagattaccctacactgcttatgccatgatcattgtttcaatttcttggattaaaatatgccgaataatgactatatttccaacaatccaaaaacctgataggtcattttcggtagttggctttgctgctgcactgaaaccacatgcttttgatggttcaaactataagagatggaaagcacgtgcactattgtggttgacagcgatgcagtgcttctatgtttcacggggcaaacgaagtgaaccacctctttctcctgaggaagaggctaagttcgaggcttcggattgcctgttccgtggagcattgatcagtgtactcgctgacaacatagtggacgtgtacatgcacatgccttctgggaaggacatgtgggatgcacttgaggccaagttcggagtttctgacgccggcagtgagctgtatatcatggagcagttctatgactacaagatggtcgatgaccgttctgtagtagaacaagctcatgagattcagatgctggctaaggaacttgagaacaacaactgtgagttgccggacaagtttgtggcgggtggcattattgccaaactaccaccttcttggtcggactttgccacttctctaaagcacaagagacaagagttcagtgttcctgatctcattggctctttgggtgttgaggagaaggcgagggcaaaggacgtccggggcaaaaaggttgagggaggttctagtgccaatatggtacagaagaagaaccctcatgcatcccacaacaacaagaaagtcaagcctgatgtcaaacccaaggctgcaaccaattttaagaagaaaggcaagggaaaggcaaagggagactgctttgtgtgtggcaagtctgggcattgggccaaggactgtcctgagcgcaaagacaggaagtctgccaacatgatcattagcgagggcggaggaacatcggggtacggtaaaatattacctacagttctctctgtttttcattcacctgattggtgggtggatactggtgctaatattcatgtatgtgctgacatttctctgttttcttcttatcaggtcgagagaggttcctccttgttgatgggaaacgggtcgcttgcggctgttcatggtgttggtacggtcgatctgaagtttacttcgggaaagaccgtgcagctgaagaacgtgcagcatgtcccttcaataaagaagaatctagttagcggctctctattgtgtagagaaggttttagacttgtgtttgagtccaataaatgtgtcgtatctaaatatgggacttttgttggtaaaggttatgacagcggaggcttgttccgcttttctttgaatgacatgtgtaataatcataatgctgtgaaccatattagcaagaatgatgagtctaatgtgtggcattcgcgactctgtcatgtgaatttcggttgtatgacgcgcttagctaacatgagtttaattccaaaattcactttggtcaaaggttccaagtgccatacttgtgttcaatcgaaacaacctcgcaagcctcacaaggcatctgaggcgaggaatttggcacctctagaacttgttcattccgatttgtgcgaaatgaacggcatgttgactaaagggggaaagaaatatttcatgacactgatagatgattgcactagattttgctatgtgtatctattgaaaacaaaggatgaggcattgcattactttaaaatctataaagctgaggtagaaaaccaacttgaaaggaaaatcaaacggttgaggtctgatagaggtggggagtatttttctaatgagtttgcatccttttgcgaagagtttggaattattcatgagatgacgcctccctattcaccccaatcaaatggggtggccgaaagaaagaaccgtattctaactgagatggtgaatgccatgttagacactgcggggctttccaaggaatggtggggtgaggcagttttgactgcgtgtcatgtcctgaataaaattccaatgaagcataaggaagtaacaccattcgaggaatgggaaaggaagaaattaaatctctcatacctacgaacatggggctgtttggccaaggtaaatgtacctatagtcaaaaagcggaaacttggaccaaaaactgttgattgtgtgtttcttggttatgctatccacagtgtgggttatagattcttaatagtaaactttggagtacccgacatgcatgctgctacaatttttgagtccagagatgctacattctttgagaatgaatttcttatgaaatatacacctagcacttctagtaaagaaactgtcatgctccatgagcactttgcaccgatagaacacaatgatgaaacgcctgaggaaaatcctgaggaggacaacattgtagatactcgcaagagtaagagacaaagggttgcaaaatcctttggagatgactacattgtatacctcgtggatgacaccccaagaaccatagaagaggcatattcatctcctgacgctgactactggaaggaagcagtacgcagtgaaattgactcgattatatctaatggtacttgggaagtcgttgagcgtccatatgggtgcaagcctgtaggatgcaaatgggttttcaagaaaaagcttaggcctgatggtacaatcgaaaagtacaaggcaaggcttgtggccaagggttatacccaaaaggaaggcgaggatttcttcgacacatattcaccagttgctcgcttgactacgattcgagtactacttgctctggcagcctctcatggtcttctcgtccatcagatggacgttaagacagctttcctaaacggagagctggaggaggagatctatatggatcaaccagacgggtatgtactagaaggtcaggagggaatggtgtgtaaactattgaaatccttgtatggcctcaagcaagcacctaagcaatggcatgagaagtttgacaccacgcttacagctgcaggctttgttgtgaacgaagctgacaaatgtgtatactatcgctatggtgggggagaaggggtgatcttgtgcttgtatgtcgatgacatactgatctttgggaccagtcttaatgtgattgaggaggtcaaagactatctgtccaagagttttgaaatgaaggatttgggagaggctgatgttattcttaacatcaaattacaaagaggagatgagggtgggattacacttgtgcaatcccactacgtggacaaggttttgagtcgctttggatatagtgactgcaagccagctcctactccttatgatcccagcgtgctattaaggaaaaatcgaagaatagcaagggatcaactgagatactctcaaatcattggttcattgatgtacttggctagcgcaacgaggcctgacatctcatttgctgtaagcaagctgagctggtttgtctcaaatccgggagatgatcattggcaggctctggaaagagtaatgcgctatctaaagggcactatgagctatggaattcactataccgggtatccaaaagtactagaagggtatagtgactcaaactggatatctgatgctgatgagataaaagccacaagtggatatgtgttcacacttggaggtggcgctgtttcctggaagtcttgcaagcagaccatcttaacgaggtcaacaatggaagcagaacttacagcactagatactgcgacagttgaggccgagtggcttcgtgaactcctgatggatttgccggtggttgaaaaaccagtgccagctatcctaatgaactgcgataatcaaacagtgattattaaagtgaacagttcaaaggacaacatgaagtcatctagacacatcaagagaagactgaaatctgtcagaaagcagaaaaactccggagtgatagcattggactatgtccaaacggctagaaatctggcagaccagtttaccaaggggctaccacgtaatgtgatagacagtgcatcgagggaaatgggcttgatacccacctaa

SEQ ID NO: 23399 - DNA, 4371 bp, Oryza sativa
  Clone ID: TF_OsC1713_4762
atgtctggagttgctgccgccgctattggcggaggtggagctgcgccgccgccgacgccgacaggagctggatccggagctggtgcgccaggaggaggtgccgtgaacgactacaacaacggaggcaattctgcctcaccatccagcggagggccattctcggggtataatcttctccttctactgctcatgttatcgcattactggtatgttcctgtttctgacattcatgatgcgcatagtatgctactggttatgttaagatcaccctacactgcttatgccatgatcatagtttcaatttcttggattaaaatatgccgaataatgactatatttccaacaatccaaaaacctgataggtcattttcggtagttggctttgctgctgcactgaaaccacatgcttttgatggttcaaactataagagatggaaagcacgtgcactattgtggttgacagcgatgcagtgcttctatgtttcacggggcaaacgaagtgaaccacctctttctcctgaggaagaggctaagttcgaggcttcggattgcctgttccgtggagcattgatcagtgtactcgctgacaacatagtggacgtgtacatgcacatgccttctgggaaggacatgtgggatgcacttgaggccaagttcggagtttctgacgccggcagtgagctgtatgtcatggagcagttctatgactacaagatggtcgatgaccgttctgtagtagaacaagctcatgagattcagatgctggctaaggaacttgagaacaacaactgtgagttgccggacaagtttgtggcgggtggcattattgccaaactaccaccttcttggtcggactttgccacttctctaaagcacaagagacaagagttcagtgttcctgatctcattggctctttgggtgttgaggagaaggcgagggcaaaggacgtccggggcaaaagggttgagggaggttctagtgccaatatggtacagaagaagaaccctcatgcatcccacaacaataagaaagtcaagcctgatgtcaaacccaaggctgcaaccaattttaagaagaaaggcaagggaaaggcaaagggagactgctttgtgtgtggcaagtctgggcattgggccaaggactgtcctgagcgcaaagacaggaagtctgccaacatagtcattagcgagggcggaggaacatcggggacggtcgggagaggttccttcttgttgatgggaaacgggtcgcttgcggctgttcatggtattgccaaaaagcggaaacttggaccaaaaactgttgattgtgtgttccttggttatgctatccacagtgtgggttatagattcttaatagtaaactctggtgtacccgacatgcatgctggtacaattcttgagtccagagatgctacattctttgagaatgagtttcctatgaaatatacacctagcacttctagtaaagaaactgtcatgccccatgagcactttgcaccgatagaacacgatgatcaaacgcctgaggaaaatcctgaggaggacaacattgtagatactcgcaagagtaagagacaaagggttgcaaaatcctttggagatgactacattgtatacctcgtggatgacaccccaagaaccatagaagaggcatattcatctcctgacgctgactactggaaggaagcagtacgcagtgaaatggactcgattatgtctaatggtacttgggaagtcgttgagcgtccatatgggtgcaagcccgtaggatgcaaatgggttttcaagaaaaagcttaggcctgatggtacaatcgaaaagtacaaggcaaggcttgtggccaagggttatacccaaaaggaaggcgaggacttcttcaacacatactcaccagttgctcgcttgaccacgattcgagtactacttgctctggcagcctctcatggtcttctcgtccatcagatggacgttaagacagctttcctaaacggagagctggaggaggagatctatatggatcaaccagacgggtatgtactagaaggtcaggagggaatggtgtgtaaactattgaaatccttgtatggcctcaagcaagcacctaagcaatggcatgagaagtttgacaccacgcttacatctgcaggctttgttgtgaacgaagctgacaaatgtgtatactatcgctatggtgggggagaaggggtgatcttgtgcttgtatgtcgatgacatactgatctttgggaccagccttaatgtgattgaggaggtcaaagactatctgtccaagagttttgaaatgaaggatttgggagaggctgatgttattcttaacatcaaacttcaaagaggagatgagggtgggattacacttgtgcaatcccactatgtggacaaggttttgagtcgctttggatatagtgactgcaagccagctcctactccttatgatcccagcgtgctattaaggaaaaaccgaagaatagcaagggatcaactaagatactctcaaatcattggttcattgatgtacttggctagcgcaacgaggcctgacatctcatttgctgtaagcaagctgagccggtttgtctcaaatccgggagatgatcattggcaggctctggaaagagtaatgcgctatctaaagggcactatgagctatggaattcactataccgggtatccaaaagtactagaagggtatggtgactcaaactggatatctgatgctgatgagataaaagccacaagtggatatgtgttcacacttggaggtggcgctgtttcctggaagtcttgcaagcagaccatcttaacaaggtcaacaatggaagcagaacttacagcactagatactgcgacagttgaggccgagtggcttcgtgaactcctgatggatttgccggtggttgaaaaaccagtgccagctatcctaatgaactgcgataatcaaacagtgattattaaagtgaacagttcaaaggacaacatgaagtcatctagacacatcaagagaagactgaaatctgtcagaaagcagaaaaactccggagtgatagcattggactatgtccaaacggctagaaatctggcagatcagtttaccaaggggctaccacgtttttggggagtgcctcctgcacgactgctcatcgccatgtctggagttgctgccgccgctactggcccgccgacaggagctggtggtacgccgccgccgacaggagctggatccggagctggtgcgccaggaggaggtgccgtgaacgactacaacaacggaggcaattctgcctcaccatccagcggagggccattctcgggggacggctatgcatttgcatccacagagaacagcatggttatctacaacattaatgtggctcctctgataaaaagtaacaaatacacgcttttggctgagcggacgaggaagtgggaggaggagaagaggcaggagcgccgtgagggcaaggccccggcggctcccgccggcaaccggcgaggtgaggccaagcagaaggccaccgccgaggacatcgacgatggcgacgaggacttggggttccaggagcctgaggccaccgtcgccaccgtcgatgggggagcgtgcgctcacgcttctcgctggagcctcaaggccatgaagcgcgagcttctggccgcggcccctacccatgaggcgacgcggcgggcgcggtggtcggaggttgccctcaccttcgaccagaccgaccacccgccgtgcgttgcccggggaggacagatcgcgatggtggtttcccccaccgtttgcaatgtgaagttggggcgtgtcctcatagacgggggtgcagccctcaacatcctttcccccgtagcctttgacgccatcaaggccctggggatggtgctccggccgtcccagccgatcatcggtgtgacgctggggcacacctggccgctgggtcatatcgacctcccggtcaccttcggtggttccgccaacttccgcacggagcgggtggacttcgatgtggcggacctcagtctgccctacaacgcggtcctggggaggcccgcgttggtgaagttcatggcggcggtccactacgcctatctccagatgaagatgccgggccccggtggccccatcaccgtccatggcgacctcaaagttgcgcttgcttgtatggagcagcacgcggaccacctcgccgcggcgtccaagcccgcgggtggcgacgagaggctcagcgcctccgtcccggccgccccgaggcagcggatggtcacgtgcgacgaggtcccggtcaaggaggttgccctgggcgacggcccgtccaagaccacacgaatcggtggtcttctggacgacaaatag

SEQ ID NO: 23400 - DNA, 7376 bp, Oryza sativa
  Clone ID: TF_OsC1713_4807
atgcagtgcttctatgtttcacggggcaaacgaagtgaaccacctctttctcctgaggaagaggctaagttcgaggcttcggattgcttgttccgtggagcattgatcagtgtactcgctgacaacatagtggacgtgtacatgcacatgccttctgggaaggacatgtgggatgcacttgaggccaagttcggagtttctgacgccggcagtgagctgtatgttatggagcagttctatgactacaagatggtcgatgaccgttctgtagttgaacaagctcatgagattcagatgctggctaaggaacttgagaacaacaactgtgagttgccggacaagtttgtggcaggtggcattattgccaaactaccaccttcttggtcggactttgccacttctctaaagcacaagagacaagagttcagtgttcctgatctcattggctctttgggtgttgaggagaaggcgagggcaaaggacgtccggggcaaaaaggttgagggaggttctagtgccaatatggtacagaagaagaaccctcatgcatcccacaacaacaagaaagtcaagcctgatgtcaaacccaaggctgcaaccaattttaagaagaaaagcaagggaaaggcaaagggagactgctttgtgtgtggcaagtctgggcattgggccaaggactgtcctgagcgcaaagacaggaagtctgccaacatgatcattagcgagggcggaggaacatcgggagatgctacattctttgagaatgaatttcctatgaaatatacacctagcacttctagtaaagaaactgtcatgccccatgagcactttgcaccgatagaacacaatgatcaaacgcctgaggaaaatcctgaggaggacaacattgtagatactcgcaagagtaagagacaaagggttgcaaaatcctttggagatgactacattgtatacctcgtggatgacaccccaagaaccatagaagaggcatattcatctcctgacgctgactactggaaggaagcagtacgcagtgaaatggactcgattatgtctaatggtacttgggaagtcgttgagcgtccatatgggtgcaagcccgtaggatgcaaatgggttttcaagaaaaagcttaggcctgatggtacaatcgaaaagtacaaggcaaggcttgtggccaagggttatacccaaaaggaaggcgaggacttcttcgacacatactcaccagttgctcgcttgaccacgattcgagtactacttgctctggcagcctctcatggtcttctcatccatcagatggacgttaagacagctttcctaaacggagagctggaggaggagatctatatggatcaaccagacgggtatgtactagaaggtcaggagggaatggtgtgtaaactattgaaatccttgtatggcctcaagcaagcacctaagcaatggcatgagaagtttgacaccacgcttacatctgcaggctttgttgtgaacgaagctgacaaatgtgtatactatcgctatggtgggggagaaggggtgatcttgtgcttatatgtcgatgacatactgatctttgggaccagccttaatgtgattgaggaggtcaaagactatctgtccaagagttttgaaatgaaagatttgggagaggctgatgttattcttaacatcaaactacaaagaggagatgaggacgggcgggcgatcaggtttttggggagcgcaaggcgcgactactcactgttcgtcaatatctacttcatcttcaccaacatgtcgaacactggagacaaggagaaggagactcccgtcaacaccaacggaggcaatactacctcaaactccagcggaggaccattcttggggactattcatttccacttgtttgagtcggggttcatgccaagctataattgttggacatcccacggagagcaaggtgttgaaatggaagaggatgaagtggaagacgacaatattccggactttgctcagtatgttggatttgaaggaaatcaaacgggcgaggaggaaatagctgctgatggtaacgacgttgcggatgatcttggtcagatgttgcaggacgccagggaagacagcgaaagtgaaaaggaggcccataaattggacaagatgttggaggaccacagaacttcgttgtacccaggttgcgagcaggggcacaaaaagttggataccactctggatttgttgcaatggaaggcaaaaaatggggacgggatcctgagacaccccgccgatggttcgcagtggcgaaacatcgacagaaaatttaaagaatttggaaaggacgcacgaaacatacggtttggccccaagcaacctggtaacgacatcgacgtgtacctaagaccactggtcgaagatcttaaacagttgtggaagaaggaaggtgtccccgtgtgggacgaggacaaacaggaggagtttaacctacgagcgctgctgttcgtaaccatcaacgattggcctgcacttagcaacctatccggacagtccaacaagggttacaaggcttgcactcactgtatggatgaaacagaaagtacgtatcttaagcactgtaggaaggttgtatacatgggtcatcgtcgattccttgcagcaaaccacccggtacggaagaaagacaagcacttcgaacataaggccgaccaccgtacgaagcctaaacatcgcagcgggaaaacagtgtttgctatggttaaagatcttaaagtagtgttcggaaaggggcctggaagccagcatatagagagcgaagatggtcacgcggcgatgtggaaaaagaactctatattttgggagttaccatattgggaattcttggacgtacgccacgcaatcgacgtgatgcacctcactaagaacctttgcgtaaaccttcttggcttcctaggtgtatacggaaagtcgaaagatacactggaagcacgtaatgatctgaagcatatggaacaacgtagcgaccttcacccggaaccaaaggagaaaggaagccattacttgagtccagccagctacactcttagcaaggcagagaaggaaagtatgtttgaatgcttggagagcataaaggtaccgtctggatactccacgaatatcaagcgaataataagcacgaaggagaagaagttcacaaacctaaagtctcatgactgtcacgtgttgatgacacaactgctaccagttgtaataaggggtatccttccagacaatgtccgggcaacaataacaaagctatgtgcattcatgaacgcaatttcgcagaaggtcatcgatccggatagattagaagcccttcagaatgaagtggtgcaatgtctcgtcagttttgagttgatatttccaccttcatttttcaatataatgacgcatctgctttgtcaccttgtgaaagagatccgtattctcggacctatgtacctacacaacatgtttcctttcgagaggtacatgggcgttctgaagaagtatgttcgtaaccgtgctcgtccagaggcaagcatcgccaagggttatggaacagaggaggtcatcgaattttgcgtagaatttatcgaagaccttcgcccaatcggggtacctaaatcacgccatgaagggagactacagggaaagggaactctcggaaggaaagcaataacgacggtagacaacaatttattccgtaaagcccatttcactgttctgcaacactcttcattggtagctccttacatcgaggagcacttggctctagttcgcgcaaggaacatcggtaagtccgatgcatggattacacggcatcacattgatactttccccgcgtggctacgacaacatctcatgggtaacgagtcgatcaaccaacaacttgccttcctggcgtggggaccgtctgggtcgatcgcgacattccagggatatgagatcaatgggtacacattctacacgagagcccaagacatgaagagcacgaaccaaaacagcgctgttcgtgtcgatgccatgggacacgatggaacaactgccacgtattacggttccatcgaggacatatgggaacttgactatggtcctctcaaggttcctctgttccggtgccaatgggttaggttgactggtggaggcgtaatgattgatgacagtgggatgacaactgttgaccttaacaaggttggatactcggacgaaccttttgtccttgccaatgatgtaacgcaagtctttttcgtgaaggacatgtctagcaaaggaaagaagggcagagggcctgatgagcctaagcgtcaagtggttctcccaggcaaaagaaaaatcgtcggagttgaggacaagactgacgaggattacgatcagttggatgggcaaccccctttcacggtgacgattgaccctagcatcctcctatcaaatgaagacaccccttactcacgcagcgatcacaaggagggaacaataggggcatccccgcgccgacgccgccgccatatctcgccgtcgtctcgcgctcgtcgtcgtcgccgcctcctccgccatcgccgcatctctggggtgagagccgccgcacgccgcctccctctcgatctctctctccgatctcgatctctctctctctctcggttgccgccagccgccgagtttcagacgccgacgctgacctcgtcacgacacgacgccgcgccacgacgacgccgcgccacgagacgccacgacgccgcacgccgccgccgcgccacgccgatgccgcgcgcggcgccacgccgccgccgccccgccccgccgccgctccgctgccgccacaccgagaacgtgaacgagcgaacgaacgtgaacgagaacaaggtgaatgaatgtgaacgagaacgagcgaatgaacgtgaacgagccaacgaacgtgaatgagaacgagcgaacgaacgtgaacgagaacaaggtgaatgaacgtgaacaagaacgagcgaacgaacgtgaacgagccaacgaacgtgaatgagaacgagagaacgaatgtgaacgagaacaaggtgaatgaacgtgaacgagaacgttgtcggacaaacgtgaacgagccaacgaacgtgaacgtgaaatgcaattataggcaggtggctgatcgcgatgaggaacagatattgtacgattcaatcgcggagggaagcagccagtactggaacgaagaagaggggaacgaggatccaaaccagtatttgaacgaggaagggaacgtggagagggatgcggaggggaaccaggaggggcacgtggaaagggatgtggaggggaaacaggaggaggaggctagtggaagtcaaccctccgttggacagaagagggcacgcgggcaacgaggtgccgcgaagaagcttgagggttggcacatcataacggaagtggaagaagatggacgacctagtgccccggcagaagccgccaagaactatagcttcaagggagagctgtacaagaaatatatcctgaaggggcagacaccgaacttcgacacattcccaaagctaagggatcaccgggacgagttcgttgcatataagacaggtgaacaagggcaggcgatgatggaaagaaacaaagaaaatgccaccaagaagaagtaccatcaccacttggggtcaggcggctatagcgtcgcgatgccgaagtgggaggagatggaggctagcttgcttgagagggagcatccaggacgaacacgaggcaaaggggtgattccttggaagattgggttcaaggaggacatccacacgtacaggagtcggatgaggagcaagagagataccgaggcgaagattgcagatcttgagttcagggtatcgagctacgagctcagcatgcaagaggaggtggcaaggaaggttgatgaacgcatggccgcacatcggtccactgatccccagccgaccattcctcctgcaatggacgaatccacctgccccgttgatgacatcactcaacggacaccatgtgagctacatattcctttcaagaacttatcaataaaggtggtgtcgggcatggccatcccaacggaaccttcaggtacttaccactgcaggccgattccagcaggatactcgaaggtcgaagttgagttggtcaaaggcgcgtacgaggacctcgagctggattaccctagaggagacgcaccgtctccacctcaagctcctgcaccgactcctcctcgggctcctgcaccgactcctccgcaagctcctcttccgacaccttcaaagtcaagggccccccaagctccaccacctgcccacacaagggcaacgaagaaggcgaaagttgacgccgccaagaacaaggacccggggtacgattgcacgcaagaggagcttgacgcttacgtggcatcagaagtcaagagacaattcaagcctcgaagaccagaaaagaagattcctatagacccgagtgtcatgaacttcttcaggggtatgtctgcacctgccaaggaggccattaagctatcggactatgagcgaacgctgaagaaagcatcttctggaaagtccaaaacagtccctcagcttggagagcaaccaaaccaggacatcgagccgttggtgaccggtaaagaaatgacgatagaagaatttattactgacaccggtctaactacggatcaattgctaggagtcgcaccaatcgaaaaggcagaagtgaaatacatgtacgaactcggtaaaccgcttgtcaaccctgagcttctgcagtccctacccacacaaatgtacaagttccatcagctgtacatggagatgagcgccaccggtagagagatgatcggagcgaggatcagggacacggacttcttgcaaggagatgacattctctggatcaatttcaagggaatctacgaactataccagctggacgccctcaacgtctctattatgagttgctggattttaatggagattcaaagggcccgacggcggggggttttcgatactggattcatcgaccctcggaaagtaaacgtcgcaatgctcgaccaatatccgcaagccacagaggacaatatcgtccatctcctgaaggcgcagcattacaagacgttcatactgttgccgtacaacacagagtggctggatggtgggcctgtttatggctctttggtaaactcctcggtgacaggagggctgcgcccattaagggagcggcacagattcccgagggcgcctgctattacccgggtaaaggcgtgctgcggggctgttgaggccctagcttcttctggagcccttgtacagctccggaggacctggaaggctttgaagtccttggacagctccggagtccacggacagctccggaggccttggacacccccgtag

SEQ ID NO: 23401 - DNA, 3831 bp, Oryza sativa
  Clone ID: TF_OsC1713_4916
atgtctggagttgctggcggaggtggtgcgccgccgccgacaggagctggatccggagctggtgcgccgccgccgacaggagctggatccggagctggtgcgccaggaggaggtgccgtgaacgactacaacaacggaggcaattctgcctcaccatccagcggagggccattctcggggtataatcttctcctcctactactgttgttagcgctatactgtgtgagctatgttcttgttcctgttctacatgatgcctctagcatgttatcgcattactggtatgttcctgtttctgacattcatgatgcgcatagtatgctactggttatgttaagatcaccctacactgcttatgccatgatcattgtttcaatttcttggattaaaatatgccgaataatgactatatttccaacaatccaaaaacctgataggtcattttcggtagttggctttgctgctgcactgaaaccacatgcttttgatggttcaaactataagagatggaaagcacgtgcactattatggttgacagcgatgcagtgcttctatgtttcacggggcaaacgaagtgaaccacctctctctcctgaggaagaggctaagttcgaggcttcggattgcctgttccgtggagcattgatcagtgtactcgctgacaacatagtggacgtgtacatgcacatgccttctgggaaggacatgtgggatgcacttgaggctaagttcggagtttctgacgctggcagtgagctgtatgtcatggagcagttctatgactataagatggtcgatgaccgttctgtagtagaacaagctcatgagattcagatgctggctaaggaacttgagaacaacaactgtgagttgccagacaagtttgtggcgggtggcattattgccaaactgccaccttcttggtcggactttgccacttctctaaagcacaagagacaagagttcagtgttcctgatctcattggctctttgggtgttgaggagaaggcgagggcaaaggacgtgcggggcaaaaaggttgagggaggttctagtgccaatatggtacagaagaagaaccctcatgcatcccacaacaacaagaaagtcaagcctgatgtcaaacccaaagctgcaaccaattttaagaagaaaggcaagggaaaggcaaaaggagactgctttgtgtgtggcaagtctgggcattgggccaaggactgtcctgagcgcaaagacaggaagtctgccaacatgatcattagcgagggcggaggaacatcggggtacggtaaaatattacctacagttctctctgtttttcattcacctgattggtgggtggatactggtgctaatattcatgtcgggagaggttcctccttgttgatgggaaacgggtcgcttgcggctgttcatggtgttggtacggtcgatctgaagtttacttcgggaaagaccgtgcagctgaagaacgtgcagcatgtcccttcaataaagaagaatctagttagcggctctctattgtgtagagaaggttttagacttgtgtttgagtccaataaatgtgtcgtatctaaatatgggacttttgttggaaaaggttatgacagcggaggcttgttccgcttttctttgaatgacatgtgtaataatcataatgctgtgaaccatattagcgagaatgatgagtctaatgtgtggcattcgcgactctgtcatgtgaatttcggttgtatgacgcgcttagctaacatgagtttaattccaaaattcactttggtcaaaggttccaagtgccatacttgtgttcaatcgaaacaacctcgcaagcctcacaaggcatctgaggcgaggaatttggcacctctagaacttgttcattccgatttgtgcgaaatgaacggcgtgttgactaaagggggaaagaaatatttcatgacactgatagatgattgcactagattttgctatgtgtatctattgaaaacaaaggatgaggcattgcattacttcaaaatctataaagctgaggtagaaaaccaacttgaaaggaaaatcaaacggttgaggtctgatagaggtggggagtatttttccaatgagtttgcatctttttgcgaagagtttggaattattcatgagatgacgcctccctattcaccccaatcaaatggggtgcccgaaagaaagaaccgtactctaactgagatggtgaatgccatgttagacactgcggggctttccaaggaatggtggggtgaggcagttttgactgcgagtcatgtcctgaataaaattccaatgaagcataaggaagtaacaccattcgaggaatgggaaaggaagaaattaaatctctcatacctacgaacatggggctgtttggccaagataaatgtacctatagccaaaaagcggaaacttggaccaaatactgttgattgcgtgtttcttggttatgctatccacagtgtgggttatagattcttaatagtaaactctggagtacccgacatgaatgctggtacaattcttgagtccagagatgctacattctttgagaatgaatttcctatgaaacattcacctagcacttctagtaaagaaactgtcatgccccatgagcactttgcaccgacagaacacaatgatcaaacgcctgaggaaaatcctgatgaggacaacattgtagatactcgcaagagtaagagacaaagggttgcaaaatcctttggagatgactacattgtatacctcgtggatgacaccccaagaaccatagaagaggcatattcatctcctgacgctgactgctggaaggaagcagtacgcagtgaaatggactcgattatgtctaatggtacttgggaagtcgttgagcgtccatatgggtgcaagcccgtaggatgcaaatgggttttcaagaaaaagcttaggcctgatggtacaatcgaaaagtacaaggcaaggcttgtggccaagggttatacccaaaaggaaggcgaggacttcttcgacacatactcactagttgctcgcttgaccacgattcgagtactacttgctctggcagcctctcatggtcttctcgtccatcagatggacgttaagacagttttcctaaacggagagctggaggaggagatctatatggatcaaccagacgggtatgtactagaaggctttgttgtgaacgaagctgacaaatgtgtatactatcgctatggtgggggagaaggggtgatcttgtgcttatatgtcgatgacatactgatctttgggactagccttaatgtgattgaggaggtcaaagactatctgtccaagagttttgaaatgaaggatttgggagaggctgatgttattcttaacatcaaactacaaagaggagatgagggtgggattacacttatgcaatcccactatgtggacaaggttttgagtctctttggctatagtgactgcaagccagctcctactccttatgatcccagcgtgctattaaggaaaaacagaagaatagcaagggatcaactgagatactctcaaatcattggttcattgatgcacttggctagcgcaacgagacctgacatctcatttgttgtaagcaagttgagccggtttgtctcaaatccgggagattatcattggcaggctctggaaagagtaatgcgctatctaaagggcactatgagctatggaattcactataccgggtatccaaaagtactagaagggtatagtgactcaaactggatatctgatgctaatgagataaaagccacaagtggatatgtgttcacacttggaggtggcgctatttcctag

SEQ ID NO: 23402 - DNA, 4515 bp, Oryza sativa; identical to SEQ ID NO: 15429
  Clone ID: TF_OsC1713_4934

SEQ ID NO: 23403 - DNA, 4374 bp, Oryza sativa; identical to SEQ ID NO: 15411
  Clone ID: TF_OsC1713_4959

SEQ ID NO: 23404 - DNA, 4260 bp, Oryza sativa; identical to SEQ ID NO: 15432
  Clone ID: TF_OsC1713_4998

SEQ ID NO: 23405 - DNA, 1483 bp, Oryza sativa
  Clone ID: TF_OsC1713_5057
atggcggcggcggccggccccagcctgtccatcaccgtcgagaagaacccgccggaggcgcgcttgcttcagctcggcatcaagtcgtggcccaaatgggggtgtccgccggggaagttcccgctcaagttcgacgcgaggctgacgtgctacctcctcaagggcagggtgagggcctccgtgaagggcaccgggaggtgcgtcgagttcggcgccggcgacctcgtcgtcttccccaagggcctcagctgcacatgggacgtcgtcgtcggcatcgacaagcactacaacttcgactcctatggtctcgaacccagctttggaccgggcggccgggtggtgactgacgggcgggcgatcaggtttttggggagcgcaaggcgcgactactcactgttcgtcaacatctacttcatcttcaccaacatttcgaacactggagacaaggagaaggagactcccgtcaacaccaacggaggcaatactgcctcaaactccagcggaggaacattcttgggtgtactcgctgacaacatagtgaaggtgtacatgcacatgccttctgggaaggacatgcgggatgcacttgaggccaagttcggagtttctgacgccggcagtgagctgtatgttatggagcagttctatgactacaagatggtcgatgaccgttctgtagttgaacaagctcatgagattcagatgctggctaaggaacttgagaacaacaactgtgagttgccggacaagtttgtggcaggtggcattattgccaaactaccaccttcttggtcggactttgccacttctctaaagcacaagagacaagagttcagtgttcctgatctcattggctctttgggtgttgaggagaaggcgagggcaaaggacgtccggggcaaaaaggttgagggaggttctagtgccaatatggtacagaagaagaaccctcatgcatcccacaacaacaagaaagtcaagcctgatgtcaaacccaaggctgcaaccaattttaagaagaaaagcaagggaaaggcaaagggagactgctttgtgtgtggcaagtctgggcattgggccaaggactgtcctgagcgcaaagacaggaagtctgccaacatgatcattagtgagggcggaggaacatcggggtacggtcgggagaggttcctccttgttgatgggaaacgggtcgcttgcggctgttcatggtgttggtacggtcgatctgaagtttacttcgggaaagaccgtgcagctgaagaatgtgcagcatgtcccttcaataaagaagaatctagttagcggctctctattgtgtagagaaggttttagacttgtgtttgagtccaataaatgtgtcgtatctaaatatgggacttttgttggaaaaggttatgacagcggaggcttgttccgcttttctttgaatgacatgtgtaataatcataatgttgtgaaccaaaaaaaaaaaaaaaaaaaa

SEQ ID NO: 23406 - DNA, 3708 bp, Oryza sativa
  Clone ID: TF_OsC1713_5171
atgtctggagttgctgccgccgctaccggcggaggtggtgcgccgccgccgacaggagctggtgcgccgccgccgacaggagctggatccggagctggtgcgccaggaggaggtgccgtgaacgactacaacaacggaggcaattctgcctcaccatccagcggagggccattctcggggtataatcttctcctcctgctactgctgttagcgctattcctgttcccattgttagcgctatactgtgtgcgctatgttcttgttcctgttctacatgatgcctctagcatgttatcgcgttactggtatgttcctgtttctgacattcatgatgcgcatagtatgctactggttatgttaagatcaccctacactgcttatgccatgatcattgtttcaatttcttggattaaaatatgccgaataatgactatatttccaacaatccaaaaacctgataggtcattttcggtagttggctttgctgctgcactgaaaccacatgcttttgatggttcaaactataagagatggaaagcacgtgcactattgtggttgacagcgatgcagtgcttctatgtttcacggggcaaacgaagtgaaccacctctttctcctgaggaagaggctaagttcgaggcttcggattgcctgttccgtggagcattgatcagtgtactcgctgacaacatagtggacgtgtacatgcacatgccttctgggaaggacatgtgggatgcacttgaggccaagttcggagtttctgacgccggcagtgagctgtatgtcatggagcagttctatgactacaagatggtcgatgaccgttctgtagtagaacaagctcatgagattcagatgctggctaaggaacttgagaacaacaactgtgagttgccggacaagtttgtggcgggtggcattattgccaaactaccaccttcttggtcggactttgccacttctctaaagcacaagagacaagagttcagtgttcctgatctcattggctctttgggtgttgaggagaaggcgagggcaaaggacgtccggggcaaaaaggttgagggaggttctagtgccaatatggtacagaagaagaaccctcatgcatcccacaacaacaagaaagtcaagcctgatgtcaaacccaaggttgcaaccaattttaagaagaaaggcaagggaaaggcaaagggagactgctttgtgtgtggcaagtctgggcattgggccaaggactgtcctgagcgcaaagacaggaagtctgccaacatgatcattagcgagggcggaggaacatcggggtacggtaaaatattacctacagttctctctatttttcattcacctgattggtgggtggatactggtgctaatattcatgtcgggagaggttcctccttgttgatgggaaacgggtcacttgcggctgttcatggtgttggtacggtcgatctgaagtttacttcgggaaagaccgtgcagctgaagaacgtgcagcatgtcccttcaataaagaagaatctagttagcggctctctattgtgtagagaaggttttagacttgtgtttgagtccaataaatgtgtcgtatctaaatatgggacttttgttggtaaaggttatgacagcggaggcttgttccgtttttctttgaatgacatgtgtaataatcataatgctgtgaaccatattagcaagaatgatgagtctaatgtgtggcattcgcgactctgtcatgtgaatttcggttgtatgacgcgcttagctaacatgagtttaattccaaaattcactttggtcaaaggttccaagtgccatacttgtgttcaatcgaaacaacctcgcaagcctcacaaggcatctgaggcgaggaatttggcacctctagaacttgttcattccgatttgtgcgaaatgaacggcgtgttgactaaagggggaaagaaatatttcatgacactgatagatgattgcactagattttgctatgtgtatctattgaaaacaaaggatgaggcattgcattactttaaaatctataaagctgaggtagaaaaccaacttgaaaggaaaatcaaacggttgaggtctgatagaggtggggagtatttttctaatgagtttgcatccttttgcgaagagtttggaattattcatgagatgacgcctccctattcaccccaatcaaatggggtggccgaaagaaagaaccgtactctaactgagatggtgaatgccatgttagacactgcggggctttccaaggaatggtggggtgaggcagttttgactgcatgtcatgtcttgaataaaattccaatgaagcataaggaagtaacaccattcgaggaatgggaaaggaagaaattaaatctctcatacctacgaacatggtgctgtatggccaagtccagagatgctacattctttgagaatgaatttcctatgaaatatacacctagcacttctagtaaagaaactgtcatgccccatgagcactttgcaccgatagaacacaatgatcaaacgcctgaggaaaatcctgaggaggacaacattgtagatactcgcaagagtaagagacaaagggttgcaaaatcctttggagatgactacattgtatacctcgtggatgacaccccaagaaccatagaagaggcatattcatctcctgacgctgactactggaaggaagcagtacgcagtgaaatggactcgattatgtctaatggtacttgggaagtcgttgagcgtccatatgggtgcaagcccgtaggatgcaaatgggttttcaagaaaaagcttaggcctgatggtacaatcgaaaagtacaaggcaaggcttgtggccaagggttatacccaaaaggaaagcgaggatttcttcgacacatattcaccagttgctcgcttgactacgattcgacaagcacctaagcaatggcatgagaagtttgacaccacgcttacatctgcaggctttgttgtgaacgaagctgacaaatgtgtatactatcgctatggtgggggagaaggggtgatcttgtgcttgtatgtcgatgacatactgatctttgggaccagccttaatgtgattgaggaggtcaaagactatctgtccaagagttttgaaatgaaggatttgggagaggctgatgttattcttaacatcaaactacaaagaggagatgagggtgggattacacttgtgcaatcccactatgtggacaaggttttgagtcgctttggatatagtgactgcaagccagctcctactccttatgatcccagtatgctattaaggaaaaaccgaagaatagcaagggatcaactaagatactctcaaatcattggttcattgatgtacttggctagcgcaacgaggcctgacatctcatttgctgtaagcaagctgagccggtttgtctcaaatccgggagatgatcattggcaggctctggaaagagtaatgcgctatctaaagggcactatgagctatggaattcactataccgggtatccaaaagtactagaagggtatagtgactcaaactggatatctgatgctgatgagataaaagccacaagtggatatgtgttcacacttggagtggaagcagaacttacagcactagatactgcgacagttgaggccgagtggcttcgtgaactcctgatggatttgccggtggttgaaaaacca

SEQ ID NO: 23407 - DNA, 4344 bp, Oryza sativa
  Clone ID: TF_OsC1713_5234
atgtctggagttgctgccgccgctattggcggaggtggtgcgccgccgccgacaggagctggatccggagctggtgcgccaggaggaggtgccgtgaacgactacaacaacggaggcaattctgcctcaccatccagcggagggccattctcggggtataatcttctccttctactgctgttagcgctactcctgttcccattgttagcgctatactgtgtgcgctatgttcttgttcctgttctacatgatgcctctagcatgttatcgcattactggtatgttcctgtttctgacattcatgatgcgcatagtatgctactggttatgttaagatcaccctacactgcttatgccatgatcatagttttaatttctaggattaaaatatgccgaataatgactatatttccaacaatccaaaaacctgataggtcattttcggtagttggctttgctgctgcactgaaaccacatgcttttgatggttcaaactataagagatggaaagcacgtgcactattgtggttgacagcgatgcagtgcttctatgtttcacggggtaaacgaagtgaaccacctctttctcctgaggaagaggctaagttcgaggcttcggattgcctgttccgtggagcattgataagtgtactcgctgacaacatagtggacgtgtacatgcacatgccttctgggaaggacatgtgggatgcacttgaggccaagttcggagtttctgacgccggcagtgagctgtatgtcatggagcagttctatgactacaagatggtcgatgaccgttctgtagtagaacaagctcatgagattcagatgctggctaaggaacttgagaacaacaactgtgagttgccggacaagtttgtggcgggtggcattattgccaaactaccaccttcttggtcggactttgccacttctctaaagcacaagagacaagagttcagtgttcctgatctcattggctctttgggtgttgaggagaaggcgagggcaaaggacatccggggcaaaaaggttgagggaggttctagtgccaatatggtacagaagaagaaccctcatgcatcccacaacaacaagaaagtcaagcctgatgtcaaacccaaggctgcaaccaattttaagaagaaaggcaagggaaaggcaaagggagactgctttgtgtgtggcaagtctgggcattgggccaaggactgtcctgagcgcaaagacaggaagtctgccaacatgatcattagcgagggcggaggaacatcggggtacggtaaaatattacctacagttctctctgtttttcattcacctgattggtgggtggatactggtgctaatattcatgtatgtgctgacatttctctgttttcttcttatcaggtcgggagaggttcctccttgttgatgggaaacgggtcgcttgcggctgttcatggtgttggtacggtcgatctgaagtttacttcgggaaagaccgtgcagctgaagaacgtgcagcatgtcccttcaataaagaagaatctagttagcggctctctattgtgtagagaaggttttagacttgtgtttgagtccaataaatgtgtcgtatctaaatatgggacttttgttggaaaaggttatgacagcggaggcttgttccgcttttctttgaatgacatgtgtaataatcataacgctgtgaaccatattagcgagaatgatgagtctaatgtgtggcattcgcgactctgtcatgtgaatttcggttgtatgatgcgcttagctaacatgagtttaattccaaaattcactttggtcaaaggttccaagtgccatacttgtgttcaatcgaaacaacctcgcaagcctcacaaggcatctgaggcgaggaatttggcacctctagaacttgttcattccgatttgtgcgaaatgaacggcgtgttgactaaagggggaaagaaatatttcatgacactgatagatgattgcactagattttgctatgcatatctattgaaaacaaaggatgaggcattgcattactttaaaatctataaagctgaggtagaaaaccaacttgaaaggaaaatcaaacggttgaggtctgatagaggtggggagtatttttccaatgagtttgcatccttttgcgaagagtttggaattattcatgagatgatgcctccctattcaccccaatcaaatggggtggccgaaaaaaagaaccgtactctaactgagatggtgaatgccatgttagacactgcggggctttccaaggaatggtggggtgaggcagttttgactgcgtgtcatgtcctgaataaaattccaatgaagcacaaggaagtaacaccattcgaggaatgggaaaggaagaaattaaatctctcatacctacgaacatggggctgtttggccaaggtaaatgtacctatagtcaaaaagcggaaacttggaccaaaaactgttgattgtgtgtttcttggttatgctatccacagtgtgggttatagattcttaatagtaaactctggagtacccgacatgcatgctggtacaatttttgagtccagagatgctactttctttgagaatgaatttcctatgaaatatacatctagcacttctagtaaagaaactgtcatgccccatgagcactttgcaccgatagaacacaatgatcaaacgtctgaggaaaatcctgaggaggacaacattgtagatactcgcaagagtaagagacaaagggttgcaaaatcctttggagatgactacattgtatacctcgtggatgacaccccaagaaccatagaagaggcatattcatctcctgacgctgactactggaaggaagcagtacgcagtgaaatggactcgattatgtctaatggtacttgggaagtcgttgagcgtccatatggatgtaagcccgtaggatgcaaatgggttttcaagaaaaagcttaggcctgatggtacaatcgaaaagtataaggcaaggcttgtggccaagggttatacccaaaaggaaggcgaggatttcttcgacacatattcaccagttgctcgcttgactacgattcgagtactacttgctctggcagcctctcatggtcttctcgtccatcagatggacgttaagacagctttcctaaacggagagctggaggaggagatctatatggatcaaccagacgggtatgtactagaaggtcaggagggaatggtgtgtaagctattgaaatacttgtatggcctcaagcaagcacctaagcaatggcatgagaagtttgacaccacgcttacatctgcaggctttgttgtgaacgaagctgacaaatgtgtatactatcgctatggtgggggagaaggggtgatcttatgcttgtatgtcgatgacatactgatctttgggaccagccttaatgtgattgaggaggtcaaagactatctgtccaagagttttgaaatgaaggatttgggagaggctgatgttattcttaacatcaaactacaaagaggagatgagggtgggattacacttgtgcaatcccactatgtggacaaggttttgagtcgctttggatatagtgactgtaagccagctcctactccttatgatcccagcgtgctattaaggaaaaaccgaagaatagcaagggatcaactgagatactctcaaatcattggttcattgatgtacttggctagcgcaacgaggcctgacatctcatttgctgtaagcaagctgagccggtttgtctcaaatccgggagatgatcattggcaggctctggaaagagtaatgcgctatctaaagggcactatgagctatggaattcactataccgggtatccaaaagtactagaagggtatagtgactcaaactggatatctgatgctgatgagataaaagccacaagtggatatgcgttcacacttggaggtggcgctgtttcctggaagtcttgcaagcagaccatcttaacgaggtcaacaatggaagcagaacttacagcactagatactgcgacagttgaggctgagtggcttcgtgaactcctgatggatttgccggtggttgaaaaaccagtgccagctatcctaatgaactgcgataatcaaacagtgattattaaagtgaacagttcaaaggacaacatgaagtcatctagacacatcaagagaagactgaaatctgtcagaaagcagaaaaactccggagtgatagcattggactatgtccaaacggctagaaatctggcagatcagtttaccaaggggctaccacgtaatgtgatagacagtgcatcgagggaaatgggcttgatacccacctaa

SEQ ID NO: 23408 - DNA, 3853 bp, Oryza sativa
  Clone ID: TF_OsC1713_5259
acgagtgtgtgcacacgcgttgggagagtaggcctccgaaaccacgcgttgctgcgacgtttgcacagacgggcgggcgatcaggtttttggggagcgcaaggcgcgactactcactgttcgtcaacatctacttcatcttcaccaacatgtcgaacactggagacaaggagaaggagactcccgtcaacaccaacggaggcaatactgcctcaaactccagcggaggaccattcttggggtataaccttattacattatttcaattagaagttttactgttaatgttcatcgcaatgtcaacattgtgtcattatgtgattgttgatgcttattcaacgttaagcatgctcatgttgattacattcaccactatcactggatcaaatcctattgtaaatatcatgtttattatcttgttattttggattaaaatatgccgaattatgaccaaatttccaacaatccaaaaacctgataggtcattttcggtagttggctttgctgctgcactgaaaccacatgcctttgatggtccaaactataagagatggaaaacacgtgcactattgtggttgacagcgatgcagtgcttctatgtttcacggggcaaacgaagtgacccacctctttctcctgaggaagaggctaagttcgaggcttcggattgcctgttccgtggagcattgatcagtgtactcgctgacaacatagtggacgtgtacatgcacatgccttctgggaaggacatgtgggatgcacttgaggccaagttcggagtttctgacgccggcagtgagctgtatgttatggagcagttctatgactacaagatggtcgatgaccgttctgtagttgaacaagctcatgagattcagatgctggctaaggaacttgagaacaacaactgtgagttgccggacaagtttgtggcaggtggcattattgccaaactaccaccttcttggtcggactttgccacttctctaaagcacaagagacaagagttcagtgttcctgatctcattggctctttgggtgttgaggagaaggcgagggcaaaggacgtccggggcaaaaaggttgagggaggttctagtgccaatatggtacagaagaagaaccctcatgcatcccacaacaacaagaaagtcaagcctgatgtcaaacccaaggctgcaaccaattttaagaagaaaagcaagggaaaggcaaagggagactgctttgtgtgtggcaagtctgggcattgggccaaggactgtcctgagcgcaaagacaggaagtctgccaacatgatcattagcgaggacggaggaacatcggggtacggcaaaatattacctacagttctctctgtttttcattcacctgattggtgggtggacactggtgctaatattcatgtcgggagaggttcctccttgttgatgggaaacgggtcgcttgcggctgttcatggtgttggtacggtcgatctgaagtttacttcgggaaagaccgtgcagctgaagaacgtgcagcatgtcctttcaataaagaagaatctagttagcggctctctattgtgtagagaagattttagacttgtgtttgagtccaataaatgtgtcgtatctaaatatgggacttttgttggaaaaggttatgacagcggaggcttgttccgcttttctttgaatgacatgtctaataatcataatgctgtgaaccatattagcgagaatgatgagtctaatgaaaatcaaacggttgggtctgatagaggtggggagtatttttccaatgagtttgcatccttttgcgaagagtttggaattattcatgagatgacgcctccctattcaccccaatcaaatggggtggccgaaagaaagaaccgtactctaactgagatggtgaatgccatgttagacactgcggggctttccaaggaatggtggggtgaggcagttttgactgcgtgtcatgtcctgaataaaattccaatgaagcataaggaagtaacaccattcgaggaatgggaaaggaagaaattaaatctctcatacctacgaacatggggctgtttggccaaggtaaatgtacctatagccaaaaagcggaaacttggaccaaaaactgttgattgtgtgtttcttggttatgctatccacagtgtgggttatagattcttaatagtaaactctggagtacccgacatgcatgttggtacaattcttgagtccagagatgctacattctttgagaatgaatttcctatgaaatatacacctagcacttctagtaaagaaactgtcatgccccatgagcactttgcaccgatagaacacaatgatcaaacgcctgaggaaaatcctgaggagggcaacattgtagatactcgcaagagtaagagacaaagggttgcaaaatcctttggagatgactacattgtatacctcgtggatgacaccccaagaaccatagaagaggcatattcatctcctgacgctgactactggaaggaagcagtacgcagtgaaatggactcgattatgtctaatggtacttgggaagtcgttgagcgtccatatgggtgcaagcccgtaggatgcaaatgggttttcaagaaaaagcttaggcctgatggtacaatcgaaaagtacaaggcaaggcttgtggccaagggttatacccaaaaggaaggcgaggacttcttcgacacatactcaccagttgctcgcttgaccacgattcgagtactacttgctctggcagcctctcatggtcttctcgtccatcagatggacgttaagacagctttcctaaacggagagctggaggaggagatctatatggatcaaccagacgggtatgtactagaaggtcaggagggaatggtgtgtaaactattgaaatccttgtatggcctcaagcaagcacctaagcaatggcatgagaagtttgacaccacgcttacatctgcaggctttgttgtgaacgaagctgacaaatgtgtatactatcgctatggtgggggagaaggggtgatcttgtgcttatatgtcgatgacatactgatctttgggaccagccttaatgtgattgaggaggtcaaagactatctgtccaagagttttgaaatgaaagatttgggagaggctgatgttattattaacatcaaactacaaagaggagatgagggtgggattcacttgtgcaatcccactatgtggacaagcgcaacgaggcctgacatctcatttgctgtaagcaagctgagccggtttgtctcaaatccgggagatgatcattggcaggctctggaaagagtaatgcgctatctaaagggtactatgagctatggaattcactataccgggtatccaaaagtactagaagggtatagtgactcaaactggatatctgatgctgatgagataaaagccacaagtggatatgtgttcacacttggaggtggcgttgtttcctggaagtcttgcaagcagaccatcttaacgaggtcaacaatggaagcagaacttacagcactagatactgcgacagttgaggccgagtggcttcgtgaactcctgatagatttgccggtggttgaaaaaccagtgccagctatcctaatgaactgcgataatcaaacagtgattattaaagtgaacagttcaaaggacaacatgaagtcatctagacacatcaagagaagactgaaatctgtcagaaagcagaaaaactccggagtgatagcattggactatgtccaaacggctagaaatctggcagatcagtttaccaaggggctaccacgtaatgtgatagacagtgcatcgagggaaataggcttgatacccacctaa

SEQ ID NO: 23409 - DNA, 4137 bp, Oryza sativa
  Clone ID: TF_OsC1713_5387
tcacgtcgctattcttttgcgtccacgatcccacgttcccacgactgcctctgcaatggcgcgtccacgatcccacattgcaaccacgaacccacgttcccacgacttcgcctgagatctgcaccggtaggtgggtgatcaggtttttggggagtgcttcccgcacgactgctcgtcctcgtccaccatgtctgcgcctggagctgcagacggagatggcgcgcctggagctggagccggagccgcaattctgcctcacaatccagcggagggccattcttggggtatatccttctcctgttccctttgttagcgctatcgctttattattatgtgcgctatgttcctgttcctgacattcatgatgcctctagtatgttattgcgttactgtaatgttcctgtttctgacattcatgatgcgcatagtatgctacttcatgatgcctctagcatgttattgcgttactgtaatattcctgttcctgacattcatgatacgcatagtatgctactggttatgttaagatcaccctacaccgcttatgccatgattattgttttaacattttggattaaaatatgccgattcatgactatatttccaacaatccaaaaacctgataggtcattttcggtagttggctttgctgctgcactgaaaccacatgcttttgatggttctaactataagagatggaaagcatgtgcactattgtggttgacagcgatgcagtacttctatgtttcacggggcaaacgaagtgaaccacctctttctcctgaggaagaggctaagttcgaggctttggattgcctgttccgtggagcattgatcagtgtactcgctgacaatatagtggacgtgtacatgcacatgccttccgggaaggacatgtgggatgcacttgaggccaagttcggagtttctgacgccggcagtgagctgtatgtcatggagcagttctatgactacaagatggtcgatgaccgttctgtagtagaccaacctcatgagattcagatgctggctaagaaacttgagaacaacaactgtgagttgccggacaagtttgtggcgggtggcattattgccaaactgccaacttcttggtcggactttgccacttctctaaagcacaagagacaagagttcagtgtttctgatctcattggctctttgggtgttgagaagaaggcgagggcaaaggacgttcggggcaaaaaggttgagggaggttctagtgccaatatggtacagaagaagaaccctcatgcatcccacaacaacaagaaagtcaaacctgatgtcaaacccaaggctgcaaccaactttaagaagaaaggcaagggaaaggcaaagggagactgctttgtgtgtggcaagtcagggcattgggccaaggactgtcctgagcgcaaagacaggaagtctgccaacatggtcattagcgagggcggaggaacatcggggtacggtaaaatattacctacagttctctctgttcttcacttacctgattggtgggtggacactggtgctaatattcatgtcgggagaggttcctccttgttgatgggaaacgggtcgcttgcggctgttcatggtgttggttccaagtgccatacttgcatccaatcgaaacaacctcgcaagcctcacaagtcatctgaggcgaggaatttggcacctctagaacttgttcattccgatttgtgcgaaatgaacgacgtgttgactaaagggggaaagaaatatttcatgacactgatagatgattgcactagattttgctatgtgtatctattgaaaacaaaagataaggcattgcattactttaaaatctataaagctgaggcagaaaaccaacttgaaaggaaaatcaaacggttgaggtctgatagaagtggggagtatttttccaatgagtttgcatcattttgcgaagagtttggaattattcatgagaggacacctccctattcaccccaatcaaatggggtggccgaaagaaagaaccgtactctaactgagatggtgaatgccatgttagacacttcagggctttccaaggaatggtggggtgaggcagttttgaccacctatcatgtcctgaataaaattccaatgaagcataaggaagtaacaccattcgaggaatgggaaaggaagaaattaaatctctcatacctacgaacatggggctgtttggccaaggtaaatgtacctatagccaaaaagcggaaacttggaccaaatactgttgattgtgtgttccttggttatgctattcacagtgtgggttatagattcttaatagtaaactttggtgtacccgacatgcatgttggtacaattcttgagtccagagatgctacattctttgagaatgaatttcccatgaaacatacacctagcacttctagtaaagaaactgtcatgccccatgagcactttgcaccggtagaacacaatgatcaaacgcctgaggaaaatcctgaggaggacaacattgtagatactcgcaagagtaagagacaaagggttgcaaaatcctttggagatgactacattgtatacctcgtggatgacacctcaagaaccatagaagaggcatattcatctcctgacgctgactactggaaggaagcagtacgcagtgaaatggactcgattatgtctaatggtacttgggaagtcgttgagctttcatatgggtgcaagcccgtaggatgcaaatgggttttcaagaaaaagcttatacctgatggtacaattgaaaagtacaaggcaagacttgcggccaagggttatacccaaaaggaaggcgaggacttcttcgacacatactcaccagttgctcgcttgaccacgattcgagtactacttgctctggcagcctctcatggtcttctcgtctatcagatggacgttaagacagctttcctaaacggagagctagaggaggagatctatatggatcaactagacgggtatgtactagaaggtcaggagggaatggtgtgtaaattgttgaaatccttgtatggcctcaagcaagcacctaagcaatggcatgagaagtttgacaccacgcttacatctgcaggctttgttgtgaatgaaactgacaaatgtgtgtactatcgctatggtgggggagaaggagtgatcttgtgcctatatgtcgatgacatattgatctttgggaccagccttaatgtgattgaggaggtcaaggactatctgtccaagagttttgaaataaaggatttgggagaggctgatgttattcttaacatcaaactacaaataggagatgagggtgggattacacttgtgcaatcccactatgtggacaaggttttgagtcgctttggatatagtgactgcaagccagctcctactccttatgatcccagcgtgctattaaggaaaaaccgaagaatagcaagggatcaactgagatactctcaaatcattggttcattgatgtacttggctagtgcaacgaggcctgacatctcatttgctgtaagcaagctgagccggtttgtctcaaatccgggacatgatcattggcaggctctggaaagagtaatgcgctatctaaagggcactatgagctatggaattcactataccgggtatccaaaagtactagaagggtatagtgactcaaactggatatctgatgctgatgagataaaagccacaagtggatatgtgttcacacttggaggtggcgctgtttcctggaagtcttgcaagcagaccatcttaacgaggtcaacaatggaagcagaacttacagcactagatactgcgacagttgaggccgagtggcttcatgaacttctgatggatttgccggtggttgaaaaatcagtgccagctatcctaatgaactgtgataatcaaacagtgattattaaagtgaacagttcaaaggacaacacgaagtcatctaggcacatcaagagaagactgaaatctgttagaaagcagaaaaactccggagtgatagcattggactatgtccaaacggctagaaatctggcagatcagtttaccaagggactaccacgtaatgtgatagacaatgcatcgagggaaatgggcttgatacccacctaa

SEQ ID NO: 23410 - DNA, 6888 bp, Oryza sativa
  Clone ID: TF_OsC1713_5421
atgggcttgggaggaggaggtcgaccagtggaggtgtccctcgagggcttgaggagcctagctgtaacatcccggcctaggcaaaacctgccttggtttggtaaagtgtccggtattgataaatggaggatggatcggcaatggatgtacgctgaccggcggtccaaagagtttattgacggcgtgcactattttttgagagtggccaaagctaacaggcaaaggggttttatttgttgtccatgcaataagtgtaagaatcagaaggagtattctgcattcaggactattcatttccacttgtttgagtcggggttcatgccaagctataattgttggacatcccacggagagcaaggtgttgaaatggaagaagatgaagtggaagacgacaatattccggactttgctcagtatgttggatttgaaggaaatcaaacgggcgaggaggaaatagctgctgatggtaacgacgttgcggatgatcttggtcagatgttgcaggacgccagggaagactgcgaaagtgaaaaggaggcccataaattggacaagatgttggaggaccacagaacttcgttgtacccaggttgcgagcaggggcacaaaaagttggataccactctggagttgttgcaatggaaggcaaaaaatggggttagtgacaaggcatttggcgatttattgaaactcgtcaagaacattcttccggggggaaacaaattgcccgagaaaacgtacgaggctaagaagatagtctgcccgttaggactggaagttcataagattcacgcatgtccgaacgattgtatcctatatcgcggtgaggagtatgagaacctagaagcatgccatgtttgcaaagcactacgatacaagattagacgggacgatccaggagaagttgacgggcagctaacaaagaagagaattcctgctaaggtgatgtggtattttcctataataccacggctaaggcgtttgttcaggaacaaggggaatgctagaatgttgcgatggcacgctgaagagcgtcaacaggacgggatgctgagacaccccgccgatggttcgcagtggcgaaacatcgacagaaaatttaaagaatttggaaaggacgcacgaaacatacggtttggtttgagtacggatggcatgaatccttttggagagatgagcagcggccatagcacttggcccgttacgatgtgtatctacaacctccccccctggctatgcatgaagaggaagtacataatgatgccgattattattcaaggccccaagcaacctggtaacgacatcgacgtgtacctaagaccactggtcgaagatcttaaacagttgtggaagaaggaaggtgtccccgtgtgggacgaggacaaacaggaggagtttaacctacgagcgctgctgttcgtaaccatcaacgcggcgacctgcacttagcaacctatccggacagtccaacaaggggtacaaggcttgcactcactcaaaccacccggtacggaagaaaggcaagcacttcgaacataaggccgaccactgtgtatacggaaagtcgaaagatacactggaagcacgtaatgatctgaagcatatggaacaacgcggcgaccttcacccggaaccaaaggagaaaggaagccattacttgagtccagccagctacactcttagcaaggggtatccttccagacaatgtccgggcaacaataacaaagctatgtgcattcatgaacgcaatttcgcagaaggtcatcgatccggatagattagaagcccttcagaatgaagtggtgcaatgtctcgtcagttttgagttgatatttccaccttcatttttcaatataatgacgcatctgctttgtcaccttgtgaaagagatccgtattcttgggcctatgtacctacacaacatgtttcctttcgagaggtacatgggcgttctgaagaagtatgttcgtaaccgtgctcgtccagaggcaagcatcgccaagggttatggaacagaggaggtcatcgaattttgcgtagaatttatcgaagaccttcgcccaatcggggtacctgaatcacgccatgaagggagactacggggaaagggaactctcggaaggaaagcaataatgacggtagacaacaatttattccgtaaagcccatttcactgttctgcaacactcttcattggtagctccttacatcgaggagcacttggctctagttcgcgccaggaacatcggtaagtccgatgcatggattacacggcatcacattgatactttccccgcgtggctacgacaacatctcatgggtaacgagtcgatcaaccaacaacttgccttcctggcgaggggaccgtctgggtctatcgcgacattccagggatatgagatcaatgggtatacattctacacgagagcccaagacatgaagagcacgaaccaaaacagcgctgttcgtgtcgatgccatgggacacgatggaacaactgccacatattacggtgccatcgaggacatatgggaacttgactatggtcctcttaaggttcctctgttccggtgccaatgggttaggttgactggtggaggcgtaatgattgatgacagtgggatgacaactgttgaccttaacaaggttggatactcggacgaaccttttgtccttgccaatgatgtaacgcaagtctttttcgtgaaggacatgtctagcaaaggaaagaagggcagagggcctgatgagcctaagcgtcaagtggttctcccaggcaaaagaaaaatcgtcggagttgaggacaagactgacgaggattacgatcagttggatgggcaaccccctttcacggtgacgattgaccctagcatcctcctatcaaatgaagacaccccttactcacgcagcgatcacaaggagggaacaatagtgaggagaaagtacgtgcggtcaaccgtcaccgccgatgtaatgccgccgattccagcaggatactccaaggtcgaagttgagttggtcgaaggcgcgtacgaggacctcgagctggattaccctggaggagacggcggtacatcatcctccctgggcgacaagcggcgtctcgctccagcatcgactcctcaggatcctgcaccgactcctcctcgtgctcctacacctactcccccgcaagctcctcttccggcaccttcaaagtcaagggcccccccagctccaccgcttgcccacacaagggcaacaaagaaggcgaaagttgacgccgccaagaacaaggacccggggtacgattgcacgcaagaggagcttgacgcttacgttgcatcagaagtcaagagacaattcaagcctcgaagtccagaaaagaagattcctatagaccccagtgtcaggaacttcttcaggggtatgtctgcatctgtcaaggaggccatcaagctatcggactatgagcgaacgctgaagaaagcatcttctggaaagtccaaaccagtccctcagcttggagagcaaccaaacctggagatcgagccgttggtgaccggtaaagaaatgacgatagaacaatttattactgacaccggtctaactacggatcaattgctaggagtcgcaccaatcgaaaaggcggaagtgaaatacatgtacgaactcggtaaaccgcttgtcaagcctgagctgctgcagtccctacccacacaaatgtacaagttccatcagctgtacatggagatgagcgccaccggtagagagatgatcggagcgaggatcagggacacggacttcttgcaaggagatgacattctctggatcaatttcaggggaatctacgaactataccagctggacgccctcgacgtctctattatgagttgctggattttaatggagattcaaatggcccgacggcggagggttttcgatactggattcatcgaccctcggaaagtaaacgtcgcaatgctcgaccaatatccacaagaaacagaggacaatctcgtctatctcctgaaggcgcagcattacaagacgttcatactgttgccatacaacacagaattccactgggtgcttttactcatcgacctggaggcctgcaccgtcaactgcgcaaagcaaaagcagggaactaacttgtgcggctattacgtgtgcgagtattgccactgccttgcagaccaaatcatcaccacaagagagctcgattttattcgcatgagggataacctgaccacacacaaggaatttatcgcggcggttcaagaacaactcatgggattcatcaacgaagaaatccttgatcccaagggcgacgtgttggccgtcgacgacatgtccggcgacatcgtggcacacccaaggaaaattgcctctattggtgttgatgttcgcggcaccggctccagctccaggcgtgccatctccggctccagctccaggcgcgccatctcctccagaagtagcggcaccggcggcagctccggctccaggcgcagacatggtgggcgaggacgagcagtcgtgcgggaagcactcaggacgagcagtcgtgcgggaagcactccccaaaaacctgatcacccgccggcaaatccatcaggagttcacgaagccactcggcctcaactgtcgcagtatctagtgctgtaagttctacttccattgttgacctcgttaagatggtctgcttgcaaggcttccaggaaacagtgccacctccaagtgcgaacacatatccacttgtggcttttatcttatcagcatcagatatccagtttgagtcactatacccttctagtacttttggatacctggtatagtgaattccataactcataatgccctttagatagcgcattactctttccagagcctgccaatgatcatctcccggatttaagacaaaccggctcagcttgcttacagcaaatgagatgtcaggcctcgttgcactagccaagtacatcaatgaaccaattatttgggagtatctcagttgatcccttgctattcttcggtttttccttaatagcacgctgggatcataaggagtagaagctggcttgcagccactatatccaaagtgactcaaaatcttgtccacatagtgggattgcacaagtgtaatctcaccctcatctcctctttgtagtttaatgttaagaataacatcagcctctcccaaatccttcatttcaaaactcttggacagatagtccttgaccccctcaatcacattgaggttggtcccaaagatcaatatgtcatcgacatataagcacaagatcactccttctcccccaccatagcgatagtacacacatttgtcagctccgttcacaacaaagccttctagtacatacccgtctggttgatccatatagatctcctcctccagctctccgtttaggaaagctgtcttaacgttcatctgatggacgagaacaccatgagaggctgccagagcaagtagtactcgaatcattgtcaagtgagcaactggtgagtatgtgtcgaaaaaatccttgccttccttttgggtataacccttggccacaagtcttgccttgtacttttcgattgtaccatcagggctaagctttttcttgaaaacccatttgcatcctataggcttgcacccatatggacgctcaacgacttcccaagtatcattagacataatcgagtccatctcactgcgtactgcttccttccagtagtcagcgtcaggagatgaatatgcctcttctatggttcttggggtgtcatccacgaggtatacaatgtagtcatctccaaaggattttgcaaccctttgtctcttactcttacgagtatctacaatgttgtcctcctcaggattttcctcaggcgtttgatcattgtgttctatcggtgcaaagtgcttatggggcatgacagtttcttgactagaagtgctaggtgtatgtttcatggaaaattcattctcaaagaatgtagcatctcccgatgttcctccgccctcgctaatgaccatgttggcacacttcctgtctttgcgctcaggacagtccttggcccaatgcccagacttgccacacacaaagcagtcgccctttgcctttcccttgcctttcttcttaaagttggttgcaaccttgggtttgacatcaggcttgactttcttgttgttgttgtgggatgcatgacggttcttcttctgtaccatattggcactagaacctccctcaacctttttgccccagttgtcctttgccctcgccttctcctcaacacccaaagagccaatgagatcagaaacactgaactcttgcctcttgtgctttagagaagtggcaaagtccgaccaagaaggtggcaatttggcaataatgccacccgccacaaacttgtccggcaactcacagttgttgttctcaagttccttagtcagcatctgaatctcatgagcttgttctactacagaacggtcatcgaccatcttgtagtcataaaactgctccatgacatacagctcactgccggcgtcggaaactccgaacttggcctcaagtgcatcccacatgtccttcccgaaaggcatgtgcatgtacacgtccactatattgtcagcgagtacactgatcaatgctccacggaacaggcaatccgaagccttgaatttagcctcttcctcaggagaaagaggtggttcacttcgtttgccccgtgaaacatagaagcattgcatcgcccgagaatggccctccgctggattgtgaggcagaattgcctccgttggagttgacgttcgcaacgcctccggctcccggcgtgccatctccagaggcagcaacggcgccagcggcagctccggctcgaacggctccggctcccggcgcgccat

SEQ ID NO: 23411 - DNA, 6642 bp, Oryza sativa
  Clone ID: TF_OsC1713_5483
tcagtatccgctactactggtggcgtccacttcaaaactgatactttccggcgagtcgctgagcaaacaccgcacctcgtcgagctcgacgacgtcctgcgtccatggatgctggtgcagcttccgcagtccgcccagcctctcggcgacctccttcatcgccggcctgtcgccgccgcacatctgcaggcactccagagccagcagcgtgatctcctccagcaactcaccgctcgcctcgctcttcacctgctcatccagtatcaaatcggctctgttctccctcatggcggccaagaacctcgccgacaagctccgcccctcatccggcccgtcgaggcagagcggcttcttgccggtgagcagctcgagcaggacaacgccgaagctgtacacgtcgctcttctccgtgagctggcatgtctgcatgtattctgggtcgaggtaaccgcacgtcccctgcaccatggtcatcatttgggcttcgtcagtgggagccaagatggaggcgccgaagtcggacaccttggccatgatgctctcgtcgaggaggatgttggaggacttgacatcgccatggaggatcggcggcgacgcgaaggagtgcaggtacgcgagtgactccgccgactcgtgggcgatccggagacgggaagcgaaggagatggcgccggcagatccgccatggatgagctggtacaaggtgccattggggacgtactcgtagaccaacatggggacgtcgacctcgaggcagcagccgagtagcttgacgatgttcttgtggttgacctgggagaggatcagcatctccttcccgaattccttcttgttcctctcgtccattagcttgcaccgcttgatggcgacaacgaggtcgtcggaggctgcagccacccagcccttgtacacggtgccgtggccgccgcggccgaggacgttgctctcgtcgaagccgttggtcgcctgctcgagctgctcctcggtgtatatggtgaacgcgttgctcttcctcgcgttcagctcctcgtacagaagcaggccgccatgtcgcttgaagtagctgcgcttgatgtcggcaagcgctcttcgctggtgtactaggtatgagctcaggaagctcatcacgatgatagcgatgccaccggtgacgccgatagctatgatcgctgagaccgggagccggtaagatcgtttaaatttcaggtccggcaaagatcgtttcaggtccggctcgcagatgagtactccactcttgttgctcttgtgctctccttctggacacgagcagttgtgtccgccgggaaaattactgcaaatcatcccgtccggacacccgtcatttccaggagcacatacgtcaatatctgtgcatccgccggggaggtaggggttgcccttgtacccactcgtgcagttgcacacgtagccatcagccgtgccgacgcacgcgctgtggtcgctgacgcacgcgtaggtatctttcattcttgcttccttgcacttctcgctgcccgccgcgaagttgagcacgacggggaccgtgccgttcttgtttctgaaaaacttatcggttgtcgcgtagtccctctcgaagctgaagcttttagcctccatcaacacggcgtggctgcaccaggtgtaattgtccggcgaccagctgttattaaataataatggcccgctgaattcaagccggtaggatttgagtcccacggggatggccatctcgcagcatcccgcgccagagcagtagccgttcctgatgttgctcccgttgccgaagcatgtggacatgcagacgttcaggatcgggtcgactgacgcctcctctccggatagcaagacgagcacgttgcagccgacggtgacgaattggttgtcctcgtaggagaagcggtacggcagctccgtcacgtcgaggcccatccacgagctgttcttcaacggggcgccggttgggtcgttctcgtccttgcactgccaggagatgctgttggcaatccggatcttgccgtggagcaggttgatgtcgagcacggccaccaccacttgctgccgatcggtgccgaggcgaagctgcggggtgtcgtggacgcactcgaggctgaaatcgtcggacagcgagcagtttggcccgatgccgaacgggtactcgatgtcgacgttgccgcacttcttcggacacagcggcgacggcggcggccgccgtgatgcggccgcgatcagaggctgcagggcgagcaaagctaggccaaggaagagcagcattggatgatgcttcgtcatccgtgcctggaggtggctgtcgtagcagatgccacgttcccacgattccctccgcaacagcgcgtccacgttctttctcctgatagataaggaggccgcgagtccgatccgatttcttcgcttctttcccggtgttagtttctctttctccgcgcctgagttgctctcgcttccccgcttctgatctcttgcgcgcacgagagattggaaggagcagtgcctccgaaaccacacctttgcctgagatctgcaccgggtaggcgggtgatcaggtttttggggagtgcctcccgcacgactgctcatcaccatgtctggagttgccaccgccactgctggcggaggtggtacgccgccgacaggagctcgatccggagctggtgcgccaggaggtgccgtgaacgacaacaacaacggaggcaattcgccactgctggcggaggtggtacgccgccgacaggagctggatccggagctggtgcgccaggaggtgccgtgaacgacaacaacaacggaggcaattctgcctcaccatccagcggagggccattctcagggtataatcttctcctcctgctactgttgttagcgctatcgctatactatgtgcgctatgttcttgttcctgttctacatggtgcctctagcatgttatcgcgttactgttatgttcctgttcctgacattcaggatgcgcatagtatgctactggttatgttaagatcaccctacactgcttatgccatgatcattgctttaaccttttggattaaaatatgccgattaatgactatatttccaacaatccaaaaacctgataggtcattttcggtagttggctttgctgctgcactgaaaccacatgcttttgatggttcaaactataagagatggaaagcacgtgcactattgtggttgacagcgatgcagtgcttctatgtttcacggggcaaacgaagtgaaccacctctttctcctgaggaagaggctaagttcgaggcttcggattgcctgttccgtggagcattgatcagtgtactcgctgacaacatagtggacgtgtacatgcacatgccttctgggaaggacatgtgggatgcacttgaggccaagttcggagtttctgacgccggcagtgagctgtatgttatggagcagttctatgactacaagatggtcgatgaccgttctgtagtagaacaagctcatgagattcagatgctggctaaggaacttgagaacaacaactgtgagttgccggacaagtttgtggcaggtggcattattgccaaactaccaccttcttggtcggactttgccacttctctaaagcacaagagacaagagttcagtgttcctgatctcattggctctttgggtgttgagaagaaggcgagggcaaaggacgtccagggcaaaaaggttgagggaggttctagtgccaatatggtacagaagaagaaccctcatgcatcccacaacaacaagaaagtcaagcctgatgtcaaacccaagactgcaaccaattttaagaagaaaggcaagggaaaggcaaagggagactgctttgtgtgtggcaagtctgggcattgggccaaggactgtcctgagcgcaaagacaggaagtctgccaacatgatcattagcgagggaggaggaacatcggggtacggtaaaatattacctacagttctctctgtttttcattcacctgattggtgggtagacactggtgctaatattcatgtatgtgctgacatttctctgttttcttcttatcaggtcgggagaggttcctccttgttgataggaaacgggtcgcttgcggctgttcatggtgttggtacggtcgatctgaagtttacttcgggaaagaccgtgcagctgaagaacgtgcagcatgtcccttcaataaagaagaatctagttagcggctctctattgtgtagagaaggttttagacttgtgtttgagtccaataaatgtgtcgtatctaaatatgggacttttgttggaaaaggttatgacagcggaggcttgttccgcttttctttgaatgacatgtgtaataatcataatgctgtgaaccatattagcgagaatgatgagtctaatgtgtggcattcgcgactctgtcatgtgaatttcggttgtatgacgcgcttagctaacatgagtttaatttcaaaattcactttggtaaaaggttccaagtaccatacttgtgttcaatcgaaacaacctcgcaagccacacaaggcatctgaggcgaggaatttggcacctctagaacatgttcattccgatttgtgcgaaatgaacggcgtgttgactaaagggggaaagaaatatttcatgacactgatagatgattgcactagattttgctatgtgtatctattgaaaacaaaggatgagacattgcattactttaaaatctataaagctgaggtagaaaaccaacttgaaaggaaaatcaaacggttgaggtctgatagaggtggggagtatttttccaatgagtttgcatccttttgcgaagagtttggaattattcatgagatgacgcctccctattcaccccaatcaaatggggtggccgaaagaaagaaccgtactctaactgagatggtgaataccatgttagacactgcggggctttccaaggaatggtggggtgaggcagttttgactgcgtgtcatgtcctgaataaaattccaatgaagcataaggaagtaacaccattcgaggaatgggaaaggaagaaattaaatctctcatacctacgaacatggggctgtttggccaaagtaaatgtacctatagccaaaaagcggaaacttggaccaaaaactgttgattgtgtgtttcttggttatgctatccacagtgtggattatagattcttaatagtaaactctggagtacccgacatgcatgttggtacaattcttgagtccagagatgctacattctttgagaatgaatttcctatgaaatatacacctagcacttctagtaaagaaactgtcatgccccatgagcactttgcaccgatagaacacaatgatcaaacgcctaaggaaaatcctgaggaggacaacattgtagatactcgcaagagtaagagacaaagggttgcaaaatcctttggagatgactacattgtatacctcgtggatgacaccccaagaaccatagaagaggcatattcatctcctgacgctgactactggaaggaagcagtacgcagtgaaatggactcgattatgtctaatggtacttgggaagtcgttgagcgtccatatgggtgcaagcccgtaggatgcaaatgggttttcaagaaaaagcttaggcctgatggtacaatcgaaaagtacaaggcaaggcttgtggccaagggttatacccaaaaggaaggcgaggacttcttcgacacatactcaccagttgctcgcttgaccacgattcgagtactacttgctctggcagcctctcatggtcttctcgtccatcagatggacgttaagacagctttcctaaacggagagctggaggaggagatctatatggatcaaccagacggatatgtactagaaggtcaggagggaatggtgtgtaaactattgaaatccttgtatggcctcaagcaagcgcctaagcaatggcatgagaagtttgacaccacgcttacatctgcaggctttgttgtgaacgaagctgacaaatgtgtatactatcgctatggtgggggagaaggggtgatcttgtgcttatatgtcgatgacatactgatctttgggaccagccttaatgtgattgaggaggtcaaagactatctgtccaagagttttgaaatgaaggatttgggagaggctgatgttattcttaacatcaaactacaaagaggagatgagggtgggattacacttatgcaatcccactatgtggacaaggttttgaatcactttggatatagtgactgcaagccagctcctactccttatgatcccagcgtgctattaaggaaaaaccaaagaatagtaagggatcagctgagatactctcaaatcattggttcattgatgtacttggctagtgcaacgaggcctgacatctcatttgctgtaagcaagctgagccggtttgtctcaaatccgggagatgatcattggcaggctctggaaagagtaatgcgctatctaaagggcactatgagctatggaattcactataccgggtatccaaaagtactagaagggtatagtgactcaaactggatatctgatgctgatgagataaaagccacaagtagatatgtggtcatacttggaggtggcgctgtttcctag

SEQ ID NO: 23412 - DNA, 4622 bp, Oryza sativa
  Clone ID: TF_OsC1713_5486
atggcgagcttgggggcgaacccatcggtcttcgtcgcttggcttcgcccaagcgcttcaccctattgcttcgccccgagcgcactcctttggactcagtcgacgcctagtggattcggtggtttcagcagtcccactagttgcaaccgctcctcggcatgcttgtggtctctgcagaaggataggggcgacgccgacatgtgcgagaacgagatgaagcgtgagcctccacaaagacaagtagtcctgccaactgtaataacagttcttcagccatgtcagcactgccattggagacgggcgggcgatcaggtttttgggagctcaaggcgcgactactcactgttcgtcaacatctacttcaccttcaccaacatgtcgaacactggagacaaggagaaggagactcccgtcaacaccaacggaggcaatactgcctcaaactccagcggaggaccattcttggggtataaccttattacattatttcaattagaagttttactgttaatgttcatcgcaatgtcaacattgtgtcattatgtgattgttgatgcttattcaacgttaagcatgctcatgttgattacattcaccactatcactggatcaaatcctattgtaaatatcatgattattatcttgttattttggattaaaatatgccgaattatgaccaaatttccaacaatccaaaaacctgataggtcattttcggtagttggctttgctgctgcactgaaaccacatgcctttgatggttcaaactataagagatggaaagcacgtgcactattgtggttgacagcgatgcagtgcttctatgtttcacggggcaaacgaagtgaaccacctctttctcctgaggaagaggctaagttcgaggcttcggattgcctgttccgtggagcattgatcagtgtactcgctgacaacatagtggacgtgtacatgcacatgccttctgggaaggacatgtgggatgcacttgaggccaagttcggagtttctgacgccggcagtgagctgtatgttatggagcagttctatgactacaagatggtcgatgaccgttctgtagttgaacaagctcatgagattcagatgctggctaaggaacttgagaacaacaactgtgagttgccggacaagtttgtggcaggtggcattattgccaaactaccaccttcttggtcggactttgccacttctctaaagcacaagagacaagagttcagtgttcctgatctcattggctctttgggtgttgaggagaaggcgagggcaaaggacgtccggggcaaaaaggttgagggaggttctagtgccaatatggtacagaagaagaaccctcatgcatcccacaacaacaagaaagtcaagcctgatgtcaaacccaaggctgcaaccaattttaagaagaaaagcaagggaaaggcaaagggagactgctttgtgtgtggcaagtctgggcattgggccaaggactgtcctgagcgcaaagacaggaagtctgccaacatgatcattagcgagggcggaggaacatcggggtacggtaaaatattacctacagttctctctgtttttcattcacctgattggtgggtggacactggtgctaatattcatgtatgtgctgacatttctctattttcttcttatcaggtcgggagaggttcctccttgttgatgggaaacgggtcgcttgcggctgttcatggtgttggtacggtcgatctgaagtttacttcgggaaagaccgtgcagctgaagaacgtgcagcatgtcccttcaataaagaagaatctagttagcggctctctattgtgtagagaaggttttagacttgtgtttgagtccaataaatgtgtcgtatctaaatatgggacttttgttggaaaaggttatgacagcggaggcttgttccgcttttctttgaatgacatgtgtaataatcataatgctgtgaaccatattagcgagaatgatgagtctaatgtgtggcattcgcgactctgtcatgtgaatttcggttgtatgacgcgcttagctaacatgagtttaattccaaaattcactttggtaaaaggttccaagtgccatacttgtgttcaatcgaaacaacctcgcaagcctcacaaggcatctgaggcgaggaatttggcacctctagaacttgttcattccgatttgtgcgaaatgaacggcgtgttgactaaagggggaaagaaatatttcatgacactgatagatgattgcactagattttgctatgtgtatctattgaaaacaaaggatgaggcattgcatttctttaaaatctataaagctgaggtagaaaaccaacttgaaaggaaaatcaaacggttgaggtctgatagaggtggggagtatttttccaatgagtttgcatccttttgcgaagagtttggaattattcatgagatgacgcctccctattcaccccaatcaaatggggtggccgaaagaaagaaccgtactctaactgagatggtgaatgccatgttagacagtgcggggctttccaaggaatggtggggtgaggcagttttgactgcgtgtcatgtcctgaataaaattccaatgaagcataaggaagtaacaccattcgaggaatgggaaaggaagaaattaaatctctcatacctacgaacatggggctgtttggccaaggtaaatgtacctatagccaaaaagcggaaacttggaccaaaaactgttgattgtgtgtttcttggttatgctatccacagtgtgggttatagattcttaatagtaaactctagagtacccgacatgcatgttggtacaattcttgagtccagagatgctacattctttgagaatgaatttcctatgaaatatacacctagcacttctagtaaagaaactgtcatgccccatgagcactttgcaccgatagaacacaatgatcaaacgcctgaggaaaatcctgaggaggacaacattgtagatactcgcaagagtaagagacaaagggttgcaaaatcctttggagatgactacattgtatacctcgtggatgacaccccaagaaccatagaagaggcatattcatctcctgacgctgactactggaaggaagcagtacgcagtgaaatggactcgattatgtctaatggtacttgggaagtcgttgagcgtccatatgggtgcaagcccgtaggatgcaaatgggttttcaagaaaaagcttaggcctgatggtacaatcgaaaagtacaaggcaaggcttgtggccaagggttatacccaaaaggaaggcgaggacttcttcgacacatactcaccagttgctcgcttgaccacgattcgagtactacttgctctggcagcctctcatggtcttctcgtccatctgatcagatggacgttaagacagctttcctaaacggagagctggaggaggagatctatatggatcaaccagacgggtatgtactagaaggtcaggagggaatggtgtgtaaactattgaaatccttgtatggcctcaagcaagcacctaagcaatggcatgagaagtttgacaccacgcttacatctgcaggctttgttgtgaacgaagctgacaaatgtgtatactatcgctatggtgggggagaaggggtgatcttgtgcttatatgtcgatgacatactgatctttgggaccagccttaatgtgattgaggaggtcaaagactatctgtccaagagttttgaaatgaaagatttgggagaggctgatgttattcttaacatcaaactacaaagaggagatgagggtgggattacacttgtgcaatcccactatgtggacaaggttttgagtcgctttggatatagtgactgcaagccagctcctactccttatgatcccagcgtgctattaaggaaaaaccgaagaatagcaagggatcagctgagatactctcaaatcattggttcattgatgtacttggctagcgcaacgaggcctgacatctcatttgctgtaagcaagctgagccggtttgtctcaaatccgggagatgatcattggcaggctctggaaagagtaatgcgctatctaaagggtactatgagctatggaattcactataccgggtatccaaaagtactagaagggtatagtgactcaaactggatatctgatgctgatgagataaaagccacaagtggatatgtgttcacacttggaggtggcgctgtttcctggaagtcttgcaagcagaccatcttaacgaggtcaacaatggaagcagaacttacagcactagatactgcgacagttgaggccgagtggcttcgtgaactcctgatggatttgccggtggttgaaaaaccagtgccagctatcctaatgaactgcgataatcaaacagtgattattaaagtgaacagttcaaaggacaacatgaagtcatctagacacatcaagagaagactgaaatctgtcagaaagcagaaaaactccggagtgatagcattggactatgtccaaacggctagaaatctggcagatcagtttaccaaggggctaccacgtaatgtgatagacagtgcatcgagggaaatgggcttgatacccacctaa

SEQ ID NO: 23413 - DNA, 4199 bp, Oryza sativa
  Clone ID: TF_OsC1528_2046
ctagaagagagcatgcggcgtcatgatgtagtcgtcggtatacacagcgcgctcctcgaatgacattggctcgccgtggagcttcacccaggttgtgacatcgttcggccgttgtcgagcatgtaggtttcgtgtagtcccctgtggagaggaggagaccatggtgatatgacctgtggtgcatggtccaagcgacatgatgtggcagctcaaaaggttgcggtaagggtgaccatgtctcgccaatgccagcccggtgaacactttccctgagctggtgtcagtgatgtcgctctcaacattgttggcgccgttggattttccggtgatgccgatgatcttcgaaccaaccttgatgaagtccatgccaataaggtgagcgatagggggtttggtgagctcttcaccaatgttgaagatgctatgtcaatgcagtgtgcacgacatagccgaagtggtcattgtggccatcttgcaagatcagctagaggcgtaaaaaggcttcttggtcctctaatgatggtagagccgctgatcctcatgcatcggtgttaccatctgccacaaaccagagtcgccaaagtttgttgtctagcattgaaccccaaacaacggtgggactctggctcagggaacatcaaggagatcaaaattcgtggcgagctcggactcagagatgaacaatcatcgtcagacgctgcactcacgtggcaatcgacgcggacactgagaaaacatcttctcatacgacgtggtgaatgttggtcggagtactcctccatcgtcaacaccgacgacgaagcaaaggcgacctgcaactcattttgtgagacatgttggaagattctacggtttcgctccaaccagacattccaccagctgaacccgttcctcaatctccgaaacagatgtaatcgggttaagcatggcaatccaatggttgtcttgcagttccacctggagattatttccctttcttttggcaagcttgaaaatagagggcgcaatgtgttgagggggagactgaggtatttgcaggggaaagatttcaggcttcctgtgaaagaagggagaaggccttcaacatcaataccagagcatgatattgggaagatttcagttttgattaaatcattatatgcctataatctcaacaatccaaaaacttattataggcactgtgattttactatggctggttttgccgatgcactgaggccggataaatttaccggtgtgcattttaagagatggcagatcagggtcactctgtggctgacagctatgaaatgcttctgggtgagtactggcaaacctgaaggagttcttactgctgaacagcagaagcaattcgaggaagccactactctctgtgtaggatgcattcttagcgttcttggcgatcgtctggtcgaggtgtatatgcatatgaccgacgcaaaggagttgtgggatgcactgaatactaaattcggtgctactgatgctagcaatgatctgtatatcatggagcagtttcatgactacaagatggctgacaaccgttctgtagtcgaacaggctcatgagatacaaaccatggctaaggaacttgaactccttaagtgtgttttacccgacaaatttgtggccaggtgcattattgcgaaactacctccatcttggagaagtttcggtactgcactcaaacacaagagacaggaatactccgttgaggggttgatagcgtctcttgatgttgaggagaaagctcgggaaaaagatgccgcgtctaagggcgatggtgggcagtccagtgccaatgttgtgcacaaggcccagaacaagagcaaggggaaatacaaagctcagcagaccaccaacttcaagaagcagaagaagaacaacaacaatcctaatcaggatgagaggacttgctttgtgtgtggccaacttggtcatctggctaggaagtgtccacagcgcaaggggatgaaggcacctacagggcagacttctaagtctgctaatgtgaccattagcaacactggagatggaagcgggtatggtaatttacctgctattttttcagttaatcagtctactaattggtgggttgatactaggtccaatgtcgcacggggttccaccgtcctaatggggaatgggtcacatgtttctgttcatggtgttggcacggtagatctgaagtttacttcgggaaagatcgtgcagctgaagaacgtgcagcatgtcccttctatcgacaggaatcttgttagtggctcccgtctgactagagctggatttaagttggtttttgagtctaataaagtagtcgtgtccaaacatggatattttattggtaaaggttatgagtgcggaggcctgttccgcttttccctttctgatttctgcaataagtctgtgaaccatatttgtggcagtgtggatgatgaggctaatgtttggcactcacgtttatgtcatattaattttggcttgatgtctcggctttccagcatgtgtttaattcctaagttttccattgtcaaaggttctaagtgccatagttgtgtgcaatcgaagcaacctcgcaagcctcacaaggttgccgaggaaagaaacttggcaccactagaactcttacattcagatctttgtgaaatgaatggggtgttgacaaagggtggaaaacgatatttcatgactttgattgatgatgctactagattttgctatgtgtacttgttgaaaacgaaagacgaagctctagactattttaaaatttataaggcagaagttgaaaatcaacttgacagaaagataaaaagacttatgtctgatcgtagtggagagtttttctcaaacgagtttgacttattctgtgaggaacaggacatcatacatgagaggacgcccccctattctcccgagtctaatgggattgctaaaaggaagaaccgcacactgactgacttggtgaatgccatgttggacactgcgggactacctaaggcatggtggggggaggcattgttgacctcaaattatgtgttaaacagagttcctaacagaaataaggacaaaacaccatatgagatatggatcgggagaaaaccatcactttcttacttgcgcacatgggggtgcttggcgcaagtcaatgtaccaataacgaataagcacaaacttggacctaagactgtagactgtgtctttctgggatatgcttatcacaacattgcctatagatttttaatagttaaatctgaggtacctgacatgcatgttggtcaattatgaagtctcgtgatgctaccttttttgagagcttttttccaatgaaggatacacatagtagttcgagccaaccctctgaagtaattcctagttcaatcacaccaccagaacaaactgaacatacacatgaatatgtcactgaggaggatgtcagtgaagctcctcgaaggagtaagagacaaaggacagctaagtcctttggtgatgatttcattgtgtacctcgtggatgacactcctaagtcaatttcagaagcatatgcatctcctgatgcagactactagaaggaggttgtctgtagtgaaatggattccattatcgctaacgggacttgggaggtgacagagcgaccctatgggtgtaaacctgttgggtgcaaatgagtgttcaagaagaagcttaggcctgatggtactattgaaaagtacaaggttcggcttgttactaagggctatactcagaaagaaggcgaatatttctttgatacttactcacctgttgctagattgaccacaattcgtgtgctactttccctagcagcctcacatagtcttctcgttcatcaaatggacgttaagacagcttttcttaatggagagctggatgaggagatctatatggatcaacctgatgggtttgtagttgaaggtcaagaaggcaaaatgtgcaaattgttgaagtctttgtatggtttgaaacatgctcctaagcaatggcatgagaaatttgacaaaacattgacatctacaggctttgcagtcaatgaggcagataaatgtgtgtactatagccatggtgggggtgagggagttattctgtgcttgtatgttgatgacatactgatatttgggacaaaccttgaggtgataaatgaggttacatcaaccctctctcttcatcgacctgtgtcggaggcg

SEQ ID NO: 23414 - DNA, 960 bp, Oryza sativa; identical to SEQ ID NO: 15564
  Clone ID: TF_OsC108353_1

SEQ ID NO: 23415 - DNA, 8279 bp, Oryza sativa
  Clone ID: TF_OsC359_7779
gtggatccccgggctgcaggcagcaaagtttacaatactgttttatttaatcttgctgcaataaaataaattagtatgttgattttatgactttcttttgaaaccagttattcaaaattacaaaattgtgatctcgtttccaactgttttaatttatttcgcaaagcttggtttactttatttacttccctttttactttgattttctaactttattcaaattaatccaaaaacttgtgctattaattggataaaggtcttaactccctcctttcacttgtctttagatgccgcgttacaagcctgagtacctgtttggtgttgagggttttgtccaggagttgcgcacgatgtcctttgtcattggatttgggactgcccctttttatgcccagattcctcatgatcgtcatgaagagaagtgccgagtcaaagtcaccttgaacagcaatagtgaagaggtcccctcagtgatgtttgaagctggaggaagaaactacatccatgcatgtcaggaggtggcaaggatcgccataggagagctccgtgatcgctacagtgatcaattggccgacactgagtatcgctaccatcctcgccaacctcagggaagtgaccgtggcagttaccttgagactgaaggaattgagaatgatgttaccacgaaacatttggttgagatgttgtgggctatggatgaaagtcgtgcggagactgtgttagcagctcaagatcgtgaagatcggaatcgtggtaagatttgcaagctagaagacaaggtggatcgtttggagaaggaattagccgcattgaagggagaagcaccgccgcagaaggccaggattcgtcttaccgcaaggaagagagctttatttgtccctcgctatcaactggcgccaaaggttcgtgtggtggagaaagaagttgccccagctcaagcggatcctccggtcatcatcataagtagtgatgaagaagaagaatccaagcgcaaccattccaagattgagtgggtagcaactcaagatgatgaagatgagccttcaattgacctccgatgcttggaagaactagataccactaatcctgttgaagctagtgattggctgcatgccatagagaagaagttggatttacttcagtgtactgatcaggagaaggtctcatttgcatcacatcagttgcatggccctgcctctgaatggtgggatcacttccgccttaacaggactactgctgaacctatcacttggcttgaattcaccgctgctttccggaagacgcatataccatcgggagtagtgtctctcaagaagaaggagttcaggtcgctttcccagggatctcgctctgttacggagtatctgcacgagttcaatcgtcttgctcgttatgctccggaagatgtgcgcaatgatgaagagcgccaggagaagtttttgggaggacttaatgatgagctttcttacccactcatggttggagattaccctgatttccagaaattagtggataaggctattcgtcaggaggacaagtacaatcgcatggagcagaagaaacgtcggattgctcaattcaagacacaacagggaaataatcagaagccgcgtcttactttaggaccccagtccatgccacagggaggttcttcgtctgttgttcgtccgcaacgtcagttcttcaacaacaatgctggcaacaacattcgtaatcaagctccacgtcctgttgcagctccagcacagcaacaacctgccaagagggagcaaggcaacaagcccgtggtgtgtttcaactgtggagacccaggacattatgctgacaagtgtccgaagccccgacgcgtgaaggttgtccctgcccagaataactctgctgtaccagcatccaaggctcgtgtaaatcatgtcgctgctgcagaagctcaagatgctccagatgtgattttggtccgggagtatcctgatgtgttcccagatgatttacctgccaatgagttggcagaagttaagaggcaagtagatgatttgctacagaaaggatacatcagaccgagttcatcaccatggggagctccggttatctttgtggaaaagaaagaccatactcagagaatgtgtgtggactatcgtgcactaaacgatgtgactatcaagaataagtatccactacccaggattgatgatttgtttgatcagcttaaaggtgccactgttttctccaagatagatcttcgatcagggtatcatcagttgagaatcaaagaggaagatatacctaagacagcttttaccactaggtatgggttgttcgaatgtactgttatgtcttttggacttaccaatgcccctgctttcttcatgaacttgatgaataaggtgtttatggaatacttagacaagttcgtggtggtctttattgatgatattcttatctactctcgaaccaaagaagagcatgaggaacatcttcgccttgcattggagaagctacgagaacatcaactgtatgctaagtttagcaagtgtgaattttggttgtccgaagtgaaattccttggtcacgtcatctcagccggaggagttgccgtcgatcctagtaacgtggaatccgtaaccaattggaagcaaccaaagacagtttcagagattcgcagtttcctaggccttgcaggatattatcggaggtttatagagaatttttccaagattgctaagcccatgacacgactgcttcagaaagatgtgaagtacaagtggtcggaagaatccttagaagcgaagcccactctaattgatcaagttagagaagcccaaattaatgatcctgatattcaagagatcaagaagaatatgagaagaggaaaagctattggtttcttggaggatgagcaaggaacaccgtgctccgccgtcgctccagctgtcgccgccgctcgggaagaccgccgtcgtcatcgccaagtcgccgccgtcctcgtccgccccttcgcagccgtcggaacccgccggagcttcgtcgccgtcgacaacccgaaggtagccgccgcttccttctcgtcgccgtcgtcgtccaagattccgtcgtttccggagagtccgttttcgcagaagaagagtttgaagagttccaaggccagcaaggcaactcctggtttggaatggtacattcctggtttggagatagaactgtgcagccggggtggttgttcagaatggttgggcctatacaacaggatgccgcgctacaagcctgagtacctgtttggtgttgaagggtttgtccaggagttgcgtactatgtcctttgtcattggatttggaactgcccctttttatgcccagattcgtcatgatcgtcatgaagagaggtgccgtgtcaaagtcaccttaaacagtaatagtgaagatattccatcagtgatgttcgaagctggaggaagaaattatatccatgcatgtcaggaagtggcaaggatcgccataggagagctccgtgaccgctacagtgatcagttggccgatactgagtatcgctaccatcctcgccaaccacagggaagtgaccgtggcagttaccttgagactgaaggaattgagaatgatgctaccacaaggcatttggttgagatgctgtgggctatggatgaaagtcgtgcggagactgtgttagcggctcaagatcgtgaagaccggaatcgtggtaagatttgcaagctagaagacaaggtggatcgcttggagaaggaattagccgcattgaagggagaagcaccgccgcagaaggccaggattcgtctcaccgcaaggaagagaactttgtttgtccctcgttatcaattggcgccaaagatggtgaacactcgcagcaacgggaatggtcctaacctcaacaaccccaataacaacaacaatggagagaatcccactcttgctcaagttcttgctcaacagacacagcttatgaacatgatgatgcagcaatttcagaatcagcagaaccaaggaaataaccatgtacctcctcagaataagttagcagaatttcttcgtgtgaggccgcctgttttctctagtaccactaatcctgttgaagctagtgattggctgcatgccatagagaagaagttggatttacttcagtgtactgatcaggagaaggtctcatttgcatcacatcagttgcatggccctgcctctgaatggtgggatcacttccgccttaacaggactactgctgaacctatcacttggcttgaattcaccgctgctttccgaaagacgcatataccatcgggagtagtgtctctcaagaagaaggagttcaggtcgctttcccagggatctcgctctgttacggagtatctgcacgagttcaatcgtcttgctcgttatgctccggaagatgtgcgcaatgatgaagagcgccaggagaagtttttgggaggacttaatgatgagctttcttacccactcatggttggagattatcctgatttccagaaattagtggataaggctattcgtcaggaggacaagtacaatcgcatggagcagaagaaacgtcggattgctcaattcaagacacaacagggaaataatcagaagccgcgtcttactttaggaccccagcccatgccacagggaggttcttcgtctgttgttcgtccgcaacgtcagttcttcaacaacaatgctggcaacaacatccgtaatctagctccacgtcctgttgcagttccagcacagcaacaacctgccaagagggagcaaggcaacaagcccgtggtgtgtttcaactgtggagatccaggacattatgctgacaaatgtccgaagccccgacgcgtgaaggttgtccctgcccagaataactctgctgtaccaacatccaaggctcgtgtaaatcatgtcgctgctgcagaagctcaagatgctccagatgtgattttgggtatgttccttgttaactcagttcctgcaacagtgcttttcgattctggtgctacacattcattcttatctatgagttttgcgggaaatcatgggatggaagtagaagaccttagatgtcctttgatggttagtaccccaagtaatcaagcactctctttgcaacgtagcccctctgtcagaatagaaattcaaggagtaccatttctggccaatcttatcttgttagaatccaaagaccttgatgtcatcctagggatggactggttagccagacataaaggtgtgatagactgtgccaacagaaaagtaactctcaacagctatgatggtcgagttgtaactgttcatgcattgtcatctgagtctttaaggtcaagactgaaccagataactttggaagagattcctatagtccgggagtatcctgatgtgttcccagatgatttacctggtatgccgcctaaaagggatatagagttcagaatagatttggtacctggaacaactccgatccataagagaccttatcgaatggcagccaatgagttggcagaagttaagaggcaagtagatgatttgctacagaaaggatacatcagaccgagttcatcaccatggggagctccggttatttttgtggaaaagaaagaccatactcagagaatgtgtgtggactatcgtgcactaaacgatgtgactattaagaataagtatccactacccaggattgatgatttgtttgatcaacttaaaggtgccactgttttctccaagatagatcttcgatcagggtatcatcagttgagaatcaaagaggaagatatacctaagacagcttttaccactaggtatgggttgttcgaatgtactgttatgtcttttggacttaccaatgcccctgctttcttcatgaacttgatgaataaggtgtttatggaatacttagacaagttcgtggtggtctttatagatgatattcttatctactctcgaaccaaagaagagcatgaagaacatcttcgccttgcattggagaagctacgagaacatcaactgtatgctaagtttagcaagtgtgaattttggttgtccgaagtgaaattccttggtcacatcatctcagccggaggagttgccgtcgatcctagtaacgtggaatccgtaaccaattggaagcaaccaaagacagtttcagagattcgcagtttcctaggccttgcaggatattatcggaggtttatagagaatttttccaagattgctaagcccatgacacgactgcttcagaaagatgtgaagtacaagtggtcggaagaatgtgagcagagttttcaagagttgaaaagtcgcttaatatcagctcctattttgattttgcctgatccaaagaagggttttcaagtgtattgtgatgcatccaaacttgggttaggttgtgttctgatgcaagatgggaaggtggttgcctatgcctctcgacagttacgtccgcatgagaagaactaccctactcatgatattgagttagctgcagtcgttcatgcattgaagatttggcgtcattatcttttcggtactcgtacagaagtgtacaccgatcacaagagtttaaagtatatctttactcagtcggatctgaacatgagacaacggagatggttggaattaattaaggattatgacatgggaattcattatcatccgggaaaggctaatgttgtagcagacgctcttagcagaaaaggctattgcaatgctacagaaggacgacagttgccattggaattatgcaaggaatttgaaagattaaatttgggaattgtcggtagaggtttcgttgcagccttagaagcgaagcccactctaattgatcaagttagagaagcccaaattaatgatcctgatattcaagagatcaagaagaatatgagaagaggaaaagctattggtttcttggaggatgagcacggaactgtatggttgggtgagagaatctgtgtccccgacaacaaagatttaaaggatgcaattctgaaagaagctcatgatactttatactccattcaccctggtagtactaagatgtaccaggatctcaaggaaagattttggtgggcaagtatgaagcgtgaaatcgcagaatatgtagcagtatgtgatgtttgtcagcgagtcaaggcagaacatcagaaacccgccggtttgttgcagcctttgaagattcctgaatggaaatgggaagaaataggtatggattttattactggtttacccagaacgtcatcaggccatgactctatttgggtgatagtcgacagacttaccaaagtggctcatttcattccggtaaagacaacttattccggaagtcgcttagcggaattgtatatggcaaggattgtgtgtttgcatggcgtccctaagaagatagtgtctgatcgaggcagtcagtttacttcaaatttttggaagaaacttcaggaagagatgggttctaagctgaactttagtactgcttatcatccgcagacagacggacaaaccgaaagggtgaatcaaattttggaagacatgttgagagcttgtgctctagatttcggtggaagttgggataagaatctaccctatgcagaattttcgtacaacaacagttatcaagctagtctacagatggctccgtatgaagcactgtatggtcggaagtgccgcactccgcttttgtgggatcaaacgggagaacgtcaggttttcggaacggatatcctaagggaagcagaagaaaaggtaaagatcattcaagaaagattgcgtgtggctcagtctcgtcataagagttatgccgacaatcgccgtagggatttgagttttgaagaaggagattatgtgtatcttcgtgtcacgcctctacgaggagttcatcgttttcataccaagggaaaattggcaccgcgttttgtgggaccttataagattgtcagtagaagaggagaggttgcttatcagttggagttacctcaatctttggcaggagtacataatgtgttccatgtgtcgcaattgaaaaagtgtttaagggtacctactgaagaagctaatattgagcagatagaagtccaagaggatttgacttatgttgagaaaccaatccgtatcctggaaacaaatgagagaagaaccaggaatcgagttatccgtttttgtaaagtccagtggagtaatcactcggaagaagaatcaacttgggaacgagaagatgaattgaagtcagctcatccgcacctgttcgccagttcttccgaatctcgaggacgagattctgtt

SEQ ID NO: 23416 - DNA, 4000 bp, Oryza sativa
  Clone ID: TF_OsC1713_4911
gtcgctatccttttgcaggcactaacccacgttcccacgattccctccgcaacagcgcgtccacgttctttctcctgatagataaggaggccgcgagtccgatccgttttcttagcttctttcccggtgttagtttcttcttctccgcgcctgaattgctctcgcttcctcgcttctgatctcttgcgcgcacgagagaatggaaggagcagtgcctccgaaaccacaccttcgcctgagatctgcaccgggtaggcgggtgatcaggtttttggggagtgcctcccgcacgactgctcgactgctcatcgccatgtctggagttgccgccgccactgctggcggtggtggtacgccgccgacaggagctggatccggagctggtgcgccaggaggtgccgtgaacgacaacaacaacggaggcaattctgcctcaccatccagcggagggccattctcggggtatactcttctcctcctgctactgttgttagcgctattcctgttcccattgttagcgctatcgctatactatgtgcgctatgttcttgttcctgttctacataatgcctctagcatgttatcgtgttactggtatgttcctgttcctgacattcatgatgcgcatagtatgctactggttatgttaagatcaccctacactgcttatgccatgatcattgctttaactttttggattaaaatatgccgattaatgactatatttccaacaatccaaaaacctgataggtcattttcggtagttggctttgctgctgcactgaaaccacatgcttttgatggttcaaactataagagatggaaagcacgtgcactattgtggttgacagcgatgcagtgcttctatgtttcacggggcaaacgaagtgaaccacctctttctcctgaggaagaggctaagttcgaggcttcggattgcctgttccgtggagcattgatcagtgtactcgctgacaacatagtggacgtgtacatgcacatgccttctgggaaggacatgtgggatgcacttgaggccaagttcggagtttctgacgccggcagtgagctgtatgtcatggagcagttctatgactacaagatggtcgatgaccgttctgtagtagaacaagctcatgagattcagatgctggctaaagaacttgagaacaacaactgtgagttgccggacaagtttgtggcgggtggcattattgccaaactaccaccttcttggtcggactttgccacttctctaaagcacaagagacaagagttcagtgttcctgatctcattggctctttgggtgttgaggagaaggcgagggcaaaggacgtgcggggcaaaaaggttgagggaggttctagtgccaatatggtacagaagaagaaccctcatgcatcccacaacaacaagaaagtcaagcctgatgtcaaacccaaggctgcaaccaattttaagaagaaaggcaagggaaaggcaaagggagactgctttgtgtgtggcaagtatgggcattgggccaaggactgtcctgagcgcaaagacaggaagtctgccaacatggtcattagcgagggcggaggaacatcggggtacggtaaaatattacctacagttctctctgtttttcattcacctgattggtgggtggatactggtgctaatattcatgtcgggagaggttcctccttgttgatgggaaacgggtcgcttgcggctgttcatggtgttggtacggtcgatctgaagtttacttcgggaaagaccgtgcagctgaagaacgtgcagcatgtcccttcaataaagaagaatctagttagcggctctctattgtgtagagaaggttttagacttgtgtttgagtccaataaatgtgtcgtttctaaatatgggacttttgttggaaaaggttccaagtgccatacttgtgttcaatcgaaacaacctcgcaaggctcacaaggcgtctgaggcgaggaatttggcacctctagaacttgttcattccgatttgtgcgaaatgaacggcgtgttgactaaagggggaaagaaatatttcatgacactgatagatgattgcactagattttgctatgtgtatctattgaaaacaaaggatgaggcattgcattactttaaaatctataaagctgaggtagaaaaccaacttgaaaggaaaatcaaacggttgaggtctgatagaggtggggagtatttttccaatgagtttgcatccttttgcgaagagtttggaattattcatgagatgatgcctccctattcaccccaatcaaatggggtggccgaaagaaagaaccgtactctaactgagatggtgaatgccatgttagacactgcggggctttccaaggaatggtggggtgaggcagttttgactgcgtgtcatgtcctgaataaaattccaatgaagcataaggaagtaaatgtacctatagccaaaaagcggaaacttggaccaaaaactgttgattgtgtgttttttggttatgctatccacagtgtgggttatagattcttaatagtaaactctggagtacccgacatgcatgctggtacaattcttgagtctagagatgctacattctttgagaatgaatttcctatgaaatatacacctagcacttctagtaaagaaactgtcatgccccatgagcactttgcaccgatagaacacaatgatcaaacgcctgaggaaaatcctgaggaggacaacattgtagatactcgcaagcgtaagagacaaagggttgcaaaatcctttggagatgactacattgtatacctcgtggatgacaccccaagaaccatagaagaggcatattcatctcctgacgctgactactggaaggaagcagtacgcagtgaaatggactcgattatgtctaatggtacttgggaagtcgttgagcgtccatatgggtgcaagcccgtaggatgcaaatgggttttcaagaaaaaacttaggcctgatggtacaatcgaaaagtacaaggcaagacttgtggccaagggttatacccaaaaggaaggcgaggacttcttcgacacatactcaccagttgctcgcttgaccacgattcgagtactacttgctctggcagcctctcatggtcttctcgtccatcagatggacgttaagacagctttcctaaacggagagctggaggaggagatctatatggatcaaccagacaggtatgtactagaaggtcaggagggaatggtgtgtaaactattgaaatccttgtatggcctcaagcaagcaccaaagcaatggcatgagaagtttgacaccacgcttacatctgcaggctttgttgtgaacgaagctgacaaatgtctatactatcgctatggtgggggagaaggggtgatcttgtgcttatatgtcgatgacatactgatctttgggaccagccttaatgtgattgaggaggtcaaagactatctgtccaagagttttgaaaagaaggatttgggagaggctgatgttattcttaacatcaaactacaaaaaggagatgagggtgggattacacttgtgcaatcccactatgtggacaaggttttaagtcgctttggatatagtgactgcaagccagctcctactccttatgatcccagcgtgctattaaggaaaaaccgaagaatagtaagggatcaactgagatactctcaaatcattggttcattgatgtacttggctagcgcaacgaggcctgacatctcatttgctgtaagcaagctgagccggtttgtctcaaatccgggagatgatcattggcaggctctggaaagagtaatgcgctatttaaagggcactacgagctatggaattcactataccgggtatccaaaagtactagaagggtatagtgactcaaactggatatctgatgctgatgagataaaagccacaagtggatatgtgttcacacttggaggtggcgctgtttcctggaagtcttgcaagtag

SEQ ID NO: 23417 - DNA, 2811 bp, Oryza sativa
  Clone ID: TF_OsC1713_5111
atgtcgacaaccggcgacaacaacaacactggagacaaggagaaggagcctcccgtcaacaccaacagaggcaataccgcctcaaactccagcggagggccattatcaggtgtactcgctgacaatatagtggatgtgtacatgcacatgccttcggggaaggacatgtgggatgcacttgaggccaagttcggagttttcgacgccggcagcgagctttatgtcatggagcaattctatgactacaagatggtcgatgaccgttctgtagtggaacaggctcatgagattcagatgttggcaaaggaacttgagaacaacaattgtgagttgccggacaagtttgtggcggctggcattattgccaagttgccaccttcttggtcggactttgctacttctctaaaacacaagaggcaagagttcggtgttactgatctcattggctctttgggtgttgaggagaaggcgagggcaaaggacaaccggagtaaaaagatcaagggaggttctagcgccaatttggtgcagaagaagaaccctcacgcatcccacaacaacaacaagaaagtcaaacctgacgtcaaacccaaggctacaaccaattttaagaagaaaggcaagggaaaggcaaaaggagattgctttgtgtgtggcaagtatgggcattgggccaaggattgtcctgagtgcaaggataagaagtctgcaagcatggttattggtgagggcggaggaacattgaggtatggtaaatttttacctacagttctctttgtctgtcactcacctgattggtgggttgatactggtgctaatattcatgtcgggagatgttcctccttgttgatgggaaacggatcgcttgcagctgttcatggtgttggttatgacagcggaggcttgtttcgcttttccttggatgatatgtgtaataaagttgtcaaccatgatgaagcattacattactttaagatctataaggctgaggtagaaaaccaaactggaaaggaaaatcaaacggttgagtatggaattattcatgagaggacgcctccctattcaccccagtcaaacggggtagccgaaagaaagaaccgcactctaactgagatggtgaatgccatgttagacactgcaggactttccaaggaatggtggggtgaggcaatattgactgcgtgtcatgtcctgaatagaattcctactaagcataaggaagtaacacaattcgaggaatgggaaaggaagaaattaaatctctctcacctgcgcacatggggctatttggccaaggtaaatgtacctatagccaaaaagcgtaaacttggaccaaagaccgtagattgtgtgttccttggttatgctatccacagtgtgggatataggttcttaatagtaaattctagagtacccgacatgcgtattggtacaattactgagtctagagatgccacattttttgagaatgaatttcctatgaaaaatgcacctagcacttctagtcaagaacctattttatcccctgagcactttgcgccgatagaatacattgatcaaacacttgaggaaaatcctgtggaggataacattatggatgttaagacagctttcctcaatggagagttggaggaggagatctatatggatcaaccagatgggtatgtactagaaagtcaggagggaatggtgtgcaagctgttgaagtctttgtatggtctcaaacaagcgcctaagcaatggcatgagaagtttgacaatacacttacatctgctggctttgttgtgaacgaagctgacaaatgtgtgtactatcgttgtggtgggggagagggagtgatcttgtgtttatatgtcgatgacatattgatctttgggaccagcctcaatgtgattgaggaggtcaaggactttttgtccaaaagctttgaaatgacggatttgagagtggctgatgttattcttaacattaaactactgagaggagatgagggtgggattacacttgtgcaatctcactatgtggacaaggtcttgagtcgctttggttatagtgactgcaaggcagctcctactccttatgatcctaggacaatgagctatggaattcactacgccgggtacccaaaagtgctggagggctatagtgattcaaactggatatctgatgctgatgagataaaggccacaagtgggtatgtgttcacacttggagaatccttccctggttctgttcacctgcgcgcacaggtgtatgggacgagcaggtgcctccgaaactccgtccgcttgagaacttgcacgggtaggcgggcgatcaagtttttgggtagcgcttcaagtgcgactgctcctgttcttcgcgactactattattgcatcgacgccttcgtcaacatgtcgatggagattggagacaaggaggtgaacgacatcaacggaggcaatactgcctcaaaatccagcggtgggacgttcttaggggagatcttgctctccggacgcaaatttacttgggccaactctatgccgagcccaacttacaaaaacgccgcctccgcgtcagcccgtgcgccgccgtcgctgccgcgagtccagccaagcgccgccgctgctccagtcaccgccgtcgctccggaaggccatcgccaggttcgcaaggtcgccaccgtcctcatcccgtcctccgtttctgccaaagactgccggagcgccgccgccatcgacgacccgaagaccgccgccgcctcgacctcgctgccgtcgtcgtccaagccaccggtgagttgtcgcgtcgcgctttacgcgtag

SEQ ID NO: 23418 - DNA, 1713 bp, Oryza sativa
  Clone ID: TF_OsC359_7392
ttctccttcccctaatgctatttgcaaaaggtttctccgttcttccttcttcggattttcaactagtactagatggtcagctttgcgaagaagaagatgtcgtcaattgtttgccgaagctccggaagactgcaaggatccgctagtgaagtggaggaagcagtgaagccagctgtgaagcaggacaaaagacttagatctgttaaggtcctatccttagtttctaatctgtctctcccctttgttttccctctctccctctccaaacctttgcaacagatggctgacaatgagaaaggcaataaggtcagaagtcaggacattggtacctcaagctcccgagtgaatgaagcaccagacaccagttgtgtggcagtggtccaacacctgattaaccagaaccaattgcttatagagatactacagcagcatcggatgccaattttgaacccgagtcagatgcaacatcaagtgcagttggaggcagtccaagcactcacaccacaagtcagcgcaccgccaacatcccagaaggcccctcatgccatgccacatgttgacccaaaagaagcaagtatcatctgttttatgtgtgatgagcaagggcactacgcaaggaactgtcctcagcagaaaagaaaagcaccaatgcgaaccgaagatgaagtccgtaagatgatcattaccagcacagaatggcctccaccaggaatgacaaaacatcagagaagaaattcctcccgaggtgcacaacagttgacagagcatcttttagctaatggaggtagagtgtctggtagtgaagattcagatcaagtctcctcagatgatgaagatgcgaagtctccccaaggctttaaccagaataaaatagaacttaaggcatgctctcgttgtggagaaatcggtcatgttgccagctcgtgtgcctctacatgcgttcattgtgaggaagaccatccacccgacaggtgtccaacgagcaggatcacttgtttcttttgtgaaggaactgatcatgtaccaaaagattgtcaattcagttttctgctgacgaagaagatggccaaccaacccgccagttccaacggagagaagcatcaaggcaacacaaatccccgccaaggtcaccgtttcagcctaactccagtgccaggacagaggaatcgaaatgagaaaagaaaatgccgagtccgggaagacatctgttgcttcaattgtcaaggaatgggtcatttcgccgacaagtgcccaaaaccgagaaacatagctgccggcacgtcagtccacgcaactccctgcaatcagaagcttgctcctcaacgaattgtcatccatgcatcccgaagcagtcctatagcccgcgttgcaacagctccaattccaatgaatgcactaccacaaggtgtcaatgctcaatttcagccccagccaccagctgacaagacaggggccagtatctgcgttgtacctttggaagttccaatacagcagctgagaaatcaagtacaagatgaagaacccgagtgtaagaaagttattgtttgttacaactgcagtgaagaagggcattactccaaaaactgtccccaaccaaggcaaaatcgacctccacattaccgccaatttacacgaagcagacattccaatcgtattgtggtcactggagcaaacgccgtacccgtaaggcctcgtgttaatcagaacccatag

SEQ ID NO: 23419 - DNA, 4333 bp, Oryza sativa
  Clone ID: TF_OsC359_7849
atggataatactggtaacaaaggctatgggaatgatggatccgatgactcaagaacccaagccaatgggaatgagagaagcaccaacgaaacctcaccagagctaatccaagttgtggttaaccaaaccaacatgttggcaacagcctttcaactattacagaattggagcagcccagcaggggcaaccaacgttcaagtgcctacagtccagcaacagtgcaagttatcagaatttctcaaaactgagcctccaacctttgccattgccgtcgatcctatggaagccagtgattggttgcgcacaatcgagaagaagctagggttgattcagtgcaccgaccaggagcgggttggcttcgcaactcatcagctggttggaccggcttcagagtggtggggaagctacgaagcatcacggccagaaggacataccatcacctggaacgagttttcatctgtattcaagagatcacatgttcccgcaggaatgatcacactaagaaaacgagagttccgctacctgaagcaaggagatttgaccgtcacagagtacctgcacgagttctatcgtttggctcactatgcaccagaagatgtggaaacggatgaagacaaacaagagaagtttctccaggggttaaaagatgagcttgcagtgcaactactcctagaggattatgaagattttgagaaacttgtggacaaagccatgcaactcgaaagtgagcataatcggatgacgaactgcaagagaaggattgtcaacatcccagtaattccatgtggtaaccaaagacagcgcactgagccacttcagatcaccggatcttctgttgtgcatcaagagttcctgccccaagaagacggacgcaatgcagacaacaacagtagcaatactaacgatgatgataccaccaacaaccatggttcttgccccattagtgaccactcgaataaagcgtgcaatgtcagtagcattcaccaagatgtcaacgatagtatcaatgttggaacccagaatgacaaccttagcaattttgacactgagaaagactccaatggtgatagcaactatggtaccactgatgccaatgttagcaaggatttccaaccaccaattccaactccaagtcaaaatgatcgtccccagatgggcagctcagtaaagaagacgttgatttgttacaactgcaaagaaccaggtcatttctctagagattgtccacagccgaagcgtaacctgcgccatcactccggccattatgcaagaagaagacaagtcactcgccttgtggtcactggagcaaacgccgtacctgcgggcccgcccgccactctcgctgacgggtgggacccacctgtcatcgccttcctcccgccgcgcccgccgcccgcccgtgccctagcgccgccgccgccgctgaatccgccgcatcccgccttccccgcgcgccttaatgaggggggaatcactccccgtgattccctctcccgtttccccctcttttccctctctctctccctcggattcgtccggattcatcccgcgaagttcgccggcgtcttcaatggcgcccgagatctccgcgcgcggtttcctctctccccggccgcgctctccccctcccgttgctatatattcgatccccgtgcttcgctcttccgtttccgccgctcgccgctcgctctcgccgtcggtttcgtgcccgcgccgtgctcctctctctccgccgtcgccgccgaccttcggttcgccgccgacgtcgctccggtcctccgcccgactcggcgccacctccttcggcttcgccgagtggttgccgaccccgtccgccgctccgcttcgcccgccgactgccggagcaccgtcgccctcggcatcccgaaccgcgccgtcgccttcctccgctccggttcgccgccgccgtcgctccggtcttcctcccggctcggcgccacctccctcggcatcgccgcatcgccgtcgacctcgtccgcgccttcgtttcgctcgccgaccgtcggagcgccgccgtcatcgtcatcccgagccgtgccgccgccttcttccgctccggccgccgttctcgtcgtcgtcgttgtcccggggtgagccgtggaccgtcccttccgtttccccctcctctccgctctctcgggcgctgctccgccgcgccgatggtcgccggcggtgaccatcggggcgcgggcgcgttccctcccgtcggccgtgccggcgaggccgccttcgggcgcgccctcgcgggcgtgggacccacggcgccgaccgccgccagccgcgtgcgcccggtccaccgtggaccgagcggctgacgcgtgggcccccacccccgtggacccgggcaaatgaaggctacacgggctgcggcccgatggctgacaatgagaaaggcaataaggtcagaagtcaggacattggtacctcaagctcccgagtgaatgaagcaccagacaccagttgtgtggcagtggtccaacacctgattaaccagaaccaattgcttatagagatactacagcagcatcggatgccaattttgaacccgagtcagatgcaacctcaagtgcagttggaggcagtccaagcactcacaccacaagtcagcgcaccgccaacatcccagaaggcccctcatgccatgccacatgttgacccaaaagaagcaagtatcatctgttttatgtgtgatgagcaagggcactatgcaaggaactgtcctcagcagaaaagaaaagcaccaatgcgaaccgaagatgaagtccgtaagatgatcattaccagcacagaatggcctccaccaggaatgacaaaacatcagagaagagattccttccgaggtgcacaacagttgacagagcatcttttagctagtggaggtagagtgtctgatagtgaagattcagatcaagtctcctcagatgatgaagatgagaagtctccccaaggttttaaccagaataaaatagaacttaaggcatgctctcgttgtggagaaatcggtcatgttgccagctcgtgtgcctctacatgcgttcattgtaaggaagaccatccacccgacaggtgtccaacgagcaggatcacttgtttcttttgtgaaggaactgatcatgtaccaaaagattgtcaattcagttttctgctgacgaagaagatggccaaccaacccgccagttccaacggagagaagcatcaaggcaatacaaatccccgccaagatcaccgtttcagcctaactccagtgccaggacagaggaatcgaaatgagaaaagaaaatgccgagtccgggaagacatctgttgcttcaattgtcaaggaatgggtcatttcgccgacaagtgcccaaaaccgagaaacatagctgccggcacgtcagtccacgcaactccctgcaatcagaagcttgctcctcaacgaattgtcatccatgcatcccgaagcagtcctatagcccgcgttgcaacaactccaattccaatgagtgcactaacacaaggtgtcaatgctcaatttcagccccagccaccagctgacaagacagaggccagtatctgcgttgtacctttggaagttccaatacagcagctgagaaatcaagtacaagatgaagaacccgagtgtaagaaagttattgtttgttacaactgcagtgaagaagggcattactccaaaaactgtccccaaccaaggcaaaatcgacctccacattaccgccaatttacacgaagcagacattccaatcgtattgtggtcactggagcaaacgccgtacccgccgagccaagggcaatcaacctccggagggcgataccaagcagaagaccgtcatccgcttcaaccagcaatcagaaggaagcttctcctgtgaatgatagcagtatgcagtcctatcacatcatcacagaaccaatcgaggatgcagtcactggaacaatgccagctatatctctccagaatcaaaatgagcagccatgtttgtggttttcagtccgctacttatcatggtgtaatcgaaagtttgcagcaatcatattcatgtctataaacattgataacttgtccgaggttgactccgaagatatgaatcatgagaagttctggaacggaagcatcacagaactaccgcaacctagtctgagtcagccaaaaggtgcaccctggtccaagtcaggtgaagagaagattccatccgcaacaggaggtcaagccaagcagttccgagtggtaaagttttgctggaagttcgtcaagacgcaacggaagaagtcagacaagaagagaagcccgcccaacctatcttcttgctag

SEQ ID NO: 23420 - DNA, 1639 bp, Oryza sativa
  Clone ID: TF_OsC359_5515
ttatccggtaggcggtctgacgcacgcctcgccccatcctgtcaggatgagagcctccaagcactcgtccctagccggagccggcgtgttagctcctggagatggcacgttggtcccggtcagatatataccaggcttcatccgatttatgaccggtctgacaatggtcatgtcgtcagcagacagccatgttcccacgtcgcgcctgcttccggcggaagtggagaccaagagtttagaacctcacccagggcccccggccgaaccggcaaaggggggcctgcgcggtctcccggtgaggagccccaagctccgtcagaaggtgttcgccaggtcacctgaaaaagacgagaagcagtgcccagggagtaaccaagctccatgtcagtctaccgacaagaaggatggtactttgcagcccaactctggagcaaacaggacagtgatatggaagatggataatggcaggaccatgatcatcaccggttcagaatttactcctgaagacgcagcaaggatacccaagcgtcagagaggaagaaataccttccgaggagcgcgtcagctaacccgtcatctcataaagtacggtccgcctagacccgaagatgatgaatcaggagaacggttttctgctgatgacgatgacgacaacgatgatgataatgatgacaatgatgatgcgacccttgacagtttcagggaaagagagttgaagttcaaagcatgtgctagatgtgggatagtcggacacactgctagtttatgcctccccacatgccgctgtggtgaatatacccattactcaaatgcatgccctttaaggaaggtcacatgtttcttgtgtgaaggaacagatcatgtgcctaaggactgtcagttaaacgcggtcatagctaagaccaagaaagaacaagggacaaccgtgcaacccattcgtcaaccaatgacaatcgacaacagcggtcacaatccttctgctcttcctccaactccagctccagtggaagccaaccatggaagaagcaacgtcaccaaggatgttcataagtctctgcttgttcccgtttcagctgccaaagtgcataatcagaagcctgcaccccgagaccaagcaagtcgattctgtcgcaactgtcataagccaggacatcgtttcagtgattgtcctcttccaagagcagcaaaggcagttcgtcgtgattcacaagttaccagcactgcccatgacaccaatcgacacctgaatgtgcaacctccgccccaacggattatcgtcaagggcaccgtcaaaggtcgcattgttccaccggcaatcgtttcaagcctacagcaccaacgccagcagggtaagcaatgtcaggagaacaacagctcgctacagctacaaagaggcggtacgctccctcgtcagcacccgcggcaagtgttgtcagcaacaggtcgtccaactgttgtcagttctagcaatgcacctcgtattgctccaatctggaggcccatcgacaaatcaccgctcggtaaccccacgggcaagaagatcctacccgttacagctgacaagacagttgcccctccaccatcgaagatcaacaagcagagcaacgttcccggtgagacttctggtagtaggaactaa

SEQ ID NO: 23421 - DNA, 3550 bp, Oryza sativa
  Clone ID: TF_OsC359_7154
atggatgaagtcgggggtcgatggacattctccagggcaaatgaaggctacacgagctgcggcccggtagtcgagatgtcatggcagagggttggtgccctgctgctagggggctcagtcctgcctgcctgtcccgggtgtcccggccgtaggaggattgggtcggtactcttgtttatggctaggatgggttgggaactatgtcacgtcttccgtccgtataccgtggtggtattttgctcaacaactaaaatgtggaatggttggcctgggttggcttgggacgagctgggacccagggtcgggttgccagttcggtctgaatcatcgtaggccttgggttaaggcagtactagatggtcagctttgcgaagaagaagatgtcgtcagttgtttgccgaagctccggaagactgcaggatccgctagcgaagcaaaggaagcagtgaagccagctgtgaagcaggacaaaagacttagatctgttaaggtcctatccttagtttctaatctgtctctcccctttgttttccctctctccctctccaaacctttgcaacagatggctgtcaatgagaaaggcaataaggtcagaagtcaggacattggtaccttaagctcccgggtgaatgaagcaccagacaccagttgtgtgacactggtccaacacctgattaaccagaaccgattgcttatagagatactacagcagcatcagacgccaattctgaacctgagtcaaatacaacctcaagtgcagttggaggcagtccaagcactcacaccacaagtcagcatgccgccagcatcccgaaggacccagggtgacgtgccacatgttgacccaaaagaagcaagtaacatttgctttatgtgtgatgagcaagggcactatgcaagggagcgtcctcagcagaaaagaaaaacaccaatgcgaaccgaagatgaagtccgtaagatgatcattactagcacagaatggcctccaccaggaatgaccagacgtcagagaagaaataccttccgaggtgcaccacagttgacagagcatcttttagctaatggaggtagagtgtctgatagtgaagattcagatcaagtctcctcagatgatgaagatgaaatggaatgtaaggcatgctctcgttgtggagaaatcggtcatgtcgccagctcgtgtgccactatatgcgttcattgcgaggaagaccatccacccgacaggtgtccaacaagcaggatcacttgtttcttttgtgaaggaattgatcatgtaccaaaagattgtcaattcagttttctgctgacgaagaagatggctaaccaacccgccagttccaacggagagaagcatcaaggcaacaccaatcctcgccaagattacagtttcagcctaactccagtgccaggacagaggaatcaaaatgagagaagaaaatgccgagtccgggaagatatctgttgcttcaattgtcaaggaatgggtcatttcgccgacaagtgcccaaaaccgagaaacatagctgccagcacgtcagtccacgcagctccctgcaatcagaagctcgctcctcagcgaattgtcatccatgcatcccaaagcagtcctatggcccgcgttgcaacagctccaactccagcgagtgcattaccacaaggtgtcaatgctcactttcagccccagcaaagaattgtcgtcgatggaagaagttgtgtctctccccgacctactccaggccaagcaaagggcaatcgacctccggagggcgataccaagcagaagaccgttattcgcctcaaccagcaatcagaaggaaacttctcctgtgaatgatagcaatatgcagtcctatcacatcatcacagaaccaatcaaggatgcagtcactagaacagagacctagggtctcatttcagaggaactatgttcgacaggcataggctggggtcctaaagtaagacgcggcttctgattactcccctgttgtgctttgaagtgagcaatccggcgtttcttctgctccatgcgattgtatttgtcctcctgacgaatagccttatccactaacttctggaaatcatgataatctccagtcatgagtgggtaagaaagttcatcattaagtccttccaagaacttctcttgacgctcttcatcattgcgcacatcttccggagcataacgagcaagacgattgaactcgtgcagatactccgtaacagagcgagatccctgagtaagcgacctgaattccttctttttgagagacaccactcccgatggtatatgcgtcttccggaaagcagcggtgaactcaagccaagtgataggttcagcagtagtcctgttaaggcggaagtgatcccaccattcagaggcagggccatgcaactggtgtgatgcaaatgagaccttctcctgatcagtgcactaaagtaaatccaacttcttctctatggcatgcagccaatcaccagcttcaacaggattagtggtactagagaaaataggcggcctcacacgaagaaattctgctaacttattctgaggaggtacatggttatttccttggttctgctgattctgaagttgttgcatcatcatgttcattagctgtgtctgttgagcaagaacttgagcaagagtgggattctctccattgttgttattggggttgttgggaccattcccgttgctgcgagtattcaccatctggcagggcacaagaagagaaaccaggggaaaaagctactctagttcttccaagcatcggaggtcgattgaaggctcatttggctcgtcttcatcatcttgagttgctacccactcaatcttggaattgttgcgcttggattcttcttcttcatcatcacttatgatcatgaccggaggatccgctagggttggggcaacttctttctccaccacacgaacctttggcgccaattgataacgagggacaaatagagctctcttccttgcggtaagacgaatcctggccttctgcggcggtgcttctcccttcaatgcggctaattccttttccaaacgatccaccttgtcttctagcttacaaatcttaccacgattccgatcttcacgatcttgagctgctaacacagtctctgcacggctttcatccctagcccacaacatctcaaccaaatgccttgtggtagcatcattctcaattccttcagtctcaaggtaactgccacgatcacttccctgaggttgacgaggatggtagcgatactcagtgtcggccaactgatcactgtagcgatcacggagccctcctatggcgatccttgccacttcctgacatgcatggatgtagtttcttcctccagcttcgaacatcactgaggggatatcttcactattgctgttcaaggtgactttgattcggcacttctcttcatgacgatcatgaggaatctgggcataaaaaggggcagtcccaaatccaatgacaaaggacatcgtacgcaactcctggacaaaaccctcaacaccaaacaagtactcaggcttgtagcgcggcat

SEQ ID NO: 23422 - DNA, 2745 bp, Oryza sativa
  Clone ID: TF_OsC359_6375
aaatgattttaggctgggctcggggtgcatggttttgctagtagcacctcggccacataaggaccggtcttcgggcctctgttgaaaagcactaccgtacttccacatgtctagtgggtaaggcttagtttgtggctcagtctggttataaacaaaagtacacggatggagatggacgaagtcgggggtcgatggacatctgtcccggaggttccggccgtaggtggggttgggtcggtactcttgtctatggctaggatgggttggaaactatgtcatgtcttccgtccatatgccgtggtgaataagcctaacatacatcataacagcaaaagacttagatctgttaaggtcctatccttagtttctaatctgtctctcccctttgttttccctctctccctctccaaacctttgcaacagatggctgacaatgagaaaggcaataaggtcagaagtcaggacattggtacctcaagctcccgagtgaatgaagcaccagacaccagttgtgtgacactggtccaacacctgattaaccagaaccgattgcttatagagatactacagcagcatcagacgccaattctgaacctgagtcaaatacaacctcaagtgcagttggaggcagtccaagcactcacaccacaagtcagcatgccgccagcatcccgaaggacccatggtgacgtgccacatgttgactcaaaagaagcaagtatcatttgttttatgtgtgatgagcaagggcactatgcaagggagtgtcctcagcagaaaagaaaaacaccaatgcgaaccgaagatgaagtccgtaagatgatcattaccagcatagaatggcctccaccaggaatgacaaaacgtcagagaagaaataccttccgaggtgcaccacagttgacagagcatcttttagctaatggaggtagggtgtctgatagtgaagattcagatcaagtctcctcagatgatgaagatgagaagtctccccaaggtttcaaccagaataaaatggaacgaaaggcatgctctcgttgtggagaaatcggtcatgttgccagctcgtgtgccactacatgcgttcattgtgaggaagaccatccacccgacaggtgcccaacgagcaggatcacttgtttcttttgtgaaggaactgatcatgtaccaaaagattgtcaattcagttttctgctgacgaagaagatggccaaccaacccgccagttccaacggagagaagcatcaaggcaacacaaatcctcgtcaagattacagttttagcctaactccagtgccaggacagaggaatcaaaatgagaaaagaaaatgccgagtccggaaagatatttgttgcttcaattgtcaaggaatgggtcatttcgccgacaagtgcccaaaaccgagaaacatagctgccagcacctcagtccacgcaactccctgcaatcagaagcttgctcctcagcgaattgtcatccatgcatcccgaagcagtcctatagcccccgttgcaacagctccaactccagcgagtgcattaccacaaggtgtcaatgctcaacttcagccccagccaccagttgacaacacagaggccagtatcggcattgtacctttggatgttccagcacagcagccaagaaatcaaaattggaacaacccagcaggggcaaccaacgttcaagtacctacagtccagcaacagtgcaagttatcagaatttctaaaaactgagactccaacctttgccattgccgtcgatcctatggaagccagtgattggttgcgcacagtcgagaagaagctggggttggttcagtgcacagaccaggagcgggttgtcttcgcaactcatcagttgatatcacatgttcccgcaggaatgatcacactgagaaaacgagagttccgctacctgaatcaagaagatttgaccgtcacagagtacctgcacgagttccatcgtttggctcactatgcaccggaagatgtggaaaatgatgaagacaaacaagagaagtttctccaggcgttaaaagatgagatcgcagtgcaactactcctagaggaatatgaagattttgagaaacttgtggacaaagccatacaactcgaaagtgagcataatcggatgaagaactgtaagaggaggattgtcagcatcccagtatcttcatgtggtaaccaaagacagcgcactgagccacttcagatcatcggatcttctgttgcacatcaagagtttccgccccaagaagatggacacaatgcagacaacaacattagcaatactaatgatgatgataccaccaacaaccatgctccatgccccattagtgaccactcaaaccaagcgtgcaatgtcaacatcattcaccaaggtgtcgacgatagtatcgatgatggcacccaaaatgacaaccctagcaattgtgactctgagaaagactccaatggtgatagcaactatggtaccactgatgccaatgttagcaaggatttccaaccaccaattccaactccaagtcagaatgatcgtccccagacggatagctcagcaaagaagacgttgatttgctacaattgcaaagaaccaaggcattactcgagggactgcctgcaaccaaggcaaagtcgacctccacattaccgccaagttacacaaagcagacatcccaatcgtattgtggtcactggagcaaacaccgtacccgtgaggcctcgtgttaatcagaacccatag

SEQ ID NO: 23423 - DNA, 6150 bp, Oryza sativa; identical to SEQ ID NO: 15595
  Clone ID: TF_OsC359_6999

SEQ ID NO: 23424 - DNA, 484 bp, Oryza sativa
  Clone ID: TF_LIB3434-029-P1-K1-D7
aatgagtccatcaaggagcaggagcaacagcaggagcagaagcagaagcagaagcgggagcaagagcaagagcaagagcaagagcaggagtcgcagcaggagcaggagccgaagccgaagccctcggcgagaaaggctgcgtagtgagcgtgtatcacgtcgcagccgcagccgcagccgtagccgtagcccaattcgtagaagagaacatcgcggccacagggatcttatatgcaagaattgcaggaggcctggtcactttgctagggattgccaatctactgctacatgcaacagatgcaatcttccaggacacttcgcagcagaatgcacttctgaaactgtttgttggaactgcaagcagtctggccacattgctaccgaatgcaagaatgacgccctgtgtcacacctgcagcaagacaggtcatctggcacgtgattgcccaagttcaggatctagtaagctatgcaacaaatgtttt

SEQ ID NO: 23425 - DNA, 1036 bp, Oryza sativa
  Clone ID: TF_OsC103556_1
atggagcaggtctgccgctgttacaatgagtccatcaaggagcaggagcaacagcaggagcagaagcagaagcagaagcgggagcaagagcaagagcaagagcaagagcaggagtcgcagcaggagcaggagccgaagccgaagccctcggcgagaaaggctgcgtattgttctgccaatcccccagacttgacccacctcaacccccaagggatcttatatgcaagaattgcaggaggcctggtcactttgctagggattgccaatctactgctacatgcaacagatgcaatcttccaggacacttcgcagcagaatgcacttctgaaactgtttgttggaactgcaagcagtctggccacattgctaccgaatgcaagaatgacgccctgtgtcacacctgcagcaagacaggtcatctggcacgtgattgcccaagttcaggatctacctgggcacatagctcgggagtgcacgaacgagcctgtttgcaacctgtgcaatgtctctgggcatcttgctcggaactgtcaaaaaacgaccatttcttcagagatacagggcggccctttccgtgacattacctgccgcttgtgtggcaagccagggcacatcagccgcaactgcatgacaaccatgatctgtggcacctgcggtgggaggggtcatatgtcatatgagtgcccatctgcaaggatgtttgatcgtgggctccgcaggttctgatgacagccatccatacgcactgctggttctgatgctcggaatttcgcattgttccattgattctgcttagatagcttgcttgactataccgaaacggttcttttataccttttgctctctgggagttgaggaatgattctgtaggatgtatttgggtgaaacttttgcttgtgttaatcagggtgttgtagcctttcgtgggggaacaaatgatgtatcttcccaagagagacatccagaaaaactgctttggtagaccaggccatatcaagtattgtgcatgactgtttgagctaaaaaaaaaaaaaaa

SEQ ID NO: 23426 - DNA, 2380 bp, Oryza sativa; identical to SEQ ID NO: 15533
  Clone ID: TF_OsC1713_4732

SEQ ID NO: 23427 - DNA, 2409 bp, Oryza sativa; identical to SEQ ID NO: 15529
  Clone ID: TF_OsC359_5625

SEQ ID NO: 23428 - DNA, 1948 bp, Oryza sativa
  Clone ID: TF_OsC359_6528
cctagctcgctccctcctccaaatccgcctcattcaaaccggggattccaaaattaagtggggggttttttctcccccctccagtaagagaagcttttgagaagaggtcttaggtggagtcctggcttataccccagttgagcgcctgtgaagatggagccataggcccgctagtccgctgctgtttatttttgattgtcaggccttaagtgcctttgtaataacgtaaatattatcgaccccgtgacacagccggaggagaggacgacgctgcgacgtcgacggaggagacagcgacgtcggtcggtgctcgggcacggcggaaggggctgccggaggtggtgcagtggcagcaacgccactgtttaccggcgaggacgcgtctccgatggtttccccacgaaacagaggcgacgtcggggaagaggatgcacttgacttatccctggttgcacctctagctgacttcgactgggttgcggcacttgaagatggggcttcagttcgagaacttctcatagttcatatcttgggtgtcaactttctcaaccaagtactcttcactctgagagttgtggatgcttctggtggcaatgtggtccttgggcttgctgcctttcagagaaacaggtatggcgtttgctccagtgaccacaaggcgagtgacttgtcttcttcttgcataatgcccggagtgatggcgcaggttacgcttcggttgtggacaatctctagagaaatgacctggttctttgcagttgtaacaaatcaacttcttctttactgagctgtccgtctgggaacgatcattctgacttggagttggaattggtggttggaaatccttgctaacattggcatcagtggtaccatagttgctatcaccattggattctttctcagagtcacaattgctagggttgtcattctgggtgccttcattgatactatcgtcgacatcttggtgaatgttgttgacattgcacgcttgattcgagtggtcactaatggggcaagaaccatggttggtggtggtatcatcatcattagtattgctaatgttgttgtctgcattgtatccatcttcttggggcaggaactcttgatgcgcaacagaagatccggtgatctgaagtggctcagttcgctgtctttggttaccacatggaattactgggatgttgacaatccttctcttgcagttcttcatctgattatgctcactttcgagttgtatggctttgtccagaagtttctcaaaatcttcataatcctctaggagtagttgcactgcaagctcatcttttaacccctggagaaacttctcttgtttatcttcatccgtttccacatcttctggtgcatagtgagccaaacgatggaactcgtgcaggtactctatgacggtcaaatattcttgctttaggtagcggaactctcattttcttagtgtgatcattcctgcgggaacatgtgatctcttgaatacagctaaaaactcgtcccaagtgatggtatgtccttctggccgtgatacttcgtagctatcccaccattctgaagctagcccaaccaactgatgagttgcgaagacaacccgctcctggtctgtgcactgaatcaaccccagattcttctcgactgtgcgcaaccaatcattggcttccataggatcgacggcaatggcaaaggttggaggcccagttttgagaaattctgataacttgcactgttgctggactataggtacttgaacgttggttgcccatgctgggttgttccgattctgtaatagttgaaatgctgttgccaacatgttggtttggttaaccacaatttggattagctatggtaaggtttcgttgatgcttttctcattcccattggcttgggttcttgagtcatcggatccatcattcccatagcctttgttaccagtgttatccat

SEQ ID NO: 23429 - DNA, 2018 bp, Oryza sativa
  Clone ID: TF_OsC359_6849
atggataacactggtaacaaaggctatgggaatgatggatccgatgactcaagaacccaagccaatgggaatgagaaaagcatcaacgaaacctcacccgagctaatccaaattgtggttaaccaaaccaacatgttggcaacagcctttcaactattacagaatcggaacaacccagcaggggcaaccaacgttcaagtacctacagtccagcaacaatgcaagttatcagaatttctcaaaacggggcctccaacctttgccatggccgtcgatcctatggaagctagtgattggttgcgcacagtcgagaagaagctagggttgattcagtgcaccgaccaggagcgggttggcttcgcaactcatcagttggttgaaccggcttcagagtggtgggatagctacgaagcatcacggccagaaggacataccatcacctggaacgagttttcatctgtattcaagagatcacatgttcccgcaggaatgatcacactaagaaaacgagagttccgctacctgaagcaaggagatttgaccgtcacagagtacctgcacgagttctatcgtttggctcactatgcaccagaagatgtggaaacggatgaagacaaacaagagaagtttctccaggggttaaaagatgagcttgcagtgcaactacttctagaggattatgaagattttgagaaacttgtggacaaagccatgcaactcgaaagtgagcataatcggatgacgaactgcaagagaaggattgtcaacatcccagtatttccaggtggtaaccaaagacagcgcactgagccacttcagatcaccggatcttctgttgcgcatcaagagtttccgccccaagaagatggacgcaatgcagacaacaacactagcaatactaatgatgatgataccaccaacaaccatggttcttgccccattagtgaccactcgaataaagcgtgccatgtcagtagcattcaccaagatgtcaacgatagtatcaatgatggcacccaaaatgacaaccctagtaattgggactctgggaaggactccaatggtgatagcaataatggtaccactgatgccaatgttagcaaggattcccaaccaccaattccaactccaagtcaaaatgatcgtccccagatggacagctcagtaaagaagacgttgatttgttacaactgcaaagaaccaggtcatttctctagagattgtccacagccgaagcgtaacctgcgccatcactccggccattatgcaagaagaagacaggtcactcgccttgtggtcactggagcaaacgccgtacctgtttcactgaaaggcagcaagccaaaggacctcatcgtcaccagaagcatccacaactctcggagtgaagagtacctggtggacaaagttgacgccaaagatatgaattatgagaagttctggaactgaagtcccatcttcaagtgccacaatccagtcgaagtcagctagaggtgcaaccagggaaaagtcaggtgaagagaagattccatctataacaggagatcgagccaagcagtccagagtggagaagttttgctaggcaagtttgttatagaagacgcgacggaagaagtcagacaagaagagaagaccgcgcaacctatcttcttgctagccacctcgaatctcggggacgagattcttccctctccctcccgggctgcctctccctcctctcctcctgggccgcctccgggcccaagccgaggggcgccctcccgcccgtgccgcgcacgtgcgcgcgctgaccgcgcgcccgcgtggggcccacgtgccaggtcgtcttcctcctcccgcccggcctcctcctctctcctccgtgaaccctagccatttcctccctcaaatccgcgcgattcaaaccgggaattccaaaattgacgccaactccggccgctttccatggctgccggccgccatttccgccgccgttccccactcctcctgtgctcggctcgcttccccgggctgcagga

SEQ ID NO: 23430 - DNA, 1506 bp, Oryza sativa; identical to SEQ ID NO: 15536
  Clone ID: TF_OsC359_6888

SEQ ID NO: 23431 - DNA, 2575 bp, Oryza sativa
  Clone ID: TF_OsC359_7436
attttctcccccttcccaacattatataaacactccccgtgcctccctccaccgtttccgccactgaccgctctctctttcggcgggaatcaagctggcgcagtcgctctctctctcagcggtcacagccgagctccggtccgccgccgtcgtcgccccggaccttctcccgcttcggcgtcgccttcttcgggttcgccgcaacctcgccgacctcgtccacctctccgtttcggtcgccgactgccggaacgccgccgtgcccgtcgacccgagccgcgccgccgcctctctccgctccggtcgtcgtacccgtcgtcgccgtcgacccggggtgagccgtggaccgccgattcgtttcccccttccctcccctctctcgggcgccgctccgccgcgccggtggtcgccggcggcgaccatcggggcacgagtgcgccacctcccgtcggctgtgccggcgtggccgccttcgggcgcgtcccgcggctgccatgtggggcccggccgttagccgcccgcgccctcggatgcggctgacgcatgggacccacggcgccggccggtgtgagccgggtgcacccggtccaccgtggacccacctcggccatataaggaccggtcttcgggcctctgttgcaaagcactaccgtacttccacatgtctagtgggacaaatgaaggctacacgagctgcggcccggtagtcgagatgtcatggcacagggccggtgtcctgctgctaggggctcagtcctgcctgcctgtcccgagggttccagccgtaggtgggattgggtcgatgtacacctctgatcagagtataatctattcgaatagccgcgccctcggttatgggcaagccgagcaatgtacccaagtcagtgttttaattcttaaaatttgcttaacaactaaaatgtggaatggttggcctcggttggcttgggacgagctgtgacccagggtcgggttgccagttcggtctgaatcatcgtaggccttgggttaaggcagtactagatggccagctttgcgaagaagaagatgtcgccaattgtttgccgaagctccggaagactggaggatccgcttcagaagtgcaggaagcagtgaagccagctgtgaaggaaacaaaaagagttagttcctttaaggtcttatccctagttctggtctattctttccttgtatgcttcccctctcaatctctaccttgtgacagatggataacactggtaacaaaggctatgggaatgatggatccgatgactcaagaacccaagccaatgggaatgagaaaagcatcaacgaaacctcaccagagctaatccaaattgtggttaaccaaaccaacatgttggcaacagcctttcaactattacagaatcggaacaacccagcaggggcaaccaacgttcaagtacctacagtccagcaacagtgcaagttatcagaatttctcaaaacggggcctccaacctttgccatggccgtcgatcctatggaagccagtgattggttgcgcacagtcgagaagaagctagggttgattcagtgcaccgaccaggagcgggttggcttcgcaactcatcagttggttggaccggcttcagagtggtgggatagctacgaagcatcacggccagaaggacataccatcacctggaacgagttttcatctgaattcaggagatcacatgttcccgcaggaatgatcacactaagaaaacgagagtttcgctacctgaagcaaggagatttgaccgtcacagagtacctgcatgagttctatcgtttggctcactatgcaccagaagatgtggaaacggatgaagacaaacaagagaagtttctccaggggttaaaagatgagcttgcagtgcaactacttctagaggattatgaagattttgagaaacttgtggacaaagccatgcaactcgaaagtgagcataatcggatgacgaactgcaagagaaggattgtcaacatcccagtatttccaggtggtaaccaaagacagcgcactgagccacttcagatcaccggatcttctgttgtgcatcaagagttcctgccccaagaagatgaacacaatgcagacaacaacactagcaatactaatgatgatgataccaccaacaaccatggttcttgccccattagtgaccactcgaataaagcgtgcaatgtcagtagcattcaccaagatgtcaacgatagtatcaatgttggaacccagaatgacaaccttagcaatttcgacactgagaaagactccaatggtgatagcaactatggtaccactgatgccaatgttagcaaggattcccaaccaccaattccaactccaagtcaaaatgatcgtccccagatggacagctcagtaaagaagacgttgatttgttacaactgcaaagaaccaggtcatttctctagagattgtccacagccgaagcgtaacctgcgccatcactccggccattatgcaagaagaagacaagtcactcgccttgtggtcactggagcaaacgctgtacctgtgaggcctcatgttaattctaacccatag

SEQ ID NO: 23432 - DNA, 1943 bp, Oryza sativa
  Clone ID: TF_OsC359_7475
atggataatactggtaacaaaggctatgggaatgatggatccgatgactcaagaacccaagccaatgggaatgagagaagcatcaacgaaacctcaccagagctaatccaaattgtggttaaccaaaccaacatgttggcaacagcctttcaactattacagaattggaacaacccagcaggggcaaccaacgttcaagtacctacagtccagcaacagtgcaagttatcagaatttctcaaaacggggcctccaacctttgccatggccgtcgatcctatggaagccagtgattggttgcgcacagtcgagaagaagctagggttgattcagtgcaccgaccaggagcgggttggcttcgcaactcatcagttggttggaccagcttcagagtggtgggatagctacgaagcatcacggccagaaggacataccatcacctggaacgagttttcctctgtattcaggagatcacatgttcccgcaggaatgatcacactaagaaaacgagagtttcgctacctgaagcaaggagatttgaccgtcacagagtacctgcacgagttctatcgtttggctcactatgcaccagaagatgtggaaacggatgaagacaaacaagagaagtttctccaggggttaaaagatgagcttgcagtgcaactacttctagaggattatgaagattttgagaaacttgtggacaaagccatgcaactcgaaagtgagcataatcggatgacgaactgcaagagaaggattgtcaacatcccagtaattccaggtggtaaccaaagacagcgcactgagccacttcagatcaccggatcttctgttgtgtatcaagagttcctgccccaagaagatgaacgcaatgcagacaacaacactagcaatactaatgctgatgataccaccaacaaccatggttcttgccccattagcgaccactcgaacaaagcgtgcaatgtcagtagcattcaccaagatgtcaacgatagtatcaatgttggaacccagaatgacaaccttagcaattttgactctgagaaagactccaatggtgatagcaataatggcaccactgatgccaatgttagcaaggatttccaaccaccaattccaactcctagtcagaacgatcgttcccagacggacaactcagcaaagaagacgttgatttgttacaactgcaaagaaccaggtcatttctccagagattgtccacagccgaagcgtaacctgcgtcatcactccggccattatgcaagaagaagacaagtcactcgccttgtggtcactggagcaaacgccgtacctgtttcacggaaaggcagcaagccaaaggacctcatcgtcaccagaagcatccacaactctcggagtgaagagtacttggttgacaaagttgactccaaagatatgaactatgcaaagttctggaactgaagccccatcttcaagtgccgcaacccagtcaaagtcagctaaaggttcaaccagggacaagtcagtctcttcctcctttgggccaagcccagcccaaaaatctccctttcctccctctttttctctccctctccttctctccctccttctcttgggctcccctttccctcggcccactccctcctccctctctctcccgggctgcctttcccccccctcttccctcccggcctgctcggcccaggccgctgtcacgtcctgataaattcatcccgaaaataaaaatcatcttctaaaaggaataatagaattaattaaaattcgaaaagaaattggcaaacactaaaatacgtacaaaaaaaattcaaatgtgacccggagaatttttgttaaattctccttggtctaaaaggagccctcaaattttaatggaattttcagagcacaaataataattgaaagaaataaacaaagttgaaaaggtttataaaaag

SEQ ID NO: 23433 - DNA, 1422 bp, Oryza sativa
  Clone ID: TF_OsC359_7477
atgtcatggcagagggttggtgccctgctgctaggggctcagtctcgcctgcctgtcccgggggttccggccgtaggcgggattgggtcggtactcttgtctatggctaggatgggttggaaactatgtcacgtcttccgtctgtataccgtggtgatggataatcctggtaaccaaggctatgggaatgatggatccgatgactcaagaacccaagccaatgggaatgagagaagcatcaacgcaacctcaccagagctaatccaagttgtggttaaccaaaccaacatgttggcaacagcctttcaactattacagaattggaacaacccagcaggggcaaccaacgttcaagtgcctacagtccagcaacagtgcaagttatcagaatttctcaaaactgagcctccaacctttgccattgccgtcgatcctatggaagccagtgagtggttgcgcaccatcgagaagaagctagggttgattcagtgcaccgaccaggagcgggttggcttcgcaactcatcagctggttggaccggcttcagagtggtgggatagctacgaagcatcacggccagaaggacataccatcacctggaacgagttttcatctgtattcaggagatcacatgttcccgcaggaatgatcacactaagaaaacgagagtttcgctacctgaagcaaggggatttgaccgtcacagagtacctgcacgagttctatcgtttggctcgccatgcaccagaagatgtggaaacggatgaagaaaaacaagagaagtttctccaggggttaaaagatgagcttgcagtgcaactactcctagaggattatgaaaattttgagaaacttgtggacaaagccatgcaacttgaaagtgagcataatcggatgacgaactgcaagagaaggattgtcaacatcccagtatttccaggtggtaaccaaagacagcgcactgagccacttcagatcatcggatcttctgttgggtatcacgagttcctgccccaagaagatgaacgcaatgtagacaacaacaacatcattcaccaagatatcgacgatagtatcaatgaaggcacccagaatggcaaccctagcaattttgactctgagaaagactccaagggtgatagcaataatggtaccactgatgccaatgttagcaaggatttccaaccaccaattccaactcctagtcaggacgatcgttcccaggcggacaactcagcaaagaagacgttgatttgttacaactgcaaagaaccaggtcatttctcgagagattgtccacagccgaagcgtaacctgcgtcatcactccggccattatgcaagaagaagacaagtcactcgccttgtggtcactggagcaaacgtcatacctgtgaggcctcgtgttaatcataacccatag

SEQ ID NO: 23434 - DNA, 1650 bp, Oryza sativa; identical to SEQ ID NO: 15525
  Clone ID: TF_OsC359_7569

SEQ ID NO: 23435 - DNA, 2426 bp, Oryza sativa
  Clone ID: TF_OsC359_7686
ccgccgccgctccggacttcctcccgactcggcgacccctccatccgcttcgccgtgttgccgccgaccccgtccgccgctccgcttcgcccgcagaccgtcggagcgccgtcgccatcgtcatcccgagccgcgccgccgtcttcttccgctccgtccgccattctcgtcgtcgtcgttgtcccggggtgagctgtggaccgtccccttcgtttcccccttccctcctctctctcgggtgccactccgccgcgccgttggtcgccggcggcgaccatcggggcgcgggtgcgcgccgctcccgtcggccgcgccggcgaggccgccctcgggcgcgccctcgcggctgccaagtgggcccggccgtcagccgcccgcgcccgtgggtgcggctgacgcgcgggacccacggggccgaccgccgccagccgcgtgcgcccggtccaccgtggacccaccccggccactataaggattaagctcgggcctctgttgcaaagcactaccgtacttccacatgtctaatggggcaaatgaaggctacacgagctgcggcccggtagtcgagatgtcatacggcggagggttggtgcccaatgctaggggctcagttctgcctgcctgtcccgggtatcccggccgtaggtaggattgggtcggtactcttgtctaaggctaggatgggttggaaactatgtcacatctttacgacgggttccaaggccatggatagtactggtaacaaaggctatgggaatgatggatccgatgactcaagaacccaagccaatgggaatgagaaaagcatcaacgaaacctcaccagagctaatccaagttgtggttaaccaaaccaacatgttggcaacagcctttcaactattacagaatcggaacaacccagcaggggcaaccgacgttcaagtacctacagtccagcaacagtgcaagttatcagaatttctcaaaacggggcctccaacctttgccatggccgtcgatcctatggaagccagtgattggttgcgcacagtcgagaagaagctagggttgattcagtgcaccgaccaggagcgggttggcttcgcaactcatcagctggttggaccggcttcagagtggtgggatagctacgaagcatcacggccagaaggacataccatcacctggaacgagttttcatctgtattccggagatcacatgttcccgccggaatgatcacactaagaaaacgagagtttcgctacctgaagcaaggagatttgaccgtcacagagtacctgcatgagttctatcgttcggctcactatgcaccagaagatgtggaaacggatgaagacaaacaagagaagttcctccaggggttaaaagatgagctcgcagtgcaactacttttagaggattatgaagattttgagaaacttgtggacaaagccatgcaactcgaaagtgagcatagtcggatgacgaactgcaagagaaggatggttaacaacccagtatttccaggtggcaaccaaagacagcgcactgagccacttcagatcaccggatcttctgttgtgtatcaagagttcctgccccaaggagatgaacgcaacgcagacaaccacaatagcaatactaatgctgatgataccaccaacaaccatggttctggccccattagtgaccactcgaataaagcgtgcaatgtcagtagcattcaccaagatgtcaacgatagtatcaatgttggaacccagaatgacaaccttagcaattttgactctgagaaagactccaatggtgatagcaactatggtaccactgatgccaatgttagcaaggatttccaaccgccaattccaactccacgtcacaatgatcatccccagatggacagctcagcaaagaagacgttgatttgttacaactgcaaagaaccaggtcatttctctagagattgtccacagccgaagcgtaacctgcgccatcactccggccattatgcaagaagaagacaggtcactcgccttgtggtcactggagcaaacgccgtacctgtttcactgaaaggtagcagaccaaaggacctcatcgccaccagaagcatccacaactctcggagtgaagagtacttagtgaccaaggttgactccaaagatatgaactatgcaaagttctggaactgaagccccatcttcaagtgccgcaacccagtcgaagtcagctaaaggttcaaccagggacaagtcaggtgaagagaagattccatctgcaacaggagatcgagccaagcagtccagagtgaagaagttttgttaggcaagtttgttatagaagacagagcctcctccctctctttctctccctctccttctctccctcctcttgggcctcctcccctctcggcccagctccatttccccccctctctctcccgg

SEQ ID NO: 23436 - DNA, 3400 bp, Oryza sativa
  Clone ID: TF_OsC359_7766
atggagagctcaccggcgtgcgatggaaacggcgcttcggcgacgtttggcggcaagcgagcggcggccgaggtagctctagctgcggcggcggttgcgcggcgcggcggcgagcctagcagcgacggcgtgcggccgaaggtcggcagcgggcggcggaggcaagaaaaaggggaaacttcagggcgtgacaagaagccttccatgagcccaccaccctcttgcctcaccttcctcggctccggcctactccgactcagctccctcttcctcaccgcgcgccatctccttgccgccaacagctacgccagtcacctcgtctgcgtcgatgatccttgcaccgaccaggagcgggttggcttcgcaactcatcagctggttggaccggcttcagagtggtgggatagctacgaagcatcacggccagaaggacataccatcacctggaacgagttttcatctgtattccggagatcacatgttcccgccggaatgatcacactaagaaaacgagagtttcgctacctgaagcaaggagatttgaccgtcacagagtacctgcatgagttctatcgttcggctcactatgcaccagaagatgtggaaacggatgaagacaaacaagagaagttcctccaggggttaaaagatgagctcgcagtgcaactacttttagaggattatgaagattttgagaaacttgtggacaaagccatgcaactcgaaagtgagcatagtcggatgacgaactgcaagagaaggatggttaacaacccagtatttccaggtggcaaccaaagacagcgcactgagccacttcagatcaccggatcttctgttgtgtatcaagagttcctgccccaaggagatgaacgcaacgcagacaaccacaatagcaatactaatgctgatgataccaccaacaaccatggttctggccccattagtgaccactcgaataaagcgtgcaatgtcagtagcattcaccaagatgtcaacgatagtatcaatgttggaacccagaatgacaaccttagcaattttgactctgagaaagactccaatggtgatagcaactatggtaccactgatgccaatgttagcaaggatttccaaccgccaattccaactccacgtcacaatgatcatccccagatggacagctcagcaaagaagacgttgatttgttacaactgcaaagaaccaggtcatttctctagagattgtccacagccgaagcgtaacctgcgccatcactccggccattatgcaagaagaagacagcatcgccgccacctcctccacgccggcctgccctccgtttcgcgaggagacccccggaactacgttcccgccgtcgccctcccctttccctcgcgccggccacctccagccgccttcctctcctcgcccgaacgccgcccggccgcgccgtcttctccctcggcctcgcagctgccccctctccctcggtcagccctccgtttcgcggggaaatcaccggagacgcgccctcgccggcgtccagtggcgtcgccaccacttctccgcctccggccgcctctgccacgtccccggagcgccggccgacgtcgccaccaccttcctcggctccacgacgccgctctcatccccggcatcacctccgcctcgcccgaacttcgccggaacaccgtcgcccgcgccggtttctccttcctcctcggcggcatctcctccggctgccccggtcgccgcgccagagcgtcggccgacgtcgccgtctcctccctcggcgtcgccgcatcgccctccaccccggcctgccctcggtttcgccggaacgtcgccgcgaacctctccgtccgcctcaccggagttgttcggccgcccgtccctcctcgccgtgcatcggtcggccacctccaccaccatcttcggcatcgcagcggcaaggtcgtcctcggcatcgtttcccctccatccaaacccctccgcggtccatcatcgtcgtctccgatcgttctcgtcgtcgacgtcccgttcatcctcgctcggctcgtcgtctcgcggcgccgcctccgtcatcgtcatcgctgcggcgtgttccgcgtcgtccccgtctctgtgcagccactgccggctgccctcgtcgccccctcgccggtcccggtcgtcgtcgtcgtcgtcgtcctctcgtcgttcccggtcgctgcagcccccgtcatcgtcttcgtcctcgcctccgcgtcgtcaagcctcgtgccggccgcgtctcgccttcgtccaaggatcgccgccgaagccgtcccctcgccgttcgtctccgttgtgcccgtctgtctccgccgcgcccgttcgtcgttgtcgttcccgcgcctcgtcgcgtggtggtaaggatccgtcctctcgcttccccgccctcgtcctctcggtgtcgccccgtacccgttgtgcggtcgtcgaccccggtacccgtgtaccggtgtcggtagtcgttcacgtgtgctggagtccgtttgtcggccactcgcctcggttgacacacggggtccgcttccgtcgacccgtggaccgtctctgtgtacccggtctaccgtggtcctttaggttgacatgtggggcttgtagctttgcttgtgtgcttcgcgtagcttctgtcgttccggaggttcccgaagcgtggttcgtggtcgtcgccgtaggttcggaaggccgttctctctcgggtactataaggattaagctcgggcctctgttgcaaagcactaccgtacttccacatgtctagtgggtaaggcttagtttgtggctcagtctcgcgtacccccaccaccctctcctcgtcagcacaaaggagagcccgtcggtcagccttgacatcgaggcgatcgacagctccaacgttgtcaaggccctcgggcagccgaaggcacggcgacgactcgtcaggagtgtcgcgcctctccgcgcgagacgcccgctccccgcgaccattcccggtgggaccgggtgcaaggccttcgtggtgagtctccggaatgtccggtggcccccgaagttccgccccaacctcaccgagaaatatgatggcagcatcaacccctccgagttcctccagatctataccacgatcatcatggcagcagggggtgatgaccgggtcatggcgaattactttcccatggcccttaagggtcaggcgtgcggctggctcatgacccaaccccccgactccatctactcctgggaggacctttgccagcagttcgttacgaacttccaaggcacgaaccagcccaggaaaggaggcagatctgcacgctgtgcagcggaaggatgacgagtccctccgctcatacatacagcgtttctgccaggtccgcaacaccatcccctgcataccggcccatgcggtcat

SEQ ID NO: 23437 - DNA, 2019 bp, Oryza sativa
  Clone ID: TF_OsC359_7894
atggataatactggtaacaaaggctatgggaatgatggatccgatgactcaagaacccaagccaatgggaatgagaaaagcatcaacgaaacctcaccagagctaatccaaattgtggttaaccaaaccaacatgttggcaacagcctttcaactattacagaatcggaacaacccagcaggggcaaccaacgttcaagtacctacagtccagcaacagtgcaagttatccgaatttctcaaaacggggcctccaacctttgccattgccgtcgatcctatggaagccagtgattggttgcgcacaatcgagaagaagctagggttgattcagtgcaccgaccaggagcgggttggcttcgcagctcatcagttggttggaccggcttcagagtggtggtatagctacgaagcatcacggccagaaggacataccatcacctggaacgagttttcatctgtattcaagagatcacatgttcccgcaggaatggtcacactaagaaaacaagagtttcgctacctgaagcaaggagatttgaccgtcacagagtacctgcatgaattctatcgtttggctcactatgcaccagaagatgtggaaacggatgaagacaaacaagagaagtttctccaggggttaaaagatgagcttgcagtgcaactacttctagaggattatgaagattttgagaaacttgtggacaaaaccatgaaactcgaaagtgagcataatcggaggacgaactgcaagagaaggattgtcaacatcccagtatttccaggtggtaaccaaagacagcgcactgagccacttcagatcaccggatcttctgttgcgcatcaagagtttccgccccaagaagatggacgcaatgcagacaacaacactagcaatactaatgatgatgataccaccaacaaccatggttcttgccccattagtgaccactcgaataaagcgtgcaatgtcagtagcattcaccaagatgtcaacgatagtatcaatgttggaaaccagaatgacaaccttagcaattttgactctgagaaagactccaatggtgatagcaactatggtaccactgatgccaatgttagcaaggatttccaaccaccaattccaactccaagtcacaatgatcgtccccagatggacagctcagtaaagaagacgttgatttgttacaactgcaaagaaccaggtcatttctctagagattgtccacagccgaagcgtaacctgcgccatcactccggccattatgcaagaagaagacgagtcactcgccttgtggtcactggagcaaacgccgtacctgtttcactgaaaggcagcaagccaaaggacctcatcgtcaccagaagcatccacaactctcggagtgaagagtacttgtatgaggttgacgccaaagatatgaattatgagaagttctggaactgaagtcccatcttcaagtgccacaatccagtcgaagtcagcaagaggtgcaaccagggaaaagtcaggtgaagagaagattccatctgcaacaggagattgagccaagcagtccagagtggagaagttttgcgtctcctcgccggaaactcgccggaacggtgcccccgccggcaaccagtggcattggtgccactgtactccctccagccggctgctgttcatcgccggtgcgccgatcgacgccgccgtctcctccttcgacaccgcggcatcgccttcttccccggcatcacctcctcctcgcccgaatttcgccggaacgccgtcgcccgcgccggcctcaccttcctcctcgtcgacatctcctccggctgccccggtcgccgcgccagagcgtcggccgacgtcgccgtctcctccctcggcgacgccgcatcgccctccaccccggcctgccctcggtttcgccggaacgtcgccgcgaacctctccgtccgcctcgccggagttgttcggccgcccgtccctcctcgccgtgtaccggtcggccacctccaccaccatcttcggcat

SEQ ID NO: 23438 - DNA, 2434 bp, Oryza sativa
  Clone ID: TF_OsC359_7944
ccgacaccggtacatgggtaccggggtcgacaaccgcacaacgggtacgggggacaccgaaaggacgaggacggggcagcgagggagagggaaccttaccaccacgcgacgaggcgtgggaacgacaacgacgaacgggcgcggcggagacagacgggcacaacggagacgaacggcgaggggacggcttcggcggcgatccttggacgaaggcgagacgcggccggcacgaggcttgacgacgcggagccgaggacgaagacgaggacggggctgcagcggttcgcttgacgaacgcggacgacggacgagaacggctcgacggagggacgaacgccacgacgaccgggaacgacgagaggacgacgacggcgacgaccggggccggcgaggaggcgatgagggctgccggcagcggctgcacggaggcgaggatggcgcggaccacgccgctgcgatgccgacgacggaggcggcgccgcgagacgatgagccaggcgaccgacgtgacgtcgatcggcgaggacgaacggtgacgaggaaacgatgatggcaggcagcagcggctgagcggaggaggggacggcgtggaacgcgctgctgcgatgttggagaaggtggtggtgcagcggggcgacgagccgacgaggaggaatgggtggccgaaaggacgccggcgacgaagaggatggagaggccggcgcggcgacggtgttccggcgaaaccgaggagcagccggggtggagggcggcgtcgcggagccgagggaggtggtggcgacgtcggccggcgcacgggaaacgcgacagtggcggccggaggtggaacagtggcggcaacgccactgttttgccggcgagaacgcgtctccggtgctttccccgcgaaacggagggctgaccgagggagaggaggtggctgacttgaaccagggtgcaccttttagctgacttcgactgggttgtggcacttgaagatgggacttcagttccagaacttctcataattcatatctttggcgtcaactttgtcaactaagtactcttcactccgagagttgtggatgcttttggtgacgatgtggtacttgagcctgctgcctttcagagaaacaggtacggcgtttgctccagtgaccacaaggcgagtgacttgtcttcttcttgcataatggccggagtgatggcacaggttacgcttcggctgtggacaatctctagagaaatgacctggttctttgcagttgtaacaaatcaacgtcttctgtactgagctgtccatctggggacgatcattttgacttggagttggaattggtggttggaaatccttgctaacattggcatcagtggtaccatagttgctatcaccattggagtctttctcagtgtcaacattgctaaggttgtcattctgggttccaacattgatactatcgttgacatcttggtgaatgctactgacattgcacgctttgttcgagtggtcactaatggggcaagaaccatggttgttggtggtatcatcatcattagtattgctagtgttgttgtctgcattgcgtccatcttcttggggcgggaactcttgatgcacaacagaaggtccggtgatctgaagtggctcagtgcgctgtctttggttaccacatggaaatactgggatgttgacaatccttctcttgcagttcgtcatccgattatgctcactttcaagttgcatggctttgtccacgagtttctcaaaatttccataatcctctagaagtagttgcaccgcaagctcatcttttaacccctggagaaacttctcttgtttgtcttcatccgtttccacatcttctggtgcatagtgagccaaacgatagaactcgtgcaggtactctgtgacggtcaaatctccttgcttcaagtagcgaaactctcgttttcttagtgtgatcattcctgcgggaacatgtgatctcctgaatacagatgaaaactcgttccaggtgatggtatgtccttctggccgtgatgcttcgtagctatcccaccactctgaagccggtccaaccagctgatgagttgcgaagccaacccgctcctggtcggtgcactgaatcaaccctagcttcttctcgattgtgcgcaaccaatcactggcttccataggatcgacggcaatggcaaaggttggaggctcagttttgagaaattctgataacttgcactgttgctggactgtaggtacttgaacgttggttgcctctgctgggttgttccaattctgtaatagttgaaaggctgttgccaacatgttggtttggttaaccacaatttggattagctctggtgaggtttcgttgatgcttttctcattcccattggcttgggttcttgagtcatcggatccatcattcccatagcctttgttaccagtgttatccat

SEQ ID NO: 23439 - DNA, 2073 bp, Oryza sativa
  Clone ID: TF_OsC359_8145
gtcatatggcagagggttggtgccctgctgctaggggctcagttctgcctgcctgtcccgggtatcccggctgcaggtgggattgggtcggtactcttgtttatggctaggatgggttgggaactatgtcacgtcttccgtccgtataccgtggtgatggataacactggtaacaaaggctatgggaatgatggatccgatgactcaagaacccaagccaatgggaatgagaaaagcatcaacaaaacctcaccagagctaatccaaaaagtggttaaccaaaccaacatgttgacaacagcttttcaactattacagaattggaacaacccagcaggggcaaccaacgttcaagtacctacagtccagcaacagttcaagttatcagaatttctcaaaactgagcctccaacctttgccattgccgtcgatcctatggaagccagtgattggttgcgcacagtcgagaagaagctagggttgattcagtgcaccgaccaggagcgggttggcttcgcaactcatcagttggttggaccggcttcagagtggtgggatagctacgaagcatcacggccagaaggacataccatcacctggaacgagttttcatctgtattcaagagatcacatgttcccgcaggaatgatcacactaagaaaacgagagtttcgctacctgaagcaaggagatttgaccgtcacagagtacctgcacgagttctatcgtttggctcgctatgcaccagaagatgtggaaacggatgaagacaaacaagagaagtttctccaggggttaaaagatgagcttgtagtgcaactacttctagaggattatgaagattttgagaaacttgtggacaaagccatgcaactcgaaagtgagcataatcggatgacgaactgcaagagaaggattgtcaacatcccagtaattccaggtggtaaccaaagacagcgcactgagccacttcagatcaccggaccttctgttgtgcatcaagagtccccgccccaagaagatggacgcaatgcagacaacaacactagcaatactaatgatgatgataccaccaacaaccatggttcttgccccattagtgaccactcgaacaaagcgtgcaatgtcagtagcattcaccaagatgtcaacgatagtatcaatgttggaacccagaatgacaaccttagcaattttgacactgagaaagactccaatggtgatagcaactatggtaccactgatgccaatgttagcaaggatttccaaccaccaattccaactccaagtcacaatgatcatccccagatggacagctcagcaaagaagacgttgatttgttacaactgcaaagaaccaggtcatttctctagagattgtccacagccgaagcgtaacctgcgccatccctccggccattatgcaagaagaagacaggtcactcgccttgtggtcactggagcaaacgccgtacccgcagcaagccaaaggacctcatcatccccagaagcgtccgcaatccacattaaagaataccacctgttagagataagccgaaagatgattgataaaaagagattggcaaagatgttctctagcataaaagaagtaggccgaaaggtgattgataaacagaaacatgctctgcatcgctcaaggaagacccctgattgtaattgccccgcaacagtcaccttgtcattaagtaagcaagatgacctaggtaaaagtgtttctatgaaggcaaggagtgaaatcttcaactcggtatcagatgctacacgaagtgaaaagtgcaagcaccggttaccagttgataacttgtctgaggttgactccgaagatatgaatcatgagaagttctggaacggaagcatcactgaactaccgcaacctagtctgagtcagccaaaaggtgcaccctggtccaagtcaggtgaagagaagattccatccgcaacaggaggtcaagccaagcagttccgagtggtaaagttttgctggaagttcgtcaagacgcaacggaagaagtcagacaagaagagaagaccgcccaacctaccttcttgctag

SEQ ID NO: 23440 - DNA, 6711 bp, Oryza sativa
  Clone ID: TF_OsC1713_5408
tcactcttgtagaggaggaggacgcgccgaagtggaaggatgaggagcatcacgacgacgatgatacacaaatgcttgggagctctccaacatttggactcgagaatccaatgtacccactctagtgtgcaatctccccacagaagcattcaagtctccaacatctgtgcgcaatccacgaacattctcatgcaaagcttcatgcccggtggacaagcgttgaatgctttcacttagggtattaatagccccaagtaccgggttaaagtattcgtttggttgcattccaaagtaggcatactgaggatagaaaaaagcatttggatcatacccatgaggaggaggaggtgctgagcttgagctagctccaggatgagaggagggtgccgccctaggagcacggggagctccaagctgaaggcggggcttgtactgcttgtgcttctttaaattttgcccaacagccccaagcttgtcttgaatcaacctcatgatgtaaggggcataatagattccctgagtgaatgtagccttagagatggcaatctcttgcatcataagagacacaatgtcgaattgatggccctgaatgatggcatcgatgacgtgccaagccacccccctaatgtcatcattgttaccaaggcgagggaggatggtaactctcacaatcctgttaaccacacaggggatggtcctcaagccggcaaccttcccatgtgtgtaccacactccgtcttcgtaaaactgagagacgtagtctatggagagcggattgtgagtgtgctcctcatgcaagtcatctccaaagtccaagcgaatactgaggagccgccagaattgcctcctagagatagaacactgaagggtgtcggacatccacttcatctcactatagtctccagccacccacatcttttggaaagcggtgtgaaaacggggattccgggtgtcccgaggcctcaaaaactgatcatggtgcctcaaaatggtatactgcgatggattcctcatgttcacaacaaactggatggagggatcaatgtgcatatcatcacttccttcatcctcatcctctccacttccactgacatcatctccactttcctcctcactagccccctcaacattggcctcaacctcttcatcactttgagcgtactcatctccgcttgactcctcactcacgggatcgggcgtgggctcacgacgactatgacgagtgcggggaggcatttgcggtggataacggccggtcagaccgccgtccacatgtcggtcagaccgtcggccgagctcggtcagaccgtcgaccgctgaccgagctcgatcagaccacctcaactttgttttgaaacttttctcaaattctctctcaatctcattttggaggaaaatctcattttggccaaaaataagaatatagtttccgccgaaacatattccgcctcggcggtagagggctacggagttttgtttcttggatgaccatgacacaagggatctaccaagcatttggcaactaccgaatgtgctctttctatccactttgcaaccggcataatccgaatcggaatagccaacaagtttaaacttagcaccttttaagtaccacaagccaatagtagaggaatgctttaaatatcttagaatccttttcacggccactaagtgacactccttaggagcggcttgaaaccgtgcacacatgcaaacactaaacatgatatccggcctagatgcagtaaggtaaagcaagctaccaatcatagaacgataaagctttaaatctaccggtttacctccctcatcaaggtcgagatgcccgttggttgccataggtgtcttgatgggcttcgcatcctccaagccaaacctcttgagtagatccttgatgtacttggtttggctcacgaacgtcccatccttgagttgcttgatttgaagtccaaggaagaagctcaattcttcaatcatggacatctcaaattccctagacatcatatcaccaaatcccttgcaaaataccttattagtagaaccgaaaatgaaatcatcaacataaatttgacacacaaagaaatcatcaccaatgatttttgtgaaaagggtggtgtcaacttttccaattttgaaatcctttgacaaaagaaaatctctcaatctttcataccaagccctaggagcttgttttaaaccataaagagcttttgagagtttataaacatggttaggatttttaggatcttcaaaaccgggaggttgttcaacaaagacaagttcggcaatttcaccatttagaaaagcacttttcacatccatttgaaatagttttatatcaaagcataatgcaaatgcaagaaggatgcgaatagcctcaagtcttgccacgggggcaaaagtttcaccgaagtccaaaccttcaacttgtgtgaaaccttgtgccaccaaccttgccttgtttctcaccaccaacccgttctcatcttgtttgttcctaaagacccactttgtccctatgacattgtggtctctaagtctttcaaccaaagtccacacattatttcttgcaaagttgttgagctcttcatgcatagcattcatccaatccggatcacaaagagcttcatctacatgttttggctcaagacaagaaacaaacgagtaatgttcacaaattgaagcgacacgagatcgagtttgaacacccttactaatgtcactcaacacttggtcaattgggtgatccttggaaagagcggtgtgtatccttggtggcataggtggatcttgtgccttctcctcctccacttcaacttgagcttgacttggcgtagcggaagtagatggctcatcttgagtggaggtggatggcttgtcttccacttcagtaggcttgacatctccaattgacatgttcttcatagctctcatcaagccttcatcacctacatcatccagattcttgtgcccctcttgggagccattagtctcatcaaattgaacatcggcggtttcttccacaatacctttgttcttgttgtagacccggtatgccttgctatttgaggcataacctagaagaaacccttcatcacaacgactttcaaatttggttagtctaacacccttttgataaatataacacttgcaaccaaaaactcgaaaataggcaacatttggcttcctcccaataattcgctcatagaaagtctttttcatgagacgatgcaaataaagccaattggttgcatggcaagcggtgtttatggcttccgcccaaaaggaatcagaaacaccatattcatcaagcatagtcattgccatctcaatcaatgtacgatttttcctctccacaccaatgctcttataggttgttgggccaaacaaatccatatgcaagagctccaatggtctagatgtggacatgatactcttagtaggatgagaacatgcaacttgcttgccagcttgacaagcactacaaagcttatctttctcaaacttcacatctttcaagcccacaactagatcacgttttgaaagtttgctcaattgattcacgcaaacatgggctagcctcctatgccaaagccaacccattgaagtttttgcaactaacccaattacctttcctttgctattgtctccaaatgtcactttctcttgttctttccctcctacttcaaatatggtgaacatagccctatcaccagtcatgtgttgagtgcatccactatcaagcacacaatggctcccaccggtgcggtagttcaccacggagtataggggaacccacatatctagcaataatgctaccatcatgagccttcccttgaagcacatctccaaactcttgttgagcttaaccacttgctccttaagctcattgttctcaacaacaagtgaggcatcacaaatagaaacacaagtgctagagctagagctaggcatatccacaagatcatcacaagaggtagaaatgctagatgatacaacatgagcaatatggcaaatagcactatcatcaagcaaatcacaagatatgccaacatcaatgagaactccatgttgagtagtggaaaggaggttgtcatgagcttccttaagcttctcatgagaaatggtgagtctctcatgagaggtctttagctcctcatacaagacctccaaagaagcatgatccttctttcgggccttgaacttgacaatctccttctcactataagcatagagctccttaaacatactcacaagctcatcataggaaacatcatcacaatcatcatcactctcactatcactaagaaatgctaccttagaggagtcctttgccatgagacaaagtggagcgaagagtgatggagcctccttgatggcaacaacggccatcttcttcttcttggagcttgcatcatcaccaccttcttcttcggacccggatgaggcggagctctcctcatttgagtcccattccccgataaaggcctcaatattcttgccttccttcttgagcttcttcatgagcttgtagcctccactcttcttcttggatgacttgtctccatcatcatccttggaagggcacttggaagcaaagtgtcccttctcaccacactcaaagcaccttctagcaagaagggcaatctcttcctttcctttactattgtctctaaatgtcactttctcttgttcttttcctcctacttcaaatatggtgaacatagccctatcaccggtcatgtgttgaatgcatccactattaagcacccaatggctcccaccgatgcggtagttcacccaaacttgtttgggtccttggaggttagagaccaaagctttgggcacccaaatggcattctttttaccaccaagtataggggaacccacatatctagcaacaatactaccatcatgagccttcttaagcatataatgagaatcaaacatgcatgtcttggaaggcttactaccggggcaatcattcaccaaatgcccaacctcatgacacttggagcaatacttaccgttgctcttgacaaaacgagtgacacggtgagaaggtttcttacccttctttggaatgtatccaagtcccttattgttaaggatgcaccgttgctcactgaaaatcttgtcaagagtgttcttacccttgaagcacctctccaaactcttgttgagcttggccacttgctccttaagctcattgttctcaacaacaagtgaggcatcacaaatagaaacacaagagctatagctagagctaggcatatccataagatcatcacaagaggtagaaatgctagatgatgcaacatgaggaatatgactagaagcactatcatcaagcaagtcacaagatatgccaacatcaatgtgagctccatgttgagtagtggaaaggaggttatcatgagcttccttaatcttctcataagaaatggtgagtctctcatgagaagtctttagctcctcatacaagacctccaaagaagcatgatccttctctagggccttaaacttgacaatctccttttcactatacgcatggagcttctcaaacatactcacaagctcatcataggaaacatcatcacaatcatcgtcactctcactatcactaagagatgctaccttagaagagcccttagccatgagacaaagtggagcgaagagtgatggagcctccttgatggctacaacggccatcttcttcttcttggagcttgcatcatcaccaccttcttcttcggacccggatgaggcggagctctcctcatttgagttccattccccgatgaaggcctcaatcttcttcccttccttcttgagcttcttcatgagcttgtaacctccactcttctttttggatgacttgtctccatcattatccttggaagggcacttggaagcaaagtatcccttctcaccacactcaaagcacctcaagttagagagagtcttgttgggtcttttatttcttctcttattggagttggagccccttcctctctcctttcttcttcctaagagattattgaaccttctagcaagaagggcaatctcttcctccaagtcatcattgacttcattcaccttgctcttgcccttgtcttcaacttcggcttggaaggtgaggcttcctccatctccttcttcttcaacttgtacatgtcattggtgttgattttccccaagaggcttgcgggtgtcatccttgacatgtcggagttgatgagcatggtgacaagggtctcatacttctccggtagagccctaagcatcttttgggcaacctcaagatcggtgtagtttgccccaagccccttgagatcattcacaatgacattgagcctcccatacatgtcattcacactcttatgaggcaacatggggaatgtctcatattggatcttgaggaaatgaagcttggcatccttgtactcgcttgtgacctcatggatctccgccaacttgttccaaatctcatatgcggttctcaaggttgctcactctatcgaactccttttggctcaaagagttgaacaaagcattcatggcttgggcattgagttggaggttgcggtgatcaatctcagtcaagggcgtgccggtgatagcaaagcaattagcgcttgtcattaattaccaaaattaacaacgtgggcctagatgcttcacacgagtacttgatgtaaagctctcaga

SEQ ID NO: 23441 - DNA, 2833 bp, Oryza sativa
  Clone ID: TF_OsC359_7994
tcaaatagcagaagtagctatcacccggagaccaggaaagctaatatgaggcagttggtggcgagttagaagcaaatgacaagcatggtatcttagtaatgacgagctgatctcgacgcatgacatgaagtgggtaacttgtatgaggttgactccaaagatatgaactatgcaaagttctggaactgaagccccatcttcaagtgccacaatccagtcgaagtcagctagaggtgcaaccagggaaaagtcaggtgaagagaagactccatctgtcatcgccttcctcgcgccgctcccgccgcccgcccgtgccctagcgccgccgccgccgcggattccgccgcatcccgccatccccgcgcaccattaagagggggaaatcactccccgtgattccctccctcttttcccccgctttcccctctctctctccctcgggttcgttcggatttgctcccgcgatcttcgccggcgcatcaatggcgcccgagatggccgcggccgtttccttcccctccggcctctctctctccctcccggcgctatataatcgttccccgtgcctccctcctccgtttccgccgctcgccgctcgctctccccgtcggaatcaagcccgcgccgtcgtcctctctctccgccgtcgccgccgagctccggttcgccgccgtcgtcgccccggacctcctcccgcttcggcgtcgcctccttcggcttcgccgcgtcttcgtcgacctcgtccgctccttcgtttcgcccgccgaccgccggagcgccgccgtcctcgtcgatccgaaccgcgccgccgcctctcgccgtttcggtcgccgtttccgtcaccgccgtcgacccggggtgagccgaggaccgccgcttcgcttccctcttctctcctctctctcggccgccgctccgccgtgcctatggccgccgccggcgaccataggggcgcgggcgcgccgcctcccgtcggccgtgccggcgaggccgccttcgggcgcgccccgtggctgccaggtggggcccggccgtcagccgcccgcgcccgcgggtgcggctgacgcgtgggacccacggcgccggccggctttgcttaatcaacttgcagaataagcctaacatacatcataacagcaaaagacttagatctgttaaggtcctatccttagtttctaatctgtctctcccctttgttttctctctctccctctccaaacctttgcaacagatggctaacaatgagaaaggcaataaggtcagaagtcaggacattggtacctcaagctcccgagtgaatgaagcaccagacaccagttgtgtgacactggtccaacacttgattaaccagaaccgattgcttatagagatactacagcagcatcagacgccaattctgaatctgagtcagatacaacctcaagtgcagttggaggcagtccaagcactcacaccacgagtcagcatgccgccagcatcccgaaagacccatggtgacgtgccacatgttgactcaaaagaagcaagcaagggagtgtcctcagcagaaaagaaaaacaccaatgcgaaccgaagatgaagtccgtaagatgatcattaccagcacagaatggcctccaccaggaatgacaaaacgtcaaagaagaaataccttccgaggtgcaccacagttgacagagcatcttttagctaatggaggtagagtgtttgatagtgaagattcagatcaagtctcctcagatgatgaagatgaaatggaacgtaaggcatgctctcgttgtggagaaatcggtcatgttgccagctcgtgtgccactacatgcgttcattgtgaggaagaccatccacccgacaggtgtccaacgagcaggatcacttgtttcttttgtgaaggaactgatcatgtactaaaagattgtcaattcagttttctgctgacgaagaagatggccaaccaacccgccagttccaacggagagaagcatcaaggcaacacaaatcctcgccaagattacagtttcagcctaactccagtgccaggacagaggaatcaaaatgagaagaaaatgccgagtccgggaagatatctgttgcttcaattgtcaaggaatgggtcatttcgccgacaagtgcccaaaaccgagaaacatagctgccggcccgtcagtccacgcaactccctgcaatcagaagcttgctcctcagcgaattgtcatccatgcatcccgaagcagcccaatagcccgcgttgcaacagctccaaccccagcgagtgcattaccacaaggtgtcaatgctcaatttcagccccagccgtcagttgacaagacagaggccagtatcggcattgtacctttggatgttccagcacagcagccaagaaatcaagtacaagatgaagaacccgagcaagaccatccaccaggggagtgccccactcgcaaggtgacatgttttctgtgcgaagaaacaaaccatgtgcccaaggattgccaactcagtgtgttgttgaccaagaccgcagaaatccaacgaacaaccctacgattgtctcatcagctagtcagctccaacagcaacattgacgatatcatccacagcaccaatgctcctcctgccccacctaactctgcaacaaatcatagcactaataccttcagcaccaaccattctctgcaccgacagcctcagcaaagaattgtcgtcgatggaagaagttgtttctcgacctactccaggccgagcgaagggcaatcaacctcaggagggcgataccaagcagaagaccgttattcgcttcaaccagcaatcagaaggaagcttctcctgtgaa

SEQ ID NO: 23442 - DNA, 3259 bp, Oryza sativa
  Clone ID: TF_OsC359_7971
atggagcccgagatcaccgcgccggtttccttcccctccggccactctctcccctttccaaccctatataaaccctccccgtgcctccctcacccgtttccgcccttgccgcaccgtctcctcgccggaatcgagctcgcgccgtcgctctctctctctgccatcgccgtcgagctccggtccgccgccgccgtcgccccggaccacctcccacctcggcgccgcctccttcggcttcgccgcatcctcgccgacctcgtccacccctctgtttcggtcgccgaccgccggaacgccgttgaccccgtcgacccgagccgcgccgccgccttcctccgctccggccgcctttttcgtcgtcgccgtcgacctagggtgagccgaggaccgccgcctcttttcccccttcccttcccctctctcggccgccgctccaccgtgcctatggccgccgccggcgaccataggggcgcgggcgccgcctcccgccggccgcgccgagtggccgccgcgtggggcccggctgtcagccgcccgcgtcctcgggtgtggctgacgcgtgggacccatggcaccgggcggtgcgagcccgggtgcgcccggtccaccgtggaccacgctgcagcttcggaagatccgctcttcgtggaagttgaagccgacgtttgggaaagcgagcaaggcaagtcacatcatccttgaacatattgaatcccaatggacgaagtcggggtcgatggacatctctaggacaaatgaaggctacacgagctgcggcccggtagtcgagatgtcatggcacagggctggtgtcctgctgctaggggctcaatcctgcctacctgtcccggaggttccggccgtaggtgggattgggtcggtactcttgtctatggctaggatgggttgggaactatgtcacgtcttccgtccgtataccgtggtgaataagcctaacatacatcataacagcaaaagacttagatctgttaaggtcctatccttagtttctaatctgtctcttccctttgttttccctctctccctctccaaacctttgcaacagatggctgacaatgagaaaggcaataaggtcagaagtcaggacatcggtacctcaagctcccgagtgaatgaagcaccagacaccagttgtgtgacactggtccaacacctgattaaccaaaaccgattgcttatagagatactacagcagcatcagacgccaattctgaacctgagtcagatacagcctcaagtgcagttggaggcagtccaagcactcacaccacaagtcagcatgccgccagcatcccaaaagaccgatggtggcgtgccacatgttgactcaaaagaagcaagtatcatttgttttatgtgtgatgagcaagggcactatgcaaggaactgtcctcagcagaaaggaaaaacaccaatgcgaaccgaagatgaagtccgtaagatgatcattaccagcacagaatggcctccaccaggaatgacaaaacgtcagagaagaaataccttccgaggtgcaccacagttgacagagcatcttttagctaatggaggtagagtgtctgatagtgaagattcagatcaagtctcctcagatgatgaagatgagaagtctccccaagattgtcaattcagttttttgctgacgaagaagatggccaaccaacccgccagttccaatggagagaagcatcaaggcaacacaaatcctcgccaagattacagtttcagcctaactccagtgccaggacagaggaatcaaaatgagaaaagaaaatgccgagtccgggaagatatctgttgcttcaattgtcaaggaatgggtcatttcgccgacaagtgcccaaaaccgagaaacatagctgccagcacgtcagtccacgcaactccctgcaatcagaagcttgctcctcagcgaattgtcatccatgcatcccgaagcagtcctatagcccgcgttacaacagctccaactccagcgagtgcattaccacaaggtgtcaatgctcaatttcagccccagccaccagttgacaagacagaggccagtatcggcattgtacctttggatgttccagcacagcagccaagaaatcaaaattggaacaacccagcaggggcaaccaacgttcaagtacctacagtccagcaacagtgcaagttatcagaatttctcaaaattgagactccaacctttgccattgccgtcgaacctatggaagccagtgattggttgcgcacagtcgagaagaagctggggttgattcagtgcacagaccaggagcgggttgtcttcgcaactcatcagttggttggactggcttcagaatggtgggatagctacgaagcatcacggccagaaggacataccatcacctgggacgagttttcatctgtattcaagagatcccatgttcccgcaggaatgatcacactgagaaaacgagagttccgctacctgaagcaagaagatttgaccgtcacagagtacctgcacgagttccatcgtttggctcactatgcaccagaagatgtggaaaatgatgaagacaaacaagagaagtatctccaggggttaaaagatgagatcgcagtgcaactactcctagaggaatatgaagattttgagaaacttaattgtaagagaaggattgtcagcatcccagtattcccatgtggtaaccaaagacagcgcacggagccacttcagatcaccggatcttctgttgcgcatcaagagtttccgccccaagaagatggacacaatgcagacaacaacattagcaatactaatgatgatgataccaccaacaaccatgcttcttgccccattagtgaccactcaaatcaagcgtgcaatgtcaacatcattcaccaaggtgtcgatgatagtatcaatgatggcacccaaaatgacaaccctagcaattgtgactctgagaaagactccaatggtgatagcaactatggtaccactgatgccaatgttagcaaggatttccaaccaccaattccaactccaagtcagaatgatcgtccccagacggatagctcagcaaagaagacgttgatttgctacaattgcaaaggaccagggcattactcgagggactgcctgcaaccaaggcaaagtcgacctccacattaccgccaatttacacgaagcagacatcccaatcgtattgtggtcactggagcaaacgccgtacccgtgaggcctcgtgttaatcagaacccatag

SEQ ID NO: 23443 - DNA, 1312 bp, Oryza sativa
  Clone ID: TF_OsC34615_1
cttcctcctcctcgagaccgcggcgcctcgcacgccacgcttctcctcctcttcctatcccaatccactcggcgacccccctcgccgtcgccgcgctgcgccggcgagcgccacgggagcagcagccctcgccgctccgcggctagctagctcgtctcctcgtccgcctcgcgcctgctggagatccgccccccgacccccgtggaaggaaggaagaagggagggttgtaacagcctaacaggttgtgggagtcttggaggtgctggttttgtggtgtggtgttcgcagtttggttggagcttggagatttagaaggaaggtttgacgatgagcagccgcagcccgccaccaaaggaccgcaggattcgtactgagcgtacctcataccgtgatgcgccatacaggagagacagccgccgtggtcctagcagatttcctaatgatttgtgcaacaattgtaagcgtccaggacattttgctagagattgtccaaatgtggctctttgccatgcatgtgggcttccagggcacattgcagcagagtgttcttccaaagatctctgctggaactgcaaagaacctggccacatggctaacagctgcccaaatgaagggatatgccgcaactgtggcaagtcgggtcacattgcaagagaatgcagtgctccaccaatgctgccaggtgaaatgaggctttgcagcaactgctacaaaccagggcaccttgctgcggaatgcaccaatgagaaggcctgcaacaactgtaggaagagtggccatcttgctcgtaactgccctaacgagcccgtctgcaacctatgcaacgtgtcaggacatttggcccgagagtgccccaaatctgatgctatcaatgagaggggtgggcctcctcccttccgtggtggatacagtgatgtggtctgccgtgcttgcaatcaggttggtcatatgagccgtgattgcatggccggtgcgttcatgatctgccacaactgcggtggtcgtggtcacatggcttatgagtgcccatctgggaggcttatggatcggtttccccctcgccgtttttgagtgattttccaagtgctcaatcagatgactcttcgttgggaccggcattatgaataatcatatctcgtgctttatgccttaagaatgttagtgtatttcagatacttcagttttcatagtttgtcagcttacttgtatttgtcggttctgctgtttaactgcgatactcgttgatcggtgaggatgaattccagatgggatacttgttttaattcctaaaaaaaaaaaaaaaaaaaaaaa

SEQ ID NO: 23444 - DNA, 2592 bp, Oryza sativa; identical to SEQ ID NO: 15635
  Clone ID: TF_OsC359_7184

SEQ ID NO: 23445 - DNA, 3708 bp, Oryza sativa
  Clone ID: TF_OsC1528_1980
atggctggttttgccgatgcactgaggccggataaattcaccggtgtgcattttaagagatggcagatcagggtcactctgtggctgacagctatgaaatgcttctgggtgagtactggcaaacctgaaggagttcttactgctgaacagcagaagcaattcgaggaagccactactctctttgtgggatgcattcttagcgttcttggcgatcgtctggtcgaggtgtatatgcatatgaccgacgctaaggagttatgggatgcactgaatactaaattcggtgctactgatgctagcaatgatctgtatatcatggagcagtttcatgactacaaaatggctgacaaccgttctgtagtcgaacaggctcatgagatacaaaccatggctaaggaactcgaactccttaagtgtgtcttacccgacaaatttgtggccgggtgcattattgcaaaactacctccatcttggaggagtttcggtactgcactcaaacacaagagacaggaatactccgttgaggggttgattgcgtctcttgatgttgaggagaaagctcgggaaaaagatgccgcgtctaagggcgatggtgggcagtccagtgccaatgttgtgcacaaggcccagaacaagagcaaggagaaatacaaagctcagcagaccaccaacttcaagaagcagaagaagaacaacaacaatcctaatcaggatgagaggacttgctttgtgtgtggccaagttggtcatctggctaggaagtgtccacaccgcaaggggatgaaggcacctgcagggcagacttctaagtctgctaatgtgaccattggcaacactggagatggaagcgggtatggtcgcacggggttccaccgtcctaatggggaatgggtcacatgcttctgttcatggtgttggcacggtagatctgaagtttacttcgggaaagatcgtgcagctgaagaacatgcagcatgtcccttctatcgacaggaatcttgttatgagtgcggaggcctgttccgcttttccctttctgatttctgcaataagtatgtgaaccatatttgtggcagtgtggatgatgaggctaatgtttggcattcacgtttatgtcatattaattttggcttgatgtctcggctttccagcatgtgtttaattcctaagtttttcattgtcaaaggttctaagtgccatagttgtgtgcaatcgaagcaacctcgcaagcctcacaaggctgccgaggagagaaacttggcaccactagaactcctacattcagatctttgtgaaatgaatggggtgttgacgaagggtggaaaacgatatttcatgacattgattgatgatgctactagattttgctatgtgtacttgttgaaaacgaaagacgaggctctagactattttaaaatttataaggcagaagttgaaaatcaacttgacagaaagataaaaaggcttaggtctgatcgtggtggagagtttttctcgaacgagtttgacttattctgtgaggaacatggcatcatacatgagaggacgcctccctattctcccgagtctaatgggattgctgaaaggaagaaccgcacactgactgacttggtgaatgccatgttggacaccgcgggactgcctaaggcatggtggggggaggcattgttgacctcaaatcatgtgttaaacagagttcctaacagaaataaggacaaaacaccatatgagatatggattggtagaaaaccatcactttcttatttgcgcacatgggggtgcttggcgaaagtcaatgtaccaataacgaagaagcgcaaacttggacctaagactgtggactgtgtttttctgggatatgctcatcatagcattgcctatagatttttaatagttaaatccgaggtaccggacatgcatgttggtacaattatggagtctcgtgatgctaccttccttgagagctttttcccaatgaaggatacacatagtggttcgaaccaaccctctgaaataattcccagttcaatcacaccaccagaacaaactgaacatacacatgaacttgtgtctgaggaggatgtcagtgaagctcctcgaaggagtaagagacaaaggacggctaagtcttttggtgatgacttcactgtgtacctcgtggatgacactcctaagtcaatttcaaaagcatatgcatctcctgatgcagactactggaaggaggctgtccgtagtgaaatggattccattatcgctaacgggacttgggaggtgacagagcgaccctatgggtgtaaacctgtggggtgcaagtgggtgttcaagaagaagcttaggcctgacggtactattgaaaagtacaaggctcggcttgttgctaagggctatactcagaaagaaggcgaagatttctttgacacttactcacctgttgctagattgaccacaattcgtgtgctactttccctagcagcctcacatggtcttctcgttcatcaaatggacgttaagacagcttttcttaatggagagctggatgaggagatctatatggatcaacctgatgggtttgtagttgaaggtcaagaaggcaaagtgtgcaaattgttgaagtctttgtatggtctgaaacaagctcctaagcaatggcatgagaaatttgacaaaacattgacatctgcaggctttgcagtcaatgaggcagataaatgtgtgtactatcgccatggtgggggtgaaggagttattttgtgcttgtatgttgacgacatactgatatttgggacaaaccttcaggtgataaatgaggttaaatcattcttgtctcaaaattttgatatgaaagatttgggagtagctgatgttatcttaaacattaagctaattagaggtgagaatgggattaatctcttgcagtcccattatgtggagaagatcttgaatcgctttggctacattgatagtaagccttctccaacaccttatgatcctagcttgttgcttcgcaagaacaagagaattgctaggaatcaactggaatactctcaaatcattggctcgttgatgtacctggctagtgcaactaggcctgatatctcctttgctgtgagcaagttgagccgatttacttctaatccgggagatgatcactggcgtgcgcttgagcgagtaatacgctatctgaaaggtactgtggaattggggcttcactatactgggtatcctgcggtactggagggtcatagtgattctaactggatctctgatgtggatgagatcaaagccactagtggatatgttttcacactgggtggtggtgctgtttcatggaggtcttgcaaacagacaattttgacgaggtcaaccatggaagcagagctaacggcactggatactgctactgttgaggcagaatggctgcgtgatctattaatggatcagcctgttgttgaaaaaccggtgccggctatccttatgaactgtgacaatcaaacggtaattgtcaaagtgaatagttctaaggataatatgaaatcgtctagacatgtgaaaagacgattgaagtctgtcaggaaattaagaaactccggagttataacgttggattacatccaaacagcgagaaacctggcagatcccttcacgaagggactatcacgaaatgtgatagacaatgcatcgaaggagatgggtttgagacccatgtga

SEQ ID NO: 23446 - DNA, 1680 bp, Oryza sativa; identical to SEQ ID NO: 15755
  Clone ID: TF_OsC359_6691

SEQ ID NO: 23447 - DNA, 4353 bp, Oryza sativa
  Clone ID: TF_OsC359_7135
atggagctcacttcggagcaagaacaactcatctaccgcaatgctcaagcttccaatgcaattctctccgccttgaatccggaggagttcaacaaggttgatggactagaggaggccaaggagatatgggatactttgcaattggctcatgagggatgtcccgccgttcgtgaggccaagattgaattattggaaggaaggcttggaagatttgtaatggatgacaaggagacagcacaagagatgaaagacttcaagagactcaccccaagtgacattcttggaagaatagtgtctcatgagatgcaagaagaggaagctcgtgaagtgagacaaatgatgaagaatgccgccatgatcaaaaatcaagaagttgctttgaaggcaaaacaagaagaagagtcaagttgtgaagaaagtgaagatgaagaaatggcttttattgtcaagaggttcaagcactttctttacaagagtggctatggcaaagggaggaaggacgatgacaagggaaagaggcaatcaaagagagcgtgcttcaattgtggcgaatatggccacttcattgccgattgtcccaagtcaaatgaagctaacgctaagggaggcaagaagaagccggagcgtgctcatgtggcggaggcacacatggcggaagtgtggtacttcggagatgaagaagatcccgaggtcaagcccaagcccaagtcaaaagacaaggttgaaggagaaggtggtgttgctaccgtcgccttcaaatcatcctcttcaagcaaggagcgtctcttcaacaacttgagtgatgacgacgacgactcctaccactactcttgcttcatggcccaaggccgcaaggtgatgactcaaaagccctctcaaacttctcttgatgttgattctagtgatgaggaaagtgataatgaattagatgatgtgcttaagagctttagcaaacccgctatgcaacatttggctaagttaatgagagctttggatagtaaagaacaatcactcgaaaggcaagaagaattgcttattcttgagaagaaaagaaaccttgtcttagaggagagcttagctaaagaatgtgctaaaaataaacaacttgctaatgagcttaatttggctaatggttctttagctagccttagggatgttaatgaaactcttcaagaaaaatttgctaatttagacaaaagtcataaagatcttgaagttcaatttgacactctttggaatagcacctctcaaccaaatgtggtttctaattcttctaacccttctactagcaatgctcttaagaaagagaatgaaaagttgtgcactttggtgaaatatggatgcatcaagacataccattcaaaagatgccctttacaagaccatcaccgctcatcctaacaaggatggacacgggttcgggttttcgggtagaagtcctgtgtctaagcgtgtgatggtaaatgggaaagaatgcttgatgtttgtgcgagaaggtaaagctccacaagcaagtgaggtgactggtcttgtgagctgccagggacccggaacatccggacaaaccgggcgaaacctccgggtgggagtctctgtctctcaaaaattcccaccagaaagttccggccggtttgccaagaagttccgggccaatggccgtgcacaagacatgaccggaagttccgggcataatgccaggaggttccggccagatggtctttactatgattcatatgtaatttccaaaaatttagagggaaaagtgggtgcttattttaatgggaattacaatgatgagtaccgcacttgtgtgtgggtgccaaaggctttggcatactcctccggtggttcaagttgggttgtggacagtggttgcaccaatcatatgactggagagaggagtatgtttacaagtcttgatgaggagaacggaactcgtgagaatattgtatttggagatgatggtaaaggaaagctacaatttattatccgtttctcaattatggatgactcctctgtagcattcaaaggcaagttaaagggtgatctctatcttgtcgatttcgatgtggatagagtgaatccagaagcttgtttgattgctaaatcctccatgggttggctatggcatcatagactagcccatgttggaatgcagaatttggcaactcttctaaagggggaacacatcctcgggctcactaatgtcacatttgagaaagatcgtgtgtgtagtgcttgccaagcagggaaacaagttgggaatccacatcctatcaagaacatcatgactacaacacgccctcttgagcttctacatatggatttatttgggcccgtggcttacataagtattggaggtaacaagtatgtttttgtcattgttgatgatttttcacgcttcacttgggtgtactttctccatgacaaaagcaaagctcaagatgtcttcaagcgctttgcaaagcaagcccaaaacctctatgatctcactatcaagagggtgcgaagcgacaatggaggagaattcaagaacactcaagtggaggaatttcttgatgaagaaggaatcaagcacgagttctccgccccctatgatcctccccaaaatggcattgttgagaggaagaaccgaaccctcattgaagccgcaagggcaatgcttgatgagtacaagacttcggatgtcttttgggcggaggccgtgagtaccgcatgtcatgccatcaaccgcttgtacctccacaagatcctaaagaaaacttcatatgaactcttgagtggtaagaagcctaatgtttcatattttcgtgtctttgggagcaaatgttttattttaagtaagaggccttgctcatctaaattctcacctaaggtggatgagggattcttacttggctatgaatcaaatgcacatgcctatcgtgtcttcaacaaaacctccggtattgttgaagtcactagggatgtgatatttgatgaatctaatggctcccaaggagagcaagttgttgtacatgttgtaggtgatgtggatccaagtcaagctataggcactaaggctattggagacatacgaccagtcgagacgcaggatgaccaagaggatagggatcaacctccgtcatcgacatccaatagccctacaagtgttgtgtctgctgagccagaagttccgggtcctattgaccggaacctccggacatctccaggcccggaagttccgggttctacagtccggaacctccggaccagtggcagtgaagacgtgccaacggcacaagtggatgggatcgatgctgcgggcactttagaggttgaagatgaacttggtgatccggattgggtgatggctatgcaagaggagttgaataacttcattcgcaaccaagtatggacgttggtggagagacccgaccaaaatgtcatcggcaccaagtggatcttccgcaacaagcaagatgaacatggagtggttgtaaggaacaaagcccggttatatcaaatggatgtcaaaagcgcctttctcaatggacccatctcggagttagtctttgtggagcaaccaccggggttcgaggatccaaagttgccaaaccatgtgtacaagctccacaaggcgctctacgggctcaaacaagcccctagagcttggtatgaatgtctccgagattttcttttgaaaaatggttttgaaattgggaaggcggacactactctcttcactaaaaagtttgaaaataatttattcatttgccaaatttatgtcgatgacataatatttggttctactaatgcctctttttgtgaagaatttagtagtatcatgactaaaaggttcgagatgtctatgatgggtgagctaaccttctttctcgggctacaagtcaagcaagcacaagaaggtaccttcatctctcaaaccaagtacgtgaaggacattgttaagaagtttgggatggaagatgccaaacccatcaagactcccatgcctaccaatggtcaccttgatcttgatgaaaatggtaaatgtgtggaccaaaaggtatatcgctccataataggatccttgctttacttatgtgcatctcgtcccgatatcatgcttagtgtttgcatgtgtgctcgctttcaagcggagcctaaagagtgccatttgattgccgtcaagagaattctaagatatttagttcatactcctaatcttggcttgtggtatcctaagggttgtgactttgagcttttgggctattccgattcggattacgccgggtgtaaggttgatagaaaaagcacaaccgggacttgccaatttcttgggcggtcccttgtttcctggtcctccaagaagtaa

SEQ ID NO: 23448 - DNA, 6336 bp, Oryza sativa; identical to SEQ ID NO: 15756
  Clone ID: TF_OsC359_7430

SEQ ID NO: 23449 - DNA, 3545 bp, Oryza sativa
  Clone ID: TF_OsC359_7882
atgtcgcatctagagggagacgaatatttggaggagaagggagacgcttctagcaccaaggagactggatcaaagggagctactattcactttgattacatcaaacttaatgttcctcctcataactttgtctccgtgccttccgggcgtgcacctcattttgatgggacacattatgccgcttggaagcacaagatgaagttgcatctaatctctttgcatccaagtatttggaaagttgtttgtacaggtattgatgtacccaatgatgacatggagctcacttcggagcaagagcaactcatccaccgcaatgctcaagcttccaatacaattctctccgccttgagtccgaaggagttcaataagtttgatggtcttgaggaggccaaagagatatgggatactttgcaattggctcatgagggatcacccgccgttcgtgaggacaagattgaattgttggaaggaaggcttggaagatttgtgatggatgacaaggagacacctcaagagatgtatgataggatgatgatccttgtcaacaagattaaaggatttgggagtgaggacatgacaaatcactttgtggtcaagagacttctccgtgcatttggtccaagaaatcccactcttgtatcaatgatacgtgagaggaaagacttcaagaggctcaccccaagtgacattcttggaagaattgtgtctcatgagatgcaagaagaggaagctcgtgaagtgaggcaaatggtgaagaatgccgccatgatcaaaaatcaagaagtggctttgaacgcaaaacaagaagaagagtcaagttgtgaagaaagtgaagatgaagagatggctcttattgtcaagagattcaagcactttcttctcaagagtggctatggcaaaggaaggaaggatgatgacaagggaaagaggcaatcagagagagcttgcttcaattgtggcgaatatggccacttcattgccgattgccccaaaacaaatgaagctaaggctaaaggagacaagaagaagccggagcgtgctcatgtggtgaaggcacacatggtggaggtgtggtactccgaagatgaagaagcttccgaggacaagcccaaacccaagccaaaagacaagattgaaggagagggtggtattgctaccgtcgccttcaagtcatcctcttcaagcaaagagtgtctcttcaacaacttgagtgatgacgacgacgactcctaccactactcatgcttcatggcccaaggccgcaaggtgatgactcaaaagccttctcacacttctcttgatgatgattctagtgatgaagaaactagccttagggatgtcaatgaaactcttcaagaaaaatttgctattttagacaaaagtcataaagatcttgaagttcaattagacactctttggagtagcacctctcaaccaaatgtggtttctaattcttccaatccatctactagtaatggttgtgctaggtgttacaatattgatttgacctcttatgctactaatgttgatgctatgcaagctcttaagaaagagaatgaaaggttgggtacattggtgaaatatggatgcatgaagacttaccattcaaaagatgccctttacaagaccatcaccgctcatcctaacaaggatggacacgggctcgggttttcgggtggaatgtcacgtcctgataaattcatcccaaaataaaaatcattttgccacctccccgccgtcgtcccctctctcccgtgccgccggccgtcttcagctgcccctgccgccgcgttagcacgctggccggctgtgccgtcgcctcctccagcgtcgcagccacctcctcttcgccggcctgccctctgtttcccgcgaagacctccggaagtgcatccccgccggcaacagtggcgttgccgccactgttccgcctccggccacctctgccgcgtcccctgtgcgccggccgacgttgccaccacctctcccggcaccggaatgccatcctcttccccggccaagccacggcatcgctcgtatttcgccggaatgccgtcgcgcgcgccgcctcttcctcggtctccggcgtcgcagcggcaagatcgccctcggcctcgcctccccttcgaccgaacccctctgcggtccatcgtcgtcgtctccgttcgttctcgtcgtcgacgtcccgtcgtcgcccagctcgtcgtctcgcggcgccgcctccgtcgtcggcatcgcagcggtgtgttccacgccatcctcgtcttcgtgcagccgctgtaggctgcccacgtcgcctcctcgccggccccggtcgtcgtcgtcgtcgccctctcgtcgttcccggtcgtcgtggcgttcgtccctccgtcaagccgttctcgtttgtcgtcctcgcttcgtcaagtgctgcagcctcgtcgtcgtcttcgtcctcggctccgcgtcgtcaagccttgtgccggccgcgtctcgcccgtgtaccggtgttggtagtcgttcacgtgtgcgggtggtgaccgtgtagtgtccgtgttagtgtgcccgctcggtagccgcgtggtttccacgtgtgcagcccgtgtggtgtctagtggagtccgtttgtcggccactcgcctcggttgacacacggggttcgcttccgtcgacccgtggaccgtctctgtgtactcggttttctttttatgtattgttattgcttctttataggcttgtagctttgcttgtgtgcttcgcgtagcttctgtcgttccggaggttcccgaagcgtggttcgtggtcgtcgccgaaggttcggaaggccgttctctctctccccctctattcaaaacccccaaaatggttttaggctgggctcgaggtgcgtggttgggttttgtttgtcgtacctcgggtactataaggattaagctcgggcctctgttgcaaagcactaccgtacttccacatgtctagtgggtaaggcttagtttgtggctcagtctagttaaacagaagtacacggatggagatggacgaagtcgggggtcgatggacatctctagggcaaatgaaggctactcgagctgtggcccggtagtcgagatgtcatggcacagggctggtgtcctgctgctaggggctcagtcctgcctacctgtcccggaggttccggccgtaggtggggttgggtcggtactcttttctatggctaggatgggttggaaactatgtcacgtctcccgtccgtataccgtgatggtatgtggcacgtggttacacataaggaagatgtgtcttgtggcacttatgggtgtgtcttgttgagtacggtggttgtactcagtcttgctcaatttttcccaaacccagaagaggagttcctggaagatgaaggctttggtgtctagctcgtgcctgccgtcaagcgcccgtggtcgtcgccctagtcttccgctgtcttttcgtttgtcttcatgtgtgctgggccttgcctcttgggacaaggaacaatacacgcacgcaaggaacgcccgttgggtgatttccggtcgtgacaagtt

SEQ ID NO: 23450 - DNA, 6344 bp, Oryza sativa
  Clone ID: TF_OsC359_8323
atgttggacttagggggaaagaatggggaaaatggaaatgaagatgaagcaagcagcaagggaactccaccacccaagggagctactataccttttgattacagcaaacttactattccctctcactacttcgtctccatgccttccgggcatactcctcaatttgatgggacatattatgacgcttggaagcacaaggtgaagttgcatctaatctctttgcatccaagtatttggaaagttgtttgtacaggtattgatataccccatgatgacatggagctcacttcggggcaagaacaattcatccaccgcaatgctcaagcttctaatgcaattctctccgccttgagtccggaggagttcaacaaggttgatggactagaggaggctaaggagatatgggatactttgcaattggctcatgagggatcacccgccgttcgtgaggccaagattgaattattggaaggaaggcttggaagatttgtgatggatgtcaaggagacaccacaagaaatgtatgataggatgatgattcttgtcaacaagattaaaggacttgggaagacttctgcgtgcatttggtccaagaaatcccactcttttttatcaatgatacgggaaaggaaacacttcaagagactcaccccaagtgacattcttggaagaattgtgtctcatgagatgcaagaagaggaagctcgtgaagtgagacaaatggtgaataatgccgccatgataaaaaatcaagaagttgctttgaaggcaaaacaagaagaagagtcaagttgtgaagaaagtgaagatgaagaaatggcttttattgtcaagagattcaagcactttcttcgcaagagtggctatgacaaagggaggaaggatgatgacaagggaaagaggcaatcaaagagagcgtgcttcaattgtggcgaatatggccacttcattgccgattgtcccaagtcaaatgaagctaaggctaagggaggcaagaagaagccggagcgtgctcatgtggcggaggcacacatggcggaagtgtggcactccggagatgaagaagatcccgaggtcaagcccaagcccaagtcaaaagacaaggttgaaggagaaggtggtgttgctaccgtcgccttcaagtcatcctcttcaagcaaggagtgtctcttcaacaacttgagtgatgatgacgacgactcctaccactactcttgcttcatggcccaaggccgcaagagctttagcaaacccgctatgcaacatttggctaagttaatgagagctttggatagtaaagaacaatcactcgaaaggcaagaagaattgcttattcttgagaagaaaagaaatcttgccttagaggagagcttagctaaagaatgtgctaaaaataaacaacttgctaatgagcttaatttggctaatggttctttagctagccttagggatgtcaatgaaactcttcaagaaaaatttgctaatttagacaaaagtcataaagatcttgaagttcaatttgacactctttggaatagcacctctcaaccaaatgtggtttctaattcttctaacccttttactagcaatggttgtgctaggtgttacgatattgatttgaactcttatgctactaatattgacgctatgcaagctcttaagaaagagaatgaaaggttgagcactttggtgaaatatggatgcatgaagacataccattcaaaagatgtcctttacaagaccatcaccgctcatcctaacaaggatggacacgagctcgggttttcgggtggaagtcctgtgcctaagcgtgtgatggtaaatgggaaagaatgcttgatgtttgtgcgagaaggtaaagctccacaagcaagtgaggtgactggtcttgtgagctgccagggacccggaacatccggacaaaccgggcgaaacctctgggtgggagtctctgtctctcaaaaattcccaccgggaagttccggccggtttgccaggaagtttcgggccaatggccgtgcacaagacatgaccggaagttccgggcataatgccaggaggttccagccagatggtctttactatgattcatatgtaatttccaaaaattcagagggcaaagtggttgcttattttaatgtgaattacaatgatgagtaccgcacttgtgtgtgggtgccaaaggctttggtaactaacatcaagggacccaaacttagacaggcatactcctccggtggttcaagttgggttgtggacagtggttgcaccaatcatatgactggagagaggagtatgtttacaagtcttgataaggagaacggaactcgtgagaatattgtgtttggagatgatggtaaaggaaagttgggttacaattgcttgtttaccgatgaggatgtgaccgtctttagaagggatgactcctccgtagcattcaaaggcaagttaaagggtgatctctatcttgtcgatttcgatgtggatagagtgaatccggaaacttgtttgattgctaaatcctccatgggttggctatggcatcgtagactagcccatgttggaatgcggaatttggcaactcttctaaagggggaacacatcctcgggctcactaatgtcacatttgagaaagatcgtagtgaggctcaagatgtcttcaagcgcttcgccaagcaagcccaaaacctctatgatctcaccatcaagagggtacgaagtgacaatggaggagaattcaagaacacacaagtggaggaattccttgatgaagtgggaatcaagcacgagttctccgccccttatgatcctcctaaaaatggcattgttgagaggaagaaccgaactcttattgaagccgcaagagcaatgcttgataagtacaagacttcggatatcttttgggcggaggccgtgagcaccgcatgccatgccatcaattgcctgtacctccacaaaattctaaagaaaacttcatatgagctcttgagtggtaagaaaccaaatgtttcctattttcgtgtctttgggagtagatgctttattttgagtaagaggcctcgttcatctaagttctcacctaaggtggacgagggattcttacttggctatgagtcaaatgcacatgcctaccgtgtcttcaataaaaccttcggtattgttgaagttataagggatgtgacatttgacgaatctaatggctcccaaggagagcaagttgttgtacatgttgtaggtgatgtggatccaagtcaagctataggtactaaggctattggagacatacgaccagtcgagacgcaggatgaccaagaagatagggatcaaccttcgtcatcgacatccaatagccctacatcgagtcaagagtcagttgacccggaagttccgggaccagatgatcggatcctccggacctccccaagccaggaagttccgggtccatctgccaggaagttccgggcagaggacagtcaaggcgtgcctgtggatgggattgatgccgagggcactgtagagcatcctgatcaggctcaggtcccctcggtgcaccatccaagaatacatcacactgtccaaagagatcatcccgtcgacaacatacttggtgacataagaaaggggataactactcgttctcgtgtcgctaacttttgtcaacactattcgtttgtctcttctttggaaccaaccagggttgaagatgcacttggtgatacggattgggtgatggctatgcaagaggagttgaataacttcactcgcaaccaagtatggacgttgttggagagacctgaccaaaatatcatcggcaccaagtggatcttccgcaacaagcaagatgaacatagagtggttgtaaggaacaaagtccggttagttgcgcaagggttcacccaagtcgagggtctcgattttggtgaaaccttcgcacctgttgctcgccttgagtcaatccgaatccttttagcctatgccgctcaccatgatttcaggttattccaaatggatgtcaagagtgcctttctcaatagacctatctcggagttggtctatgtggagcaaccaccggggttcgaggatccaaagttgccaaaccatgtgtacaagctccacaaggcgctctacgggctcaaacaagcccctagagcttgtagtatcatgactaaaaggttcgagatgtctatgatgggtgagttgaccttcttcctcgggctacaagtgaagcaagcacaagagggcactttcatctctcaaaccaagtacgtgaaggacattctcaagaagtttgggatggaagatgccaaacccatcaagactcctatgcctactaatggccacctagacctcgacgacaatggtaaatgtgtggaccaaaaggtatatcgctccaaaagtgtttgcatgtgtgctcactttcaagcggagcctaaagagtgccatttgattgccgtcaagagaattctaagatatttagttcatactcctaatattggcttgtggtatcctaagggttgtgactttgagcttttgggctattccgattcggattatgccgagtgtaaggttgatagaaaaagcacaaccgggacttgtcaattccttgggcggtcccttgtttcttggtcctccaagaagcaaaattccattgccctatccaccgccgaagccgaatatgtcgccgccggttcttgttgtgcccaactcctttggatgaaacaaaccctaaaagattttggctacaacttcaccaagatcccactcctatgtgataatgagagtaccatcaaaatagccaacaatcccgttcaacactcaagaaccaagcacatagatattcgccaccacttcttgagagatcatgaaaccaaaggagacatatgccttacccatgtgagaaccgagagccaattagccgacattttcaccaaacctttagatgagaaaagattttgcgagcttaggataagcactatgcctcgtgagaaaagacagaaagcctctcaggatgtgtccggtgataagagtcctcctattcgttttcctcgtggtcgtttgggtaaagagaaagtggttgatgcggcagtggtagcagtactcgtacttgtcctaggtttaccagtgattatggctagagaaaatccagtggttgagatgaagtggattgattgggcttacatgaggaagaagaacaatgaagtgttcaaccaagtgatgcaagtgtgccacaacaagaatcttggagatattcttgccttggagtatgattggaatgaggaggtcattgcacagttctatgcgacagcattctttggtactacaaggaagggaaccccttatgtgaagtggttgactgaggatgatgaggatctcaataggcccaacattcatagtgaagcatctctccccatgatcaagaccaagttcatgtatgcaaaggatgctcctaggacttgcatgggatctactcatggattgcatcccaactacaaggtgttgtactccatctttcattggtctttgcttccaaaggttggagatgctactgctttgccatccaagcatgctcatcttctcagtcgcatgcgctacaatcagcctcccttcaatgtgatgaaattgatttgccctttcttagcggagtgcctgaaggaatttcattcaacatatgatgatgaactcttgcagtggaatggtgctgaacttatgacaagagtaatcagaaatatgtccgacaaagcagatgacaacagtgggcatcttgacataaagtttgaaccttctgttgcattttatcccataagctcaacagatattacaaggtacttctcagaagcagatagcacggatgaaagagcccaacatgatgctctgttttctaggattgtaaatgactctactactttccacctctggaacagcattacttcttcgctggttcctgaacccaactctcttgttgagagaatccttaaccgttactgtcttcattgccttgatgttttatagtttgtagcgggttgaagttctgacgaagagcttcattttgggttagaatacatatacagaagaaattcatgagtttaatgggcgacaatatggctagtagtatattgttgaattttgcccaaaaattagttggggggataaaatggtggcattgtagatatatattcttttcaacagggctgcagtgttggtgctacaggcatgtacaattgtgttgacctgactacccattgtcactttttgacagcagatttgcttactggaaacactcaactcaagaactagaggcatttggaaattgagatgtttaaccagttaaaaaaaaaaaaaaaaaa

SEQ ID NO: 23451 - DNA, 1350 bp, Oryza sativa
  Clone ID: TF_OsC9918_3
tcacaagagagttggttcatcatcacttgatgctgtggcaagaagcgctatctccttgttcttcttttttgctggacactcaaacgcaaaatgaccgagctcttggcagtgatagcacatcaccttggatttatcaaacctcttgctgcgggctcgaccagcaccatcatcagtgttgcgtgtggtgagaagaagctgctccccataattgtcactgtgcttccgtatcctctcctcgaaagctttgaggcggccaatagcctcctcaaatggcatggtgtccaaatcgcagaattgctctatcgctgcaattatgtgcaaaaacttttcaggcactgagtcaagtagcttcttgacgagctcatcgtccgtcatggttgcaccaagaccgctcatcgcgtttgccaggccactgattttgccggcaaactcgtcgatggtctcggtgtccttcatgcgcagtgccttgaattcgctcttcaaggtttgcacccgcgccttcttcactcgctcaacgccaaggaacctcgtcttgaggctctcccaggcctccttcgccgtcttcttcttcgcgatctgctgcagcacctcttcggggacggccccgaagagacacgcccgcgcctgcttgtccttcttcttctccacggcctcatcggccgcgggctcgatggcatcccagatgccttgcgcctccatgttggcctccatcttgatcgcccaggtggagtagttggtggaggtgagcaccgggtatggcagcgacacgccgccctccctcatcgatcgcgacgcggagtgctcgacgatggccatcttgttgaagcgcaggatcttgggcataaattggctctgataccaattgttagaatctctcctcttggctcggatcctttgctgccacacactactaccttgtgcaaaacttgacgctgcggcaaggagcgctatctccttcttcttctttttctcagggcactcatacgcaaagtgtccaagttcttgacagtagtagcacattgtcttggacctgtccggcttcttgacgcggctgcggccaccgcttgtgtcgccggacgtgaaaagtagatgctcgccattcttgtcatcacgcttgcgtatcctttcctcgtatgccttgaggcgaccaattgcctcatcaaatggcatgctgtccaagtcagagaactgctcaattgcagcgatgacatgcagaaacttatctggcacagaatcgagtagtttcttgacttgctcatcatcgtccatggttacaccaagatcgctcaacttgtttgccaggccactgattttgccggcaaactcgtcgattgactcggtgtccttcat

SEQ ID NO: 23452 - DNA, 4581 bp, Oryza sativa
  Clone ID: TF_OsC1528_1921
tcagagccacactttcctgtaggctaaacatctcttgttccaccccttcccaagctcggttgagctctcagccagcagcagcagcagcaccggttgctcctccttcccctttccctttcccccctccacgcagcagccccccggaggtgcgccatgtccgacgctcggtctcggagttcggtcgcctcgagcactcggcgtcagcaggacgccgagctcgctgcagcagaagagcgcaggcgagcaacggctcagaccgctgtagcagtagcgagggcggccagactggcggcagcggagttggcagcagccagggcggaggcggaggcggcggaagatgcggcacgtgcggcggaggtagaggttgagaccttgcgtagcagcatcaacggctccatcgccggtgacatcaccgccgacagggagcttgaggagctggcaagaggaagggcacgggagcgggcagagcggtgggcagcagcccacctccacggcggcggcggcggcccaagggaccgcgcgcccgccgacgggaacccagacgggcgcgggcgtgccagcggcagcccggagcccgcacgcgcccctcgcaggcagcgcggctctctctcccttgacctgcgccatggtcaccacggcgtccagacggtggtcagggactttggtcccggcggtgggtggcctaccctcaccaaaaccaactacatcgagtgggccgcggtgatgagggtgaggctccaggtgcggcacatgtgggaggcagtccgcaacgaccgcgcccgcaagtccacactgcaggcactccgcaaggagtgggagaacctggccttcaagccaggtgaggatattgatgactttgctctccgtctcaagactctcttgcagaaaatggtgcagtacggcgacgacacctactacgaggagagagctgtcgagaagctcttccgctgcgtccctgagaagtacaggcagatcgctcgctcgatcgaatctctgctggacctctccacgatgtcgctcgaggaggcgttaggtcgcctcaaggtcgtcgatggtaatgagccacagcctctctcggggcccatcaccattggcgggaagctccatctcactcgggagcagtgggaggcctctcagggtgacgggaggaagggggagtcatcttcctcgacaggcggccgtaagccgcgcaaggtgcgggaaggtgtccagctacggtgggcgcgaaaacgtgccgagggtggcgcccgcagaggcgcccagggcgttgccaccggcaaccacaagccggcacaagacgacgcctgccgcaactgtggcaagcttggccattgggccaaagactgtcgacagccacgacgcggccaggcccacgtcgcacgggtggaggagaaaaagccggctctgctcttggctcacgcaagcatcgaactacctccagcggcaccggccgcagcggctttcctccaccttgatgagccgaaggtactcgtctccctctgcaacggctccagcaacgacaaggctgatgggtggtacctcgacaccggcgccacccatcacatgaccggccgacgggagttcttcaccgagttcgactccagcgtccgaggctccgtcaagttcgggaacgcctccggcgtggagatcaagggtgttggctccgtcaccttcaccgccaagtccggtgagcataggctgctcaccggagtctactacatccccacgttgaggaattctatcatcagcgtgggacagctgaatgagaacggctcacgcgtgttggttgaggacggactcatgaggatttgggatcgccgtcgtcgccttcttgccaaggtaaccggaggcactaatcgactctacatcctcagcgcgcaggtcgcacaaccagtttgcctcgccgctcgtcgggacgacgaggcgtggcagtggcacgagcgcttcgggcacctccacttcgaggccctgaagcagctcagtgccaaggagatggtgcgaggcatgccgtgccttgaccatgtggagcagctctgcgacgtctgcgtggtgacgaagcagcggcggctcccctttccccagcagacgagcttccgagccaaggaacggctcgagctcatgcacggggacttgtgtggcccagtgacaccggccacaccaggaggacgatgttacttcctgctgctcgttgacgacctctcccgctacatgtgggtgatggtcctcggcagcaagggagaggctgcggacgccatcaggcatgcgcaggctgctgcagaggtggagtgcggccgcaagctgcgcgtgctgcgcaccgacaacggcggcgaattcacagcggctgaattcacgtcgtactgcgctgatgagggcattcagcgccactacaccatgccgtatagcccgcagcagaacggcgtcgtcgagcggcgcaaccagacggttgtggggatggctcgggccctcctcaagcagagggggatgccggccatcttctggggggagacggtggtgacggctgcctacatcctcaaccgctcgcctaccaaggccctcgatggtaggacaccgtacgaggtttggcatgggcgcaagccggcggtctcccacctacgggtcttcagctgcctcgcgttcgccaaggagcttggccacatcggcaagctcgacgacaggagcaccccaagggtgttcatcggctacgcgaagggctcgaaggccttccgcatcctcgacccggagacacagcgtgtgcgcactgcgcgcgatgttgtgttcgacgaagggcgagggtgggtatgggacaaggcggtggacgatggttcgactccgacgtacgacgacttcaccgtcgagtacgtctacttcgagggagctgggggagtaggtagctcttcttcaccgagcgtgtctaccccagcccccgaatccccaccgactccgacaccaacacaccctcgggccacgacttcgactacgacgagctcttcgttgacaccaccccagccagtgactccacatgctccagcaccaacagccactcctccaagcacgtctactccgacgccagctcgtgttgagcgcagcccggtggagttcgctactccgctctcccacgacggggagcgcatcgacgcgtaccacgacggcgagcagctacggtaccgtacgatggaggatcttctcggcgaccagccggtgccggtgcctcgcgacctagaggcgcagttgcaccttgcgtgcaacgacggtgagcctcggtcttttgcagaggccgagaaacacgcggcatggcgtgccgcgatgcagtcggagatggacgcggttcaggagaaccgcacctgggagcttgctgacctccctcgtggtcaccgcgcgatcacccttaagtgggtgttcaagctgaagagggatgaagccggagccatcgtcaagcacaaggctcgcttggtggcacgcggtttcgtgcagcaggaggggatcgactacgacgatgccttcgctcccgtggcacggatggagtccgaaggctggggcgtccatcacatggacgtcaagtcggcgtttctgaacgacaacttgaaggaggaggtctacgtgcaccagccgccgggatttgtgatccccggcaaggagggcaaggatgcagaggtcgcggcgttcaaggaggagatgaaggccaccttccagatgagtgatctggggcctctctccttctacctggggatcgaagtgcaccaggacgactccgagatcacgcttcgacagaccgcctacgccaagcgcgtcgttgagctggctgggctcaccgattgcaacccagctctcactccgatggaggagagactgaagctgagccgcgacagcacagcggaggaggtggatgctacacagtaccggtgtcttgtggggagccttcgctacctcacccacacacggccggacttggccttctccgtcggctacgtcagtcggttcatgcagcgaccgacgatggagcaccagcaggctgtgaagaggatcatccgctacattgcggggactctcgaccacggtctctactacccaaggtgtcctggcaaggcacacttcgtcgggtacagcgacaacgaccacgccggcgacatcgacaccaacaagagcacgagcaggattctcttcttcctcggcaagtgcctcgttagctggcagtcggacaagcagcaagtggtggccctgtccagctacaaggccgagtacatagcggcctccgccgcttcgacccaggcgctctggcttgctcgactgcttagtgatctccccggcagagacactggaacggtggagctcagggtggatagcaagtccgctctggccctggcaaagaaccccgtttttcacgaacggagcaagcacatccgggtgaggtaccacttcatccgaagctacttggaggaagggagcatcaaggcgagctacatcaataccaaggaccagcttgcggacttgctcaccaagcctcttgggaggatcaagttcctcgagctctgctccaggatcgggatggcccaacttgcccacaagacgacgcacaagacttag

SEQ ID NO: 23453 - DNA, 4452 bp, Oryza sativa
  Clone ID: TF_OsC1528_2034
atgtccgacgctcggtctcggcgttcggtcgcctcgagcactcggcgtcagcaggacgccgagctcgccgcagcagaagagcgcaggcgagcaacggctcagaccgctgcagcagcagctagggcggccagactggcggcagcggagttggcagcagccagggcggaggcggaggcggaggcggcggaagatgcggcacgtgcggcggaggtagaggttgagaccttgcgcatcagcatcaacggctccatcgccggcgacatcaccgccgacagggagcttgaggagctggcaagaggaagggcacgggagcgggcagagcggtgggcagcagcccacctccacggcggtggcggcggcccaagggaccgcgcgcccgccaacgggaacccagatgggcgcgggcgtgccggcggcagcccggagcccgcacgcggccctcgcaggcagtgcggttctttctcccctgaccgacgccatggtcaccacggcgtccagacggtggttagagactttggtcccggcggtgggtggcctaccctcaccaaaaccaactacatcgagtgggccgcggtgatgagggtgaggctccaggtgcggcacatgtgggaggcagtccgtcccgcccgagatgcagttctcgctttcccagaagcggactgccaaggaggcctaggacgccatcactgcggcatgcatcggcagcgaccgcgcccgcaagtccacactgcaggcacccgcaaggagtgggagaacctggccttcaagccaggtgaggatgttgatgactttgctctccgtctcaacactctcttgcagaaaatggtgcagtacggcgacgacacctacgacgaggagagagctgtcgagaagctcttccgctgcgtccctgagaagtacagacagatcgctcgctcgatcgaatctctgctagacctctccacgatgtcgatcgaggaggcgttaggtcgcctcaaggtcgtcgatggtgatgagccacagcctctctcggggcccatcaccatcggcgggaagctccatctcactcgggagcagtgggaggcctctcagggtgacgggaggaagggggagtcatcttccccgacaggcggccgtaagccgcgcaaggcgcggggaggtgtccagctacggtgggcgcgaagacgtgccgagggtggcgcccgcagaggcgcccagggcgttgccaccggcaaccacaagccggcacgagacgacgcctgccgcaactgtggcaagcttggccattgggccaaagactgtcgacagccacgacgtggccaggcccacgtcgcacgggtggaggaagagccggctctgctcctggctcacgcaagcatcgagctacctccagcggcaccggccgcagcggctttcctccaccttgatgagccgaaggtactcgtctccctctgcaacggctccagcaacgacaaggctgatgggtggtacctcgacaccggcgccacccatcacatgaccggccgacgggagttcttcaccgagttcgactccagcgtccgaggctccgtcaagttcggggacgcctccggcgtggagatcaagggtgttggctccgtcaccttcaccgccaagtccggtgagcacaggctgctcaccggagtctactacatccctgcgttgaggaattctatcatcagcgtgggacagctggatgagaacggctcacgcgtgttggtcgaggacggactcatgaggatttgggatcgccgtcgtcgccttcttgccaaggtaaccagaggcactaatcgactcgacatcctcaacgtgcaggtcgcacaaccagtttgcctcgccgctcatcgggacgacgaggcgtggcagtggcacgagcgcttcgggcacctccacttcgaggccctgaagcagctcagtgccaaggagatggtgcgaggcatgccgtgtcttgaccacgtggagcagctctgcgacgtctgcgtggtgacgaagcagcggcggctcccctttccccagcagacgagcttccgagccaaggagcggctcgagctcgtgcacggggacttgtgtggcccagtgacaccagccacaccaggaggacgacgttacttcctgctgctcgtcgacgacctctcccgctacatgtgggtgatggtcctcggcagcaagggagaggctgcggacgccatcaggcatgcgcaggctgctgcaaaggcggagtgcggccgcaagctgcgcgtgctgcgcactgacaacggcggcgaattcacagcggctgaattcgcgtcgtactgcgctgatgagggcattcagcgccactacaccacgccgtacagcccgcagcagaacggcgtcgtcgagcggcgcaaccagacggttgtggggatggctcgggccctcctcaagcagagggggatgccggccatcttctgggggcaggcggtggtgacggccgcctacatcctcaaccgctcgcctaccaaggccctcgatggcaggacaccgtacgaggcttggcatgggcgcaagccggcggtctcccacctgcgggtcttcggctgcctcgcgttcgccaaggagcttggccacatcggcaagctcgacgacaggagcaccccaggggtgttcatcggctacgcggagggctcgaaggcctaccgcatcctcgacccggagacacagcgtgtgcgcactgcgcgcgacgttgtgttcgacgaagggcgagggtgggtatgggacaaggcggtggacgatggttcgactccgacgtacgacgacttcaccgtcgagtacgtccacttcgagggagctgggggagtaggcagctcttcttcacctagcgtgtctaccccagcccccgaatctccaccgactccgacaccaacacaccctcgggccacgacttcgactacgacgagctcttcgtcgacacaaccccagccagtgactccacatgctccagcaccaacagccactcctccaagcacgtctactccgacgccagctcgtgttgagcgcagcccggtggagttcgctactccgctctcccacgacggggagcgcatcgacgcgtaccacgacggcgagcagctacggtaccgtacgatggaggatcttctcggcgaccagccggtgccgggactggtgcctcgcgacctagaggcgcagttgcaccttgcgtgcgacgacggtgagcctcggtcttttgtagaggccgagaaacacgcggcatggcgtgccgcgatgcagtcggagatggacgcggttcaggagaaccgcacctgggagcttgctgacctccctcgtggtcaccgcgcgatcacccttaagtgggtgttcaagctgaagagggatgaagccggagccatcatcaagcacaaggctcgcttggtggcacgcggtttcgtgcagcaggaggggatcgactacgacgatgccttcgctcccgtggcacggatggagtctgtgcgactccttgcgctggctgctcgggaaggctggggcgtccatcacatggacgtcaagtcggcgtttctaaacggcgacttgaaggaggaggtctacgtgcaccagccgccgggatttgtgatccccggcaaggagggcaaggtgctacgcctgcacaaggccctctacggcttgcggcaggcaccgagggcgtggaatgccaagttggattccacgctcaaggggatgggcttcgagcaaagcccgcacgaggcggccatctaccggcggggcaatggaggaaatgccttgctagtgggtgtctacgtcgacgacttggtgatcaccggcaccaaggatgcggaggacaactccgggatcacgcttcgacagaccgcctacgccaagcgcgtcgttgagctggctgggctcaccgattgcaacccagctctcactccgatggaggagagactgaagctgagccgcgacagcacggcggaggaggtggatgctacacagtaccgacgtcttgtggggagccttcgctacctcacccacacacggccggacttggccttctccgtcggctacgtcagtcggttcatgcagcgaccgacgacggagcaccagcaggctgtgaagaggatcatccgctacgttgcggggactctcgaccacggtctctactacccgaggtgtcctggcaaggcacacttcgtcgggtacagcgacagcgaccacgccggcgacatcgacaccagcaagagcacgagcgggattctcttcttcctcggcaagtgcctcgttagctggcagtcggtcaagcagcaggtggtggccctgtccagctgcgaggccgagtacatggcggcctccgccgcttcgacccaggcgctctggcttgctcgactgcttagtgatctcctcggcagagacactagaacggtggagctcagggtggatagcaagtccgctctggccctggcaaagaaccccgtttttcactaa

SEQ ID NO: 23454 - DNA, 4068 bp, Oryza sativa
  Clone ID: TF_OsC1528_2045
atgagggtgaggctccaggtgcggcacatgtgggaggcagtccggtacggcgacgtcgactacgacgaggatcggcaggcactggatgccctcatcgctgcagtcccgcccgagatgcagttctcgctttcccagaagcggactgccaaggaggcctgggacgccatcactacggcacgcatcgacagcgaccgcgcccgcaagtccacactgcaggcactccgcaaggagtgggagaacctggccttcaagccaggtgaggatgttgatgactttgctctccgtctcaacactctcttgcagaaaatggtgcagtacggcgacgacacctacgacgaggagagagctgtcgagaagctcttccgctgcgtccctgagaagtacaggcagatcgctcgctcgatcgaatctctgctggacctctccacaatgtcgatcgaggaggcgttaggtcgcctcaaggtcgtcgatggtgatgagccacagcctctctcggggcccatcaccatcggcgggaagctccatctcactcgggagcagtgggaggcctctcagggtgacgggaggaagggggagtcatcttcctcgacaggcggccgtaagccgcgcaaggtgcggggaggtgtccagctacggtgggcgcgaagacgtgccgagggtggcgcccgcagaggcgcccagggcgttgccaccggcaaccacaagccggcacgagacgacgcctgccgcaactgtggcaagcttggccattgggccaaagactgtcgacagccacgacgcggccaggcccacgtcgcacgggtggaggaggaagagccggctctgctcctggctcacgcaagcatcgaactacctccagcggcaccggccgcagcggctttcctccaccttgatgagccgaaggtactcgtctccctctgcaacggctccagcaacgacaaggctgatgggtggtacctcgacaccggcgccacccatcacatgaccggccgacgggagttcttcaccgagttcgactccagcgtccgaggctccgtcaagttcggggacgcctccggcgtggagatcaagggtgttggctccgtcaccttcaccgccaagtccggtgagcataggctgctcaccggagtctactacatccccacgttgaggaattctatcatcagcgtgggacagctggatgagaacggctcacgcgtgttggttgaggacggactcatgaggatttgggatcgccgtcgtcaaaaaaatgccaaggtaaccggaggcactaatcgactctacatcctcagcgcgcaggtcgcacaaccagtttgcctcgccgctcgtcgggacgacgaggcgtggcagtggcacgagcgcttcgggcacctccacttcgaggccctgaagcagctcagtgccaaggagatggtgcgaggcatgccgtgccttgaccatgtggagcagctctgcgacgtctgcgtggtgacgaagcagcggcggctcccctttccccagcagacgagcttccgagccaaggaacggctcgagctcatgcacggggacttgtgtggcccagtgacaccggccacaccaggaggacgatgttacttcctgctgctcgttgacgacctctcccgctacatgtgggtgatggtcctcggcagcaagggagaggctgcggacgccatcaggcatgcgcaggctgctgcagaggtggagtgcggccgcaagctgcgcgtgctgcgcaccgacaacggcggcgaattcacagcggctgaattcacgtcgtactgcgctgatgagggcattcagcgccactacaccatgccgtatagcccgcagcagaacggcgtcgtcgagcggcgcaaccagacggttgtggggatggctcgggccctcctcaagcagagggggatgccggccatcttctggggggagacggtggtgacggctgcctacatcctcaaccgctcgcctaccaaggccctcgatggtaggacaccgtacgaggtttggcatgggcgcaagccggcggtctcccacctacgggtcttcagctgcctcgcgttcgccaaggagcttggccacatcggcaagctcgacgacaggagcaccccaagggtgttcatcggctacgcgaagggctcgaaggccttccgcatcctcgacccggagacacagcgtgtgcgcactgcgcgcgatgttgtgttcgacgaagggcgagggtgggtatgggacaaggcggtggacgatggttcgactccgacgtacgacgacttcaccgtcgagtacgtctacttcgagggagctgggggagtaggtagctcttcttcaccgagcgtgtctaccccagcccccgaatctccaccgactccgacaccaacacaccctcgggccacgacttcgactacgacgagctcttcgttgacaccaccccagccagtgactccacatgctccagcaccaacagccactcctccaagcacgtctactccgacgccagctcgtgttgagcgcagcccggtggagttcgctactccgctctcccacgacggggagcgcatcgacgcgtaccacgacggcgagcagctacggtaccgtacgatggaggatcttctcggcgaccagccggtgccggtgcctcgcgacctagaggcgcagttgcaccttgcgtgcaacgacggtgagcctcggtcttttgcagaggccgagaaacacgcggcatggcgtgccgcgatgcagtcggagatggacgcggttcaggagaaccgcacctgggagcttgctgacctccctcgtggtcaccgcgcgatcacccttaagtgggtgttcaagctgaagagggatgaagccggagccatcgtcaagcacaaggctcgcttggtggcacgcggtttcgtgcagcaggaggggatcgactacgacgatgccttcgctcccgtggcacggatggagtccgaaggctggggcgtccatcacatggacgtcaagtcggcgtttctgaacgacaacttgaaggaggaggtctacgtgcaccagccgccgggatttgtgatccccggcaaggagggcaagcggggcaatggaggaaatgccttgctggtgggtgtctacgtcgacgacttggtgatcgccggcaccaaggatgcagaggtcgcggcgttcaaggaggagatgaaggccaccttccagatgagtgatctggggcctctctccttctacctggggatcgaagtgcaccaggacgactccgagatcacgcttcgacagaccgcctacgccaagcgcgtcgttgagctggctgggctcaccgattgcaacccagctctcactccgatggaggagagactgaagctgagccgcgacagcacagcggaggaggtggatgctacacagtaccggtgtcttgtggggagccttcgctacctcacccacacacggccggacttggccttctccgtcggctacgtcagtcggttcatgcagcgaccgacgatggagcaccagcaggctgtgaagaggatcatccgctacattgcggggactctcgaccacggtctctactacccgaggtgtcctggcaaggcacacttcgtcgggtacagcgacaacgaccacgccggcgacatcgacaccaacaagagcacgagcaggattctcttcttcctcggcaagtgcctcgttagctggcagtcggacaagcagcaagtggtggccctgtccagctacgaggccgagtacatagcggcctccgccgcttcgacccaggcgctctggcttgctcgactgcttagtgatctcctcggcagagacactggaacggtggagctcagggtggatagcaagtccgctctggccctggcaaagaaccccgtttttcacgaacggagcaagcacatccgggtgaggtaccacttcatccgaagctacttggaggaagggagcatcaaggcgagctacatcaataccaaggaccagcttgcggacttgctcaccaagcctcttgggaggatcaagttcctcgagctctgctccaggatcgggatggcccaacttgcccacaagacgacgcacaagacttag

SEQ ID NO: 23455 - DNA, 4803 bp, Oryza sativa; identical to SEQ ID NO: 15681
  Clone ID: TF_OsC1528_2070

SEQ ID NO: 23456 - DNA, 7818 bp, Oryza sativa
  Clone ID: TF_OsC1528_2158
atggcgctggagaggcggctcgcgtacgccgcgctcatcccgttcctccttctcgcgctccccatcctgccgtccgattccccgtccggcggcggcggcggtggcgcgggtgggggtgggggagggggagaaaccctagacccgcccgcggcgaagtacgtggtgcggttcgtcgagtaccggcccgccgacgagcaccgggagtacctggaggacggcctccgcggggccgcgcggcctccccccgccgcgtcgtggcggtgggtggagcggcggaaccccgccgccgcgttccccaccgacttcgccgtgctcgagatccgcgacgcgtgccgcgcggctgtcgtcgacgccgtcagtgcgctcggccgtgtccgggacgtgcacgccgatgcgagctactccaggggcgtcctgtctgcggatcggccgcggcagcaggggaagctgttcacagccatgtcgttcgagggggaggaaggagggggagatagggaggtcgggtgcagcactgatagtaataattcctcttctgctggttggaggcggaagcttctcgtgcagagatcacaagtaacgtctctttttggagctgaacgactatgggggagaggtttcactggtaggaaagtcaagatggccatttttgacactggtattcgagcagatcatccgcacttccgtaatattaaggagcgcactaattggacaaacgaagacacactaaatgataaccttggacatggaacatttgtagctggagttattgctggtcaagatgcagaatgccctggatttgcacctgacactgagatatatgcatttcgagtgttcacagatgctcagatatcctacacatcgtggttcttggatgcatttaattatgcaattgcaactggtatggatgtactgaatttgagtattggtggacctgattatctggatctcccctttgtggaaaaggacgccgagctcgccgcagcagaagagcgcaggcgagcaacagctcagaccgctgcagcagcagcgagggcggccagactggcggcagcggagttggcagcagccagggcggaggcggaggcggaggcggcgaaagatgcggcacgtgcggcggaggtagaggttgagaccttgcgcagcagcatcaacggctccatcgccggcgacatcaccgccgacagggagcttgaggagctggcaagaggaagggcacgggagcgggcagagcggtgggcagcagcccacctccacggcggcggcggcggtccaagggaccgcgggcccgccaacgggaacccagatgggcgcgggcgtgccggcggcagcccggagcccgcacgcggccctcgcaggcagcgcggctctttctcccctgaccggcgccatggtcaccacggcgtccagacggtggtcagggactttggtcccggcggtgggtggcctaccctcaccaaaaccaactacatcgagtgggccgcagtgatgagggtgaggctccaggtgcggcaaatgtgggaggcagtccggtacggcgacgtcgactacgacgaggatcggcgagcactggatgccctcatcgctgcagtcccgcccgagatgcagttctcgctttcccagaagcggactgccaaggaggcctgggacgccatcgctgcggcacgcatcggcagcgaccgcgcccgcaagtccacactgcaggcactccgcaaggagtgggagaacctggccttcaagccaggtgaggatgttgatgactttgctctccgtctcaacactctcttgcagaaaatggtgcagtacggcgacgacacctatgacgaggagagagctgtcgagaagctcttccgctgcgtccctgagaagtacaggcagatcgctcgctcgattgaatctctgctggacctctccacgatgtcgatcgaggaggcgttaggtcgcctcaaggtcgtcgatggtgatgagccacagcctctctcggggcccatcaccatcggcgggaagctccatctcactcgggagcagtgggaggcctctcagggtgacgggaggaagggggagtcatcttccccgacaggcggccgtaagccgcgcaaggcgcggggaggtgtccagctacggtgggcgcgaagacgtgccgagggtggcgcccgcagaggcgcccagggcattgccactggcaaccacaagccggcacgagacgacgcctgccgcaactgtggcaagcttggccattgggccaaagactgtcgacagccacgacgcggccaggcccacgtcgcacgggtggaggaggaagagccggctctgctcctagctcacgcaagcatcgagctacctccagcggcaccggccgcagcggctttcctccaccttgatgagccgaaggtactcgtctccctctgcgacggctccagcaacgacaaggctgatgggtggtacctcgacaccggcgccacccatcacatgacctgccgacgggagttcttcaccgagttcgactccagcgtccgaggctccgtcaagttcggggacgcctccggcgtggagatcaagggtgttggctccgtgaccttcaccgccaagtccggtgagcacaggctgctcaccggagtctactacatccccgcgttgaggaattctatcatcagcgtgggacagctggatgagaacggctcacgcgtgttggtcgaggacggactcatgaggatttgggatcgccgtcgtcgccttcttgccaaggtaaccagaggcactaatcgactctacatcctcagcgcgcaggtcgcacaaccagtttgcctcgccgctcgtcgggacgacgaggcatggcagtggcacgagcgcttcgggcatctccacttcgaggccctgaagcgcctcagtgccaaggagatggtgcgaggcatgccgtgccttgaccacgtggagcagctctgcgacgtctgcgtggtgacgaagcagcggcggctcccctttccccagcagacgagcttccgagccaaggagcggctcaagctcgtgcacggggacttgtgtggcccagtgacaccggccacaccaggaggacgacgctacttcctactgctcgtcgacgacctctctcgctacatgtgggtgatggtcctcggcagcaagggagaggctgcggatgccatcaggcgcgcgcaggccgctgcagaggcggagtgcggccgcaagctgcgcgtgctgcgcaccgacaacggcggcgaattcacggcggctgaattcgcgtcgtactgcgctgatgagggcattcagcgccactacaccgcgccgtacagcccacagcagaacggcgtcgtcgagcggcgcaaccagacggttgtggggatggctcgggctcttctcaagcagagggggatgccagccatcttctggggggaggcggtggtgacagccgtctacatcctcaatcgctcgcctaccaaggccctcgatggcaggacaccgtacgaggcctggcatgggcacaagccggcggtctcccacctacgggtcttcggctgcctcgcgttcgccaaggagctcggccacatcggtaagctcgacgacaggagcaccccaggggtgttcatcggctacgcggagggctcgaaggcctaccgcatcctcgacccggagacacagcgtgtgcgcactgcgcgcgatgttgtgttcgacgaagggcgagggtgggtatgggacaaggcggtggacgatggttcgactccgacgtacgacgacttcaccatcgagtacgtccacttcgagggagctgggggagtaggcagctcttcatctagcgtgtctaccccagcccccgaatctccaccgactccgacaccaacacaccctcgggccacgacttcgactacgacgagctcttcgtcgacaccaccccagccagtgactccacatgctccagctccaacagccactcctccaagcacgtctactccgacgccagctcgtgttgagcgcagcccggtggagttcgctactccgctctcccacgacggggagcgcatcgacgcgtaccacgacggcgagcagctacggtaccgtacgatggaggatcttctcggcgaccagttggtgccgggactggtgcctcgcgacttagaggcgcagttgcaccttgcgtgcgacgacggtgagcctcggtcttttgcagaggccgagaaacacgcggcatggcgtgccgcgatgcagtcggagatggacgcggttcaggagaaccgcacctgggagcttgctgacctccctcgtggtcaccgcgcaatcacccttaagtgggtgttcaagctgaagagggatgaagccggagccatcgtcaagcacaaggctcgcttggtagcacgcggtttcgtgcagcaggaggggatcgactacgacgatgccttcgctcccgtggcacggatggagtccgtgcgactcctttttgcgctggctgctcaggaaggctggggcgtccatcacatggacgtcaagtcggcgtttctaaacggcgacttgaaggaggaggtctacgtgcaccagccgccgggatttgtgatccccggcaaggagggcaaggtgctacgcctgcacaaggccctctacggcttgcggcaggcaccgagggcgtggaatgccaagttggattccacgctcaaggggatgggcttcgagcaaagcccgcacgaggcggccatctaccggcggggcattggaggaaatgccttgctggtgggtgtctacgtcgacgacttggtgatcaccggcaccaaggatgcggaggtcgcggcgttcaaggaggagatgaaggccactttccagatgagtgatctggggcctctctccttctacctggggatcgaagtgcaccaggacaactccgggatcacgcttcgacagaccgcctatgccaagcgcgtcgttgagctggctgggctcaccgattgcaacccagctctcactccgatggaggagagactgaagctgagccgcgacagcacggcggaggaggtggatgctacacagtaccgacgtcttgtggggagccttcgctacctcacccacacacggccggacttggccttctccgtcggctacgtcagtcggtttatgcagcgaccgacgacggagcaccagcaggccgtgaagaggatcatccgctacgttgcggggactctcgaccacggtctctactacccgaggtgtcctggcaaggcacacttcgtcgggtacagcgacagcgaccacgccggcgacattgacaccagcaagagcacgagcgggattctcttcttcctcggcgagtgcctcgttagctggcagtcaatcaagcagcaggtggtggccctgtccagctgcgaggccgagtacatggcggcatccgccgcttcgacccaggcgctctggcttgctcgactgcttagtgatctcctcggcagagatactggagcggtggagctcagggtggatagcaagtccgctctggccctggcaaagaaccccgtttttcacgaacggagcaagcacatccgggtttgggagctcacagcaaataacattattatggtatcagctattggaaatgatggccctctttatggcacgctaaataacccggctgatcagagtgacgtcattggtgttggtggtattgattacaataaccatatagcttcattttcctctcgaggcatgactacttgggagcttcctcatgggtatggccgtgttaaacctgatgttgttgcgtatagtcgtgatataatgggttcaaagatcagcacaggttgtaaaaccctttcaggcaccagtgttgcaagcccggtggttgctggtgtagtatgcttgcttgttagtgttataccagaggagcatcggaaatccatccttaaccctgcaacaatgaaacaagcccttgtagagggtgcttctaggctttcaggaccaaacatgtatgagcagggcgctggcaagattgacctctggcaatcatacgaaatcttgaaaagttaccaaccgcgtgcaagcatctttcctaatacccttgacttcactgattgtccctatttctggcctttttgccgccaacctctgtatgctggagctatgccagtggtcttcaatgctacaattctgaacgggatgggggtgattggttatgttaaggatcctcctgtatggcagccctctgaggatgtcggcaatattcttagtgttcacttcacctactcagatgtcatatggccttggacaggttatcttgccctgcacttacaagttaaagatgaaggatctcagttttcaggcataatcagtggcaaggtcacattgtcaatttacagcccagcagcccatggggaaagcagtccacgaagtagttcatgtgttctttacctgaaggtcaaggtggtgccaacacctgttaggtccagaagaatattgtgggaccaatttcataatatcaaatacccatctggttttgttccaagagattcacttaatgtgcataatgatatccttgactggcatggcgatcacttgcacacgaattttcatatactgttcaacatgctgagagatgcaggatactacattgagacccttggatctccacttacctgctttgatgctagcaattatgggacactgcttatggttgaccttgaggatgagtacttcagtgaggagattcagaaacttaaggatgatgttgtacacaaagggcttggcgttgttgtttttgcagagtggtatcatgtcgacacaatggttaagatgacattctttgatgaaaatacacgcagttggtggactccaattactgggggtgcaaatgttcctgcacttaatgaacttttggcaccatttggcattgcttttggggacaaagtactaagtggtgacttctcaatcaatggtgagcagacccactatgcttctgggactgatatagtgcaattcccagcaggaggttttttgcatagcttccaactccaggacaactctaaaatttctcaggataactcaagaagcgcagatacacaaaataccccagataaaagcaagtgcctcctagtctgtggctctgtgcacatgctctcttctattcttggaatgatggaagcaggcaaaggtcgggttgcagtctatggagattcaaattgccttgacagtagtcacatggtaacaaactgctattggcttttgagaaaacttgtggagttcactggcaatagaatcaaagatcctgttcttttctcagaatctgctcagttaaaatttccagtttttgagagcatccatcaactgtcacgtagaccagatgtgaacttctcaacatattcaactgtcgttggcaatgaattgatctgtcaccaggattcccgatttgaggtttggggaacgaaaggttatggtacccaacaaacaggcacaacaagaaagttgccagagtaccagaaaagtgaagcttacaacatttcaacaccaatagcttctgacagcacaccagatgaagctggcctgcaaagaaatatttcaacaccaatagcttctaagtttgataaaagaatggactattttggttttctcgggcacgaagagaattctggatccctttatgctgtacaatttgtgcacacgcttagtaatagtaagattgacataggaatgctagtggcaagccaatggatggtaccttgctttgctgctactgcctgccttatgttgtacctaagttgcagagtgcaacaaaagcgccgacgacgaaagaaggggtcaacagctgctagattgtcaagtatggaccgtatggtctaa

SEQ ID NO: 23457 - DNA, 5217 bp, Oryza sativa
  Clone ID: TF_OsC1528_2206
gcggcccgtacccttcccaaggagaggcggcggcagcggcggcggaggtggcggcggccgtatgcgggagagagaaagagctcagctcgcatggccatcgcggtgaggtcggctgcggcggtggcgaggcactccctgcgccctccgctggccgcgcccggcagcatccgcggcgcctcgctcctgccgccgcagcgcgctcgcggcgtgggcccgtgtcgcgcccgcgctcgcgcggcgagctcctccgcgactggaggtggcgggcaccttcctccgctgttcagcgtggcgccgatgatggactggacggacaaccactaccggacgctcgcgcggctgatctcgaagcacgcgtggctctacacggagatggtggtcgcggagaccatcgtgcatcagaaagataacttggatagatttttagcgtttcctgctgaacagcatcctattgtgttgcaaattggtggaagtaatctggataacttagcgaaggcaactgaactggcaaatgcttattcgtacgatgagatcaacctaaactgtggctgccccagtggcaaagttgctggtcatggttgcttcggtgctcgcttaatgtttgatccagagtttgtaggggatgctatgtcagctattgctgccaattgtaatgtcccagtcagcgttaagtgcagaattggtgttgatgatcgtgactcctacgaagaactttgtgaatttgtagataaggttgtttcaaaatcaccaactaggcatttcattattcatgcccggaaggcattgctaagtggcctcagtcctgcagaaaatcggaacgttcctcctttaaaaaaaccagaaaattgccccatctcgagtgccatcctcttctcaatgagagtaaccattgaagttctaacatctgggagcttgaggagctggcaagaggaagggcacgggaacgggcagagcggcggcggcggcccaagggaccgcgcacccgccgacgggaacccagatgggcgcgggcgtgccggcggcagcccggagcccgcgcgcggccctcgcaggcagcgcggctctccctcccctgaccggtgccatggtcaccacggcgtccagacggtggtaagggactttggtctcggcggtgggtggcctaccctcaccaaaaccaactacatcgagcgggccgcggtgatgagggtgaggctccaggtgcggcacatgtgggaggcagtccggtacggcgacgttgactacgatgaggatcggcgggcactggatgccctcatcgctgcagtcccgctcgagatgcagttctcgctttcccataagtggactgccaaggaggcctgggatgccatcgctgtggcacgtatcggcagcgaccgcgcccgcaagtccacactgcaggcactccgcaaggagtgggagaacctggccttcaagccaggtgaggatgttgatgactttgccctccgtctcaacactcttttgcagaagatggtgcagtacggcgacgacacctacgacgaggagagagctgtcgagaagctctttcgttgcgtcccagagaagtacaggcagatcgctcgctcgatcgagtctctgctggacctctccacgatgtcgatcgaggaggcgttaggtcgcctcaaggtcgtggacggcgatgagccacagcctctctcggggcctatcaccattggcgggaagctccatctcactcgggagcagtgggaggccagccagggtgacgggaggaagggggagtcctctccctcgacaggcggccgcaagccgtgcaaggcgcgcggaggcgtccaactgcggtgggcgcgaagacgcgccgagggtggtgctcgcagaggcgcccagggcggcgccgccggcaaccacaagccggcacgagacgacgcttgccgcaactgtggcaagcttggccattgggccaaagactgtcgacagccacgacgcggcatcgagctatctccagcggcaccggccgcaacggctttcctccacctcgatgagccgaaggtacacgccttcctcggcaacagctccagcaacgacaaggctgatgggtggtacctcgacaccggcgccacccatcacatgactggccggcgggagttcttcaccgagcttgactctagcgtccgaggctccatcaagtttggggatgcctccggcatggagatcaagggcgtcggctccgtcaccttcaccgcaaagtccggtgagcacaggctgctcaccggagtctactacatccccgtgttgaggaactctatcatcagcgtgggacagctggatgagaacggctcacgcgtgttggtcgagcacggagtcatgacgatttgggatcgccgccgtcgccttcttgccaaggtaaccagaggcactaatcgactctacatcctcagcgcgcaggtcgcacaaccagtttgcctcgccgctcgtcgggacgacgaggcgtggcagtggcacgagcgtttcgggcacctccactttgaggccctaaagtggctcagcgccaaggagatggtgcgaggcctgccgtgccttgaccacgtggagcagctctgcgacgtctgcgtcctaacgaagcagaggcggctcccctttccccagcagacgagtttccgagccaaggagcagctcgagctcgtgcacggggacttgtgtggcccagtgacaccggccacaccaggaggacgacgttacttcctgctgctcgtcgacgacctctcccgctacatgtgggtgatggtcctcggcagcaaggcagaggctgcggacgccatccggcgcgcgcaggctgctgcagaggtggagtgcggccgcaagctgcgcgtgctgcgcaccgacaacggcggcgaattcacggcggctgaatttgcgtcgtactgcgctgatgagggcattcagcgccagtacaccgcgccgtacagcccgcaacagaacggtgtcaagcggcgcaaccagacggttgtagggatggctcgggctctcctcaagcagagggggatgccggccatattctggggagaggtggtggtgacggccgtctacatcctcaaccgctcgcctacgaaggccctcgatggcaggacaccgtacgaggcttggcatgagcgcaagccgggggtctcccacctgcgggtcttcggctgccttgcgttcgtcaaggagcttggccacatcggcaagctcgacgacaggagcaccccaggggtgttcatcggctacgcggagggctcgaaggcctatcgcatcctcaactcggagacacagcgtgtgcgcacagcgcgcgatgtagtgttcgacgaagggcgagggtgggtatgggacaaggcggtggacgatggttcgactccgaagtacgacgacttcaccgtcgagtacgtccacttcgagggagctgggggagtaggcaactcttcttcaccgagcgtgtctaccccagtccccgagcctccaccgactccgacaccaacacactctcgggccacgacttcgactacgacgagctcctcgcctacaccaccacagccggtgaccccacgcgctccagcaccaacagccactcctccgagcacgtctactccgacgccagctagtgttgagcgcaacccggtggagttcgctactccgctctcccacgacggggagcgcatcgacgcgtaccacgacggcgagcagctacggtaccgtacgatggaggatcttctcggcgaccagccggtgccgggactggtgcctcccgacctggaggcgcagttgcaccttgcgtgcgacgacggtgagcctcggtctttcgcagaggccgagaaacacgtggcatggcgtgccgcgatgcagtcggagatggacgcagttcaggagaaccgcacctgggagcttgctgaccttcctcgtggtcaccgcgcgatcacccttaagtgggtgttcaagctgaagagggatgaagccggagccatcgtcaagcacaaggctcgcttggtggcacgcggaaggctgggcgtccatcacatggacgtcaagtcggcgtttctaaacggcgacttgaaggaggaggtctacgtgcaccagccgccaggatttgtgatccccggcaaggagggcaaggtgctacgcctgcacaaggccctctacggcttgcggcaggcaccgagggcgtggaatgccaagttggattccacgctcaaggggatgggcttcgagcaaagcccgcacgaggcggccatctaccggcggggcaatggaggaaatgccttgctggtgggtgtctacgtcgacgacttggtgatcaccggcaccaaggatgcggaggtcgcggcgttcagggaggagatgaaggccaccttccatatgagtgatcaggggcctctctctttctacctggggattgaggtgcaccaggacgactccgggatcacgcttcgacagaccgcctacgccaagcgcgtcgttgagctggctaggctcaccgattgcaacccagctctcactccaatggaggagagactgaagctgagccgtgatagcacgacggaggaagtggatgctacacagtaccggcgtcttgtgggaagccttcgctacctcacccacacggctggacttggccttctccgtcggctacgtcagtcggctgtgaagaggatcatccgctacgttgcggggactctcgaccacggtctctactacccgaggtgtcctggcaaggcacacttcgtcgagtacagcaacagcaaccacgccggtgacatcgacaccagcaagagcacgagcgggattctcttcttcctcggcgagtgcctcgttagctggcagtcagtcaagcagcaggtggtggccctgtccagctgcgaggccgagtacatggcggcctccgccgcttcgacccaggcgctctggcttgctcgactgcttagtgatctcctcggcagagatactggagcggtggagctcagggtggatagcaagtccgctctggccctggcaaagaaccccgtttttcacgaatggagcaagcacatctgggtgaggtaccacttcatccgaagctacttggaggaagggagcatcaaggcgagctacatcaacaccaaggaccagcttgcggacctgctcaccaagcctcttgggaggattaagttcctcgagctctgcttcaggatcgggatggctcaacttccccacaagacgacgcacaagacttag

SEQ ID NO: 23458 - DNA, 5271 bp, Oryza sativa
  Clone ID: TF_OsC1528_2209
ctaccgccggccggcgccagatccacgccgcccaccgccggcctccgcgccgccacgcgtgcaccggccgccacccacgcgcgcgccagactccgccgccttgcgccgcagcagccctctccaccaccgaccgagccgctcaacatgcgccgccccacggtgccgccgccagcactccggccgaaaggcggagggactggctagatccggcgacggcgccgccggatccgcctgccgtcgccacccaccgaagccgtcgcggcagtcgagcccgctgccttcgcccgtcgcagcccgccgcgcgagcctgcccgccgccgccgcccgtcgccgcccgccgcgtgttgcgccgctctcggccggccgccggctgccgcgcgccccgccctggaaattgtcaaaagacctagcaggtatgttgtcgtcaaattccttcatcatatcccatggaccatctccaactccaaccaaaattatagacaagggaaattcacccttcccaagctcggttgagctctcagccagcagcagcagcagcaccggttgctcctccttcccctttcccttccccctctccacgcagcagccccccgcaggtgcgccatgtccgacgctcggtctcggcgttcggtcgcctcgagcactcggcgtcagcaggacgccgagctcgctgcagcagaagagcgcaagcgagcaacagctcagaccgctgcagcagcagcgagggcggccagactggcggcagcggagttggcagcagccagggaggaggcggaggcagaggcggcggaagatgcggcacatgcggcggaggtagaggttgagaccttgcgcagcagcatcaacggctccatcgccggcgacatcaccgccgacagggagcttgaggagctggcaagaggaagggcacgggagcgggcagagcggtgggcagcagcccacctccacggcggcggcggcggcccaagggaccgcgcgcccgccaacgggaacccagatgggcgcgggcgtgccggcggcagcccggagcccgcacgcggcccttgcaggcagcgcggctctctctcccctgaccggcgccatggtcaccacggcgtccagacggtggtcagggactttggtcccggcggtgggtggcctaccctcaccaaaaccaactacatcgagtgggccgcagtgatgagggtgaggctccaggtgcggcacatgtgggaggcagtccggtacggcgacgtcgactacgacgaggatcggcgggcactggatgccctcatcgctgcagtcccgcccgagatgcagttctcgctttcccagaagcggactgccaaggaggcctgggacgccatcgctgcggcacgcatcggcagcgaccgcgcccgcaagtccacactgcaggcactccgcaaggagtgggagaacctggccttcaagccaggtgaggatgttgatgactttgctctccgtctcaacactctcttgcagaaaatggtgcagtacggcaacgacacctacgacgaggagagagctgtcgagaagctcttccgctgcgtccctgagaagtacagacagatcgctcgctcgatcgaatctctgctggacctctccacgatgtcgatcgaggaggcgttaggtcgcctcaaggtcgtcgatggtgatgagccacagcctctctcggggcccatcaccatcggcgggaagctccatctcactcgggagcagtgggaggcctctcagggtgacgggaggaagggggagtcatcttccccgacaggcggccgtaagccgcgcaaggcgcggggaggtgtccagctacggtgggcgcgaagacgtgccaagggtggcgcccgcagaggcgcccagggcgttgccaccggcaaccacaagccggcacgagacgatgcctgccgcaactgtggcaagcttggccattgggccaaagactgtcgacagccacgacgcggccaggcccacgtcgcacgggtggaggaggaagagccggctctgctcctagctcacgcaagcatcgagctacctccagcggcaccggccgcagcggctttcctccaccttgatgagccgaaggtactcgtctccctctgcaacggctccagcaacgacaaggctgatgggtggtacctcgacaccggcgccacccatcacatgaccggccgacgggagttcttcaccgagttcgactccagcgtccgaggctccgtcaagttcggggacgcctccggcgtggagatcaagggtgttggctccgtcaccttcaccgccaagtccggtgagcacaggctgctcaccggagtctactacatccccgcgttgaggaattctatcatcagcgtgagacagctggatgagaatggctcacgcgtgttggtcgaggacggactcatgaggatttgggatcgccgtcgtcgccttcttgccaaggtaaccagaggcactaatcgactctacatcctcagcgcgcaggtcgcacaaccagtttgcctcgccgctcgtcgggacgacgaggcatggcagtggcacgagcgcttcgggcacctccacttcgaggccctgaagcgcctcagtgccaaggagatggtgcgaggcatgccgtgccttgaccacatggagcagctttgcgacgtctgcgtggtaacgaagcagcggcggctcccctttcctccgcagatgagcttccgagccaaggagcggctcgagctcatgcacggggacttgtgtggcccagtgacaccggccacaccaggaggacgacgttacttcctgctgctcgtcgacgacctctcccgctacatgtgggtgatggtcctcggcagcaagggagaggctgcggatgccatcaggcgcgcgcaggccgctgcagaggcggagtgcggccgcaagctgcgcgtgctgcgcaccgacaacggcggcgatgagggcatccagcgccactacaccgcgtcgtacagcccacagcagaacggcgtcgtcgagcggcgcaaccagacgggggaggcggtggtgacagccgtctacatcctcaatcgctcgcctaccaaggccctcgatggcaggacaccgtacgaggcttggcatgggcacaagccggcggtctcccacctacgggtcttcggctgcctcgcgtttgccaaggagcttggccacatcggtaagctcgacgacaggagcaccccaggggtgttcatcggctacgcggagggctcaaaggcctaccgcatcctcgacccggagacacagcgtgtgcgcacagtgcgcgacgtagtgttcgacgaagggcgagggtgggtatgggacaaggcggtggatgatggttcgactccgacgtacgacgacttcaccatcgagtacgtccacttcgagggagctgggggagtaggcagctcttcttcaccgagtgtgtctaccccagtccccgagcctccaccgactccaacaccaacacaccctcgggccacgacttcgactacgacgagctcttcgtcgacaccaccccagccggtgtccccacgcgctccagcaccaacagccactcctccgggcacgtctactccgacgccagctcgtgttgagcgcagcccggtggagttcgttactccgctctcccacgacggggagcgcatcgacgcgtaccacgacggcgagcagctacggtaccgtacgatggatgatcttctcggcgaccagccggtgccgggactggtgcctcgcaacctggaggcgcagttgcaccttgcgtgcgacgacggtgagcctcggtcttttgcagaggccgagaaacacgcggcatggcgtgccgcgatgcagttggagatggacgcggttcaggagaaccgcacctgggagcttgctgacctccctcgtggtcaccgcgcaatcacccttaagtgggtgttcaagctgaagagggatgaagccggagccatcgtcaagcacaaggctcgcttggtagcacgcgacttcgtgcagcaagaggggatcgactacgacgatgccttcgctcccgtggcacggatggagtccgtgcgactccttgcgctggctgctcaggaaggctggggtgtccatcacatggacgtcaagtcggcgtttctgaacggcgacttgaaggaggaggtctacgtgcaccagccgccgggattcgtgctccccggcaaggagggcaaggtgctacgcctgcacaaggccctctacggcttgcggcaggcaccgagggcgtggaatgccaagttggattccacgctcaaggggatgggcttcgagcaaagcccgcacgaggcggccatctaccggcggggcaatggaggaaaatgccttgctgatgcggaggtggcgacgttcaagaaggagatgaaggccaccttccagatgagtgatctggggcctctctccttctacctggggatcgaagtgcaccaggacgactccggaatcacgcttcgacagaccgcctacgctaagcgcgtcgttgagctggctgggctcaccgattgcaacccagctctcactccgatggaggagagactgaagctgagccgtgacagcacggcggaggaggtggatgctacacagtaccggcgtcttgtggggagccttcgctacctcacccacacacgatcggacttggccttctccgtcggctacgtcagtcgattcatgcagcaaccgacgacggagcaccagcaggctgtgaagaggatcatccgctacgttgcggggactctcgaccacggtctctactacccgaggtgtcctggcaaggcacacttcgtcgggtacagcgacagcgaccacgccggcgacatcgacaccagcaagagcacgagcgggattctcttcttcctcggcgagtgcctcgttagctggcagtcggtcaaacaacaggtggtggccctgtccagctgcgaggccgagtacatggcggcatccgccgcttcgacccaggcgctctggcttgctcgactgcttggtgatctcctcggcagagacactggagcagtagagctcagggtggacagcaagtccgctctggccctggcaaagaaccccgttttccacgaacggagcaagcacatccgggtgaggtaccactttatccgaaactacttggaggaagggagcatcaaggcgagctacatcaacaccaaggaccagcttgcggacttgctcaccaagcctcttgggaggatcaagttcctcgagctctgctccaggatcgggatggcccaactttcccacaagacgacacacaagacttag

SEQ ID NO: 23459 - DNA, 1213 bp, Oryza sativa
  Clone ID: TF_OsC10527_2
tcacaggtaccggctatcagtatctgtggctgttccatgagcccaaagtagaagaggacttgacatggctggagacggtactagaaccacaatttgcggtggggcaatcacgggaccagtgcccgctcttaccacacttgaaacacgcatcgggagagcttgcagaagtaaatgttctcccacctttgtcaggataatcatctacagctcagcaggtcaatcactgagctgattcgcatagactgaagcttatttaacaggtcgaaaccagatacaactgattgtagtcatagctcaaagcacaccatcatattggatcagtacatacaaagcgtgcgtattgacaccgtctaattggattagtacattcgaagtggataagtaggctttggttcaccagtccatgcctaaattccttgaggtaaacagatcttcaacgtagagaattactggtccagatgctctgatgaaagtctgcatttgaacctttgccgaattttcatcttcattcaatttcttcaggagctgcgattttgagggaagggcgtacattccagcagcaacggctttccttatggcccacccatggtgaggagcaaaaacctgagcataagccttagatgctgcatcccttaaggagttgccctctgtaaccagtatttgctcaaacagaattttaaccatatcaatcccacgcttaaccctcagcatattcctagtatggctcccagcttgcctgacggtgcccttctgaatgtccaactcaaccatctcaggcaattttgagattgacttggatgcctccagcaaatcatcaacctgaaacggaggtagtagcaaacaattaatagccgacctaactcctcgaggacaagggagagcgaagactagagagcgggggtggcggcgggggcttgccttggcgacgtagtccatctcggcgaacttgaaggcgatgccgaggcagccgaagaggacggagacgttggagcaggcgcgggcgaaggagcccacctccatggccgggccgggggcctgctgcttggccaccgcctcgagctcctcgaacgacgccgcgatccgccgcagcggcttgtccccgtcgctcgaccccatccccacctcccgctcccgcttgctccgccgatgcggctcgtcgccggcggcgtcaagctctccgcctccggtatggttggggtgggaaagtcaaaac

SEQ ID NO: 23460 - DNA, 2079 bp, Oryza sativa
  Clone ID: TF_OsC1713_4329
tcacttcaacttgagcttgacttggcgtagcggaagtcgatatggctcatcttgagtggaggtggatggcttgtcttccacttcaataggcttgacatctccaatagacatgttcttcatagctctcatcaagccttcatcacctacattatccaaattctcgtgcccctcttgggagccattagtttcatcaaattgaacatcggcggtttcttccacaatacctttgttcttgttgtagacatggtatgccttgctatttgaggcataaccaccggggcaatcatttaccaaatgcccaacatcacgacacttggagcaatacttaccattgctcttgacaaaatgaatggcacggtgagaaggtttcttacccttctttggaatgaatccaagtcccttcttgttaaggatgcaccgttgctcactcaaaatcttgtcaagagtgttcttacccttgaagcatctctccaaactcttgttgagcttagccacttgctccttaagctcattgttctcaacaacaagtgaggcatcacaaatagaaacacaagaccacggcggaaaagcaacggacggcggcggcgacgaggaagaagcggcggcggtcttcggcttgacgacgacggcggtgctccggcggtctacagcggcggcgaaggggcggacgaggacggcgacgcgacggcgaccacgatggcgacctccccgagcgacgacgacaactggagcgacggcggcgcacggctggagcgacggcggcgacggcggctcgaggtcacacggcgctagggcgcttccgacggcgagagacgaaggcgaaggtggcggcgggtagaggagacaccggtgatcctccaaagaagcatgatccttctttagagccttgaacttgacaatttccttctcactataagcatggagctcctcaaacatactcacaagctcatgataggaaacatcatcactctcactatcactaagagatgttaccttagaagagccctttgccatgagacaaagtggagcaaagagtgatggagcctccttgatggctacaacggccatcttctttttcttggagcttgcatcatcaccaccttcttcttcggacccggatgaggcggagctctcctcatttgagtcccattccctgatgacggcctcaatcttcttcccttccttcttgagcttcttcatgagcttgtagcctccactcttcttcttggatgacttgtctccatcatcatccttggaagggcacttggaagcaaagtgtcccttctcaccacactcaaagcacctcaagttggtgagagtcttattgggtcttctatttcttctcctattggagttggagccccttcctctctcatttctttttcccaagagatcattgaaccttctagcaagaagggcaatctcttcctccaagtcttcattggctacattcaccttggtcttccctttgtcttcaacttcggcttggagagcaatgcacttcttggaaggtgaggcttcctccatctccttcttcttcaacttgtatatgtcattggtgttgatcttcaccaagaggcttgcgggtgtcatccttaacatgtcggagttgatgagcatggtgacaagggtctcatacttctctggtagagccctaagcatcttttgggcatcctcaagatcggtgtaggttgccccaagtcccttgagatcattcacaatgacattgagcctcccatacatgtcattcacactctcatgaggcaatatggagaatgtctcatattggatcttaaggaaatgaagcttggcatccttgtactcacttgcaccctcatggatcttcgccaacttgttccaaatctcatatgcggtctcaaggttgctcaccctatcgaactcctcttggcttaaagagttgaacaaggcattcatggcttgggcattgagttggaggttgtggtgatcaatctccgtcaagggcgtgccggtgatagcaaagcattttaattttccaagtggagtagttgtgccatttaacatatgagccttccctacatggttcacctcgttcgacat

SEQ ID NO: 23461 - DNA, 2877 bp, Oryza sativa
  Clone ID: TF_OsC1528_1666
atggcggcagcggttctccctgcgctgcgcccgaccccgccggcgagcaattttccggcgctgctcccgaccccgccgaggagccagatgctgcctctgctcccgacgccgtgcctcatcatcctccccgcctccttccgcgctccgccggcctccgatcccaagcccggccgcgccgacgccgtcgagaggtgggacgcgcgcaaggaagccggcagttcggcagcgtcatcgtcatcgtctagctccagcagcgggcttccctgccgcgccgactcctgcgagcgttgggacgcgcacaagaacaagaaagccggcggctcggcagcgtcgtcgtcgtcgagggccaggggcgggatcagccccggccgcgccgactcctacgaacgctgggacgcgcacaagacaccaggcagccctgcgtcgtcgaccggcagcagcaggagcccctgccgcgcggactccgtcgagcgatgggacagcaacaagcggccgctgagccgcgcgtcgtcggccgagcgctgggacatcaacaagaagcctcgccccaagaaagacgctgtcggcagcggcaagaacaactccacaagccagacgacgacgatggtctccggaacctctgccttcgacgtcctgcaccgggagaagacggcaataaggtttttgggaagcgcttcgcgcgactgctccctgttcgtccgcgacggctcgccttcctctccgctcgcgtgcttcgcgccttcgtcgacgctcgcaaccgcgagtagttcctgccgagcaaccggtctttccaccacctcgatcagggtcactctgtggctgatggttatgaaatgcttctgggtgagtactggcaaacctgaaggaattcttactgctgatcaccagaagcaatttgaggaagccactactctctttgtgggatgcattcttagcgttcttggcgatcgtctggtcaaggtgtatatgcatatgaccgacgctaaggagttgtgggatgcactgaatactaaattcggtgctactgatgctagcaatgatctgtatatcatggagcagtttcatgactacaagatggctgacaaccgttctgtagtcgaacaggctcatgagatacaaaccatggctaaggaactcgaactccttaagtgtgtcttacccgacaaatttgtggccgggtgcattattgcgaaactacctccatcatggagaagtttcggtactgcactcaaacacaagagacaggaatactccgttgaggggttgatagcgtctcttgatgttgaggagaaagctcgggaaaaagacgccgcgtctaagggcgatggtgggcagtccagtgccaatgttgtgcacaaggtccagaacaagagcaaggggaaatacaaagctcaacagaccaccaacttcaagaagcagaagaagaacaacaacaatcctaaccaggatgagaggacttgctttgtgtgtgggcaacctggtcatctggctaggaagtgtccacaacgcaaggggatgaaggcacctgcagggcagacttctaagtctgctaatgtgaccattggcaacactggagatggaagcgggtatgttggcacggtagatctgaagtttacttcgggaaagatcgtgcagctgaagaacgtgcaacatgtcccttctatcgacaggaatcttgttagtggctcccgtctgactagagacggatttaagttagtttttgagtctaataaagtagtcgtgtctaaacatggatattttattggtaaaggttatgagtgcggaggcctgttccgcttttccctttctgatttctgcaataagtctgtgaactatatttgtgccagtgtggatgatgaggctaatgtttggcactcaccctcacatggtcttctcgttcatcaaatggacgttaagacagcttttcttaatggagagctggatgaggagatctatatggatcaacctgatgggtttgtagttgaagtcaatgaggcagataaatgtgtgtactatcgccatggtgggggtgagggagttattctgtgcttgtatgttgatgacatactgatatttgggacaaaccttgaggtgataaatgaggttaaatcattcttgtctcaaaattttgatatgaaggatttgggtgtagctgatgttatcttaaacattaagctaattagaggtgagaatgagattacactcttgcagtcccattatgtggagaagatcttgaatcgctttggctacagtgatagtaagccttctctaacaccttatgatcctagcttgttgcttcgcaagaacaaaagaattgctaggaatcaactggaatactcccaaatcattggctcgctgatgtacctggctagtgcaactaggtctgatatctcctttgctgtgagcaagttgagccggtttacctctaatccgggagatgatcactggcgtgcgcttgagcgagtaatgcgctatctgaaaggtaatatggaattggggcttcactatactgggtatcctgcggtactggagggttatagtgattctaactggatctctgatgtggatgagatcaaagccactagtggatatgtcttcatactgggtggtggtgctgtttcgtggaggtcttgcaaacagaccattttgacgaggtcaactatggaagcagaactgacggcactggatactgctactgttgaggcagaatggctgcgtgatctattaatggatctgcctattgttgaaaaaccgccggttggagccgagccccaaccgccggcgccccacctccccacgccgcccgccttctccgcccctcttcgcgccccactccgcgcccgcgtcgccgcccaccttccccacatctcccggccc

SEQ ID NO: 23462 - DNA, 1439 bp, Oryza sativa
  Clone ID: TF_OsC1528_1686
atggctgacaaccgttctgtagtcgaacatgctcatgagatacaaaccatggctaaggaactcgaactccttaagtgtgtcttacccgacaaatttgtggccgagtgcattattgcaaaactacctccatcttggagaggtttcggtactgcactcaaacacaagagacaggaatactccgttgaggggttgatagcatctcttgatgttgaggagaaagctcgggaaaaagatgccgcgtctaagggcgatggtggacagtccactgccaatgttgtgcacaaggcccagaacaagagtaaggggaaatacaaagctcagcagaccaccaacttcaagaagaagaagaacaacaacaatcctaatcaggatgagaggacttgctttgtgtgtggtcaacctggtcatctggccaggaagtgtccacaacgcaaggggatgaaggcacctgcagggcagacctctaagtctgctaatgtgaccattggcaacactggagatggaagcgggtatggtaatttatctactgttttttcagttaatcagtctactaattggtgggttgatacagggggcaatgtcgcgcggggttccaccgtcctaatggggaatgggtcatatgcttctattcatggtgttggcacggtaggtcgagccgaaccaactaactgctacagccaaaaatgcaagggcaatttcacattacgaaaatgcagcctccgcctagccgccgaggatgagatccatgccctcctcgccatcatggagctcggcgcattccttcactcactcctcctccgcccggctgccagggatgagatcaatgccttcatgtcggcatggagttcggcgcgctcctccgcttactcggcccctgtctggcaaagcccacttctaataccatcgagttcgacgtgggttccgtcgagtttgatcgacgtgctcgcctccatactcacagaactcatcgtcgggccttgctgccccatcatcaccctcgaccaggcggaggtcaccgaggccttcagggcctttgactgcaagggcaacggcttcatctctgccattgagctcacacgctccatagctgacacggcgacaccgacagcctcatcatccttttatttgactgtgggtcccatcacccactgacatgtgggtcatagtattttttttcttatttgtttaactgatatgtgggccccacatattttgttttaaatttgtagttttcaattttgctcgttttattttttcgggatcaaactactacgtaagcgctacattaatgccacgtgggacaaagtcctcgtcaatcaaaatcagggagcaagaaatctcgtttgactggttttgtaagttgagagacgggatgaaactggtttttcggttcatggaccaaaatcagactaggacaaatttctaaaaaaaaaaaaaaa

SEQ ID NO: 23463 - DNA, 4383 bp, Oryza sativa; identical to SEQ ID NO: 15717
  Clone ID: TF_OsC1528_1816

SEQ ID NO: 23464 - DNA, 2682 bp, Oryza sativa; identical to SEQ ID NO: 15727
  Clone ID: TF_OsC1528_2002

SEQ ID NO: 23465 - DNA, 3249 bp, Oryza sativa; identical to SEQ ID NO: 15729
  Clone ID: TF_OsC1528_2106

SEQ ID NO: 23466 - DNA, 4068 bp, Oryza sativa; identical to SEQ ID NO: 15705
  Clone ID: TF_OsC1528_2166

SEQ ID NO: 23467 - DNA, 4524 bp, Oryza sativa
  Clone ID: TF_OsC1528_2167
atggctggttttgccgatacattgaggccggataaattcaccggtgtgcactttaagagatggcagatcagggtgagtactggcaaacctgaaggagttcttactgctgaacagcagaagcaattcgaggaagccactactctctttgtgggatgcattcttagcgttcttggcgatcgtctggtcgaggtgtatatgcatatgaccgacgctaaggagttgtgggatgcactgaatactaaattcggtgctactgatgctagcaatgatctgtatatcatggagcaatttcatgactacaagatggctgacaaccgttctgtagtcgaacaggctcatgagatacaaaccatagctaaggaactcgaactccttaagtgtgtcttacccgacaaatttgtggccgggtgcattattgcgaaacttcctccatcttggagaagtttcaatactgcactcaaacacaagagacaggaatactctgttgaagagttgatagcgtctcttgatgttgaggagaaagctcgggaaaaagatgctgcgtctaagggcgatgatgggcagtccagtgccaatgttgtgcacaaggcccagaacaagagcaaggggaaatacaaagctcagcagaccaccaacttcaagaagcagaagaacaacaacaacaatcctaatcaggatgagaggacttgctttgtgtgtggccaacctggtcatctggctaggaagtgtccacagcgtaaggggatgaaggcacctgcagggcagacttctaagtctgctaatgtgaccattggcaacactggagatggaaacgggaatcttgttagtggctcccgtctgactagagacggatttaagttagtttttgagtctaataaagtagtcgtgtctaaacatggatattttattggtaaaggttatgagtgcggaggcctgttccgcttttccctttctgatttctgcaataagtctgtgaaccatatttgtggcagtgtggatgatgaggctaatgtctggcactcacgtttatgtcatattaattttggcttgatgtctcggctttccagcatgtgtttaattcctaagttttccattgtcaaaggttctaagtgccatagttgtgtgcaatcaaagcaacctcgcaagcctcacaaggctgctgaggagagaaacttggcacatctagaactcctacattcagatctttgtgaaatgaatggggtgttgacgaagggtggaaaacgatatttcatgacgttgattgatgatgctactagattttgctatgtgtacttgttgaaaacgaaagacgaggctctagactattttaaaatttataaggcagaagttgaaaatcaacttgacagaaacataaaaagacttaggtctgatcgtggtggagagtttttcttatacgagtttgacttattctgtgaggaatatggcattatacatgagaggacgcctccctattctcccgagtctaatgggattgccgaaaggaagaaccgcacactgactgacttggtgaatgccatgttggacaccgcgggactacctaaggcatggtggggggagtctcgtgatgttaccttctttgagagctttttcccaatgaaggatacacatagtaattctagtcaaccttctgaaataattcccagttcattcacaccaccagaacaaattgaatatacacatgaacatgtcactgaggaggatgatagtgaagctcctcgaaggagtaaaagacaaaggacgactaagtcttttggtgatgatttcactgtgtacctcgtggacgacactcctaagtcaatttcagaagcatatgcatctcctgatgcagactactggaaggaggctgtccgtagtgaaatggattccattatcgctaacggaacttgggaggtgacagagcgaccctatgggtgtaaacctgtggggtgcaagtgggtgttcaaaaagaagctgaggcctgacagtaccattgaaaagtacaaggctcggcttgttgctaagggctatactcaaaaagaaggtgaagatttctttgacacttactcacctgttgccagattgaccacaatttgtgtgctactttccctagcagcctcacatggtattctcgttcatcaaatggacgttaagacagcttttcttaatggagagctggatgaggagatctatatggatcaacctgatgggtttgtagttgaaggtcaagaagccaaggtgtgcaaattgttgaagtctttgtatagtctgaaacaagctcctaagcaatggcatgagaaatttgatagaacattgacatctgcatgcttcgcagtcaatgagacagataaatgtgtatactatcgccatggtgggggtgagggagttattttgtgcttgtatgttgatgacatactgatatttaggacaaatcttgaggtgataaatgaggttaaatcattcttgtctcaaaaatttgatatgaaggatttgggagtagctgatgttatcctaaacatcaagctaattagaggtaagaatgggattacactcttgcagtcccattatgtggagaagatcttgaatcactttggctacattgatagtaagccttctccaacgccttatgatcctaacttattgcttcgcaagaacaagagaattgctaggaatcaactggaatactcccaaatcattggctcgctgatgtacctggctagtgcaactaggcctgatatctcctttgctgtgagcaagttgagccggtttacctctaatccaggagatgatcactggcgtgcgcttgagcgagtaatgcgctatctgaaaggtactatggaattggggcttcactattctgggtaccctgcggtactggaaggatatagtgattctaactggatctctgatgtggacgagatcaaagccactagtgggtatgtcttcacactaggtggtagtgctgtttcgtggaggtcttgcaaacagaccattttgacaaggtcaaccatggaagcagagttaacggcactggatactgctactgttgaggcagaatggctgcgtgatctattaatggatctgcctattgttgaaaaaccggtgccggctatccttatgaactgtgacaatcaaacggtaattgtcaaagtgaatagttctaaggataatatgaaatcgtctagacatgtgaaaagacgattgaagtctgtcaggaagttgagaaactccggagttataacgttggattacatccaaacaactagaaacctggcagatcctttcacgaagggactatcacgaaatgtgatagacaatgcatcgaaggaaatgggtttgagacccatcgaagatgctgtcctacagagcattcttgaaagaactcacctttgtgagcttgactgttggtcgcagtctatgaagattttgggtgaatcttctaggaagcttactaaagacctaggagactgcggtcactgcgggcgggcgttggcggcacacgcggcaggtctgcagcagtgcgctagtgcggcactgcggctgcggcggcagccggccaaggcggcggactgcattcacatgctcgtccttgtcccatgcatactgctgttgattgcatgcccctttctcatgctcatcctcaacccatgccgatgcaattcccttcaagacgagaaaactatccgtctttcgcgtcttggggacaagtggaacatcaggctttctgattcgagtggtaacagaaggatggttggtggatgccgaaagtttgcggaagacaatgatgttggagtgggtgatatctgcctgttcgagcctgtattcggcggacttgatagcgggcttcttcttgggcgagaggccgtcgacgacgagcgcgcagtgcacgttgaccgtcacctcccggaggtcgacgtcgcccagccggagcgtcaccggcgcgctgacgtacacgtcgagcggcacgttgccggcctcctcgctctcctccagcgcgccctgcagccccggcccgaagccgtgccgcccctccatggccaccctcaccaccgtcgtgttccggtggccctggtagaacgccggcagccgccccgagcacagcgtcgtgccgcggtacgacaccgccgcccgcgacccggcgccgtagccgatcccgaccatgtcgttggggttctccgcgcggacggacgccaccagcttggcgtacacggtgaggtcggaggagctcacgtcgaaccgcgccacggacatgtcggacacggagtaggacggggccttgggcctgcacgcgtacaggaggtacgccgacgtcgccgccaccgccacgacgaggaggaggaggaagcagcagcaccagcagaggcagccgcgcaggctgccaccgtccgtgatgcggtgccggggcatgttgcggctggcgccaggcgggaccgtggccagcgagctggagccgtactcctccgtgagcatcacgtaccgcggcggcggcggaggcttggacggccccgagcccccgtcgtacgccat

SEQ ID NO: 23468 - DNA, 3719 bp, Oryza sativa
  Clone ID: TF_OsC1528_2230
atggctaaggaactcaaactccttaagtgtgtcttacccgataaatttgtggccgggtgcattattgcgaaactacctccatcatggagaagtttcggtactgcactcaaatacaagagacaggaatactccgttgaggggttgatagcgtctcttgatgttgaggagaaagctcgggaaaaagacgccgcgtataagggcgatggtgggcagtccagtgccaatgttgtgcacaaggcccagaacaagagcaaggggaaatacaaagctcaacagaccaccaatttcaagaagcagaagaagaacaacaacaatcctaaccaggataagaggacttgctttgtgtgtgggcaacctggtcatctggctaggaagtgtccacagcgcaaggggatgaaggcacctgcagggcagacttctaagtctgctaatgtgaccattggcaacactggaaatggaagcgggtatggtaatttacctactgttttttcagttaatcagtctactaattggtgggttgatactggggccaatgtacatgtttgtgctgacatctcattgttttcttcttatcaggtcgcacggggttccaccgtcctaatggggaatgggtcacatgcttctgttcatggtgttggcacggtagatctgaagtttacttcgggaaagatcgtgcagctgaagaacgtgcagcatgtcccttctatcgacaggaatcttgtcagtggctcccgtttgactagagacggatttaagttggtttttgagtctaataaagttttcgtgtctaaacatggatattttattggtaaaggttatgagtgcggaggcctgttccgcttttccctttctgatttctgcaataagtctgtgaaccatatttgtggcagtgtggatgatgaggctaatgtttggcactcacgtttatgtcatattatttttggcttgatgtctcgactttccagcatgtgtctaattcctaagttttccattgtcaaaggttctaagtgccatagttgtgtgcaatcgaagcaacctcgcaagcctcacaaggctgccgaggagagaaacttggcaccactagaactcctacattcagatctttgtgaaatgaatggggtgttgatgaagggtggaaaacgatatttcatgacgttgattgatgatgctactagattttgctatgtgtacttgttgaaaacgaaagacgaggctttagactattttaaaatttataaggcagaagttgaaaatcaacttgacagaaagataaaaaggcttaggtctgatcgtggtggagagtttttctcgaacgagtttgacttattttgtgaggaacatggcatcatacatgagaggacgcctccctattctcccgagtctaatgggattgctgaaaggaagaaccgcacactgactgacttggtgaatgccatgttggacaccgcgggactacttaaggcatggtggggggaggcattgttgacctcaaatcatgtgttaaacagagttcttaacagaaataaagacaaaacaccatatgagatatggattgggagaaaaccatcactttcttatttgcgcacatgggggtgcttggcgaaagtcaatgtaccaataacgaagaagcgcaaacttggacctaagactgtggactgtgtctttctgggatatgctcatcatagcattgcctatagatttttactagttaaatccgaggtaccggacatgcatgttggtacaattatgaagtctcgtgatgctaccttctttgagagctttttcccaatgaaggatacacatagtggttcgagtcaaccctctgaaataattcccagttcaatcacaccaccagaacaaattgaacatacacatgaacatgtctctgaggaggatgtcagtgaagctcctcgaaggagtaagagacaaaggacggctaagtcctttggtgatgatttcactgtgtacctcgtggatgacactcctaagtcaatttcagaagcatatgcatctcctgatgcagactactggaaggaggctgtccgtagtgaaatggattccattatcgctaacgggacttgggaggtgacagagcgaccctatgggtgtaaacctgtggggtgcaagtgggtgttcaagaagaagcttaggcctgacggtactattgaaaagtacaaggctcggcttgttgctaagggctatactcagaaagaaggcgaagatttctttgacacttactcacctgttgctagattgaccacaattcgtgtgctactttccctagcagcctcacatggtcttctcgttcatcaaatgaacgttaagacagcttttcttaatggagagctggatgaggagatctatatggatcaacctaatgggtttgtagttgtaggtcaaggcaaagtgtgcaaactgttgaagtctttgtatggtctgaaacaagctcctaagcaatggtataagaaatttaacaaaacattgacatctgcaggctttgcagtcaatgaggcagataaatgtgtgtactatcgccatggtgggggtgagggagttattctgtgcttgtatgttgacgacatactgatattgggacaaaccttgagaggtgagaatgggattacactcttgcagtcccattatgtggagaaaatcttgaatcgctttggctacattgatagtaagccttctccaacaccttatgatcctagcttgttgcttcgcaagaacaaaataattgctaggaatcaactggaatactcccaaatcattggctcgctgatgtacctggctagtgcaactaggcctgatatctcctttgttgtgagcaagttgagccggtttacctctaatccgggagatgatcactggcatgcgcttgagcgagtaatgcactatctgaaaggtactatggaattagggcttcactatactgggtatcgtgcggtactggagggttatagtgattctaactggatctctgatgtggatgagatcaaagctactagtggatatgtcttcacactgggtggtggtgctgtttcgtggaggtcttgcaaacagaccattttgacgaggtcaaccatggaagcaaaactgacggcactggatactgctactgttgaggcagaatggttacgtgatctattaatggatctgcctattgttaaaaaaccggtgccggctatccttatgaactgtgacaatcaaacggtaattgtcaaagtgaatagttctaaggataatatgaaatcgtctagacatgtgaaaagacgattgaagtctgtcaggaaattgagaaactccggagttataacgttggattacatccaaacagctagaaacctggcagatcccttcacgaagggactatcacgaaatgtgatagacaatgcatcgaaggagatgggtttgagacccatcgaagatgctgtcctgcagagcagtcttgaaagaactcacctttgtaagcttgactattggtcgcagtctatggagattttgggtgaatcttctaggaagcttactaaagacctaggaatgcctgcgaaaagtttcgaccgagcagccggtctttccgccacctcggtacgtagctcggctgcgatagcgctgggaccgggagcacgtccgagctatgcttgccgtccggctgcgactactagaggaagaagacgactggatggagatcgatctgtccctcccatgcaagtcaacga

SEQ ID NO: 23469 - DNA, 2745 bp, Oryza sativa
  Clone ID: TF_OsC1528_2260
atggcagatcagggtcactctgtggctggcagcgatgaaatgcttctgggtgtatacatgaccgacgctaaggagttatgggatgcactgaatactaaattcggtgctactgatgctagcaatgatctgtacatcatggagcagtttcatgactacaggatggctgacaaccgttctgtagtcgaacaagctcatgagatacaaaccatggctaaggaactcgaactccttaagtgtgtcgtacccgacaaatttgtggccgggtgcattattgcaaaactacctccatcttggagaagtttcggtactgcactcaaacacaagagacaggaatactctgttgaggggttgatagcgtctcttgatgttgagaagaaagctcgggaaaaagatgctgcgtctaagggcgatggtgggcaatccagtgccaatgttgtgcacaaggcccataacaagagcaaagggaaatacaaagctcaacagaccaccaacttcaagaagcagaagaagaagaagaacaatcctaatcaggatgagaggacttgctttgtgtgtggccaacctggtcatctggccaggaagtgtccacaacgcaaggggatgaaggcacctgcagggcagacttctaagtctgctaatgtgaccattggcaacactagagatggaagcgggtatgtcgcacggggttccaccgtcctaatggggaatgggtcacatgcttctgttcatggtgttggcacggtagatctgaagtttacttcgggaaagatcgtgcagctgaagaacgtgcagcatgtccctactatagacatgaatcttgttagtggctcccgtctgactagagacggatttaagttggtttttgagtctaataaagtagtcgtgtcaaaacatggatattttattggtaaaggttatgagtgcggaggcctgttctgtttttccctttctgatttctgcaataagtctgtgaaccatatttgtggcagtgtggataggggtgggaaaaataagaccgaaccgaagaaccgaaccgaaaagaccgagaccgagaccgaaaagaccgagatcgagaccgaaaagaccgagaccgagaaattcgggtctgatcatggtggagagcttttctcaaacaagtttgacttattttgtgaggaacatggcatcatacatgagaggacgcctccctattctcccgagtctaatgggattgctgaaaggaagaaccgcacactgactgacttggtgaatgccatgttggacaccgcgggactacctaaggcatggtgggggaaggcattgttgacctcgaatcatgtgttaaacagagttcctaatagaaataaggacaaaacaccatatgagatatggattgggagaaaaccatcactttcttatttgcgcacatgggggtgcttagcgaaagtcaatgtaccaataacgaagaagcgcaaacttggacctaagactgtggactgtgtctttctgggatatgctcatcacagcattgcctatagatttttaatagttaaatctgaggtacctgacatgcatgttggtacaattatggagtctcgtgatgctaccttctttgagagctttttcccaatgaaggatacacatagtagttcgagtcaaccctctgaaataattcccaattcaatcactgaacatacacatgaacatgtcactgaggaggatgtcagtgaagctcctcgaaggagtaagagacaaaggacggctaagtcctttggcgatgatttcactgtgtacctcgtggatgatactcctaagtcaatttcagaagcatatgcatctcctgatgcagactactggaaggaggctgtccgtagtgaaatggattccattatcgctaacgggacttgggaggtgacagagcgaccctatgggtgtaaacctgtggggtgcaagtgggtgctcaagaagaagcttaggcctgacggtactattgaaaagtacaaggctcgacttgttgctaagggctatactcagaaagaaggcgaagatttctttgacacttactcacctgttgctagattgaccacaattcgtgtgctactttccctagaagactcacatggtcttctcgttcatcaaatggacgttaagacagcttttcttaatggagagctggatgaggagatctatatggatcaacctgatgggtttatagttgaagtcaatgaggcagataaatgtgtgtactatcgccatggtgggggtgagggagttattctgtgcttgtatgtggacgacatattgatatttgggacaaatattgaagtgataaatgagtcccattatgtggagaagatcttgaatcactttggctacattgatagtaagccttctccaacaccttatgatcctagcttgttgcttcgcaagaacaagagaattgctaggaatcaactggaatactcccaaatcattggctcacttatgtacctggctagtgcaactaggcctgatatctcctttgctgtgagcaagttgagccggtttacctctaatccgggagatgatcactggtgtgcgcttgagcgagtaatgcgttatctgaaaggtactatggaattggggcttcactatactgggtatcctgcagtactagagggatatagtgattctaactggatctttgatgtggatgagattaaagccactagtggatatgtcttcacactaggtggtggtgctgtttcgtggaggtcttgcaaatag

SEQ ID NO: 23470 - DNA, 645 bp, Oryza sativa; identical to SEQ ID NO: 15732
  Clone ID: TF_OsC359_5521

SEQ ID NO: 23471 - DNA, 1985 bp, Oryza sativa; identical to SEQ ID NO: 14872
  Clone ID: TF_OsC359_6217

SEQ ID NO: 23472 - DNA, 4029 bp, Oryza sativa; identical to SEQ ID NO: 14913
  Clone ID: TF_OsC1713_3583

SEQ ID NO: 23473 - DNA, 3699 bp, Oryza sativa; identical to SEQ ID NO: 14912
  Clone ID: TF_OsC1713_4249

SEQ ID NO: 23474 - DNA, 1535 bp, Oryza sativa
  Clone ID: TF_OsC24769_1
cccgggctgcaggcggaagaacggaacggaacggaacaccagccgctgctccggcaagcgctcgccgccggcgaggcaaagatggagaacactcaatttagccgtccaaaggcggtaccctataatgactcctgggagatacccaattctgactatattctcttgtatctcaatgacaaacaaactgggaagatcacttgcatggtatgtgggaaagaaggacactacacttgtgagtgccccatgaagaataaagaaaaatatgtcatatgtactctttgtggcaaggttggccactgtcacttatggtgctgccatcagaatgagagtgagaggcgtgcttgccgtcgttgtggagaaaaaggacactatgataattggcatcacctaggttgctccagctgtgagaagcatcatccactcgggagatgtcctatgggaaaaattacatgttttctttgtgaaggcaatggacatgtccctgttcaatgtcatttgagtccaatgctcactgcaataactcagaatcaacgagagagtttccgagctactctgagacaagcattgagagaaacaagcaacacagcagtcacaccaattacattgaccagagaattagagccatataatgataagaatggaggccaacctaaaggggacaatgaaatggtgcccagggtcttaggcttcaatcaaggagaggaaggccattctgctttgaggaaccctaacagatgccatgtaccatcctctgacaaggctaacgttgctgcagataaggcaccaaaccaatctttaggagtaacctgcttcaactgtgggggcaaaggtcactattcaaataaatgtcctcaaaagcaaaagcaacatggagtcagatcaaccaatgctgcagctatgaaagataagacaccgaacctaacaggagtgacctgcttcgactgtggtgacagaggtcacttttcttatacatgtcctcaaaatctactagaagtcatgttgactgcagaactagagccacatgatgatacctatgaacgccaacctaaagcggataatggaacagtaccaactgtcctaagcctgaattgtggtgaggcaagccattgtggtaggaataatcccatgaaaagtctggaatcatcctctgataagatcaattctacagctatgacatataaggcaccaaaacgagtgttaggtgtaatctgcttcaactgtcatgaggaaggtcattatgcaaatagatgtcctcaaaagcaacagggaatcaactcaggtacttcccaatccccaataaagcggcagaggaaggaatgactgatgtaagttgatatcgagcaaacttgtcttaacatagatgttgataaaaaagaactaataatatattgttccgtgaaattgtaatggatgaaagatttatcagatattcaaaggaggttgtggttgtaaaaccataaccatttttggtattgtagaatttgatattgaataatatcaagtgatccgtgtgttgcatgaaaaaaaaaaaaaaa

SEQ ID NO: 23475 - DNA, 5867 bp, Oryza sativa
  Clone ID: TF_OsC73154_1
ccctctcaacgtcacgggcttgcagatctggcccgtgaaacggttattggcccagacaaagagaggtagtccagaagctgatagccttgacacttcttgcagttcgcctcccacaggcggactagctgatcgagaaggttgattgtgatagataaacccgcatcgagggtcaggtcatgcacccaggagtcgtcttctttcccttgccgtagggatttcttcctatttttggagatctcatagaccaacggcattaggtcttttggtcttcggccgttaatccatgcggagtcccagaagcgcgtcgtattcccatcgcccacagttatctttgttgaggcggcgaagaggttcctatccacaccatcacaaggcgtttccaaacccacccaaggcttgcttggatctctccattcgttccacaaccatcgcaatcttagagctcttgtgaatttgtccaagcttaggacaccaaggcccccctggctggtcggcaagcatgtctttgcccagttgaccttgcatttccccccggtgatatcccccgtaccagcccaaaggaagcgacgtctctgcttgtcaagctgctccagggattccttcatcaccttcaaggcagtgaggagataaattggctgtgctgaaagcacagactttacaagcgtggttctcccggctgctgccatgtttttccccctccaacttgcaactctccctgatattttgtcgaagaccggttgcaagtccgtttttcgcagccttcccagagcaagcgggaggcccaagtattttagtgggaaatttgcccgcttcgccggaacgccttggaggacctcttccaggtctatattgccgcatcttatggccgcaacctgggatttctgaaggttggtgacgagtcctatggctgtgccaaaacgatgtaggatgttcgcggaagtcgcaacatcgttctgggtgggattaatgaagatcacatcatcatccgcatacattgagatccgcagccgagttgttcttcctcgtaattttgaaattgcacccaactctgttgccttggaaaggatacgttgggatatcgaagacgacagtaaagcccctagccagtctatccatcttgtcgggaagcccttgcgctgcagcaaggccagtaggtaatcccatcgcacggagtcgaaggcttttgttatatccaacttgaagagcaacattgctcgtctttggcggtggtatcttctgatcgtgtttcttacgaagaggtagttgtcatgaatacttctcccctttatgaaagcgctttgattgaccgagatcaactcatgcatgtggggccttaaccgcagcgctagcatcttagcgaagatcttggcgatgctatgaattagactaattggcctatagtccgaaacgctttcagccccatccttttttgggattaggacgatgtttgctgagttgagcaaattcaggtgcgcacatctcaggttatagatggagctgaagactagcagaatgtcatccttgatgatttcccagcaaactttgaagaaggccccagtgaagccgtctggtcccggtgctttgtcggctggcatttccttaattgccttatgcacctcctcctcagtgaagggttcccccagcgtggctagatcaatcggtgtgatgtccaacgtctcccagtttagctcgtttggcctcggccccggcctccccatgaagcttgcgaagtgatcatggatcgtcaattccttatcaccgtgcgtcaccgcccaaccactgtcctttttcaatctttggattgtattccttctccttcgcgcattaaccttgaggtggaagaacttcgtgttcgcatctccttcacggatgtgagttaccctggaggcttgctttttccttgccctttctatagaagcgagtcctaggactttccgcttgagagccgccctcagtcgcgtttccaggggggtgagttctctgtgctcttgtgccacgtcgagtctttggatgacattgagtgccatatggaattgcaatttagcctctgagcagatgccttttgtccaatctctaaggccgaccgccgtatgttgcagcttttgattcaggcggtgcataggctcagtgtgcgaagaaggttggctccagatgtccttgactttgtccttgaaccccgggacccgtgtccaaaagttttcaaacttgaaggtcctcggacgatgtgggccttgcgggttggacagtacaagagggtaatggtcggatggccctgtaggaagggcatggagaacatggtgggggaaagcaagatcccattcctcattgcaaaagcaacggtcaagcttgacaagggttgcctttcgacgctcattactccaagtgaacttcctgttttgcagggggatctcatgcagctcacatcgatcaatgactgcgcgaaaacgtctcatgcgtgcgaggttgaggttgctattgtttttgtccctagcacggtagatcatgttgaagtctccaaggatgagccatccttccccagggctgggccttaatctcctaatgtgccggaggaacgaatctttgaggtggtgccttgttggcccgtagacaccagtgaggaggaacgtaactcctgagcgaatatctgttatttgcgcggagatcgagaagcggccgattcgaacctcctggacatcaaaatctccactactccaaaggagaaggattcctcctctcgtgcctctcgccggcttgaaggcaaatttatcaagcttgtagcctcctaagaaacgagcaaggccgtcatctatgctttggagtttggtctcttggaagcaggccaaggtgcactttgtgtcgagcatgagctcatggactacgttgcagcgcgcaggtgagtttaggcctctcacattccaggagatgagataacagtctgtcggagcgggtgcaaacacaacagcacgcaaatggaagaggaggaagacgaagttcttgccaacattggcttcgccaactagagatatcagcgccgcatccattgtctcctgctcttcgtcgtcgatgccgaagatggtggtgagggcggcgatgacgtgcgccggcagtgggccatcgaacatggcgacgtactcggcgatgacctgctcaattgaagcgccttcttcgccgttgaggacgcccagccttttgaagagaacgcgttggcagcgctccatcgtcggccgtgctggttgcttggcaatgcgctcactgcgtcgggtgggctggctgtgctgccttgtgcggatcttgaggcgtcgtcccatgtggagcggtcgcgcacacggcgatcttggtggcgacctcggcggtgaggcgatgatcggttgcggcggcgaggcgaacagagcatcgaggacgcccgtcgagatcggtgacgccgaggctgctgcttgggcaagctgggtggcaaccggggaaggtggcggcggcgccacaatgtcgtcaatctccatcgcgccggtggggactaccgggccttgggctaatgccggcgaggtgacccgcgggggcggcgagtcaatctgcgggaatggctctcccacaggggggtcggtcgccgcagccgccagctcaatccgcaggagcgcctcctctacttgttggcaagtagtcgtcgaggtaggcggcggcagcgccgacttgatgcgcgcgaaggcgtgttcgaccgggatcggctcccaggccgcgttctggaaccaggcttcaatcctcggtttggctgggcgacccgagagggctggcgtggcagccttgtctgcgatgatggagagccactgcagttggctcaccggcgacaacgtgttcgtctggggttcctgacacaagaagctggagttgtgcagcgcgtggagcaaacgaaattcacctacctctgcctggttcgcggatttgtgtagaaggggaatgttcatcagtttgctcgagtcgtagaccggatcagccgtgcgccgcgtgccgccgccgctacggttggcgcctcccctgtcccagcgacgcggggagcgcgtgcgctcacggcggtagttgttgtcgcttccccgcctatcatcccggccacggccgagatcccggcctcggtcatcacgatcatcatcgcggtcattgcggcgccagggtctcgggtggtcattgccagacccccgacgacgaccacgcccgccgcgcccgccctgatcgcgggcatggcggccatcgcgatcagcacagccgtcgcggtcgtcgcgctcgccatcccaatcatcctcgtcatcgtggtcgccttcatcatgaaggtgtcctccccgtactgcgcgtccacggcggggtctgtccgcgcggccatcgatggcgtcgcggtcagaccggcgttctggccggcgagcctcccggcgctcgtcatcccgatcacgccctccgaggcgctcgtggaccgatcgtggcggcggcgggtggtgcgggaagtcttcaaagactcgccctgggacctgttcaccgtcgagcactcccaggctccaaggcggtaggcggcgcttggccggctggaagctgccttgcccctccaaatcaatggtcgccgccgtgtagtcatgaatctcctccaagtggaagagcaccggatggcgcacccccctctgccagtgctccagtgggttctccaccgcaaataggggcgccaggttcgggtccttcgcccgctttgtgaagccaagccacatcctcttcgggatggtgctaggattcgccgtccacgcccataggtcgatggagcgcgtgttaccagactccactgggtggacgacgtccgtctcgatctgttccagggcgcaagtgcgaccaatgatgcgctcagcaatgtccgcggcccaggcatgcatggggacgccgtcaagacacaaccgaactcggaacatcagggcgacaccaagcgcgctcttgaggctgcgccacttgatgaagtggatctcaatgccgtgccgcttgacgtatcccttcgccagcgcttcctcacaatgtcgacggtgctggaacttgatgaggaaagcttgtgggtgatggagagacacggccacctcgccacggcggagcttgaactcgtcgaggaaggcctgctcgacgtcgcgcggctcggtggtcggcggagcgcgggccgcccaggagaccaatcttagccaggggcggtcgcggaggcggcgtcgggggccgggtgacgggatcctgcttggcgggtgacggcagtggagcaggggaggcgcggttgcgtggcgaatgcgctggcgagcgggcgcgacgaggggcgggggggtgcgtgtcaggaaggcggcgcgtgttggtacgacggcgaggtggagtgcgttggcgaggcggaggcggggagtgtgaggtagaacgaactcgacgtggtggaggggacgagagccgagcacggtcagcgcgagaagcgccgcagagtcgaggcgcgcggttcgcagcgtcgcggtggcgacagtcgcgcgcccgatggccggagcgacggcagaggaagcagcggactggatctctacactgggctgcacggtggccgcgggagaggcaaatgaaacatttcccactgatctgcgcccaaaagtcgcggtgggagaggcagcctcgcctagtccggacgacgtcgtttcgccttgaaggtggccggtgcgccctgcttgaatgctctccgcttgaatgctctgcacgtctccaccaatgcttccgctgaacccggatccagcccggttctccggggagagagccgcccatgtcctgctcggcgacgcgacgcggaggcaggctagcatcgtagggagcagctctccgcggcgaggtgtcat

SEQ ID NO: 23476 - DNA, 1502 bp, Oryza sativa
  Clone ID: TF_OsC73154_11
ttagccaggggcggtcgcggaggcggcgtcgggggccgggtgacgggatcctgcttggcgggtgatggcagtggagcaggggaggcgcggttgcgtggcgaatgcgtcgacgtggtggaggggacgagagccgagcacggtcagcgcgagacgcgccgcggagtcgaggcgtgcggttcgcagcgtcacggtggcgacagtcgcgcgcccgatggccggagcgacggcagaggaagcagcggactggatctctacactgggctgcacggtggccgcgggagaggcaaatgaaacatttcccactgatctgcgcccaaaagtcgcggtgggagaggcagcctcgcctagtccggacgacgtcgtttcgccttgaaggtggccggtgcgccttgcttgaatgctctccgcttgaatgctctgcacgtctccaccaatgccaactccaggtttgtcagtgacgatccataaatccgtcaccgagaatccatcacggattaacaagtttcttgtagtgcccgcagcagcctccaccggctcgtggtccagcacgacgacgtgctcgccgcggacctccccgctcagtgccgccgacatggacgacgccgcggaggtggccgggagggagaagcggagcacgccgtcgatgcggcggcggagaaggaggagcacgctggccaccgcgccgcggcgggatccggcggggacgagggagacgacgacactgacgagaaggagaggatcccgtcgggagtagcgagcgcggggcacgctgacgccgacgaccaccatgccaaccgctagggggctaccgcctccacaggctccgcctccgccaccgctgcctactggccgccacgcgctcgactgcccgccgccaccgccgcgcatttgctccactccgcttcgctggccgtcgcgcttgcacgccgcctccgcgaccgccgtccttctctcccgcctcgcccgcgcagaccggcatgacgccccgtttgagaggacggcaatcggcacggtggaaaacgaggctgaaatccagacaaacctaagctcccaggagaggacgagcagcaacacggtggagaccatcacgaagaccctcaatggccccagcgccacgccgctcccggacacggcgaacgcgagcgcggcgaccgcgaggagcacgctggggaggcggcgcgcgcgccgcctagcggtggcgacggcccggaccacgacgagcagcgtgacgacctggacgagctgcaggcgcgcctccagggcgcccacgacggcctcctcgagctggtccatcagctcggccgcctcggcgtcgacgcccgccggcgccaggcgcctggctcgcgcgagcaggggcaccagcatggcgaggcgggcggcgttgtcgcgcatcctggcgtgggcgacgtcgagggcgaactgcacggtgtcgacgtcgcggaggagcgggaggaggttgcggagcaccaacgggaccatgggatgcgcgttcgccattgggg

SEQ ID NO: 23477 - DNA, 1432 bp, Oryza sativa
  Clone ID: TF_OsC1713_5364
atgctccgtagccgcgctcgcctgccgctgcgcctgcctccagccgtgcgccgctgccgctccccatctgcggcaaaggaaaaggatgccacatcagtaaaaccggacaaaaatactgccgagggacctcaggagatgcctcgctatgatgatcattatggaagcacacgcttgtatgttggtagactgtcttcgcgcactcgttctcgtgacctagaatatcttttcggcagatatggaaggtcttgtgtgtttgacttgaatgatcttgttgaaggtttttcggttttttacacaacccgggagtggaagttgcaagtcggtgatgcatttgagtacttgagtcatgatggcttactgtttggcaaccattggtgcagaatacgtgaagtggagttgaagcgcgactacgcgtttattgaattcagtgatccccgtgatgctgatgaagcgcggtataacctagatggcagggatgttgatggaagccgcattcttgttgagtttgctaaaggagttccacgtggtgctgctggtggttcacgtgaatatatggggagaggacctcctccaggaacaggtcgctgttttaactgtgggattgatggtcactgggcaagagactgcaaggctggtgactggaagaacaaatgttaccgttgtggagaaagaggtcacatagaaagaaactgccaaaacagtccaagaaatctcagccgatctaggtccagatccctatctggatctcccaggggacgcagagatcgtgatgataggagatcaaggagtcttagctacagcagaagtcccaggcgatccatctccccagcagcaaatggaaaggagcgcaaccccagcccgaatggtaggcggagtccaaggagtccacaggatcgggtaagcccaccacccaaggataatgatgagcgcaatggtgacagcccctggggcagggagaacagcaggagcccatctgacggctaccgtagccctgtggctgccaatgggcgcagcccaagcccaaggaacaatggaagccctagtccaatggacaacaatagccgaagcccaagggacaacggcagcccgagccctagggatggaaatggtgatggtggtagccgtggcggctcacgctcgcccagagcaagcgagtcccctgaagcttgaaatttaatcccagtctctggcgttcatcttgtggatggtcatgctatggttgtaatagttatatttccggtttaagacgagatcaaggagtcttaacacctgaaaggatttggtgcccttggggctatgctatattgctattggtgtgtaatggatcgatgaactttctattagcctgcattgtttttgcggtctggtatcaccctgagattgcaacttttgttgctttggtcgctgaacaacgttgacgacagttctcttt

SEQ ID NO: 23478 - DNA, 1319 bp, Oryza sativa
  Clone ID: TF_OsC1713_5535
ccggccgggctcgaccgactctcccgtctcctcgcgagttcacccgcccgccgcctgcggcgatctccatccagcgagcagcggcgccggcgccggcgtaccgctgcttccgccgcatcctctatctctggagatgcctcgctatgatgatcattatggaagcacacgcttgtatgttggtagactgtcttcgcgcactcgttctcgtgacctagaatatcttttcggcagatatggaagaatacgtgaagtggagttgaagcgcgactacgcgtttattgaattcagtgatccccgtgatgctgatgaagcgcggtataacctagatggcagggatgttgatggaagccgcattcttgttgagtttgctaaaggagttccacgtggtgctgctggtggttcacgtgaatatatggggagaggacctcctccaggaacaggtcgctgttttaactgtgggattgatggtcactgggcaagagactgcaaggctggtgactggaagaacaaatgttaccgttgtggagaaagaggtcacatagaaagaaactgccaaaacagtccaagaaatctcaggcgagagagaagttattcgcgctccccatcgccacgccgtggacgtggtcatggtcgtagtcgtagctatagccggagccggagcaggagttacagccgatctaggtccagatccctatctggatctcccaggggacgcagagatcgtgatgataggagatcaaggagtcttagctacagcagaagtcccaggcgatccatctccccagcagcaaatggaaaggagcgcaaccccagcccgaatggtaggcggagtccaaggagtccacaggatcgggtaagcccaccacccaaggataatgatgagcgcaatggtgacagcccctggggcagggagaacagcaggagcccatctgacggctaccgtagccctgtggctgccaatgggcgcagcccaagcccaaggaacaatggaagccctagtccaatggacaacaatagccgaagcccaagggacaacggcagcccgagccctagggatggaaatggtgatggtggtagccgtggcggctcacgctcgcccagagcaagcgagtcccctgaagcttgaaatttaatcccagtctctggcgttcatcttgtggatggtcatgctatggttgtaatagttatatttccggtttaagacgagatcaaggagtcttaacacctgaaaggatttggtgcccttggggctatgctatattgctattggtgtgtaatggatcgatgaactttctattaaaaaaaaaaaaaaaaaaaca

SEQ ID NO: 23479 - DNA, 1295 bp, Oryza sativa
  Clone ID: TF_OsC1713_5589
ccggccaggtccgcccttctgacagccgccgcatccgcgccgcccccgacctaggattccgccgccattctcctccaaggagatgccgcgctatgatgatcgttatggaagcacgcgcttgtatgttggtagactgtcttcccgcactcgttctcgtgacctagaataccatttcagcagatatggaagaatacgtgaagtggagttgaagcgcgactacgcatttattgagttcagtgatccccgtgatgctgaggaagcaaggtacaaccttgatggcagggatgttgatggaagccgcattcttgttgagtttgctaaaggggttccacgtggtcctggtggttcacgtgaatatatggggagaggacctcctcctggaacaggtcggtgttttaactgtgggattgatggtcactgggcaagagactgcaaggctggtgactggaagaacaaatgttaccgctgtggggagagaggtcacatagaaagaaactgtcaaaacagcccaagaaatctcaggcgtgagagaagttattcatgctctccatcgccacgccgtggacgtggtcgcagtcggagctatagccggagccggagccggagccgcagttacagccggtctaggtccagatccctgtctggatctcccagggcacgcagagagcttgaaagatcaaggagtcttagttacagcaggagtcccaggcgatccatctccccagcagcaaatgaaaagaagcgcagccccacccctgatggtagccgtagtccaaggagtccacaggaccaggtgagcccaccacccaaggataatgctgagcgtaatggctcagatcacggtgacagcccccggggcagggagaacagcaggagcccgtctgatggctaccgtagccctgcagctgccaacgggcgcagcccaagcccaaggaacaatggaagccctagcccaatggacaacggtagccgaagtcctagggatggaaatggtgacggtggtagccgtggtggctcacgctcacctagaccgagcgagtctcctgaagcctgaaatttaatcgcagtctatggcgttcgtcatgctatggttgtaatggttacattcccggtttaagacgagatgagtgtatttgctcttttctcaaaaacgacagcgtattttgttactttgtgaatgtcatgctatggttgtaatagtcacagtcctgttttaagacgagataagtgtatttggttcttttctcaaaacgacagcgtattttgctaaaaaaaaaaaaaaaaaaaaaaaaaaa

SEQ ID NO: 23480 - DNA, 3861 bp, Oryza sativa; identical to SEQ ID NO: 14828
  Clone ID: TF_OsC1713_4259

SEQ ID NO: 23481 - DNA, 3469 bp, Oryza sativa
  Clone ID: TF_OsC1713_4290
tgaagaatgttctacataatctcaactaacacccagtcgtcaacgtactgctgtacacgtggagcccaaagtgcgcctgctagctgtccccgtcgagtcaacctgtgaagagaggtaaattatatggctcgatgaagtaatccgcctaaaaatttagaaatgaacaatccgaactcacgagtggtcggcagggaggacaggggggaggcaaaaatcgccctcccccagggcggcaagggggccgcctgcaaaattccatgccccctcgccgcccatttgcaggcgccccccccccccacagtacaaaatcgccctagcggagggcggcaagggggccgcctgcaaaattccatgccccccctcgccgcccatttgcaggcggccccccgcacagtataaaatcgccctagcggagggcggcaagggggccgccctgcaaatttcgttgacggccgtcgcccgagagcgaacggccgtctgccacgtcattttcgccgccctcggagagggcgatttttaaaaatcgccctcccagagggcggtaggcgaccgtcgcgtccaacgccgccgtcggcgaggccgccgcgtctctagaagaaggcatgtttaggaacgctaacacccctggctcgccggcgaagaattctccgtccgtctggtagtggtaccacagactgcagcgcaccccgagcaccatgccttccgtcaggccattgctgaccatctccttcccttggtcggtgatgccgcccaggcaactccggcaacgctccggcggcatgccgtccatgcactgcgccagcccgtatactactggctgactctcctggccgtcgaaccaccccttccccttgcccgtcaagtagctggcccgactactcaccatggcgtcggagatcctctccatgagctcagagaaaagctcgctgaaccgcgtgcgatcagcatccctctgagggacagcagggttcaggtaattgctcactatgcacgccggcgcgttgctgaagctggagatgaagtccgtgtcagagaagcttagcagcgcctggaactcatggtcgtacaaggttacagtactcttgtgcgactgggactgggagtcactctcactactggtagatccattattactgatgctggctgtgtcgagcactctctgtaagcggctgctgcagttggtggagtctccccggcagagtacggcgccgtagacgatgtcgggacctgtcgtcccagccgtggcgccggcggccgagtgcgaccccgtcttggtgacattggcgatcaggtctttggcgaggttgagcaggttggtcttgtaggtgccctctgccatgtaggcgagggtgttcgcgttgctgctgctgctgctcgagaacgtcccaccgctggattttgaggcagtattgcctccgttgatgtcgttcatcttcttgtctccaatctccgttgacatcttggtgaaggcgccgatgcagcagcagtagccgcgaagaacaagagcagtcgcgcttgaagcgctaccaaaaacttgatcgcccgccagcaagtccatcaggagctcacgaagccgttcggcctcaactgtggcagtatctaaagctgtgagctctgcttccattgttgacctcgttaagatggtctgcttgcaagacttccaggaaacagcgccacctccaagtgtgaacacataccctcttgtggcctttatcttatcagcatcagatatccagtttgaatcactatagccctccagcacttttgggtacccggcatagtgaattccatagctcattgtcccttttagatagtgtattactctttcaagagcatgccaatgatcatctcccggatttgaaacaaactggctcaacttgctcacagcaaatgagatgtcaggcctcgttgcactagctaagtacatcaatgaaccaatgatctgggagtatctcaattgatcccttgctattcttcggtttttccttaatagcacactaggatcataaggagtaggagctgccttgcagtcactataaccaaagcgactcaagactttgtccacatagtgagattgcacaagtgtaatctcaccctcatctcctctcagtagtttaatgttaagaataacatcagccactcccaaatccttcattttaaagcttttggacagaaagtccttgacctcctcaatcacattgaggctgttcccaaagatcaatatgtcatcgacatataaacacaagatcactccctctcccccaccatagcgatagtacacacatttgtcagcttctttcacaacaaagccaacagatgtaagtgtattgtcaaacttctcatgccattgcttaggcgcttgtttgagaccatataaggacttcaacagcttgcacaccattccctcctgaccttctagtacatacccatctggttgatccatatagatctcctcctccaactctccattgaggaaagctgtcttaacatccatcttgtacttttcaattgtaccatcaggccacaatgttcctccgccctcactaataaccatgtttgcagacttcttgtccttgcgctcaggacaatccttggcccaatgcccaggcttgccacacacaaagcaatctccttttgcctttcctttgcctttcttcttaaaattggttgtagccttggatttgatgtcaggtttgactttcttgttgttgttgtgggatgcgtgagtgttcttcttctgcaccaaattagcgctagaacctccctcgatctttttgccctggttgtcctttgccctcaccttctcctcaatacccaaagagccaatgagatcagtaacactgaacttttgcctcttgtgttttagagaagtagcaaagtccgaccaagaaggtggcaatttggcaataatgcctccagccacaaacttgtccggcaactcgcagttgttgttctcaagttcctttaccagcatctgaatctcataagcctgttccactacagaacggtaatcgaccatcttgtagtcatagaactgctccatgacatacagctcgctgccggcgtcggaaaccccgaacttgacctcaagagcatcccacatgtccttcccccgagaacgtcccatcgctggatttgaggcagtattgcctccgttgatgtcgttcatcttattgtctccaatctccgttgacatcttggtgaaggcgccgatgcagcagcagtagccgcgaagaacaagagcagtcgcgcttgaagcgctaccaaaaaacttgatcgcccgcctacccgtgcaagttctcaagcggacggagttccggaggcacctgctcgtcccgtacacctgtgcgcgcaggtgaacagaaccggggaaggattctctcggtgaaggccgaaagctgtatataagatcacaaacatgaaatccactattgtctatctcaacattgctgaaaggataagtgtccat

SEQ ID NO: 23482 - DNA, 2229 bp, Oryza sativa; identical to SEQ ID NO: 14842
  Clone ID: TF_OsC359_7892

SEQ ID NO: 23483 - DNA, 2892 bp, Oryza sativa; identical to SEQ ID NO: 14824
  Clone ID: TF_OsC1528_1838

SEQ ID NO: 23484 - DNA, 4847 bp, Oryza sativa
  Clone ID: TF_OsC2630_1
ctaaaccttgcacgtccccttaagttggttttattgacagaacacaggaaagccatggttatgatttaatataccgtcattacatgtatataatagatttatagaaaagaacaagggtatccagagagacactaccaaactcattaacaacacctgttgactgtagttgcatgttttcaccaagggtaagcaactgagggcaggcagtaaaccaacctataattgcctgttcagttcttccagttccaggccatataaaaatctgaagaattccgaggttgtgcgcaagcaagcatattcaatagtattatacacagactgagaaatgagaacatcgagcaccaatgatgcgcatcacaacttatcgaccgaaccatcccgtcagcggctgctttccaaggcagacgatgacaccggtggtgatttcccgcttgtcgacgtcatcggcgacatcgctgtcactgaatccaactagatgaacagctcctttcttcctccggtagctacagccgcgattgatggtgccggcgacatagcgcagcacacgtttcacggctgccagatgctcggtagtgggtttctccatgaatctactcacataacccactgagaacgccaagtccggtctcgagttcaccaaatagcgcagcgacccaacaattttcctgtaatcagttgcatccacgcaaggagatgtgctcaacttactgagtttgaggcgtggctccattggagtctggctcgggttgcatccaaccatgcctgctgcctcaagtatcttcttggcgtacgcaccctggctcagggtgatgccctcgtcggtctgactcacctccaggccaagatagtaccgaagtagcccgaggtcgctcatctggaacgtctcccgcatctccttcttgaattgatcaagctcggagtggttgccgccggtgatgacaaggtcgtcgacgtacaccccgaccaccagtcgacgtgcgttagctccgcgcatgtacacagcgtgctctgaggcactgcgatggaacccaagtgacagcagcgacgcgtcgagcttggtgtaccatgcacgcggggcttgacgaagtccatacaacgccttcaccaggcgcagcaccttctgttccttgccgtcgacgacgaaaccgggcggctgcgcgacgtagacttcctccttgagctcgccgttgaggaacgctgatttcacgtccatatgatggacggcccaaccttcgctcgccgcgtacgccagcagcaagcgaaccgactcgagccgtgcaactggggcaaacacttcgtcgtagtcgattccctgccgctgcacgtatccttttgcgacgagccgcgctttgtgcttggtgatgttgccggcagcgtctttcttcgtcttgaagacccacttgagtcctatgggccgctggcgaggtgggggatcgacgagcagccaggttccgttttcttcaattgatttcatctcatccagcatagcttgacgccaacagtcttgctgttgcgcctcggcgagagacgctggctcttcagcacttgccatcatgagttcgtcatcgaactcgcgcacagccagtcccggcggggtcgccggtcctaatatctcgtcgacgcggcggaaccgaagcggagcatcatcatgatcggcgtcgaggtcgtccgcggcgatggttggtggagtcgcgaattccgccgatgtcgcagttgtgcccgccgtggcggcaggtgtgcatggacttgtcgatgtcgcggacggagtcggcagctctggctgctccgagtcagctcgtggcgcgttcaccacagctgggtggtacacagtggtgtactcgatggtgaagtccagctcactcgccgtctcgccgtcccacctccattgcgcctcttcgtcgaatgcgacgtcacgtgagatgtgcacgcgccgagaggcagggtcgtagcagcgatacgccttcgaccccggctcataacccacaaagatcatgggtttactcctgtcgtcgagcttcttgacattcggcgtggtggtctggcagccctttggctttgagcatgctccgcgccgtcccgaccaccgattggttgcgacgttccacgacgccgttttgttgcggcgagtagggcgccgtcgtctcgcgtcggactcccagctcggcgcagtaatccgcgaagtggtggaccaggaactctccccccctatccgtgcgaagagcacgtagcttcttgccgctcttgcgttcagccgcggcttggatgcgcttgatggctgccgccgccccatccttggaggggagcagtgacaaccacatgaaacggctgtaatcatcgacgagaaggagaaagtaccggttgccgctcggagttggtggcgagatcgggccgcagaggtcgccgtggagtagttggagcggctccagggagcgctgttgagcctgctgtgggaacggcgtccgacggtgcttgccggcgaggcaagcctcgcaaagctggtcaacttgcgacacagccggaagaccgcgcactagctgctctctgcccattttccgcagcgcagtgaagttaatgtggccgaaccgtgcatgccacttccatgcttcgtcgccgatgcgtgccgtaaggcagaccgggcgcgcgagctcgacgtcgaggacgtagagacgtccaggattgcggtgaatacgggcaagcaggcgccgctgctcatcccatatccgcataacgccatcctcggcctccaccttgaaaccggtctcgtctagctgcccgacactaatgatgttagcagcgaggcgtggaatgaggtaggtgttggagagggttcgatgctccccattcttacaggagaagagcacggtgcctcgcccttcgattcggacgacggagccgtctcctagtcggacgttgccggtgatgcctgtgtcaatgtcggagaaggccgtccggcagccggtcatgtggttggaggcgccggagtccacaatccagcggcccggatcacgcttcgcggcgtcgtcgagcgccgcgaacagcttcttttcctccaggtagatgggatcggatgacggagttggcgcagacggcgctggtgcatgctcctgttcacatgcatgtgtgattactcctcctgtgaggagaagcaaggtgggctcgtcgtcttgtgccacgtgggcctgttcatcccgcttgggcttgctcctgcaatccttggcccagtggccgtatttgccacagttgcggcatttgtcttcacgacgggccgctccggagttcgtattcttcgcgccgccgactccagcgccgccgccgttgcggcctttgccgcctcgccgcttgccacggttgcttgggctgcctgagttcttctttgcctcctgctcctttttattgtggcgctctagccattcttcctcggtgaggtagagcttgccggcgttgtctgaggacgaagatggcaatggcatggcgtcctcagctgccttgagtctgccggtcacctcctccagggacagtgtagagatatcaaggagagtttcaatggaaaggacgagttgggtgaacctgggacgggcgacgcgcaggtacttctcgacgaccttgtctgccggctcgggatcgccgagcgtcgcgagttgattgacggtggaggtcaggcgcatggcgaagtcctccacggtctcaccgtcgcgaaggacgagcgactcgtactccatgcgcaccttctgtgcgcttgctttgcgaattcggtcgtcgccgactcgcaggatcctgatgcaatcccatgcctccttggccgaggccttggtggccaaggtcgagatcatctcggggggcaccgcgctgcaaatggcgtcaagcgccatcctatcctcatgaagctcgacgccgcctggatcgatggcgccccacaggcaccgggcttgcagtttgatcttcatcagcaaagaccaatcgttgtagttggttcttgtcaacagcgggtagttcgctgcacctcctgcttccttgaccacgcggtggatcaccagcccgcggtcgctcccgccgctgcccgaggcgcggccgccggaacctgaaacatgcacggacggtgacgccgaccgccggcgcggggagtgcgtgcgtcctcgaggcatgaagacaccctcaagagcgcgatctcgcgtccacgctctgaaccgagctctgataccacttgtcaggtttcctagatacatcgtgtaaggtttatttccaacagtgccgttgtcggccggctcggcatgctgaccacgtccatcggtggtaccgccgcctccctcacccgcgctgctcctcccaccttcaacgctgccgccgcaggtgcagaagaagccaccgccgaatgccgccatcttcgagaggatgccgacgtgagtcgcggtggcgagacgcaggcggcccttacgtgttcgtgggcacggcgggagaactgcggaggcaggtgcgtcgtggccggcagagagggcgtcgagcgcagcggtggatagtgcggtggcggggccgagggtggcgaggacgcggccgttctcatggctcgttttcttccttccaacagccaaccttccacggcggcctcgatctccgccgccgccgccgctctggccctcgcgcgcacgtcgctgtcgccgctccagtgccactcccgggtctccgccgcttgcgggctgatgcaccgccgccgccagcaacgacgccgcgggaaaggggaggaggaggctgtggatggagttggaggaggcgccggccaccgccgctagctcccgtccaacgctcacgaagagaaagagagggggaggatatgatttatgtaggccccacat

SEQ ID NO: 23485 - DNA, 2184 bp, Oryza sativa; identical to SEQ ID NO: 14936
  Clone ID: TF_OsC359_6011

SEQ ID NO: 23486 - DNA, 2527 bp, Oryza sativa
  Clone ID: TF_OsC359_7259
aaaagaaaatcctaaaagaagttctttttccccccccccttccctcttgggccggctcggcccacttctccctccctctctctctctcctcccccgcggcccatcggcctccccgcgcgcgcgcgccgctgacaggcgggcccgcccgccgctctcgctgacgggtggggcccacctgtcatcgccttcctcccgccgcgcccgccgccgcgcccgtgccctagcgccgccgccgccgcggattgcgccgcatcccgccgtccccgcgcgcattaaagagaggggaatcactccccgtgattccctctcccgtttcccccgatttcccctctctctctccctcggatccgtccggattcatcccgtaatcctcgccggcgacatctatggagcccgagatccccgcgcccgtttccttcctctccggccgcgttctccccctctcggtgctatataattgctccccgagctccgctcttccgtttccgccgctcgccgctcgctctcgccgtcggatccgtgctcgcgccgtgctcctctctctccgccgtcgccgccgaccttcggctcgccgccgacgtcgctccggtcctcctcccggctcggcgccacctccctcggcatcgccgcatcgccgtcgacctcgtccgcgcctccgtttcgctcgccgaccgtcggagcgccgccgtcatcgtcatcccgagccgcgccgccgtctccctccgctccgtccgccgttctcgtcgtcgtcgttgtcccggggtgagccgtggaccgtccccttcgtttcccccttccctcctctctctcgggtgccgctccgccgcgccgttggtcgccggcggcgaccatcggggcgcgggtgcgccgctcccgtcggccgtgccggcgaggccgccttcgggcgcgccctcgcggctgccaagtgggcccggccgtcagccgcccgcgcccgcgggtgcggctgacgcgtgggacccacggcgccgaccgccgccagccgcgtgctcccggtccaccgtggaccgagaggctgacgcgtgggccccactcccgtggacccgggcaaatgaaggctacacgagctgcggcccgatggctgacaatgagaaaggcaataaggtcagaagtcaggacattggtacctcaagctcccgagtgaatgaagcaccagacaccagttgtgtggcagtggtccaacacctgattaaccagaaccaattgcttatagagatactacagcagcatcggatgccaattttgaacccgagtcagatgcaacctcaagtgcagttggaggcagtccaagcactcacaccacaagtcagcgcaccgccaacatcccagaaggcccctcatgccatgccacatgttgacccaaaagaagcaagtatcatctgttttatgtgtgatgagcaagggcactacgcaaggaactgtcctcagcagaaaagaaaagcaccaatgcgaaccgaagatgaagtccgtaagatgatcattaccagcacagaatggcctccaccaggaatgacagaacatcagagaagaaattccttccgaggtgcacaacagttgacagagcatcttttagctaatggaggtagagtgtctgatagtgaagattcagatcaagtctcctcagatgatgaagataaaatagaacttaaggcatgctctcgttgtggagaaatcggtcatgttgccagctcgtgtgcctctacatgcgttcattgtgaggaagaccatccacccgacaggtgtccaacgagcaggatcacttgtttcttttgtgaaggaactgatcatgtaccaaaagattgtcaattcagttttctgctgacgaagaagatggccaaccaacccgccagttccaacggagagaagcatcaaggcaacacaaatcctcgccaagattccagcttcagcctaactccagtgccaggatagaggaaacaaaatgagaaaagaaaatgccgagtccgggaagatatctgttgcttcaattgtcaaggaatgggtcatttcgccgacaagtgcccaaaaccgagaaacgtagctgccagcacgtcagtccacgcaaacccccgcaatcagaagcttgctcctcaacgaattgtcatccatgcatcccgaagcagtcctataacccgcgttgcaacagctccaattccaatgagtgcactaccacaaggtgtcaatgctcaatttcagccccagcaaagaattgtcgtagatggaagaagttgtgtctctccccgacctactccaggccgagccaagggcaatcaacctccggagggcgataccaagcagaagaccgtcatccgcttcaaccagcaatcagaaggaagcttctcctgtgaatgatagcattatgcagtcctatcacatcatcacagaaccaatcaaggatgcagtcactagaacaatgccagctatatctctccagaatcaaaatgagcagccatgtttgtggttttcagtccgctacttatcatggggtaatcgaaagtttgcagcaataatg

SEQ ID NO: 23487 - DNA, 1496 bp, Oryza sativa
  Clone ID: TF_OsC359_7550
taatcaacttgcagaataagcctaacatacatcataacagcaaaagacttagatctgttaaggtcctatccttagtttctaatctgtctctccccttcgttttccctctctccctctccaaacctttgcaacagatggctgacaatgagaaaggcaataaggtcaggagtcaggacattggtacctcaagctcccgagtgaatgaagcacaagacaccagttgtgcggcagtggtccaacacctgattaaccagaacaaattgcttatagagatactacagcagcatcggatgccaattttgaacccgagtcagatgcaacctcaggtgcagttggaggcagtccaagcactcacaccacaagtcagcgcaccgccaacatcccagaaggcccctcatgccatgccacatgttgacccaaaagaagcaagtatcatctgttttatgtgtgatgagcaagggcactacgcaaggaactgtcctcagcagaaaagaaaagcaccaatgcgaaccgaaggtgaagttcgtaagatgatcattaccagcacagaatggcctccaccaggaatgacaagacgtcagagaagaaacaccttccgaggtgcaccacagttgacagagcatcttttagctaatggaggtagagtgtctgatagtgaagattcagatcaagtctcctcagaagatgaagatgagaaatctccccaaggtttcaaccaggataaaatggaacgtaaggcatgctctcgttgtggagaaatcggacatgttgccagctcgtgtgcctctacatgcgttcattgtgaggaagaccatccacccgacaggtgtccaacgagcaggatcacttgtttcttttgtgaaggaactgatcatgtaccaaaagattgtcaattcagttttctgctgacgaagaagatggctaaccaacccgccggtttcaacggagagaagcatcaaggcaacaccaatcctcgccaagattacagtttcagcctaactccagtgccaggacagaggaatcaaaatgagaaaagaaaatgccgagtccgggaagatatctgttgcttcaattgtcaaggaatgggtcatttcgccgacaagtgcccaaaaccgagaaacatagctgccggcacgtcagtccacgcaactccctgcaatcagaagcttgctcctcaacgaatggtcatccatgcatcccgaagcagtcctatagcccgcgttgcaacagctccaattccaatgagtgcactaccacaaggtgtcaatgctcaatttcagccccagccaccagctgacaagacagatgccagtatctgcgttgtacctttagaagctccaatacagcagctgagaaatcaagtacaagatgaagaacccgagttggagaagggcattactccaaaaactgtccccgacctccacattttcgccaatttacacgaagcagacattccaatcgtattgtggtcactggagcaaacgccgtacccgtaa

SEQ ID NO: 23488 - DNA, 1927 bp, Oryza sativa
  Clone ID: TF_OsC359_7896
taggtggagtcctgcttataccccagttgagcgcctgtgaagatggagccgtaggccgctagtccgctgcttactagatggtcaggtcagtgaagaagaagacatcgtcagttgtttgccgaagctccggaagactgcaggatccgctagcgaaatggaggaagtagtgaagccagctgttcataacagcaaaagacttagatctgttaaggtcctatccttagtttctaatctgtctctcccctttgttttccctctctccctctccaaacctttgcaacagatggctgacaatgagaaaggcaataaggtcagaagtcaggacattggtacttcaagctcccgagtgaatgaagcaccagacaccagttgtgtgacactagtccaacacctggttaaccagaaccgattgcttatagagatactacagcagcaccagacgccaattctgaacttgagtcaaatacaacctcaagtgcagttggaggcagtccaagcactcacaccacaagtcagcgcaccgccaacatcccagaaggcccctcatgccatgccacatgttgacccaaaagaagcaagtatcatctgttttatgtgtgatgagcaagggcactacgcaaggaactgtcctcagcagaaaagaaaagcaccaatgcgaaccgaagatgaagtccgtaagatgatcattaccagcacagaatggcctccaccaggaatgacaagacgtcagagaagaaataccttccgaggtgcaacacagttgacagagcatcttttagctaatggaggtagagtgtctggtagtgaagattcagatcaagtctcctccgatgatgaagatgagaagtctccccaaggttttaaccagaataaaatagaacttaaggcatgctctcgttgtggagaaatcggtcatgttgccagctcgtgtgcctctacatgcgttcattgtgaggaagaccatccacccgacaggtgtccaacgagcaggatcacttgtttcttttgtgaaggaactgatcatgtaccaaaagattgtcaattcagttttctgctgacgaagaagatggctaaccaacccgccagttccaacggagagaagcatcaaggcaacaccaatcctcgccaagattacagtttcagcctaactccagtgccaggacagaggaatcgaaatgagaaaagaaaatgccgagtccgggaagacatctgttgcttcaattgtcaaggaatgggtcatttcgccgacaagtgcccaaaaccgagaaacatagctgccagcacgtcagtccacgcaactccctgcaatcagaagcttgctcctcaacgaattgtcatccatgcatcccgaagcagtcctatagcccgcgttgcaacagctccaactccagcgagtgcattaccacaaggtgtcaatgctcaatttcagccccagccatcagttgacaagacagaggccagtatcggcattgtacctttggatgttccagcacagcagccaagaaatcaagtacaggatgaagaacccaagcgtaagaaagttatttacaacggtagtacctgttaaggaagcagacgtgccaatcgccaagtggtcactggagcaaatgcagtacccatggtatcctagtaatgacaagctgatatcgacgcataacatgaagtggtaacttgtatgaggttgaccccaaagatatgagctatgcgaagttctggaactgaagccccatcttcaagtgccgcaacccagtcgaagtcagctaaaggttcaaccagggacaagtcaggtgaagagaagattccatctgcaacaggagatcgagccaagcagtccagagtggagaagttgtgctaggcaagtttgttatagaagacggagcggaagaagtcagacaagaagagaagaccgcccaacctatcttcttgc

SEQ ID NO: 23489 - DNA, 4365 bp, Oryza sativa
  Clone ID: TF_OsC372310_1
atgtcggctccaacgccgcgtgtgtcgcggtcccgtgaaccgcaccagcgacgtatctcccgttcacctccacaccgtcgtggtcgccggcggcctggcgaagaccgtgaacttattccggtccagcgtgtggtgaaggaggtgggcggctcagccaactatccactgctgacgaagactaactacggagattgggctctcatgatgaaggtcatgctgcaagcgcgcggcctgtgggatgccgttgagcatggtgacgccgatttccaggcggatcgaatggcgatggaggccatactccgggcggtgccgccggagatgttagcttcactcgccgtcaagccctcggccaaggaggcgtgggacgcgatcaagacgatgcgagttggcgtcgatcgtgtccgcaagtcgaaggcgcaaatgctgcagaagcagtatgatgcgatggagttcaaggacggggagaccgtcgaggaattctcgttgcgcctcaacggactcgtcaccaacctcgccacgcttggagtccatcttgaagaaggaaaggtggttgaaaaatcccttaactctgttccagatcatctctcgcagatcgctttgtccattgagacgttgcttgacctcgatgagctcacgctcgaggaggtcaccggccggctccgaaacgctgaggagaagctgcctgccaagagctctgctgccggtgggaaactgtttctcactgaggagcagtggactgcccggtggaaggagaaacaggccgcggaaagttcctctgggaaggcgaagtccggcggtggcaaccgtcgtcggcgtggtggcaagaagaaagctgaagctgctgcgcgcgatggagatcgtgccgggcgcgacacgcaggaagggcgggaaccaaaccgcgacaagtgccgcaattgcggccgcacggggcactgggctaaggactgccggcagcccaagcggcctgccgaggcccaccaggccctggcggatgaggacgatgacgagccggccctcctcatggcccatgtcgtcgacgctgctcctgtgtctgcgtcgtcttcatctgcgccacctgcttcttcgccgccatcgcagcctgacaagacgatcgagctcgtcgagccaaaggtgttcgcgcaccttctcacggagaaacaaaccgacggcggcgtctggcatctcgacaccggagccacaaaccacatgacgggcattcgcgaagttttcgctgagctcgacctgtctgtgcggggctcggtgcgattcggcgacggctccgtcgtcggaattgagggtcgtggcaagatcatttttgagtgcaggaatcaggagcaccgagcgttgacgggggtgtattacatccctaaactcaacgccaacttgataagtttgggccagctcgatgaaaatgggtgcgacgtccgtatctaccacggtgtttgcacgatacgggacccggcggcccagctgctcgcacgcgttcggcggacgcggaatcgcctgtacttgatcaagctcaccatcgggcaaccggtgtgcctcgcggccaaggcgcaggagtgcgcctggctgtggcatgcgcgctacggccacctccacttcgacgctctgcgacgactggcgagccgccacatggtgcgcggcatgcccgacatcgatcatgtcgagcagctgtgcgacagctgcgtcatctctaagcagcgacgcaccccgtttccacgccgctccatgtttcgtgctgaggatcgccttgagctggtgcatggcgatctgtgtggtcccatctcgccggcaacccctggaggcaagactcatttcctcctgcttgttgatgatgcgagcaggtacatgtggatcactctgctgggacgcaagagcgaggcggctgatgccatcaagcgctttcaggcgcgagccgaggcggaatccaagcagaaactgcgcatcctccgcaccgacaacggtggcgagttcacctcggtggaattcgccacctactgcgccgaacagggagtctcacgccacttctccgcgccctactcgccccaacagaatggcgtggtggagcgccgcaaccaaaccatccttgggatggctcgcagcttgttgaaagccaagaacatgccggcacgctattggggggaggctgtcacgacggcagtttttctgctcaatcgcgcgccgacaaagagcttggccaacatgacaccttatgaggcgtggcatgggaagaagccggcggtgggttacctgcgcacgttcgggtgcctggcctatgtcaaggacgtgcggcctcacctccccaagctctctgaccgcagcaagccgatggttctcatcggatacgccgacggagccaaggcgtacgaggtgttcgatccggtgtctggacgagtgcaggtctcgcgcgacgtgattttcgacgagggcgctgggtgggactgggatgcggcgggcgctgcagccgtccccggcggcggaggttgctcagacttcaccgtcgagtacctgacaacggccacatcaccgtcgccttcgacctcggcgccatcatctgcatcttcgggcgcttccgcgtcaagggcagtcacgccgtcgtccgcctcgacacccgccaccttggcgtcggcctcaacgcccgctacaccgacgttcgtctcaccgccaccaggcgtcgacgagaacctggacgcggagcaggatgattgtccactgcgttatcgcagtatgggtgatctactgggcgacgcacgttcgccggggttcgcaacccgggatccggagaagggggagcttcatctccttgcggccgaggaaccagcctcgttcactgaggctgaacagcggcaggagtggaggcgggctatgctggatgaaatcgcctcaattgaggagaacaacacatggcgccttgtcgatctcccgtccggccatcgtgcaattggcctcaagtgggtcttcaagctcaagaaggatgcagaaggcagagtggcaaagcacaaggctcgcctcgtcgcgaaaggctatgtgcagcaacccggcatcgactttgaggaagtgttcgccctggttgcacggctggaatctgttcggctgttgctcgctcaggccgcgcaggcaggctggacagtgcaccatatggacgtcaagtccgcgttcctcaacggtgagctagccgaggaggtctacgtcaagcagccgcccggtttcgtcgaggaaggccgtgaacaccaagtccttcggcttgacaaggcgctgtacgggctgcgccaagcgccccgtgcgtggaactccaagctcgacgccaccctgctgtctctcggcttccggcagaacgactgcgaacatgcggtctatgttcgaggtaacaccagtgcacggttgctcgttggtgtttatgtcgacgatctaatcatcacagggacaaaggaggatgagatcgttcgattcaagggcgaaatgaaggcgttgttcaagatgagtgacctcgggcttctcagtttctacctgggtatcgaggtcgagcaggtggcgggcagcatacggctgtcacaggcagcgtacgcacgccgtatccttgagcgagcagggatgctgggatgcaacccgagcgccacgccaatggaacaacgcctcaagctcagcaaaaccagtgctgcggcgccggtgaaccccaactggtaccgtggcatcgttggctgtttgcggtatctggtacatacgaggccggatatcgcgttctcggtgggctacgtgagccgcttcatggaggcgcccaccaccgagcacgaagcggcggtgaagcgcatactgcgctatatcgccggcacgacggagttcgggtgtcactaccaccagtccagcagccccgttcagttggtgggatacagtgatgcggacatggccggcgacccagacacgcgcaagagtacgaccggtgttgtcttcttcctcgggacaagcccggtcagctggcaatccgtcaagcaaaaggttgtcgcgctttcgtcttgcgaggcggagtacatcgctgcgacaacggctgcatgccaaggcgtctggctctctcagttgctaggagaggtcaatcaagaagagccggacgcgttcaagcttctcattgataacaaatcagcaattgccctcagcaaaaatccggtgttccacgagaggagcaagcacatcgctacccgctaccactacattcgagaacgggtgggagatggctccgttcatgtcgagttcgtcaggactgaagggcagattgcagacattttgaccaaggcacttgggcgcacacgttttcaggagcttcgctcccgcattggcgttgccgacgtcaaattcaggtgcaagacttag
